United States Patent Application Publication US 2015/0376612 A1 - sequence listing, part 27

SEQ ID NO: 66459 - DNA, 1020 bp, Homo sapiens
attcattcagtcaatgcatgtttactaaacatactctctgggtcaggccctgggctaggtgctgggtgcatagcagtgactgagacctatatggccctgcccccagagaactgacattcccagtgtaacatcagagctcaaagtcacagagttacttaattataacttggtaaaggtaagtatctcagatgagagctgccaagggccatgagactgagataggggtcctggcctaatctgaatagtcagggaggcttcctggagaaagaggatggacactaaaggacaaatggaagtctactgagtaatgaggagaaggaagaacctggagcagggagcaggggtgggggctgctgtgggggaggcagagaaatgaggctgggggagtgcattgagagtttgtgtcttattttctagggaagtgacaggactgggttggtctatgtggggcgagagtagatgtagctgcagacactgctacagttgtccctgggcgaggagatgggggattgggccagggtggtgccagtaggatggagaggaggagatggatttcaggagaatggaggcgctcagattgggctgactggatggagggagggaaagcaaagcagccagtggggctgccagccttggggtgggctggatgggtggatggtggcgctggtcactaggcaggagctggtggtagatgtggacggaagtctcggggaaggttgcagggaggcatgagaaagaggaaagctcacacactctgagaacaacagctggaaggaggccgagggagcctccaagcctcgcggagatgggaacctgagcctggagatggggaggattcatccgggtctcacgaaggcttgtggcagagttggaatccgaacccagtattcctttacattccgattcgctggaagcacacgcccccatttcctcaggaagccggacatcccctcactgtgttcccccatcctatcccccctccccctacccaggtcatcccagactggaaggagcaggaat

SEQ ID NO: 66460 - DNA, 1067 bp, Homo sapiens
acttactcaggcctctcaacagccatggaagatcctggatgcagatgtgctttataaactgtacagggcagcagacagtagttattaacaccattcacaatagtaacagccagcgtttgccagtgcgtgctctgtcagccgaaagttgcactgcctgctttgattgcattacctaattccttcactagctctgagatgggcacctgctgttagattcagcctcattttacaggtgaggaaacaggtcaaaagagaggttaagggtctgtgcaatgccatgcctgtgcccttgtgtgggcttagctcccctctcaaagccagctgtgttctctcacctctgggccatatggacatattaggttgttgggctggggggccaagagcctggggaggtgtgggggaggtaccctgctcagcccctccccacatccaggatgaccttcgaggacgtgtgccggtacttcacggacatcatcaagtgccgcgtgatcaacacatcccacctgagcatccacaagacgtgggaggaggcccggctgcatggcgcctggacgctgcatgaggacccgcgacagaaccgcggtggcggctgcatcaaccacaaggacaccttcttccagaacccacaggtgggcgttctcaggaacccccaccctgccctgtagcagctgcggggtgccttgccactgtcctgccagggactcctgcatgaccttgggtaatccctgtccttccttgggcctcagcaaacctgtctgtacagtgggggttagatgggcacatccgtcccatctgggggtcatgaagcccccagcctcacaatctaacctgcagatggtaaaaatgaggaaaccgcggctctgagggacatttgggtgtcttgttctgagctacagggacacttagaggctgagccagggactcagccccttgtttccacaacagcacaattctgtcccttctgggaacttggctgggctgggcttccccacggggcctctccccacagcctcctcagtctgacccgtggcgctgcttagccctggtgcttggtgtgcctctgttga

SEQ ID NO: 66461 - DNA, 1444 bp, Homo sapiens
cctgccgggttcctgctcaggctggaattgggaaaatatgcaggtgacatttgttcattctctaatcccatcctctcacccatccatttcctcactcagtggagatttgccaaatgaataaacgacacctttgaggccccaggtgaagcggggccctactccggcctctgccttgggcctcgcctctgtcctcaggtcctctcagaggcagatacctaggggagctgctgctgcctgctcattctagcttccgattccattcccagcccctgcgttaaggtccctggagaggtggcgtcagtgggggtgaggaagggcatcttcctgactcctctgcccagtgctggaaggagcatgcctgggttagtgggccaggggccaggcagctgggggcctttggggaccagaaggggagatgtgctcccagagcctctctgctgtaagaccccagcttttcctggaagatgggactctggggtgtgtggtgctcaccagagtcaggccacccactgggctcggcaggagatagggagccccatcacctgaccacagccccccaccaacattcccccaaaatgcagcctaggaggccgcagtgctcttcttcctgcccagaccaaaatgttccttttagtcctcaatgttttatattctttttgttttgaaaatctcaattttaatcaggggttttaaaagaaaattgaaagcctgaacctccatttttcttcttggctccagttttgctggtcctctggagaactcttcgtgagcactggtgccgtgacccacttgggatctctgctgtgcccttctcgggcttccagaccaggtgtagcaaatgaaaaagtgcagttaattcaagaacaggaatccctgtgtccttgctgggatttccttttgggaacctgactttccgactccagatcctgctgtctggatcagtgttctggctggaggtgctggattctctgattttgcctcctcactctgtgtctggctttgctcctgggtcttggccctgggccatatgaggggccaggaaatgaacgacaaggaggataagagtgttctttcttgaaagccgggacttcccctcaagaacctgggcctggggccgggactctgcatgactgggagcaagtcacttaaacctcctgtgcctcgatttcccccttctacaaagtggggccaatgattcttgtgtgtcagcactgttactaccgagtgctgagtaagggcaaaataatacccctttctctatgtatctctgtatgcacacgcactatatatatatatatatatatatatacattcatgtaatcaccacttctcgatgtctatttcaaatcaaggctcctgagtagggggtgaagtgagccagcttgcacctcaggctaacacataggactttgctcagccatgtcccctgggatacaggggcaca

SEQ ID NO: 66462 - DNA, 1106 bp, Homo sapiens
aaggggaattaatctgtcttctctgtgctcccaaagcacacagctccaccacgacaggcctcactttatgctcttttgtggatttgagctgcagatcccggtgcctgtcccagctttgctcctcccatgccgtgtggacttggcctttctgagcctttgtctgggttggtcaagtgcacagcagggctgcctcccagcaggagccttggccctgatgcccttggctgtgtgcctggcagctgttcgaccggcacctgtgcgtgcgccagctgcggtactcaggaatgatggagaccatccgaatccgccgagctggctaccccatccgctacagcttcgtagagtttgtggagcggtaccgtgtgctgctgccaggtgtgaagccggcctacaagcaggtacagggctgagtgcacagagggcaggaggggagggtcccagctttggctgggcaagggtcccaattttcttatcaggaccatgggcggggcttgacatctgcttgacctctcaggtgcagcacggaaaattggggttcaggtattggaatgcatcagtgggcttcagttgccatgttcagctggtgaggacttcacacatggtggtgtaaggaacaagaccagggctgccacgcgggccctggatgtcagttgtgagaaagggttttgcaatcataccatccagctgagctaaggagaaaactggggctcagagaaggcaggacccagctgaggtcacacttcgagtcaggggcagagctcgggaagagccctgcctctcagcctcggggacactccggaggccttcccactggagaggctgtccattcccttgtgttccccatcctcactccagggcgacctccgcgggacttgccagcgcatggctgaggctgtgctgggcacccacgatgactggcagataggcaaaaccaagatctttctgaaggtgagcacagatgccttccctgggctgccctgggggggctgtaaattcccatgatgtgggctggggtgctcgggagagggaggcagtgctggggctttgagatcctttctgccgggctgtggtgtggctggaggagcaggtgggatctggcctctctg

SEQ ID NO: 66463 - DNA, 1070 bp, Homo sapiens
tgccccaggggccagagccagctgggagctcatggggcccaactgagttcttgacctgtgctcccagtgaaggaagagcagcccccactgggactgagcaggtggtcctagaggagaccttgtggggcgctgctcaggagctctgcctcctaggaccaccatgacatgctgctggaagtggagcgggacaaagccatcaccgacagagtcatcctccttcagaaagtcatccggggattcaaagacaggtgcgtgttcccaccagctcctcccctcctcagcccacatacaggtgtacgtgtggtgtttggctctcctctgctctgcccgcatgaacactaggaaaaaaacgtgttcacctatgaaacaagtgcacacatgcatggcatgcacacatgatcatgtaaacacagaggaacatagatacatgatttacatggacccattgtgccacgtaagccaaataatgcaatacattcacctacatatgcacatgcacacgtagatacatgagactcacatgtggacccactgttcatgtcagatgctgatgaaattttgcaaagaggaaatttgagattttataaattattaatacaaaatgtgtctcatattctatctaagggatatgtgtacacgtgacaattcacaaatgtgcaggactgactccaaagtgtgattaaagctctgcaaaaattccacaatgcacccctttgcagttcatatggtcactctctcccttcttccactcgtccacccacctacctatccatccgtccgttcacccacccacctacccatccatccatccatccatctgcccacctattcacccatccatccatccatccatccacccgcccacacacccacctagtcactcatccatccacctatccacccacacattcatccatcaattcacccaccaacccatccaccatccatccatccacccacccacccatccattcactcatcagtccacccacccatccacctacccattcattcctccattcatccattcacccacccactcccacagttgctcatttgcttatgtgtgt

SEQ ID NO: 66464 - DNA, 1050 bp, Homo sapiens
ggctatcgggtgggcacagacacctgggcccacttcatactctccgagggcacttgtgttcttcactttgctgggcctctccacacccatcgtcccattttacagatgaggagctcaaggctctgggagactcagtggccggtcacatcataggaagtggcaggcggggatcagaactggggttgtctgcctccaagtgtcccggtcccctggtctccacagtcccacgcacatgccccctgctgcccctgctgccttttcagaaacgggtcccggaagtaccctccgcacctggtggaggtggaggccatccagcacaagaccacccagattttccacaaagtctacttccctgatgacactgacgaggtgagggtcaccggcttctaggtctgcagtgcccaggacagggccgggcttcctgggtggacaccaaaggtggccttaagcctctcccccatcacctgacatttgccgcctcgtcctcctgccccgtagtggagtcggggctcaggacgaaggccatcgactccccaggtcaggggcccttggttcctgatccaacccctgcttcctggagcagcttccttcagaagggcgcccctccctccctgtctctgaggaggacttgccttggagaaaagcgcttctccctctgagctggctttgcactggctttgcacctccctgatgtagggccccactggcccccaggtccagacctcccctgtcgactgagcccactttcctgcaggcagaacctcaacaccccttcctccctctccacctgaggtggttgaggttccctccatccaggtcctgtctgccaaaggtcctgtctgtcatgcctgtagtcacgctgcccctcatggtccccagcccctgcctgtctcaacacagtgtctcattcagataagcttttcatttgaagagtcatttatgaaacttgtctgaggctggagactcagaaatgccataacaggatttcatttgcaaggaccaaagacttcctcaaatcctttcctgtccctccagacatctctcctgcca

SEQ ID NO: 66465 - DNA, 1034 bp, Homo sapiens
gcctgccttggagggttttgaacacaggtgacgtggccagaaagcctctcaggctgcgggtggaggaggggtctgaggggcacaacagaggcaggagtatggtgaggaggctggtgtgagaggatacgtatggtcttatcacacagctaggatgggaggccttttgaggagcttggctgtgcgaggagaacaggtaggtagctggaggcaggtgcagggtccaggaggctttttaaagatgggaggcccttgggctgagagggaggacaaagcagaggatggcctgggggacccaggaagggatgtggggcagcactgagggcccagcggaggtggaagccataggtcatggcagggccgtcagtaccacataggcaacaggagaggctgactttatcccagctggggccaggcttcattcctgtccccaaatgcttttcttgctctgggcccccatctgatgccttctcatctttttttctagcaaactacggagccaaacttccctgagatcctcctaattgccatcaacaagtatggggtcagcctcatcgatcccaaaacgaaggtgagcagggataaggcagcaagtgggggcgggcttctctgcctgaaccacagacacggtcccagaacgaaccccacaagccctcctagccaccatctatctctagactcatccacccatcacgtggcttcaaaagctgtcagcgtttgctaggactttacccaacgcttgctccaccaaaattgctctcctgaagttactaacaaactccttcctatggaatgtgaactccctttagtacttggcctttcagtatcactggatgctctgcccatgcaggtcatggggctggctgtgcaggggtgaccgtgcatctgtgtttctgggccagagcagcccagctgcacacccagagggtccgactggacaggtggtgaagagggctcgtgaccaccatctttccattggcttcatgcatcacgcattcctggctgtcctctgtgtcttggtcattccttcccggacc

SEQ ID NO: 66466 - DNA, 2104 bp, Homo sapiens
tgtagtcccagctattcgggaggttgaggcaggagaattgcttgaacccaggaggcggaggttgcagtgagccgagaccgcaccactgcactccagcctgggcaacagagtgagactccgtctcaaaaaaaaaaaaaaaaaaggaattgctttctgtaacagttttactgaaaatttagatgcaattttcatataatattttctcctaaatagtcattaaatgttgaaggtatggcccaaagtacagcccagtgaaagtgatttgggaaaggaccaagctactgaactttttactgaatgattagcattattggatttgaggatagaacaataaattcctagatcaatgctcctaaaatgcagtattgcgatatactactgggtcatgatctattaataccttccccagaggtaattattattctgattatcaccatggttaggcttacctcggaagaaatggaataatacaatatgaacttgcttgtctggcttctttcccttaatgtgtctgtgagattcaacccatttgtcagtgtaccaattacttattgtattgctgtgtaattttctgtatagtattatatgaatataacactattcatttttccattctcttggacatttgggttctttctggttattggctattataagcaaatcttttatgaacatttctgtgtatgtcttttggtggctatacaaactaatttctcttgggaatatacctaggattggaattactagagtataggtagatgtatttatctgtaagtagatgctgccaaacagttttccaaagtggtctgttttaagatgtccttcaatttggggatgatcagaagctttccacacagcaccctttacaaacaaagatgcctttatgtcttgtaatggttactggggaagaatgttaaatagtcatgtgtcttttgctatttttctcctttctagcatcaattcctgaagattgccaagcccctctccagcctcactccactgattgctgcagctaaggaggcaacaaagaacaatcactaaaaccacactcaccccagcctcattgtgccaagccttctgtgagataaatgcacatttcagaaattccaactcctgatgccctcttctccttgccttgcttctcccatttcctgatctagcactcctcaagactttgatccttggaaaccgtgtgtccagcattgaagagaactgcaactgaatgactaatcagatgatggccatttctaaataaggaatttcctcccaattcatggatatgagggtggtttatgattaagggtttatataaataaatgtttctagtcttccgtgtgtcaaaatcctcacctccttcataaccatctcccacaattaattcttgactatataaatttatggtttgataatattatcaatttgtaatcaattgagatttctttagtgcttgcttttctgtgactcaactgcccagacacctcattgtacttgaaaactggaacagcttgggaatgccatggggtttgataatctgccagggacatgaagaggctcagcttcctggaccatgactttggctcagctgatcctgacatgggagaacaaccacatttttctttgtgtgtgcttctagcagctgttcgggaggaccttgacccaatagtgttcccatgctgtttcttgtgaaatgctctcggctatgtagcagcttttgattccctgcataccctaggctgctgcccctatcctgtcccttgtttataacattgagaggttttctagggcacatactgagtgagagcagtgttgagaagtcggggaaaatggtgactacttttagagcaaggctgggcatcagcacctgtccagctctacttgtgtgatgtttcaggaactcagcccctttttctgcctaggataaggagctgaaagattaacttggatcttctaatggtccaaatcttttggtcacaataaagagtctccaaattagagactgcatgttagttctggatggatttggtggcctgacatgataccctgccagctgtgaggggaccccgtttttaagatgcatggccaagctctctgcaaatggaaatgc

SEQ ID NO: 66467 - DNA, 1057 bp, Homo sapiens
tggagtgcagtggcgtgatctctgctcactgcagcctccgcctactaggttcaagcagttctccagcctcagcctcctgagtagctgggattataggaacctgccaccatgcctggctaatttttgtattttttagtagaggtgaggtttcaccatgttagccaggctgctctcgaactcctgaccttaggtgatcttcctgcctcggcctcccaaagggctaggattacaggcatgagccagtgtgcccagctggaacatatctagtttcttactgtagcatacaaaagccaaatagcaggataacattatgaaacttaaggtttggactaaggtgaaatagttagatggagggaagtggatggatttgagagataacttagcaggtaggttcaacaggattagatgattgaatgtgaacattacttacaagtgggtgatattattcaaggagaaaggaaaaagaaattggatactgcctgattgccaagtggatagttgcttacataactttggggcttgggggagaaatctgatctacaggagatttaaaccatgtctcttgactcctaatctactggtgctacctttactttccactgaacagtgaaatcctcatttatttggaggcagctttttgtccctctcatttcattaagccatgagaactatagctaaagcctgctgacccaaggtcttatattcagtagaagaaagatatgaagggaatatagagtacttgaggtttccttgcattttaatatttggttgcagagtaggagtgtcagccaatgaactgtggatggcagctgccccagagaagttcttacttcaaagagtaccagtacacaataattgagagaggcacctcctcttccaatgaaaatagagttgggcttctgtgagggaggctgctagaaacgtgcttctatatttttggtggttgaaaccacgtggcaccctggagaagtcatggttaataggggtagcacatatctcactaggctcttgtgagtttttacaagtgttaaagccaaatattaaggctccacctagg

SEQ ID NO: 66468 - DNA, 1066 bp, Homo sapiens
tgcccaaagtcatgcagaaggtaagaataataagagttgggatttaagttcaggcagtcaggttccagagtccatgttctaaatcatcacactctactacctcttgatgaagaacaaaagtagttccttccctgcaagggttcaggatgtaaggagggagtaactcaatagaagttggtgttgtactagtaatgcaaagtgctatttgcattactacaggatatgtcttttaacttggggaagcataaaatattacaaatgaaggggattcttacctaatagaattgtcttcaactaatttcttttgttacagaatatttcttttagcttggggaatacaggatatttcttttagcttggggaagcataaaatattacagatgaaggggattcttatctaatagaattgtctttaactaatttcttttgatagttgtctagcctctattgaatatctttagtgctgagactctcacttcttttgtttacagtgagagtaaggaaggccattttacccagaatgggtgggcctgggcacagaggaggagtaatatagattttgacataagagaaaggatgagtttattggggtttgctctgtggatgttctaacctcacatctaggagaggttcccctatgctaacaaaggctggtcttgccaaaattttgcactaataatgcaggtatacacacggtctgtgattgaaccacttcctgtcactccaactcgggacgtggctacatctcccatttcacctactgaaaataacaccactccaccagatgctttgacccggaatactgagaagcagaagaagaagcctaaaatgtctgatgaggagatcttggagaaattacgtaaggaatttgtagctttctgaacctttcttcgttttatgactggtcaagcacagagatttgctggtcgtaggcttggtccatgcagctggctggccatgcttggtaccttaggcacagactgcttctcctcaccctgcccctgaacctcccttccctgtctcacagccctggttggatactatgttaggatggagatgtggtgag

SEQ ID NO: 66469 - DNA, 2101 bp, Homo sapiens
attctctgggcttggttcttggtgaggaatatattggatttggtagaatatttcccctccttaattctattagtggtgaattggcagtcagtttttcttggacccaggggaattaaagaacaaaactgaagacattacctggtctttaaacttactttcttcctaagatctccattgggtctctctttcaaattttatgaagtctaagataccactgattgtaagatgtacaattatttgcataccaatcaaagaaaataaagctgccaattaaaccataacatgctttagaaagtaggacacacctctgtttcagagacgttaatgtgaaaaaatgtacatctcagaatcagtgaaacatggtaattgcttcattgagggagcttgattctattcttggaaaacaagaccctacctttaattagacttgacaggatcaatacctctcttttcctcaaccttagtccttttgtccttgtgggcagtagatatggatatagaaggatcctttatgaaagctgaaactggagactggccatgttttggcatggatgactcaggatggtgctatggattctttccttttcttttagaatgcagattttcttggccatttaagcctgacagtgatatagctgatgatgtggatacagttctagcgtagtatttagaatgagaccagaattcaaatctaattcctctctttaacctgtgtgtaccctgggcaaataacagtcatgtgccacaacaacagaccgcatatacaatggtggtctgataattaatattataagggagttgaaaaattcttatcacctagtgattcctgaagtttaaaataaatttagcatagcctaagtgtacactggtaatgtcctacttaggccttcacatttactcatcactcactcactgactcacccagagcaacttccagtcctgcaggctctatttatggtaagtgctcatataggtgtatccttttatttaccttgtaaaccatattttttattgtaccttttctatgtttagatatacaaatacttaccgttgtgttacagttgcctgcagtaacgtgctgtacaggtttgtagcctagaaagcaataggctatacaatatagcccaggtatgtagcaggctataccgtctaggtttgtgtaagtacactctatgatgttcacataatgaccaaattacctgatgacacatttcacagaacataccccattgctaagccacacccaactgtacttaacatctctgaacttgtttccaaatcaataaaagtagatataataatagtactcagagccataatgaggattaaagaaggtgatatgtataatgcatttagcatgatatctagcctgtagtaccagtcatactattactattctctgaatctggcacgtgcttgaccagatagacttcttttgctgtccagaaaaatttaactgtaactgttattgactaagtcccttgtttttcttcctgtgcagataagtcagctgaggattacaattcttctaatgccttggtaagtctttatttactctattttgatgtgggcagatgtggaggtaaggatcaagacagtgtggtagaggcagagcctgagctgggaggcactcatattagtcactcctgcacccttggcctcagaattcctatctatccaataaagaaattagatataataaatagggggtatccctttcagctttaatgtcctagaaattctttctttgtgataatttttttatttttaatttttatggattcataatagtcgtaaaatgttctagaaattctaattttggaaccagaaggtatggctttagactcagttttaatttgtagctttgaaccttgggaaagtcagtttgcctctttgagcttcaatttcttcatcaataaaatgaggatgatacactgtgccctcacctggacatgtcttcagatacctacacttagaagaaaatttcctctttggtctatggagtctgcaaaaccaagattagtactaattgttgaagggagcagattttattcatttaaagtcattcattctgtcctctgaagttgtaatgaatgctttg

SEQ ID NO: 66470 - DNA, 1102 bp, Homo sapiens
agtccattcccaagagggaaagtgtaacttgtctaaggttataaaattagaggttggcagagaactcactatgtggaatgctgttagcagttttatttaatcttcacatagatgaataaatgaaacctaagaggttgaagaatttctctaaagttagtaagtggtactgggattcacacttagtttttgctaggccaaatttctgctttcaactacatcataatggttttccgtgctttgcaatgtctcagaatgggaatgcaaagaaaagcaagatattgtgatttttcattagtgcttggcatatagtaggcatttacatcagtgagtgttagcaatatcatggtgtgcagtggaaggacttgagctagaccctgaaggaagggctgtataattttgattctttgcaattttttaacatgtatttccttttggtcaaaaataataaaagagttatattgttcttatttctgattctagtagctgctgctggtggtgacaatgtcaaataacggcctagacattcaagacaaacccccagcccctccgatgagaaataccagcactatgattggagccggcagcaaagatgctggaaccctaaaccatggttctaaacctctgcctccaaacccagaggagaagaaaaagaaggaccgattttaccgatccattttacctggagataaaagtatagtatttgattttcttctcatcatttatatgctttaaaaaaattattttgggtaacctggataaaagatctgttgtctttgacttaattttcctttaatgttttctttctggttaaatatttccctttctccctacagtggctgaagcaaaatggaaaatagacctatttttatactctattaactatatctgagcaaaactgtaagagaataattatgctcttgccagatttgggacaatctgaagtgatttatttatttttaaattcttaaactgtttatgaagccacaaaatgtaagaaaaattgaaatgtctttatttggaatttttttccccccgagttagtttcaattggaaatgttttctttccaaaatcttgattgccttttctttattccagcttcct

SEQ ID NO: 66471 - DNA, 1116 bp, Homo sapiens
actgactggcatctgtcgcgcattttagtttatttgtgattgaccatgatgcttccagctatactaagaagcaggcagtcaggtgacatactgtacagcaaagaaatactgagtccctgtttgagatggagggagagctgagagaagcttcttctgatatgtaatttggagtttgctggtgaagttttcttctgcatatgtgctttcccacgcatatcttacttcctgattggcactggctgtgtatcacaagttgtaattatgttataattagattgtttatttctttaacatctgacttctgcagtgttctatcctataagttacataaatgtaggactctgttttgttcacagtattccagcacagtgtcttgcatgcagtagtcactttatgaaaattctgaatcagtaggcacatgagaggtaattaagagagagagataaattgacttagtcaagattatatagcagtttggtagcacttctgggactagatctgattttttctatccttaagcccagaattctttgtacaacatagtgctgcttgccacatgcctatcatgattagagctatatgattttgctctgtggtcttagccaaatctgttggttttcttttctgtaaacaaaagtattaaacagctgttcttttctccttcccatctttggttgcccaccagtgatatcctggtgtggcctccaaccatagagtaagtgtctgctgagaaacagggaaaccttactctccctgccaacctggaactgggaatcatgttatttctcctgaacaccttcctatttcagtggtgatgtggcggtcatggtctaccaattgaaacagaaagcagagtttggattatagaggaagaaggcagttggagtagctactttaacccttctttattcagaactgcactctgagtgcctatgtacacatactctagcgccttcttactcttcattataaacattggggtctgctcattttccctttagtttgttggaaaaacacacaaatctacttaaattagttgaggaaaatgtcctcttccattttcagttattttgttcagtaatactagtgataagggatgtctattaagagaaaata

SEQ ID NO: 66472 - DNA, 1017 bp, Homo sapiens
acgaggaggcacagcaaagcggcgcccagttccttctgcatggaataaatgaccccttccaggcttggacagtcacctttagggttctactccctgaaaaataagggctggtaggacttgacttacgcagcccctcccccaccccggaatattctgtaacttgggaagtgaaaaacaaccggggaaggagatttatagttattttatgttcattattacgtttgaaaagacatgattgttgtagccttcgctatcctatttcagcagtacacattactgggagtgttttggaagaatacttgagaagtagtgggtgtggcgttgtgagcaacgtccttggtttttaaaccccttggataattgttctactgttacaaaaactgtgaacagtgaagggaagggttagttccgtggttactaataaaaattcagattcattagtcttgactttaagaattgttcctgagaacaatctttaattttgcctcctacatttttgggttctctttcaactctgtcaggagaaagtaggaattatcagtacagatacctcatctctcttaccctgtggcttcatctacttcttgtgtgaccttgagcaggtcacttccagccttaaaagctccagaagtttggttttatgccccaaaacgggcaagtagcaagcaccggactcagctttcaagagtccactgaagaattcccacactgtgaagtctttgctggcctccatcctgtctctcctcttacagacagagctgatttcttcccattggcccggtgggatttctaccacagcacttacaacattttggttcctatttggaaaattctaagtcaggtgcatataaaaactccccacctcaactagaaactatgcctttcaaaaagggttttgggaacattgaccctgaaaacttcccatactttccctgaagcttatccatactctttaactacatgagctcatgggtctaccttggtaaatttgcttattcagtcaattcgtttatccaa

SEQ ID NO: 66473 - DNA, 1044 bp, Homo sapiens
ggcggtctccaggcccgagtccgaagtccgcagcccctcccctcctcacgcccctcggggcgggacgagcgggaggctcccgagcggcacacttaagaagtcctccccgcctccccggcttggcgctggggtgttggaaccagagccgaggaggcggggaggcggggaggcggggaggcgcggggaggcgcggggaggcgaagggaggtagcctagggcgccggccgcagggccaacggtcagccgagcccaccgcgcactcaccctccgcagtctccctcagggccttgtaggcgggcgcggcggcggagggccggcgcggcgcggtcgacgcagcgctcttggtgcccactgcgcacgcgtgctgcggcccttgcgcccctgcgggcggtgacacccggaccacggggcggagaggagcggcacggcgcggcggagctctgatggttgctttgcagcgaggaccttagagtttttctttccccgctccacactgtaaaaccgtggagctggaaagaccgctgaaggccatctcacatagccacctcgtttttatcaatgggcgactgaaattgagaggggagacgcggcgcagggggcgggtgagttagtgggcgtagaccggtgcgcagggcctcctggagccttgcttttcttcacctgccaaaaaacatttctaaaaatggtggtaatatatgccagataaaattcgccactttaatcaatttaagtgtatatttcagtggcatcgattaccctcacagtgttgttcaacagtcacctcttttttccagaacttgagcggtgattcttcaaagtgtagcctagttttagcatgtgactgtctataacctttggcatgaactctttacgtataatatgaaacagttgtgtcttactgttacatgcactcttcgtgaagaggaaacaacaggtaactggagaggtctgtttccaagaactgggggtcctggcgcacctcttccatctgctttgaaagcaggaatacggctgcgtgaggtggagcgcgtccggagtcccagc

SEQ ID NO: 66474 - DNA, 1026 bp, Homo sapiens
ccccgcctccccgcctccccgcctcctcggctctggttccaacaccccagcgccaagccggggaggcggggaggacttcttaagtgtgccgctcgggagcctcccgctcgtcccgccccgaggggcgtgaggaggggaggggctgcggacttcggactcgggcctggagaccgcctcctacccagagccggagcccgcaacccgctcaggcggcgacggagccatgtcgccgctgctggggctccggtccgagctgcaggacacctgcacctcgctgggactgatgctgtcggtggtgctgctcatggggctggcccgcgtagtcgcccggcagcagctgcacaggccggtggcccacgccttcgtcctggagtttctagccaccttccagctctgctgctgcacccacgagctgcaactgctgagcgaacagcaccccgcgcaccccacctggacgctgacgctcgtctacttcttctcgcttgtgcatggcctgactctggtgggcacgtccagcaacccgtgcggcgtgatgatgcagatgatgctggggggcatgtcccccgagacgggtgcggtgaggctattggctcagctggttagtgccctgtgcagcaggtactgcacaagcgccttgtggagcttgggtctgacccagtatcacgtcagcgagaggagcttcgcttgcaagaatcccatccgagtcgacttgctcaaagcggtcatcacagaggccgtctgctcctttctcttccacagcgctctgctgcacttccaggaagtccgaaccaagcttcgtatccacctgctggctgcactcatcacctttttggtctatgcaggtttgtcattctcaccaaatacttggcacttccagagcctctatgacatgaggctgtaagttctttactaaaatacatttgaaaccgtctatcccgctatgatgtaaatgctggtatccccgttattctaaccattttgcagcccgttcttaaccagtagggccgacacgtagagccttcatgc

SEQ ID NO: 66475 - DNA, 1247 bp, Homo sapiens
catgctttaaaagaatgaataaggaataaataattaagagtagtttatgcaactgttaataatttcaggataatggaactaggacttctcagtgcatgaggtggggtggagacggcacgttaatcgtggaatcacaactctgccacatacttgtgtacacctttggacaaggcatataacttatttaatcctcacttcccccatctgtaaaatggggaggataatacctaccttgcagggttgttgcagaggctaagataaaatgtacctaagtcctctggcactcgtgactaggcattcaataagtagtagctattattattatcactactgtaaacactgtaaaccttttgtttttcagattctgctcctaagtgtaggagagaacttggtgcctcttccactctggagtgaagttaatgaaagtctttttccttttccaaaacccaacctgaaccagttctttcttgagacagactatactgagacaacaagttgtcaccagcagaagatagataatatgacctttattaacttgatgaattaacttaaccaagagggtatttgtagtttactatttaccctaaaactttctgtgtctgggtaccctctgagtaggcctataattcctaccttgactgtgtgcatcatttgtaagctagcagatctatgtggtgaaaatgcacaggagcttggtagactgcgggggaaagagagagctcctttcgccatgttttaccagtctgctgttataacctcttaggttgtatcctttaatttccagccttttaggttagtttctgtaacagaacaagtgagtctgggatgaagtcctcaaagtacttcaaatggtaattgttttgtttttgtaatagcttaacaaataaacctaggttttctatattactttgctctcattcttgactaaaaccattaatgagaaatgttttttaaaaaataatgctggcaaatatgagaattttgttggctttatttttgtttacttgttgagaagatgaacatgaaattaataagaaaatatagttatagcttctggcaagtatttagtaaggcaaagatttaacacatttcaggggatttctgccacttccttttagatcagcagtaatttcttatatttatcaactctcaatttttagttttcatagatacctgggtattataaggctgatttgtaattactgatttatacttggacttttgaaatcattatgtgtccttaaaaa

SEQ ID NO: 66476 - DNA, 1033 bp, Homo sapiens
tgtgtataaataaatgttcaaaagtatcttcctggaagcctatttggacagtatattatcttcagcagattcttttttttttttttttttccaagacaaggtcttgctcggttgcccaggctggagtacaatggcgtgatctcggttcactgcaacctccacctctgtggttcaagcgattctcctgcctcagcctcctgagtagctgggacaacaggcgcgtgccaccacgcctggctaatttttgtatttttagtagagatagggtttcaccatgttggccaggctggcggcagatatattattgattccattttgttttttctaattgttgtatttaaactttaaagttttctgtttgtttagaacaaggacagggggacatccctacattttacacctatgaagaaggattatcccatctaacagcagaaggccaagccacactggagagattagaaggaatgctttctcagtctgtgagcagccagtataatatggctggggtcaggacagaagattcaataagagattatgaaggtgagtgtccttttgcagtgtgaacagtcagatgagcacttgggcaataagttatggatagtcaatagaagttcttttaataactaagagaaagaattgactctctatagtataggaagcagatacagaattacatagtataggaatgcttatgtcatttgtttttagtgattttttttcctcattaccaaaaaagtctttgttcatagtcaaaaaaatttttttaatgtgcgcaagaaagtagaagtgaaaaagaaacaagtgtaattctaactgagagatatccactattaatttactgttgcatctgtgtattagtttgctagggctattataacaaagtgtcatacaggctgggtggctcaaacaatagaattttattgtctcatagttttggaggctagaagtccacgataggttatctctgagggctgtcaattcaggcatctcttcaggtatacacacacccaccaaagcaagagagagattttaa

SEQ ID NO: 66477 - DNA, 2461 bp, Homo sapiens
ccagcctgggcaacatcgtaagaccccatctcaaaaaaacaaaaattagcagggtgtggtggcaagtgcctgtagtcccagctgcttagtaggctgaggtgggaggatcgcttgggcctgagagggcaagggtgtccagtctgggcaacaaaacaagtcccagtctcagaaaaaaaagttgacccttagctcattgttgatgagattagattaccttaaaaataaccttaaaaattcattcccggtgaggcgcggagggagcactttgggaggccaaggtgcgtggatctcgaggtcaggagatcgaggcaaggcttttctaggatgctcactgtataatcagaatttttcaaccataattggaaataaatttgtcaaccataattggaaattaaaattgaattgcaatattcagattttcaatatgcttcatttttttaaagtcaaataatgacattaaaagggtattttattttctagaagaatcaaaagaacctgttgctgatgaagaagaggaagacagtgatgatgatgttgaacctattactgaatttagatttgtgcctagtgataaatcagcgtgtgagtgttctacagtattgattcttccccttttacataccaagcattcccaattgacacacacacacatacacacacacacacacctctcacctttaccaccattacctccattctattgctttttctttattttagcattggtaatatcattaaggaccaaatacctattaatatcaaaggttgtgaatgtagtgagaatattgtagacactctgtcatctgggtatattttgtgagtggactctggttagttttactgattggtgctgttgacttaatctcacctgctggatggcagaggagttatggcagttttaaagtggaagatctcaggatggctggaaagagccctatcagctgagagcagtcttcacccttcaccctgatgccagcagtcttaccaggactctgacccttttttcttggaaaatcccacgagccatgaagagattgcaatgatctctcataatgaactcttattattttatgacttgtcttttgcttcaaccgctttcaagattgatcttacaatttggcagattttgtaaatactgtggcgttttgtgtacccattaaatttatttgcactgatggttacttttattacaaaaaaagattggttacagtttaatttccttgttcagtggaggcaatgttcactgcaatgtgcgaatgccaggccttgcatccagatcctgaggatgaggattcagatgactacgatggagaagaatatgatgtggaagcacatggttagtgaaatggattttaaagtgggttttttgtttgtttagtgtttcattttaagcatttatttgtattaagggtagaggattatagttctttatatgactgtaaagtatgcagtatggtaaaattattattattatttttgagatggagttttcgcttttgttgcccaggctggagtgcaatggcgtggtctcggctcactgcaacctctgcctcctaggttcaagcgattctcctgcctcagccttccaagtagctgggattacaggcatgcgccaccacgccaggctaattttgtatttttagtagagatggggtttctccatgttggtcaggctggtcttgaactcccgacctcaggtgatccgcctgcctcggcctcccaaagtgctgggattacaggtgtgagccactgtgcctggctggtaagattattattaaaatagaatgacacggtagaacactttatgccaaagccctttgcaacagacaaatttttgagtgtaagaaatagagattgttatggggaagaatgggtaagtagagcatatgggaggaaagaaaatggtagatagggaagtggatggtcaggaaagtcttttaagctgaggcagctgcccccagagaacaagcttctctctctacaccttgagaacctggatcatttatattgttttattattactattattattttgcaacagggtctcactctgatgcccaggctggtgtgcagtggtgtgatttctgctcactgcaacctctgcctgctggactcaaatgattctcccagctcagcctcttgagtacctgggactacaggcttgcgccaccatgcctggctaatttttgtgtattttttataaagactgggctttgccatattgcccaagctggtctccaactcctgggcccaagcaatcctctggccttggcctcccagaatgctgggttacaggcatgagccaccgggcctggcctgcatctttatttaacatgttccttcaaacagctcactgccaaggtcatttctttttctcagaaccatacttcatttatttaagagccctttccgattgcctcccccagaccagaatgcagtcactagcgtgataagagtcttt

SEQ ID NO: 66478 - DNA, 1148 bp, Homo sapiens
tgaaggtatgtatggtgtaatttaatctaatgcctcctttgatagcaaattatattttaaaaaagagtctttgaggccgggcacggtggctcacgcctgtaatcccagcactctgggaggccgaggcgggcggatcacaaggtcaggagatcgagaccatcctggctaatacggtgaaaacccgtctctactaaaaaatacaaaaaattagccaggcgtggtggtgggcgcctgtagtcccagctactcaggagactgaggcaggagaatggtgtgaacctgggaggtggagcttgtagtgagccgagatcatgccactgcactccagcctgggcgacaaagtgagactccgtctaaaaaaaaaaaaagaaaaaaaagagtctttgataataatcaatgtaacattgaggccattgactcattttgggtagtagtttattaagcaaaatttcagcacagcaacttggacacttgaagttttcacaatggatgttcatgtgtgtctgtatatatttctctatatttacacttagaattcttcatttattatggatatgtatttctagcttttcctctaaagtttcactgtttattctgcctttctctttttaaaaggcacccttaggggcttggatcagtataccctgtgcttctcataatttaagatagaactgttttgttttgtttcagtagtgggtctcagtggttgtaggggggatatattttccatgggcctccaccaacctcaccattcccccacatttggcagtgacattttggttgaaagaggaagggtattattggtgtctagcagttagatgccaaggatgctattattatactaaatattctgctatgcacagatggtcccccacaacaaagaattattccatccaaatgtcagtagtgccaaggttgagaaactgtaggatataaagattctcaagttttgctttgggataattgcaaagacttgtaaaagtctagtgaagatgctcatgtttaaaataacgggttgcttttctttgaagtagtgtgtaagagacaatcctatgaagttacctacaaggctattgctctttcaaatttagattttaatatggttccagatataatatgatcatttatattcaggtgtgaaactattt

SEQ ID NO: 66479 - DNA, 1059 bp, Homo sapiens
tttaaccatttaaacatacaattcactagtttttagtctgtttacagaattgtgcaattatcaccaccattttagaatattttcttcaccccaaaaagaacctggtacccagtagcagacattccctatttccttctagccctaggcaaccactatattgcattaacattttttttttgacttcttcaggattttttactttttttctgctaagtggtacagctccagatggatgaagtattatcagaaaattagctagcctctactgaaagctcaaaatactgattttggtgatgtgtttcctttgttacaccaataaaatatttgcatttgaccacatttgagggaaaactagatctagcttttctgtggctttctcttaaagacgttgaataaatgaaaggcttcagggaatctgtctctcagggtaataattatttcctgacttgcggtgagtgtgattacagccatttcatatatatgtcttttagtgtaggattcatggagaaatgcatgattaccaaggatttattgcatacttaactcctgagctctttgttaacggttttgaaggatgttaataaaggaatgtgacaagttctgctgtccgatagttcacattccataagggcacatataagactcattaccacagagttaagtgctaaaatttgcaaatcagaaaaggaagagatctttatggactggtgtagttgaagggaggcctcatggaagaggggaggatttgcaaaagcaaagagggtatttgaagacataccaaaaaagagtaagcatgaaagtcatagaaacatacatgtgactgaggaaaatggaatttcaagtctgtttgaatttatagctagagggaaagagaccgtaacagaattgatcttaaagaaaactcagtttccactactgaattttcttattttatgaacgtttctaaaaaagtaaacttgaatttatttatatgcataaaggtgtccaagctgaacttttatatactttgtggtcttacatgaggatttactttctaaaaataatctacttaaaacatgt

SEQ ID NO: 66480 - DNA, 1030 bp, Homo sapiens
catatgcagagggaccagactcccgttttggggtcctggaaggaattgcccttttatttggccacgtggagcactttggtattttgacagtcagatagatctaccgtaaatattgtggttgtagaacagaggtccctgtttccttgacatgcagttttctttattttgaagcctgtaatgacacatcgaatctttcctgcccttcagatatgtgttgcttccccttttgctccatcacttgtctacagccagagaaaattctctacttttaagagctcatgtgattactttggaaccacctgtaaaatccaggataatctccctatgttactgtcgactggtaaccttaattacgtttgtgaagtcccttttgctgtgtaatataacatattcacccgcatgacaccagaaagtgaaggtcgtggggccaaaattctgcctactacagaatccagagcacaaaaactgtaaagaacctctgctttaaagggaaatttagacattgaacaaggtttaggcttcaggccagaaactgagataggacatatggatgggaggaaaagcaagattgaggtgagaggcagataatgagtttggtcaggacatgtgtggagtagttgtacatatgaccgtgttgggccgggcgcggtggctcacacctgtaatcccagcactttgggaggctgaggcaggcagatcgcttgagcccaggagtttgagatcagcctgggcagcatggcgaaacccagtctctacaaaaaatacaaaaattagccaggcatggtggcggcctgtagtcctagctactcaggaaactgaggtgggaggatcacctgagcccaggaggtcgaggctgcggtgagccgtgattgtgcccctgcactccagcctgcatgacagagtgagaccctgtctcaaaaaaaaaataaaaataaaaaaagaatgtgtatcttgggaaagtggtattaaagagagatgtttggaggtcgttaaagtgttagtgtatactcatggaaatggattagatatc

SEQ ID NO: 66481 - DNA, 1738 bp, Homo sapiens
taaaagggtgttacacgtacccagtttttactttttagttgatgaaacccatcctataatatacatttgagcaaagtacacatattaagaaaaacatggacatttacttgtttaatagtcaaaatgatgaggaaatgttagctgtttttaagtgggactggtggggtgtcctttgtcacaaggaatgcttttttagcttgtttgtgggcataagagatgttaaccctttgctgattctaccacacaactgtaaagaacctaatgaatctacaagtttaatattcagaaaaagctaggaactccgctctttaccagtacagtggaacaggcccgttattcaaggtgatgcctcacagctatagaacaactattcaaagacccagagttaaatggtacatgtgtatatgtgtgtgtgtgtgtgcacacgcacacacttcagataagtatcagaaaaaataaaaatgaatccatcattaacttgaaagaaataagatggctgcattgcaacagatacaaatattatgaacatcatttaattacagaaaatctagacaacagtttctcctgatgtttgacattctcaaaatatattcctcattctcgaagaagcagagaatgccaaggctgcatatctgctgtaatctacctagccctcttctgcttaatatgatccattattgaatcttctcagattaaaatccattcctatatcatctacctttcccaaagtgtgtgcctgtaaacctaccttggaagtggcaagttaactgatttttttgtgtcatttttataccaatccttaaggtcaaagccttttgctatcaatgtatttaaactgagttgctatatgttcactaatttgttttcaaaatgttttgctccaacttaaattatcttttaacatcttttgagtgccaagaattgctaagtaactgtaatatgttgaagagagtaattgccaagcaagcagtcataagccaaaatgtaatgagcttagtatataaccactttagagtatacactcaccactttttgtattcattcatgcaaaccctcctggaagtcgattagaagaggatccaatttgtggaccttttttcctccttttggacacctgagcacaattttttttttcctttcatatttataccactttggaaaattcagtaaacccaattctggcacatcataatggtttcagttagtgaagatgtttattttaataactttaaaatatgactatcctatacataagttatataagagggcataacaatagatgagtagaaatttataaaatttcttggatattttgaatgagaaaaaaacatttttaaaggaattttgttttttccttttttggccaaaccggtacaagttagaaagtgtgctaaggactgaatacttgcctcgtgctttttgccactggatgatgtaagttaagaatggaattgttaatcctaagtatatattttcttgactttcatcagtttctaaagaaatctaatttaagtgttttgcggttttgtttgatctgtatttattgagttctggtcatagaccagcagcttgcacgtcatgctcatgaacagccagaacatagttattggggaacttcatggctcaaaaccttctgaatcatttaacttattttgtatgttgcaaaaaaaaaaaaaaagtttattttgcttgagagtcacctttttttaaaaaaaataactgtacagcttttaaggga

SEQ ID NO: 66482 - DNA, 2519 bp, Homo sapiens
agagagaaatcaggccaattattgaaaggaaacatttaggtacaagcaattctgaaagcaggacgtggggtgaatatcgggaggaaaaggagaattaaattcgtttatggttaaccgtgccaatggcttaaatgtgctgtttattctagagagctatttgtccaagaactctgaagatgatgagctagctaaagaatcaaagcggtcagttcgaaagcggggccgaagcacagacgagtattcagaagcagatgaggaggaggaggaagaggaaggcaaaccatcccgcaaacggctacaccggattgagacggatgaggaggagagttgtgacaatgctcatggagatgcaaatcagcctgcccgtgacagccagcctagggtcctgccctcagaacaagagagcaccaagaagccctaccggatagaaagtgatgaggaagaggactttgaaaatgtaggcaaagtggggagcccattggactatagcttagtggacttaccttcaaccaatggacagagccctggcaaagccattgagaacttgattggcaagcctactgagaagtctcagacccccaaggacaacagcacagccagtgcaagcctagcctccaatgggacaagtggtgggcaggaggcaggagcaccagaagaggaggaagatgagcttttgagagtgactgaccttgttgattatgtctgtaacagtgaacagttataagactttttttccatttttgtgctaatttattccacggtagctctcacaccagcgggccagttattaaaagctgtttaatttttcctagaaaactccactacagaatgacttttagaagaaaaatttcaacaaatcctgaagtctttctgtgaagtgaccagttctgaactttgaagataaataattgctgtaaattccttttgattttctttttccaggttcatggtccttggtaatttcattcatggaaaaaaatcttattataataacaacaaagatttgtatatttttgactttatatttcctgagctctcctgactttgtgaaaaagggtggatgaaaatgcattccgaatctgtgagggcccaaaacagaatttaggggtgggtgaaagcacttgtgctttagctttttcatattaaatatatattatatttaaacattcatggcatagatgatgatttacagacaatttaaaagttcaagtctgtactgttacagtttgagaattgtagataacatcatacataagtcatttagtaacagcctttgtgaaatgaacttgtttactattggagataaccacacttaataaagaagagacagtgaaagtaccatcataattaacctaaatttttgttatagcagagtttcttgtttaaaaaaaaataaaatcatctgaaaagcatttgtacagtaaaatgtataatgaagctttgccaaccagactgtgctagcaacaaatttttttaaataagctttatgcagtggtaataaggtggcctcaaatatattgtgtctgatggagagttattagtgaaatgaatgtggtctttcttaaggcctgggtggactgtaaactttgccaatagtataactcttgtcttctggccacttgatgtttaaatatctgaaatatcattttgaaaaaaatacatctatatataacatacatgaagagatgctaagctgacagtgatattttagcacatttgaagactgggaagagattttcaggtgaattttaactggtctattcttgcccttagtatctacttcaaattgaagtctacaaacaaagcagttcctttgggaggtttttagtttgagttttagcgtgtgtgtgtgtttgtgtgtgtgcgtgtgcgtgtgtgtgtgtgttggaatttcctatctgcctggatatattagcagagtttgaatgtagttttggcctttggccattagacttctattaaaattcattaatagtcatacaaccaacatagagttgaatgagaactgccgatgtaattaataggcatgacatccatttcaaacatctcaacactttaaagaaaagccctttgtttcaagaaaaaagggtttgtaactaactaaatacctaacatgtaattgacactaaaatatgaactttgtcttatttagtttctgttatagctgtaaaatttcaggcagagccataacattgtacagagtgtagcacttgtgattaaacctagcctgttaaatcctgaaaccttcaaccattacttctgtgaatactttagccctgggatttgggtttttctgttccggtgttgtgtctgttgccggcaatggacacaccatatctgctgctggcccaaggaacgtcattaatttttctttccaaattaagtattatgtgctagtcagtgtatagtaaagcacttctcttttttattactaaaaagctggcattagatttgcattataaatacctctctaggaactttatactccttttccttcttcaacaggtattgcccttaaa

SEQ ID NO: 66483 - DNA, 1063 bp, Homo sapiens
actctgtctcaaaaacaaacaaactaaaaaggataaaacattttctaatcttgaggattcaccgctaagagtatatattgtgaggtttggcattaaaaacctgcacagattgagtcattttttttttttttaagggagacttaaaggccaggcatgtggtaatctcaacactttggtaggtagccaggagtggtagtgcatatgcctgtgatcctagctttagctactggggcagctgaggccaaaggatctcttgagcccaggaggttgaggctgtagtgagtcatgttcatgccactgcactccagcctgtgtgatagtgagatactctctcaaataaaatgagactcataaaagttactgttcacttaaaaatatttatgactgaactctgcttggtagcttttcatttttataacctaagctacatttctaaatagacttaaattttgtactttgttcttcctttttttaaaatagaaagtgacttcagtgatgattttagtgatgattttgtagaaactcggcgaaggcggtcaaggagaaatcagaaaagacaaattaactacaaagaagactcagaaagtgacggttcccagaagagtttgcgacgtggtaaagaaataaggcgagtacacaagcgaagactttccagctcagagagtgaaggtaaggcataggtctcctatatatagaagtttggacagggcaaaatagacattataaagtgaactcaggattgtgattctgtaccattctttgaaactcatataaccaggccaggcatggtggctcacgcctgtaatcccggcagtttgggaggccagggcatgcagatcacttgaggccaggagttcaagaccagcctgtccaacatggtgagaccttgtctctactaaaaataaaaaaattagcctgtgtggtgatacgcgcctgtaatcttagctactcaggaggttgaggcaggagaattgcttgaacctgggaggcggagattgcagtgagccaaggttgtgccactgcactccaccctgggtgacagagcaagactgtgtctcaaaaa

SEQ ID NO: 66484 - DNA, 2578 bp, Homo sapiens
tatactaaaaatgtctgaattgtacactttaagagggtgaatattgcggtgtgtgaattatataaaaatttaaaaaacgaggttccctacatagtaaacttctcttcagtagggtaaacgaatgctaaaactctgagacctctgtcagctgaagtcataagaaaactgcatatttgttggaagaaaataaagaaatgaagagctgctaagcatgaataaggactgtctctagaaattaaagggaagcttttaataaacacatatttttctctccccgaacttccctcccccaaattcaggagttggccgaggaaaagatatctccaccatcacaggtcatcgtgggaaagacatctctactattttggatgaagaaagaaaagaaaataaacgaccccagagggcagctgctgctcgaaggaagaaacgccggcgattaaatgatctggacagtgatagcaacctggatgaagaagagagcgaggatgaattcaagatcagtgatgggtgtgtggtctcctactaggccccgatccctagataccagcaggaacaggactgggctagcagagaggcttgcccatgctgtgatgagggttttcttcttcatgtacatagacaacctctgtttattttcaggatatttaaagcagattcaagaatactaattttggcccatttttaaagtttagaacagaaaatagatttatggttgtttaacattcaaaattgtatttaaattttactaactacaattaaactttcatttgttgagagctttctctgtacctctgtgccaccttctgccaggtccatgaggggtttccagtcctatgtgaaaaataaataagatattatcctctcatgactcatagaagttggacttgggactggtaatccagtatagaagatcaagaaaggcttctttgcagagttggaattgaaacaatactgcagagtttctcctttcagattattagaagaggaaacaagtatataaaccacaaaaaaaaaaaaaagtcattctgcataactgctactaaaatacagggaaagataaattaggctacagaggaaagttggcttaatccaaagagtaaaccttaaagtagaagtaaagcttgatctgaaatttgaagaatgagtatttggaatcaacaagtatgagactaaaagcaggataagaaaaaggtattctaagcatagaagtcacatgtccaagacagcaagccgtaaaatgtcatagaatgtttgggaaactcctgttggctctggatagcaggaataaggggatgaagtagagagtgccctactggagatgtggtcaagtgataaaaagagccagattagggagtgttttatttgtcatgcataagtgttttgactttatcctgaaaattatacaaaaccagtgaagggttttaaacactaaattaatatgagatttatgcttcagaaagattcatcctggcattcatttggaggatagattgaggggaaatgagaccagatattagagaaactatttgtggagttgcttttgtagttaaggtgagtatgaaaagctgaaaacagaagagatcaggtttgagagattatcttttaagaggtagactctagagaaattattaatttattggatatgagaaatgaaaaggggaaagttaggataaataccacgtttctggttggagttaccggatgagtgatggtgccaaataccaggccagggaacagaagagagaagtagattgggaaataatgaattcacttttgaatatgtcgaatttaacatgggggacatcccaagaggtcaaagcagtacagaaatcaacattaattcatctttacaacccctcctaagaggataggtggcaaaacattttccccattttataaatagggcatttgatacaattatccagatatgttgcactatacttaatgattcactgggctcaccagaatttgaactcagaactcttaaaaatgggttcactcttctaaataccattgtattttatctgatttctcttggacagatctcaagatgagtttgttgtgtctgatgaaaacccagatgaaagtgaagaagatccgccatctaatgatgacagtgacactgacttttgtagccgtagactgaggcgacacccctctcggccaatgaggcagagcaggcgtttgcgaagaaagaccccaaagaaaaaatattccgatgatgatgaagaggaggaatctgaggagaatagtagagactctggtaaaaataatctgtaaccatatggtagctcaataaattattttttgtttttcttgttgctcatgctggagtgcaatggcaccatctcggctcactgcaacctctgtgtcccgggttcaagcgattctcctacctcagcctcccaagtagctgggattacaggcatgtgccaccatgcctggctaattttgtatttttagtagagagggagtttctccatgttggccaggctggtctcaaactcccgacctcaggtgatctgcccacctcagcctcccaaagtgctgggattacaggcgtgagccagcacgctgg

SEQ ID NO: 66485 - DNA, 1747 bp, Homo sapiens
ggaggctgaggcaggagaatggcgtgaacccaggaggcggagcttgcagtgagccgagatcccgccactgcactccagcctgggcaacagagcgagactccgtctcaaaaaaaaaaaaaaaaaaaaaaaaaaaaatttaaaagtagtaataattattttttttaaatgatgaaagtttggccaagcgtggtggcttatgcctataatcccagcactttgggaggccaaggcaggcagatcacttgaggccaggaattcaagaccagtctgaccaacatgacgatatcccatctctactaaaagtacaaaaattagacaggcatggtggcacacgcctgtaatccctgctacttagaaaactgaggcaccagaatcgcttgaacctgggagacagaggttgcggtaagccaagattgtgccactgcacgccagcctgggtgacagagtgagatctgtctcaaaaaataaaataaaataaaatgatgagctttatgcattcttcagtgaaatggacttctgtggcttagcacagctttattatcaagtacatttttcagctctgttttgactcagtaactgtgtagcattgtttgtatacttttttacagtctttttttttaaggatagtcaagtgaagccctgggagtggagaaagaacaaaaaaatctgtaactggttgggatcaattagttgtaaataccacagcactcacaccagcccagtcaccttttttaaaaaatagtttttggcatcattatgttatatcgtacgtataaccttctccctttaaaacatcttgggatcttttttaaaaagtataatcactgttacatacacatgttgaaccaaatgctgttttaaacattgactattgccagtaggataggcacagaatccgtttcttttggcaaagctgtatgtttctttaacgtgtgctttatttcaaaggtactgtgctcatcttctgttcaaaaggtgtgtttaattaaacacaagaaaagcttcattgttcacttactatgtggtcccttaccagctctcagagcccactacccatgaagttaacatgtatgtaataaatgattgctaaaagttgtttaaaatgacttttatctattttgcttcttcagaaactgctctgtgaaaaattagaggaacagttgcaggatttggatgttgccttaaagaagaaagagcgtgccgaacgaaggtatttttatatgtgtgttaatgttttgtttgggaatatgagagcagaattgtctcactgtatggataaatggatccatctaaaacaaggattggcatactgtggcctgtgggccaaatccagcctcctttttgtttttgtactgcctgctaactaagaatgttttttatgtttttaaatgattggggggaaaaactagaatcatatttcatgacacatgaaaattatatgatactcaaattttattgtctgtgaataaagttttattgaacgcaaccttgctcatttgtttgtatattgtctgtggctacttttgccctgtgacagcagcattgagtagttggaacagagaccttatgacctgccaagattgcatgcttattatctttccttttataggaaatgtttgccaactttctatctgaagtatttatcagaagtagctgggcatggtggctcccgcctgtaatcccagcactttgagaggccgaggcaggcagatcacctgaggtcagcctggccaacatggtgaaaccc

SEQ ID NO: 66486 - DNA, 1146 bp, Homo sapiens
tcatcattctcttacaaagcatttaaaatgtgcatgacctttgacccagaatcctcttcaaggaatttatcctaaccacagagatgtgtgtaaaaatatttgtaaagatacagtacattgttgacgaaagtgaaaaacatgggaaacaactacctaaatgtctagtagaggattagataaaaacagttatgtaatggcatttatagtaatgttaggagaatgtgactaggaaaaatataagaccaaatgttcattataattcggttttaagaaaaaagtaaacaaaaatgtagaaaaaatagtggaaatatataccaaaatttaaccatagctatatctgatgatgagactataataattttctcctctttttttggtatattggctgaatattattatacaatggacatgtaatcaggagatttttaaaagacattcttatatcaaattatcccaattttttttattttatacaaggtaaaacccaaaggcaaagttcgatggactggttctcggacacgtggcagatggaaatattccagcaatgatgaaagtgaagggtctggcagtgaaaaatcatctgcagcttcagaagaggaggaagaaaaggaaagtgaagaagccatcctagcagatgatgatgaaccatgcaaaaaatgtggccttccaaaccatcctgagctagtatgtacctgatgtaaatgaagaatactcatattacagacatggtgaggttgcctggagcagcctaactcttctgggttttatcattatttgaatttcttaatgataacttgtatgctacagagtaacctttatttctgtttctcatataacctaattgtaggaaggccagtgatcaagatcctactttcattctacttggcttgtatattgatatttcctctacataataatacacctcaatctcttctcacagattgaggaatgtattcaagtatttttagtctgttctttttaagtttttcttctttccctttaaattacttaataatggcatttctgcctggcatggtggccacatgccagtagttccagctactcaggtggctgaggtaggaggatttgagcccagtaattcaaatgcagcctgggcagcatagcaagaccctgtctcatggatgg

SEQ ID NO: 66487 - DNA, 1532 bp, Homo sapiens
aggaagagagctatagcccctctaaggacagaaatatcatcacggagggaaatggaacagagtccttaaattctgtcataacaagtatgaaaacaggtgagcttgagaaagaaacagcccctttgaggaaagatgcagatagttcaatatcagtcttagagatccatagtcaaaaagcacaaatagaggaacccgatcctccagaaatggaaacttctcttgattcttctgagatggcaaaagatctctcttcaaaaactgctttatcttccaccgagtcgtgtaccatgaaaggtgaagagaagtctcccaaaactaagaaggataagcgcccaccaatcctagaatgtcttgaaaagttagagaagtccaaaaagacttttcttgataaggacgcacaaagattgagtccaataccagaagaagttccaaagagtactctagagtcagaaaagcctggctctcctgaggcagctgaaacttctccaccatctaatatcattgaccactgtgagaaactagcctcagaaaaagaagtggtagaatgccagagtacaagtactgttggtggccagtctgtgaaaaaagtagacctagaaaccctaaaagaggattctgagttcacaaaggtagaaatggataatctggacaatgcccagacctctggcatagaggagccttctgagacaaagggttctatgcaaaaaagcaaattcaaatataagttggttcctgaagaagaaaccactgcctcagaaaatacagagataacctctgaaaggcagaaagagggcatcaaattaacaatcaggatatcaagtcggaaaaagaagcccgattctccccccaaagttctagaaccagaaaacaagcaagagaagacagaaaaggaagaggagaaaacaaatgtgggtcgtactttaagaagatctccaagaatatctagacccactgcaaaagtggctgagatcagagatcagaaagctgataaaaaaagaggggaaggagaagatgaggtggaagaagagtcaacagctttgcaaaaaactgacaaaaaggaaattttgaaaaaatcagagaaagatacaaattctaaagtaagcaaggtaaaacttgtcttaactttaattaaaaatatttgtctctatatattaataggttttttggttttgtctaaaacttagtcatcaaagacaactgacaaagtatctttcttcctctgtctgagataccttttcagactttatactcttacttatactctatactcttgtcatcttttaacttttttaagaaattaaaagtagtataggaatatattctccttgtaaactattcaaataatatccaacctgtagaattatagaatgagaattccccattgccactattaacagtttggggataattgccactattaacagtgtggggtatagtatctttgcagtcttttttttttttttttttttttttttttgtgagacagtcttgctctgtcgccaggctggagtgcaatggcactatctcggctc

SEQ ID NO: 66488 - DNA, 1047 bp, Homo sapiens
tgcctctgggtaataggatatgggctttttgtctttctatatttttcattttcccactgccgtgttcctggtacctcagtgaaatgaagtgctcagttcttttaacagttgtcagtttttaaaacaaatatagtcttctggaaatgttttaggtagcattttcaattttatgtttttaagccatctcttgaatttgaataaattatttgaactgcataaatatttgcaatccattgagaacaccaaaacaaaaagtaaaaagcagaaacctaaatttttctaaattttttttaatatctagaagttgtatctcaaagtttttgtaattttcttcattgtcagattttattttttactgtcaaatatccaatgacagaggccacctcttttaaaatagaaactttaaatggaaatatacattatactaagtcttatattttatagccttgaaagtttctattcatgtaattaagctttttctgatttttagaggaacagaaagaaagtgaaaagatgaaaagtgaggagcagcctatggatttagaaaaccgttctacagccaatgttctagaagagactactgtgaaaaaagaaaaagaagatgaaaaggaacttgtgaaactgccagtcatagtgaagctagaaaaacctttgccagaaaatgaagaaaaaaagattatcaaagaagaaagtgattccttcaaggaaaatgtcaaacccattaaagttgaggtgaaggaatgtagagcagatcctaaagataccaaaagtagcatggagaagccagtggcacaggagcctgaaaggatcgaatttggtggcaatattaaatcttctcacgaaattactgagaaatctactgaagaaactgagaaacttaaaaatgaccagcaggccaagataccactaaaaaaacgagaaattaaactgagtgatgattttgacagtccagtcaagggacctttgtgtaaatcagttactccaacaaaagagtttttgaaagatgaaataaaacaagaggaagagacttgtaaaaggatctctaca

SEQ ID NO: 66489 - DNA, 1093 bp, Homo sapiens
ctgccatatctagaagctttgaacattgtgactaaataaaaactttgctggttggttaaattaaaaatctcactgctttttgaattttaatttctttgattactagtggagtttgaacatttcagcctctgcattgttggttgacatccatggctaattttgttttcggatctttagttttagcttatattttaaatggtcttttaagtaaatgcatttattaatccttcttcaatgcagtataccttagcatctgttaaatgtatcatgtccttgcccaaatctcactttgtaggttggtgaaatatgcttcatagaatttttaattaaatattgctttacagtctacataagacttcctgttagtaaaagctacctcatgaaaagtattgatgttatttgccaacatttagactagcttttgttaccgtttcagttattcaatttagtcagcacatgtttgagtgtcttactgcaggtgaataatccatgatttctgccccagagtagttcataagactggtaggatacatagatttgtaaataaataattataattctgggcagtaagtgctgctatagaagtctctataaagcaatgtgcaaacacaagaaaaggagccgttaattccttatagggaaaggatcagataaaattataaaatggagtgatattgtaactgggcttgaggaaggtaagatcttgcctataatataataatattggcaaacattgagtgcttgcctggtattactcttctgaaggccttatatgtagtattgtatgcaatcattggcaacccaggagattgtgcctgttattttagttgttttacaaattaggaaagtgggtggagggtgggaggagggtcaggatcaaaaaactacatatcagatactatgtttattattgcctggatgacaaaataatctgtatgtcaaaccctcatgatacgcaatttacctgtataacaaacctgcgtacgtacccttgaacctaaagtaaaagttaaaaaaaaaaaattaggaaagtgaggaatcttaaaaggtacaaaatagcaattgcttactaggcagagttaacagagtaaaa

SEQ ID NO: 66490 - DNA, 1045 bp, Homo sapiens
ctcgccctccaaagtgctgggattacaggtgtgagccaccacgcccagccatttgtggccactttcaagtagagtaatctttacaaagtttatccgtgtaatataaatcagaactttattcctttttatggctgagtagtatttccatatgtagatatactagattttgtttattcattctatacttgtctttgagagagtaattggaattagccatggggaacacattccaggctaagagagcagaagtgcagtcagtcacccgatatcctaagaaagcctggtattttggagggatatatctgatttaacatacctgaaagaagaaatggtttggagaacagagaacaagtgagggaggggtagcaaaacaactggattgttgttagggtccatagtctaaaatattctgtacatagtgttaagaaatttggatgtgatttgagggaattcataaaaatttcctctgactaactcagatttaggattttttaaattgttcaaaaataggaaaaacccaaagatgggtagttttgttttcatataataacgactaccttaggcttgtgtttaaacacattaaacagattaaaagccttttagggagttgttctttaataaattttaatgctaaattccctttttgcttaaagtagtggaagtaggctgggtgcagtggctcacgcttgtaatcccaacagtttgggaggccaaggcaggcagatcacttgaggtcaggagttcgagactagcctgaccaacatggtgaaacctcatctctactaaaattacaaaagaaattagccaggcgtggtgatgggtgcctgtaatcccagctactcgggagtctgaggcaggaaaatcgcttgaacccaggaggaggaggttgcagtgagccaagatcctgccattgcactccagcctgggtgacaagagtgaaactccatctcaaaaaaaaaaaaaaaaaaaagtagtggaagtaattgaaatagattttcctagcaatattagctctcttacgttttgaagctttttaaaattgtta

SEQ ID NO: 66491 - DNA, 1985 bp, Homo sapiens
gtgaagtggagttttgtaagaggcagtaatctttttagcaagagatttctttagaaaatcaagtgatggccgggtgcggcggctcacacctgtaatcccagcactttgggaggccaaggcgggcggatcatgaggtcaagatatcgagaccatcctggccaacatggtgaaactccgtctctactaaaaatacaaaaattagctggcattgtggcgtgtgcctgtagtcccagctactcggaaggctgaggcaggggaatcacttgaacccagtaggcagaggttgcagtgagccaagattgcgccactgcactccagcctggcgacaacagagcggcctccatctcaaaaaagaagaaaaaagaaaattaagtgataagggaagaacaagtaaagcaaatgagattttgactttgactttttcatttaataggttgcatttaggtgcttttcttagctagtaagtattattttttactagtaaattaaaagcttcttgttttttcttaaaacaatttctttaaagtaacagtattattttcttggtgatcggctggtgttggaaacgtgtttctacctaattcttaaaagaggattatataacaaaagttatctagtctttagggttccgttttctaaagctaataagtcagccttcttaatgattgataaatttagaaatataactgaactttgcaaattaaacatcaaatggaatttttaaaaaatgagaatccaccaaaaagggataattttacatagttgatctactgaaaatttcataccatgacatcaccacagtcttaaaacttgtactgttacgtagcaacttccatttctgcaagttgcaaaattaataatataaatatagagacgttctttgccgagagtcgtcggggtttcctgcttcaacagtgcttggacggaacccggtgctcgtcccccaccccagccggccgcccatagccagccctccctcacctcttcacggcaccctcagaccgccccaaggcccctgccgccgccccagcgccacgcagccactgccaccgccgccacctctccttagtcgccgccatgaggaccacgtccacctcacaggtgcgccagaactaccaccaggactcagaggccgccatcaaccgccagatcaacctagagctctgtgcctcctacgtttacctgtccatgtcttactgctttgaccgtgatgatgtggctttgaagaactttgccaaatactttcttcaccaatctcatgaggagagggagcatgctgagaaactgatgaagctgcagaaccaacgaggtggccgaatcttccttcaggatatcaaaaaaccagactgtgatgactgggagagcgggctgaatgtgatggagtgtgcattacatttggaaaaaaatgtgaatcagtcactactggaactgcacaaattggccactgacaaaaatgacccccatttgtgtgacttcattgagacacattacctgaatgagcaggtgaaagccatcaaagaattggatgaccatgtgaccaacttgcacaagatgggagcactcgaatctggcttggcagaatatctctttgacaagcacaccctgggagacagtgataatgaaagctaagcctcggctaatttccccgtagccgtggggtgacttccctggtcaccaaggcagtgcatgcatgttggggtttcctttaccttttctataagttgtaccaaaacatccacctaagttctttgatttgtgccattccttcagatgaagaaatttggtacccccccccaaaaaaagtaataataataatataaatatatgtattagatgaatagataggaagcaattaacttatatataattatactttaagttgaaacaagatttagtatgtgatttacaaaacaatagaagtagttaagtttcattaaaccatatgaaattgttaacatttgaacattttgacctataaaaatggt

SEQ ID NO: 66492 - DNA, 1083 bp, Homo sapiens
ttctgcttccccataatttgaatccagtgatcctggctcagcctttgagatattcttctacaaatcaatcctttaaatgtttgaagacatttatgtctgagtaaatttctgctagataaagcattttcagtattcaatcatcttctttgtggttgttcccataatggactttactatattaatgtttctttcagagtctgccattcaaacagaaataccatgctccaggtatgatctcatccaagtcaaatgagatgatgccccacattattttaggcactaaatatatattagtgacaactaagatcttatctttatgaggaggcaaaaattattacaatgttttctacattcaacctttgcaacaatgagagacctatgtggacaagacagtttactatatttgtcagtaagagttccactgtgttgggttaaagctaattggaatgtcatgtcatagaacatctcacttataatatgcataaacacacccaactgaaaatttgacataaattaccatccgtccccagaaaatacgcatataatattcacctaaaatctattctttacaagttgaggcctttcacaggtgcctgcagcccctcttagagatcttagagccatactattcactattacatcaccaattgtttagcatagtacctattacacaaggatgtatgtaatagaatttataaatttaatgaaataaaggaatgttagtatgacaatcagctgtttaaaaattgaatttcattacacaaaatcagagagtcaataaaccaaatgatttctgaatgctcccaaatatttctgcgttatttgggcaatgttccctggctcattgtaaatagaaacatatgtattcacagatgtcatcaaaatggctaaaaataacctggcaccattttctaaagaaatttgtggttgtgaaaatgagaaaactatgcgatgggtatggtggttcacacctgtaatcccagcactttgggaggccacagcaagtgaatagcttgtgctcgggagttcgataccagcatggtcaacatggcaaaactctgtctctactaaaagtacaaaaat

SEQ ID NO: 66493 - DNA, 1110 bp, Homo sapiens
gcattcaaatttttccgtatcgtcaaccaacatttattattatctttctcattgtggtaaaatgtctattcagattctgacattttagcttttgatataatcactttagggtcttcctcatgtaatatttatatttttccctttttctgtatatccttttttttctctctgaaaaacgtaacactgtcagccagaggaagtaatatattctagggaatgggaaactcatgcttcctgtgagtctttaaactgtccattgtccatcttggcaacatgaagaaaccccgtctctacaaaaagtacaaaaatcagccaggtgtggtggcacacggctatagccccagcttctcgggtggctgaggtgggaggatcacctgagcccagggggtcaaggttgcagtgagctgtgatcgtgtccctgtactctaccctgggtaacagagtgagacctatctccaaaaaaaaaaaaagaaaaaaaaaaaagatcctctattatattgttcctggccatactgcttgttttgtattctttttctatattaatactaatctattattttattgcacaaatcgatgaaaagagatgacactatgacactagtgcaggctaggaaaagggtaacccacctgagagagctggcttgtttttctcctgtctaccccattccctgtactccaggttaatctcttgccttgtgttggttcttctcctttggccctcgttatgctctttgctccttgaattgcaagaaatacgtgaaattgctggcattttgtatcattttttgcctactctttggcctttaagataatattattaatgttccagttttattgctgaaaaaactagctcacagaggtcatagaacccatttgcatttcactgtgttaacctcccttactggcttcctctgacctctagtttagggtgatgctgctgaaatgagagaaagtttcttgcactggctttgaaatgcagtggttattcagatcttctttctttggtctgttacagtggctctggtttgcctgaaatgcttgtgtagaaagagaagcctagacatttatcttaaagccaagttacataagttttcatatgccaagaatgga

SEQ ID NO: 66494 - DNA, 1035 bp, Homo sapiens
aatctttttttttttttttttaaagacagtctcactctgtcacccaggctagagtgcagtggtgctgtctcggctcactgcaacgtccacctcctgggttcaagcaattctcttgcttcagcctcctgagtagctgggactacaggtgcgtgccaccatgcctggctaattttttttgtattattagtagagacagggtttcaccatattggccaggctagtctcgaactcctgacctcgtgatccgcccacctcggcctcccaaagtgctgggattacaggcgtgagccaccgtgcccggcggcttcttttaatcttttatgcatcagtattagatggatcaattaatcactgagacaattttagttttctttcccttgactgccagtaagcttaactttgttatatttatttattagttataatcattagctagttttctgatggaatttttaccttccctgttacatggctcttacagtgctctcgtctttctccttgtggcatcattgtacatatgtattactgaaagctgtttcttttccttttgaagtaaatggaatataattaatataaaattctgtttaaatccagagcaagtatctggcatctgctaggccttgttgctttgctcatagcagacattaccaacctaagccttcctgctaagcctagacttagcagactacattattacacaaatcagtcagcattggcatctatttgtcatctattgttagtaattccctaagacagctgaactaagacctatagaatgagcagaaattttgttaggaaataaccagtagcttagccctactgtaatagaaagtaccttgagaaaatgacagtgagtggaggcctaacagtcatgtgttcaggaggttactgtgataatccaactgagcaataaggagacctgaattaaggttttggcactagggatggaaaggagggggtggatgtaagagctatttggaaggtaaaatcaacaactattgataattgatagtgagagagaaagagagagaggtg

SEQ ID NO: 66495 - DNA, 1044 bp, Homo sapiens
tccagtctgggtgacagaacgagactctgtctcaaaaaaaaaaaaaaaaaaagctgataatatgttgatataattttggatgaagggcattaaataaaatatattattaaaattaattttaacctctttttactttttataatattttactagaaaatttgaaattatgtgactcaccttacatttctattgcacagtgctgactgtagaagagccagtactcttttaaatcaagtaatacataatctatttgtacatgcctaaatcaacaatgagtagatttgtaaagtgggatgaaaacatttattcacttttatttttgtcttgtattggcttttaaaaaatagtaccagttgtatcaaaatctttcatgattctgtgtagcatagaacactggtggggaacatgagtaaaacactggtgcaaaggttttagccaactgcttaatgagtgatacagacagtatgaatacagtgggtgttccagggacaaaaaggttgctggtactagaaatctatcacggagactttcgggacttgtattgcctagacattgaaagataaatatgattcaagtgggcagaaaacaataaataactctttaataaagcccacataggtaatgggctgagcatgcttagtggaccattaactggcaaaatgattcgaatcaaggatttcagtgcaggaagtaagagagaagaattgcagagttagtatgagactgaatgttgggactctgaggctagggtaagaaatctggctgggtttatgtaggtatttaggagccataaaaaatacttaccaactgggaagtgatatgaaagcagtctttttggaagattggtttgattgcaggagactatccatagctgtttttctgatgcgagaaggtatagtcatgtcctagggaaaggaggaaataggaggcaggtttaagatgtgggaagggggaacatcaatacttctgtgtttgtggaaaaggagaaattgaagaaagtgaccttggttttaaaacagaagagaaataaaagtattttatatt

SEQ ID NO: 66496 - DNA, 1027 bp, Homo sapiens
ggtagtgagggtaagagttgttgtaacattgctgctatactggcctcaaagtcttatccaagtggactgattaggggagggtaaggttggatgaatggtgatgccgtgtactcagatgggaaaggatgtagttattaaaggtagaacttaaaagatttacttaggttacttagaggacacaggactgggaaagaatgtactagataatagcttactagtaagtgggattaaatgccttggtcatcagtgtattttgcagcaaaagtgcagtactggttatgaagcttaggcatgtgttatgctagatatctcagggagtttgatacttactcttttccttttgtccttagcatcttcacagttggctctgcaaataaatataattgccacttcttcaatgtttagatgttaaaagtgttttaggaaaagaaaattaggtagaatgagttattccaaataatccattctaacttgcttttggtatttggagtttggggatatagcaatatggtaatattggaaaactttgattaatcagaagtataatggagcttactttatattcccattaaagtcttgccaacctccagtttatcagaaccataaataaaccatctacagcagcactaacttggtctggcatctgaattcagacattccataatcctcattttagaggttttttgtcctatgaattttgactgtggtcaactggtttctccttgctatctttttgcctcatggccttttcattttataccctatcttctattattacctagttgtattcaccatgataactatatctcactcctttagtgtcctattttcctgtattttggacttcccctttaaaccttaattatcttctccattcttatctttcgtagaaaaatagattacaaaaatgcaaaaataaggggctttgtagtatgcatgctttaccataattttataggttaaatgcctgtagtagtactgttgtaattatcagagcttactgttgagccagactccatgataaagt

SEQ ID NO: 66497 - DNA, 1031 bp, Homo sapiens
gatttctaaagaggctttttaaaaggaaaattgaatttctgcttgtatttatgtactcttatttttatagacagggtctcactctgtcacccaggctggagtgcagtggcttgttctctgctgactgcaacctctacctcccagactcaggcgatcctcccatttcagcctctcaagttgctggggactacaggcatgtgccaccacacccagctaaaaattttttgtatttttagtagagacagagtttcattatgttgcccaggctggtctcaaactcctgggctcaagcaatccacctgactcagcctccccaagtgctgggattacaggcgtgagccaccaagctcagcctatttatttattcttaatcttgaattacctcttaaatgaatgttactatcatctacccaagtcactcagatcagaaaccaaggaggcatcctagaccttagcctctgacactttctttgataccaagttatattgagtctgtttatccccttttatattcaaccttgcttttctgttctcattgctagttttaatcacgccaaactgcttttacatctctgaagatgtgaaaggttgttttacatttatgctttttcttcgtcctcctgcctctgagtcgaatataccatccccatcttccttcccttgcctgctcactgtacccgtcattagtctgctctttaagcatcaaatgctctgtggaaaatttccttctttctgtctctcaagttaaattaaccacttcaatctccttaccctgcacgtacactttgtagattttatgccacagtactcataacactttttgcagttactgcctagcctacaagatggtaaactctttgaggacagggtttcttactttattttatcaccagcaattggtgggtaatagcaaatatgtagtaaatgtttgtggaattaatagttttcctcaacttactataggaccatgttctgctctaaaactttgaagttaaagcctagtctgtgatagcttagtacagtggtgggca

SEQ ID NO: 66498 - DNA, 1021 bp, Homo sapiens
tttagtcctcccaattctgtgctttgtgtggacttccccaggtttctcctaactggaggtagatgatggtggttatggataaagttgacgttgactttgtgagatccctgacacccaaggctcctaagtatctttcctctcctgcagagaatatttcttttcaagaggaaactatactactgtattctttaaaaacagtctggatattggttgagatgttacatatatctaataaatttattaaggtaaatacagataatgtgttaggattctcatagtttatactatggttggctgaattagttgtatgatattaagtaagttgagccattagttttttgtttcatttttgcatttaatgatttgaattttaactcgaagtgaaaatatcaaagttaaaaaaatgcctttttaactggaattgtaactataacttactatggtctctcttactggtactgtaactgatctgtgtgtaacaatatatttttaggtgcatttgataaagtggaaaggtgattactgtaactggggccacatgtgttgatttaaacaaaagattttaccaggtgcatgtactagaggttgcatgagtctacagtggtagacactggtagggcatacatacattaatagtagtattgctggggccagagcctggttaggttgaaactttttagttgtgtctcttctgcctttgaaaaagcaaatattctttagggcacttattagatgaaaagagagaaacagatttcatctccaccattttcgatatgtcatagagtaaagttacggaggtttggagggaggttgttgtcattgtcctaggaactaggaggtaatggagacagagggacttgtctggctaacatgagcctgttaatgcaaactggcttactttttagtcttttaatgattaagaagtttgccttaaatttagatgttttgttaagttcttaaacagacctcaccggtaagaaggtaagcaagcatttattagtgaggttattcacttaatata

SEQ ID NO: 66499 - DNA, 1055 bp, Homo sapiens
gctgcatgaccctcatgttgtcatgtgagtgtgtgcttatcacatggctggtacttgatgatgaggctgcacttagatctcatgctgaaatctgaggtgcactggattgctctggccttgggctgactgcaaacctttcccttcctggaggacagcaatccagtctctactctgacccatagagagaagcttggatgtaaccaggaagaggtctggggaggcactgagaagtcctggagtctctgcccttgttaatttagatccatctagccttcattcctaccctctgaacttcttagccttgggatcatcttcaacttacactttttgctctggttgcaccaaattaaggagacatcccaagctcactccattcctggcctttgcacttgcccttacatttttctgaaattctctccctcttctttatagaagcttgtggttaatagaatgagtaactgcttcagtttatgaactgggctcaaattcttacccaggtgtgcatctggggagtctctgagaacctatctgattcttgggatttttgccaagattgtgacagtctttctttcataatgtagcaggataagaactcttggggttaactgtttggcatagaatggatattctattccaaagccttcctgcgctcctcctcagtacttcttgcaggcttggttagagcgtgtgttgtactccattgcaactatctgtttcctcaaccaaacagcaggcaacttgaggggagttcttaattattcttgctaggacctgccacatagagacactagatgattatatcgtaagataatgtaatgaaagaatgagatgttttcagacattttaggtccctgagacatgttcctgttcattggccagaaactttttggcgaaccacttcctattcaaaggcttcctctccactaataaagtagtctgtggtacatgcagccctgaggcttgagatggaactgcgcaggaagagcccaactgggtatcagaataagccacatgcaccttctgaaactgcccaaatccacacctgcataagaatt

SEQ ID NO: 66500 - DNA, 1274 bp, Homo sapiens
tgaaagagggagaaatctaggaaagctgcttgatttctagttgaatatgttgataaagtggttggggcttacaacataatgagcataggggaaaagaaaaaagaaccacagttaaggaagaagtatctaggtggcttgggttagtccagtagctctgggaacaaggagtgcctagagcccggaagctggcttgcctgcgcattctggtgaagctttcgtggttcctgtcctctgcttccagaagcactgatctgggacacagagcctttgggccaagaattggatcaaatgggtgggaattcatttagcccaaaccattggtctcatctttctccataatagatacagcttattgggttaaaagaataagatcaattgagaagtcatgttcatgggagactttcaaaggaaaacaaaaatgtaaatcccaaatgataggccagtctttgtgacctcggtattctgttccctcctgatttgtctgcgtaggccttgcaggaaaagttgtggaatgtagctgcccctttgtatttgaagcagagtgatttggcctcagcagcagcgaaacaggtaagcttattcagaccttcccttcaaataggtctctgtccagtaattgtctggtccaagacagagccagaggccttcctatagctctgtctgtgtaggccttgcaggaaaagttgtggcatgtagctgcccctttgtatttgaagcagagtgatttggcctcagcagcagcaacacaggtaagcttattcagaccttcccttcaaataggtctctgtccaggaattgtctggtccaaggcggagccagaggccttcctgtagctctatacctctgctgtggcctccctaatttcaggctatgacagaagttagtgatatgagaaggagcataactaggagacacagcactcactttggactcaggggacctgggtcctagtcccaggtcttcctctgatttgctgagtgatattgagcaagttacttaaattccctggattttttctcttctataaaatgtggcagttgggccgggcgcggtggctcacacctgtaatcccagcactttgggaggctgagatgggcacatcacttaaggttaggagtttgagaccggcctggccaacatggtgaaacgctgtctctactatcatgaatctttcatctgaaaatgtagcccaactcagttaaggttgtttatatctttagcctgtaccatctcttcaacgttaaaaggtcctgggtagttcattaagtaggctt

SEQ ID NO: 66501 - DNA, 1122 bp, Homo sapiens
agccgtatctagttttaaattagttttggtctcatctgtgtttgatgtaattaataaataaatgaaaagagtttaatagcaaataaataaatgagatgcaatatgatatggttaaaaaaatacttttggagtcagagctgactctgtctagttcatgtcctgttttgttgtttattctgtgaccttaggcaagccacttaaattttgatctttagtttcctgttcagtgaaataggattaattgcaattcatattgtgaggattaagtgagctcaagtaaggaaacagccagcacagtacagtgcacatagaatgtgctcagtttacctttctcattagagcccatagtctcctgatggatgtctagactgaggcttcctgagaattgtgagcataaagagataaagagaggtaacactgggacacaggatttttcccagagctaacaagtttccatttttgtttgtacagaagttcagatttcttatggctaattgtgttggattgggttacatcttgttttgtgcacttcagaacaactgctacaattccggggcaggggaataaagtaacatttggaatcagttagttaatgtacagtcagttggtctgtattctgtataattgtcatagaaggcagaatcttcctggagaggaaacacaaatgcttctgaagtagaatacttcagggctgtctcttgcaagagaaaaatcagagaagcgaaaggaagagaccatctggccaccaaactcacacttcacagttgggcttagctagtctatggtcttggctttcattgtgctgggttcccacactttgggtaggccctccaggaccagttcaagcaacccaaacgaataagaagtgatatatatcatacattaattcttcaatcactttgagagtaatttactctttgcccctttgtaggcatctccttcttgatgtcaaagtccccaggaggcatcgttaactatcgtaacgttacctgccgagcatgagatgggaggaagtgtcatagtccagtggacggttttttccaggctactgtgaaacctgatgtgttatgccggccctgaaacagacagcttcccaagtgactcagaccttaaggtttccca

SEQ ID NO: 66502 - DNA, 2370 bp, Homo sapiens
gctccattgtctagaactggcttacttgcccaccagcaaaccagtcactggaaaatgggaatgggattgccatgatgggtttagaccaatagtggttcagctcttgggctggacctgccttttccgagcactttgctgcctgcctgatacctgagtaaaatcagggctctctcaggaagaaagatgggggaaatggctcttggttaaataaccagttcttttatctttataataaccagtttttttagatgaattaaccgagttccagaataactgggtgacttatctgaagtcatagagttagcaaaagtatatggttgagaatttccaattccagttcaggttttctgattccagttcctagtacttttcaaaggactaactttactaatttgttgatgtgcattcttatttgtttgtttcaggtgcttgaagtttctgggaagtcggcatccaaccctggtgcttcccttggtgccagagcttctgagcacccacccattttttgacacagctgaaccagacatggatgatccagcttgtatcctctgtgcttaggatgggccctgatgtgttggcaggcagctttggcatctccttctgcagtatagctagggtagtctgaattttcttttctttgcttttctttcttttttttttttttttttgaagacagagtctcattctgtcacccaggctggagtgcagtggcctgatctcggctcactgaaacctctgcctcccgggttcaaacaattctcctgcctcagtctcctgagtagctgggattataggcgcccgctaccacacccagctaatttttgtatttttagtagagatgaggtatcaccatgttggctaggctggtctcaaattcctaacctgttgcttgggctggagtgcagtggcaccaccccagctcactgcaacctccgcctcccggattcaaatgattctcctggctcagcctcccaagtagctgggattacaggtgcctgccaccactcccggctaatttttgtatttttagtagagacggggttttaccttgttgcccaggctggtctcaaactcctgacctcaagtgatccacccacctcagcctcccaaagtgttgggattacaggcgtgagccaccatgcctgtccagtatgtactttgataggcaatatagttgcttactttataggcaaaatcatttccattttttgtattcttggcagtctctggcatttttaaaaacctttggtaattgggggtgtgggtggagtaggggaatgtattttgttgtttgtatttgcatttctttgattattagaaaatcatagtctcttgatggagattttggaggtggaaagtgagagtgccagaatctggccaaccttttatacttccaagtttacttaacccagtcatctatcagatattgcagttttggtacttattttcaatgctgctaaaacctgtccaacaatgccagcattgttctcagatcacaccttcaggcactatgcctacctccgagacagtctttctcatcttgttcctgccttgagggtatgttgaaaacatctgttgtccttgtttttattttgcatggggtagggttatttttgttcatgttttcctttgagatgggggtcttgttatgttgcccagggcggtctcaaactcctgggcttaagccatcctcctggctcagcctcccaagtcactgggattacaggtgagcaccactgtgtgcagcttgtttttggctttttattttttgtgctttgtggttattaaatagtagaaagcagtccatatattctctgaaaacttgtttgttcattctctttctctcttgggctctttgccattgttttatacttttgcttttgtatcctttaccttttaagatgattcattttttttggtgtccctgggttattgatattaggcaagaagaaaggaacctggaacaatagattatattttagatcaagaatttaaattgttatatatatatatttatttatttatttttattattattactttttgagacggagtcttgctctgtcgcccaggctgaagtgcagtggcacgatctcggctcactgcaagctccacctcccaggttcactccattctcctgcctcagcctcccgagtagctgggactacaggcgcctgccaccacgcccggctaattttttgtatttttagtagagacagggtttcaccgtgttagccaggatggtcttgatctcctgacctcgtgatctgcctgcctcggcctcccaaagtgctgggattacaggcatgagccaccacacccagcctaaattgttatattttaactattacatatagctatgattctcca

SEQ ID NO: 66503 - DNA, 1048 bp, Homo sapiens
cccagaaaacctcaaaagattaattttctatttgttaggaactacaaaggcccattctcattttgtgagatggtatgacattttaggactccttttcagcagcagttaccatggaagactgagtaaagcctttctccaaacagtaacaaaatacccccaaccccacgccattttttcttctttttttttgaaacagggtctcactctattgcccaggctgaaatgcagtggcacaatcattactcaatgcaactttgatctcttgggctcaagcattcctcccacctcaccctcctgagtagctgggactacaggcatacctcaccatgcccagctaatttttttttatctttagtagaaatgaggtcttgctgtgttcctcatgttggtcttgaactcctgagcccaggcaatcttcttgcctctgcctcccaaagtgctgggattacagatgtgagccattgtgcccggccccaaatgcctcttatgaaatgcccttaggctttgattgtgatggttcactaacgtggtttgcagaaccaaatttgagtctgagaaaataatatgtacattcattgttagtacctcaattttgaaattataaaagtggtattatagagttgtagaatttttgataagggaaaggaaaacaatttacccatatgcctgctaccctaatataatgactttggtgattttggtatatgtctctcagctctttttcttgtgcatggtttttttgtttgtttgtttgttttgttttttttttttgtttgagacagggtctcgctctgtcgcccaggctggagtgcagtggtgtgatcttggttcactgcaacctctgcctcccgggctcaagtgatcctctcacctcggcctcctgagtagctgggactacaggtgtgtaccaccacacccggctaattttttgtagttttttagagatggggtttaatgagaggctgatatataaaacggagtgccaggtcattcatttgtgatgagaaccataactgtcaagtggactggatacactaaccagtatatt

SEQ ID NO: 66504 - DNA, 1066 bp, Homo sapiens
ttcagatttttggaattgggatgttgaacctgtataatctttaaatcacctgttcagcaaatcgacaaacatcgaggacagtttctgtcttcaacgaagttgatagtcaggtagccagggatagctaatcagtgaataataatacctggtactggtaggaaagagcaccaaccacaaccacagaaggcttcttggaggagctgatctctgaactgagttttgaaggatgagtaactaggtagcgatgcagagaaagagaaaatatgagcagggatataaaagcagtacattatcatgcatagcaatatactaagctgcaatatcatactaaactacaagcagtttagtgctttctagttgcgggggtaatgttcaatataggggatctgtaacgaggtaagttggagaggaaaacagaagccaggttctgcagcaacttagctttgtagcctcgagtctatcttgcttaaaaagtgaatagtttccaatccctttggcttatagcagtatgaaaaattttctgatatgtgttacatcagaaaattcaaaaccatgtaaaagaggttagcttttacttatttataactgccctatttgtggggcaaagaaacttgaggtcccagtaaggagattcatgggactatttagaatacagtcactacttttataagccttaagaagtcattgaccttaaaaattacaacattttcagactgttaggttatagacttttatgcctgtaagtctgcccatgactggtctttcccagggtaaatgcagatattcctagttagtggcagttttatgtctgatgtacttatcacctagttgcatagacttatgttatttacaccagttgagcagtttttgttcttaaagcaggtgtgataattgttaaatatcttgtatctaaatttcacatacatttaataaggctctcaagtgaaatggttttctcagtgttaagtaaggttttcatagcattaactacctaaatttaggttgttaagtagtgctagtagtacagttggagagattccatcttaatctaaacatatttgtcttg

SEQ ID NO: 66505 - DNA, 1025 bp, Homo sapiens
ctcccaaagtgctggtattacaggcgtgagccactgagcccagtgctttttttatttttatttttttaagaaatgccataacaggccaggcgctttgtcacccaggctggagtgcaatggcgcaatatcagcttactgcaacctctgcctcccaggttccaatgattcgcctgcctcagcctcccaagtagctgagactacaggcacccgccaccacccccagccaaattttgtatttttagtagagacagggtttcaccatgttggccaggctggtctcgaactcctgacctcaggtgatccacctgtcttggcctcccaaagtgctgggattacaggtgtgagccactgcgtccagccaaaaatgtaactcttaatacacatggactaatttttgctttctttgggatttgtcatttgaatttcaggtttgcatcgccagcttctatatattacggcctttttttttgctggatattatcttgtaaaacgtgaagactacctgtatgctgtgagggaccgtgaaatgtttggatatatgaaattacatccagaggattttcctgaagaaggtatttcaagttaattttagataatctgtgtttactgtattattattttccctggttaatcttatccatgtgtatggctttagataccttctaaattctgttgactcccacatcttagtctatagaccaaaattctcttgaattaatatatccagtttctgactacctccgtgtcctttggacagcaaacaaaactcatatcccctctgccttcccaaacctcctgctcctctgtgtcctgcttcagagaatggcactactgtccacctggacactcaagccagaagcctgagaatcatcaagtctttctctttcacttcccattagtcatcaggtcttatcagttctacttcctaaatatttcttaactttgaactctcctctcccactaccactaccctggttcaggccttgttaatctcttgcttggactgttgcacttgcctcttaact

SEQ ID NO: 66506 - DNA, 1124 bp, Homo sapiens
ttaggctttggagggagtgtctatgcgaatgaacgactgaaaactcagaaaacgaaaactagcttttatggaatttcaattaattacgtttatcaaaactacgcatcatgcccatttgtgggtattggatgaaaagataaatctttccagaaggggcaggggagggagaggcaattctggttggggaagttgggagaaaagaaaatcagtatctcctagtcttcgcccagtttggctcgtttggggtactcctcgaccccgcgttaccaggcccgtgaatcccactcccaccagagaattagcgcgggcggacgagcaaagtgaaacttagtagcccggaacttcgcgtgccgggttcccgcagcaacacgtaccgggaagcgtttgggcgctgcaccgcgctgcgccgtgcccgtgagtccggcgcgcagaggaggaggagaaagctgaccgcttaggccggggtagtggtcgtcgtggttttccttgtagttcgtggtctgagaccaggcctcaagtggaaacggcgtcaccatgatcgcacggcggaacccagaacccttacggtttctgccggatgaggcccggagcctgcccccgcccaagctgaccgacccgcggctcctctacatcggcttcttgggctactgctccggcctgattgataacctaatccggcggaggccgatcgcgacggctggtgagtgctgcgcggccgggatcggctgggaggagaaggggtcgtagggctgcagactggcccggccgtaggcccccctgaggtgctctgcttttccgtgcctttttgcctagctggccccatctcgcctttccggggagtccgcgccccattagctctttagaatcaagcagagccagagtgtcatttggcacttgaagaaactgaggtgcagtgaagcaggaactgagtctgtgaaggacccgaaactactctcctcagttcgtgttgtgctgtgtgcgcaaatgagccatgactccatgccatgcactactcacactgtgggcattattgatagcatttcggccttaaaacacttttagggatgtattattcacaacgaggaaaccgagcctaacagattaacagcagcttgcccaaggtc

SEQ ID NO: 66507 - DNA, 1149 bp, Homo sapiens
caaaatcaataattttgcagtcttacatggacagcagacattctaaagtgcatagaatttaacagatgttcagatgttttctttcttcctcttcttccctgccctgaaatcaactaattaattttaattcttactaaaactgaaacgcgtcacatcttttgtagtttcccagctctccccttcaccctagtagacatggataagctgcagtctgtgttctgctttgtagcttgtaaattcttctgttattataatagtatggacgggtattcagagtatttttatgtatattgtcccactggacagtggacaaagtgagaccaaaagaaggttctgtgaacttacattgtggtgagcatataaccacttacttactagaacccagaccccataactttctacacactataccatagagagttccctagttctctttttgaatttgaaaaagattgatgactgtttaatcagtttcatttctcttttcaacagaatcagctgcctcaagtcttttcccgactctttcctttcaagaggggcctctgtcatgcatattgggctccaaacttctgggctttgtacaatgctttggacaaagtgctgtctgtcatcggtatggtagcgagcattttttactcagactctgaatattgaaaggacttaggcacatggagaaatggaaaaacctttgtgttttgaatgtggctgaattgtttgttctccagtcctgcatttcagctttcaggatgaacagggggagcagttcttgggactgaggctttagtgcagtaaacagactgttttccttataaaagctccttgtggtaatgaggttattgatcctttcctggggaaaaaataaaatatgtagacactctataaaggtaatttttgccttaattaaaaaactattcagcagcagcagttaaccctgctttttttccccccttctcaccattcctattcaaacccctacttatttttagagacagggtctcactgtcacccaggatggagtgcaatggtgttgagatcatagtgcactgcagccttaaattcctgggctcaaacagtcctcttgtctcagcctcctgagttgctgggaccacaggtgcataccaccacacctggctgatttttaaatttttg

SEQ ID NO: 66508 - DNA, 1050 bp, Homo sapiens
atcgcttggacccaggaggcagaggctgcagtgagccaagactgtgccattgcactccagcctgggtgacagagtgagactccatctcaaaaaaaaaaaaaaaaaattaaaaaaaaaatttgaatctgtttatagaaaacatatttatgagcagtccacattagtagtagtattttttgtctttaattttgctattaaagcatttggaatttctatactccatcagctggtatagttcattatgaatttggtgtcctctgttgtctttccttgacctaagtccagatattcattttcagtacaatggctttttatttggattaatgctactctccattgcacgattatttcaggtaaacataattgtttaattagattttttcccttttagattagtttttagattgtaaagggaacagtgtagtgggtgataggtaaatttatttgactgttttgagctgccaagtgcgatagacacttttattaggtatttctcacaaattccatcttctcttttgaccataattttcttcatttaacagatgagacaattgtactccaaaagcttgttagcatgcggcaggcctgaattaaattgagtttttgtttgtttgtgttttgaaacagtctcactctgtcacccagactggagtacagtggtgcaatctcagctcactgcaacctctgcctcttgggttcaagcctcatgagtagctgggattacaggtgcacaccaccacacctggctaatttttgcatttttagtagagacagggtcttgccatgttggctcgaactcctgacctcaagtgatcctcctgcctcggcctcccaaagtgctggaattataagcatgagcccctgtgcctgccctaaattacattttctttgcttttgttttttttttttttttttttttgagaatgagtctcgctctatcgcccaggctggagtgcgatggcacaatcccggctcactgcaacctctgcctcccaggttcaagcaattcttgtgcctcagcctcccaagtagctgggattacaggcgccc

SEQ ID NO: 66509 - DNA, 1048 bp, Homo sapiens
tttaggatatgtctgatcttctatttttatcacaggcaacttcagagtggacgttggattacccccctttctttgcatggtttgagtatatcctgtcacatgttgccaaatattttgatcaagaaatgctgaatgtccataatttgaattactccagctcaaggaccttacttttccagagattttccgtcatctttatggatgtactctttgtgtatgctgtccgtgagtaagtctggagcatgtcattttgtatggaaggtattgaaaaaatagtacagtgttaagtagtattaacttactcccaatttaggaggaacaaagtttatatgatagcaaatgctaaaacaatgaaaaattgtattgtgctttaaactacatgtttaaagcactctagctgaatcttgtggaagaaatggggataaggtggagttacaaggcagaggtagaacaagagattatgaatgttgtgaaaagaagtagtcccaagtatagttctagggccatttctcccacccagaatagctccatatgtttttctttgcttccttgcagcaggccgccagaggcttccatcacctaccctatcttagggtatgcacacagtacatgcacagtagcgcacacgtatggattgtgctaaccaccaaagtctgcttttacggagctttcattctagtaaactcaagaaatttcactgagtgcttttagttgtttccatatactttccttcatgaagactctttgttattttaagttatgcttatattttaaatttttatgttttacaacttttacttataagttaattttaagtattgaatacacatatatagaatgtcttgcacagtgacttccaagtactaagtttcagttaatgtcagtttccattctttcctaattcttttttttctttttttttttttttttttttcttttttttccctgagatggaatcttgctctgtcgcccaggctagagtattgtggcgcgatctcggctcactgcaactgcctctcgggttcaagcagttctcctgcctcagcct

SEQ ID NO: 66510 - DNA, 1034 bp, Homo sapiens
ttttgctttggttgtttgaacaatttctagaatggctaaagcctcagtccagtccagtgacctctgtaggggctttcttgactgatgtttaagattttcagggtttttgatatgcaagaccaggcctgggcaaaggagggggtggtgactggaccaaaggttaggccagtttctggaaggtacttttgtggttacatctttggttttctctcatcttgctgtcacatgtctctcatgagttgcttgacgcaccttcacggacacctcagtccttggttctgtactgggcactgggctcagagacggggattggacctctgccaagggaggtcccagcctggtgggagacagagacatggattccagttatgctgcagagggatgagaatagctaagagggccttggaggccagaactttagacacttgaattgtggagggaaaaggaaaggcttcccagaggagagggcatgtgagctgggcattgaagggtgagtcagaattttccaggagagaagagggaaaagccctttttcagtagaggggacattgtgcaaagtagcagtcaggaaaaagccccctgctccaatgtctgcagagtctccactgaacaatgttgcttgagttcatctccacccctgccccacatcagctgagtgtcacagaaagggcttgcatgtccggctcaggagtttggaccttattctgggtccaaggggctggagagtgttgagagttctgagcaggggcatggacggaatggtgcttaccgtgtaataagctccatctgacgatgctgcatctggagagaccaaggagggatgatgaagcttgagcgggggcccagggcgtggcagtggggctgagcataggagttgtgtacacacacatacacacacacacacagggtgctttggggtgatggagataagtcaggctcaactgtgcaggagcagagatcagtcaacactcggcagaaatgttgagggtcatccgagaggaacaggtgaaaggatctgggccttttggcagagg

SEQ ID NO: 66511 - DNA, 1833 bp, Homo sapiens
gaacttagactacagtgcaagtgagtgaaagcagatgtgtgccttccctggtgatgaggctctccaggggaaaggaagggaatgcacctggcagggtgaagaactgaggacaacagacttcgagaaggaaatggtctttctcatctaggcctctgtgtggctccacttggagtatctccttcctccagtccacgcagccctcccaccttctctagcgccagcgtttcccctcctaaaggccttgccctgaaacccactcttgatcagtgcttcgtctgtggccagcacaggagtagccccaaggctgtgctagtgaaggtttgttgagtgagtttaggtggaaccagagactttgcttgctataggagaggaggtggcctctgctgtgctcttcctagaggcccagcccggttcgttggctcctgcagggcatggtgtgctgggggaagggaggggcctgcctccctgctaagctcagccctgtcccctgttccagaggaggagccaccatctagcgccctggccagcgtggtccagcacctcccattggagctcatggatggtgttgtccggaacctcagcaatgatgacagtgtgacagactcgcagatgctgactgccattagcaggtgggacgctgaggctgagccatgatcagggctggggcccctccctctcttcctctcagaagccccttctcctgggtgggccgctgggctagatttggagtcagagggcccaggccctcatgtgtgttccatcatctatcctttcttgagccctgctctgtgccttgcctggggctggatgtgggggacacagagagcctgccctagtgatgctgtcaggccaggtaccagcagtgtgaccctggacatgccagtgagctctcagcctcagtttccccctctgtaaaagcagaggtgggtggtgtcaggcgtccttggggttgggtaagagggtgagagtgcttcacgaggtgctttctgagtggggcaaacatgggaagcagagtttgggtgcttttcagctcacagagtccttgcatatcccccacctcatctgaacgtcctcctccctgtgatctagacgcacctgcctgtccagttgtcccagaatatgccgctcccctcctccctgcaggcctttgcctatgcagaccccgtccacctggcatgcctccctctgccattctttccatcccgtgtgcagatccaccgtcttcgtagggccttcctggattccttgcctttagtgggtaagagtgtgggctctcgaggtaagttgctagaggtcaaatcccgcctctaccacttcttgcctgtgcgaccttggacaagttactcaacctctctgtttgagtttcctcaactgtaaaatggagtataaccaaacccatcatctagggttgttgtgaggattaaattgggtaaaacaagataatacacgaaacatgtctagaactgtgctgtgggagacgccgttatcattgttatgactttgctgtcatggttttgtctttttctagcacagtctgctgagtctaggctgttttcctcagcactgactgcatggcagctgtgtgctcagcccgcacaggcaggctgtgttgtggggtccagaggggctgatacatgtaaagttgatggaatatcctgctcaatggtgaatacgacctaagtgttagctgctgttatctcctttaatccatacaagaaccctctgagggaggtattatccccattttacagaggaagaaactgaggcccagagcggggaagtggcttgctctgggtcacacagcaaggacttgctggagccaaagcttctggc

SEQ ID NO: 66512 - DNA, 1038 bp, Homo sapiens
aatgtgtggctgttggggaaggtaaatgggcatggataagctgagtgccccggaaggggacccgcatgtacatgtagtgactctgtgctctctgccccaggctgcacgaagaggagaaaacgggcacaaggatctgccagaaactcaagcagtccagctcgccctctccgcccgaggagcccccggccccaagttcaacctctgtggaaaaaatgtttggaggcaagatagtgactcggatctgctgtctctgctgcctcaacgtctcctcccgggaggaggccttcacggacctctctctcgccttccctcctcctgagcgctgtcgccgccgccgcctgggctctgtgatgcgccccacagaagacatcacagcccgggagttgcccccaccaaccagtgcacaggggccaggcagggtgggtcctcggaggcaaaggaaacactgcatcacagaggacaccccccccaccagcctgtacatcgaaggcctggactccaaggaagctggtgggcagagcagtcaggaggaaaggatagagagggaggaagaagggaaggaggagagaacggagaaggaagaagtgggggaggaggaggaaagcaccagaggggaaggagagagggagaaagaggaggaggtggaagaggaagaagagaaggtggagaaggagacagaaaaggaggctgagcaggaaaaggaagaagacagcctgggagcggggacccacccggatgctgccatcccctccggggagcggacatgtggctctgagggctcccgctccgtcctggacctggttaactacttcctgtcccccgagaagctgacagcagaaaaccgctactactgcgagtcgtgtgcctccctgcaggatgccgagaaggtggtggagctgagccaagggccgtgctacctcatcctcacactgctgcgcttctctttcgacctgcgcaccatgcggcgccgcaagatcctggatgacgtctccatccccctgctgctccgcctgccactggctggtggccgtggccagg

SEQ ID NO: 66513 - DNA, 1733 bp, Homo sapiens
gttcaaatcgaatctcccaggaggcttccttccagccccctattctggtaactaccaggaggcttccttccagccccctattctggtaactaccaaaatccctcgggtgcaagtgtaggggtagagatggaaggatgagaggtgaaattgaccttttgaaagcaaagctctggctcacaggccccaaactaccagccgtatctagcatatccccaccctccacccactacctcctccaacaaaggagtcaactcagttgaaaaaactggtcctttggcctatccatgggtcaaagtccacctctcctgggggcctggagaggactgagcctacggaaaggggataccttcccactcagcactgcttcacacaggccccctgcctggggctctccaaggagccttcttcacccacttccagctccacttctgcaaggttaagtcaagtgagaacgatgagaaatagggagatggtgtctccttaagtccttgatctgcctgtctgtggaatgggaggttggattagctgcgctgaggtcccatccacagctggtgctcagctgcttgaaggggagactccctcctctgtaacttctttctgggggattggggtgggcagtacctatccccagtcccctcctagcttgactttagtggtttccaatgtagaagttaacaaagtatgccccattcctgtgacaaaagcacaaccattctgaagttactggagcatgggctcagctcatcctccctctggccccttctcccatggggacatctcggcccagcacccctatcccatttccagagttcttccttccccatctgggccttcataaaatgcaggggaagccagactggtctcaggagcgctaaagcccttccgtggggggtcgtctttctgggactagccctgctgtttaggacctgggaccacaatggggtacctgccgagggggtccccaagagatccaggctgtcatgtgatttatggtggcatgtgttgtgtatttgttggctacttgtgtcttgaaatctagaattatttcacgcagaattgtcactgtttgtcaggaagagaaaatgggctagtggaagcccagtcttgagttcttgtcttgttaccatttaaaattgacatttaattttcaaatcactgttggtgcctaatcacttaagttattaatttattctgttgtattcttttttttaaattgtaacatatttatccggtgggtgggacaggagtgtgttcaagtgggtcatgtttttgctgtggtgacacatggtacaggcttggagcttgcaggtccctttctactgtggtgttggagcaggacaataaagtccactagaaatgcaccccagaaccagctgccgtgtccatcttgtcttgaggggcttggtggtggaacccgttctcactccagtctgttccaatttttgctttatttggaaataattgggtatttttcttggctgtgaataagaacaaatgctctctacctcagcgtctgttgtaaagtggaaatcatactagcatttacccatccagctttcttaggcgtctagagatgggttctgggcgtgtctgtctgctgctttcacaggtcacttagatgtgacatcttgagggtctgtgacattgggcccaaactccacaccaccatcacagcaggcagcccctggggaaggaggtaggtaaaggcttgagagctgcctcccaggtgcatc

SEQ ID NO: 66514 - DNA, 1041 bp, Homo sapiens
caggcacatgaacttgacttcattttataggcatcaagaaagagcatctttgaatgttgctgaagatgaaaaatatcttgggcatggtagtagggaggtgggagggaggtttactgttccttaaatgaggcttatcccttcctgcttccatgcggctgatcaccattgtgatgaggaaagagatgattttgagccagatctgggtttgagacctagatttaccttgggcaaatttcttaaactggttaaaggctttgagagatacaccctttcctagggtcatctgttgtgaggttgtgaggtacagatgagaatttatgtgtaagtacttatcatggtggtatctgtcacgtggtaaatactttgttttcttcctttcctggggagtttccttttctctcttcccccagtcttactaaactcctgcccatcttttttttttttttttcctcttcacataagcagtgtagcttttccagggttcccagatgagacagatataagctttccctttgttcatcttcatttgtggaattttagacttttgaagaaagatttcaaagtgataggaggaatgacacaggaaagggtagaaatctgaacaaaatactatatttgggagcagaaaaataagggtccatgagagggtgtatgcacagtgtgaataaaggcatcttgtcacttagggcaacatcattgattctcagcccatctttgttcatccaggaggccaaagagaaagactgtcttgccagttcctagaattatccacgaaaaaggggctactcactcctctttattcagtgagagctagctaccaatctcccagatagccctgagcttttagaatatgatggtatgttttgattaggattagggcagtcattctacagactttttctaggaaaaccgagcttggtaagcagaatagaaaacatccagaatgacatcagtctggtaagctttgaaggaaacaaccaaagatggtcaacacaactgcttgttcttttatttaccatttcacacctggtgcagtcagga

SEQ ID NO: 66515 - DNA, 1066 bp, Homo sapiens
cctcggactcctgggctcaagtgatgttactgtctcagcctcttaaagcactgggattacaggcatgcgccatcatgccccgcctgagcttggtctcttgaaatgttgctgtggatgttgataaagatgacctgacactgatacatgggtcagagtagaggcaagaattctcatctggttaactggtgaagatcaaatagagttggccttccaaatactatttcactcctgtctctcctgttcatggaatcttttttgataacagaaggttacagttgggtgggagagctcttgtgatcattcgtgccaatctcaaattgcccacagggacgttttgggatcccctgcccagaaactttgctgttgtttatagatgaggaaactgaaacctaaaagatgtaaatatggtttccctcaagtcacataaagtgcttttagcaaagccagaactggacccacatctcctaatccctattcccgtggaggatctctattacactaatgcattaacttcactcctgatctttaagtaagctccacgtctgtggtctctgttttaagattgtgaaatgtcataaaggtggtttgcctttgaaaataagccagaacctagagagttaatagaaattgaacagtgaaagtggagtccttttcttctctcctcaactggggagccgccaggctgtttcacttgcaccgcatgtgttccattatggtataatgatgtaattaccagtaatgctgctgctgcttgagtagtggtgaagaggcagcattaaggaaaagactagccccagttctctcctaagagccatttcagcccacttcagtctattagattgaagatgctggaaggcgaatggcttcagcacaggaaaaggtcagatttaaaagcttttctgggtttggtatttattgttgcttttttgaccttcagaaaagtcccctgtgtgtttgtccttgattcttgcctttcccattaatgcttgaaagctgtattgctgtccagaccaggtctttggcatagatgatttcctttgtggtgttagagaaagcctagccccca

SEQ ID NO: 66516 - DNA, 1022 bp, Homo sapiens
ctcccaaagtgctggggttataggcatgagccgccatgcctggacttatctgactttaaagatgcttttctggggtctgaagttgaagatttaaacctatagagtttatttttgctgtcttgtcttttttttttcagtttgttaacatgctgtgtagttctgttacaaacatatgtagtgaaagaccagcttttattagggttaattgttccttttctcatttggtatgcactagtatttagtgaaattcttccttcgtgtagtatgctttgtttctatttttattaaaacatttgtttgtattgtgactatttgtgtagtaatttatatatttaatttgtagcttgcttttcagccatcagtactgtatttcagtgacttctgcacaaacgtgatttaactataggaaatttttttgtccaggataatttacataaagtccctcacttgagaatttcaggtgacagaagtttactatatttctaaatagcaagcctattatagagtagatcagaattaatcatattcatgaacagtattaatctgttgaataatcaaaccatcaaggcagatgcattggttgagttgctgttcatggacttcctggttgaacaaaatggtcttgccattcttagcaaagaaatacctcagcatgtggcaactcatggatgtggccagtaagtgctgtgagaagtgaacaaagaatagaaaattaagcactgacagccgggcgcagtggctcacgcctgtaatcccagcactttgggaggccgaggcgggcggatcacgaggtcaggagattgagaccatcttggctaacacggtgaaaccccgtctctactaaaaatacaaaaaattagccgggcgcagtggcgggtgccggtagtcccagctactcgggaggctgaggcaggagaatggcgtgaatccgggaggcggagcttgcagtgagcagagatagcgccactgcctggggggaagagcaagactccgtctcaaaaaaaaaaaaaaaaaaaaagaaa

SEQ ID NO: 66517 - DNA, 1137 bp, Homo sapiens
gccttagcctccagagaagctgggattacaggctgcaccactatgcctggctaatttttttgtattttcaatagagatggggttttgctctgttgaccaggctggtctcgaactcctggcctcaagtgatctacctgcctcagcctcccaaagtgctgggattacagacatgagccactgcgcctggccttaatgaaacacctttgatgttgctttttatctctaggtagaaagggacaatgagatatagtaactttaagcttataagaaatgctgagaaatacaggttcctgagcaggctgttgtctacatccaaattaattttgacaggtgtttatagagcatatactgtatcctttcccttcccaaggtaataaatcagtactcatccctgccttcaaggcatttgcagactagaaagactagaagtctacatgtgaaacagaatgatgcccttatatggagttatccaggcaccaagttgcgtgaaggcaaatgctcttggtgtggaagaagttggaggggcttcctggaataggaggtggacatgtgagttggactcaagagataagggcctaggaaggaatatggtgttcaaaatgagaaagaggtggtgcacatggggtgtggggccagtaaaattccatccagagtggaggaatctgtagcagaaagcaggaagttttgaaagttcagagctggggggaatattttataattcccagtaaatgccttagatggtaggatgacatttactgataaagagcatcactaactcagtgagtctttccctcacagatggccacttcttcagtgtgaaatgtcagtgtatattgacaatgtttatgttcagaaaacctctcagtatttcaaaggccttagggtcattaagcaaatgacttaattcttttaattcactgaggccacttctttgtctgtaaaattagactaatgcttcttatttcactgggtttgcacatttatcagaataacatgtgaaaaaaatcttagcacagtgtctagtccagagtattaagtactgggggaggtggcatagggatgatgttgacttacatttattaacctattcataggaactctgaacatgagcatgggtgccttcacatccctttcaaa

SEQ ID NO: 66518 - DNA, 1024 bp, Homo sapiens
cccaaacaactttagttcaaaataaccaggtttggaggcatttgggtcaagcacctttttcactgatttgaacgaatctagtcgtatgatggccttagcctctctttcccatcttccatgtaccttcagcccatcaggtgtcagaccttaacagctttaagtaacagcttttcttaggttaggatgtgatgtgttcacttacatgactggaagcctctgccccttcggaagttcagtttccccctaactgaaactggtgatatgtgtaaccttaagcctctggggaacagtatgcctttacatctacttttcttttggggtattcagaatttttgcatcctgttgtaagttaaaactctgctagtttgcttatttcagtagaggcccgagttcattagaaccaagcttggaaagtatttcccagccccatggctgtatatttaccccaaagtagctgctgcttctggtatacatcataggcgtgttatattgtagattgagaaatcctcattataagaatacatcgagcatatgtgataaggggaaaaagtagttgaactaggttataactatttaaaacgattttttaaaaaactgacttaatttgaagtctgggcgcagtggcttatgcctgtaatcccagcactttgggaggctgaggcgggtggatcactggaggtcagaagttcgagaccagcctggccaatgtggtgaaaccccgtctctaccataaatataaaaattagctgggcgtcatggagggcatctgtagtcccagctactcaggaggctgagacatgagaatcgcgtgagcccgggaggctgaggttgcagtgagccgagatcgtaccactgcactccagcctgggtgacaaaacgagactccatttcaaagaaaaacaaaaaaacttacttaattcggaaagacgggaaggtgtagaggggaaaaacatcttagaagaagcaaaggcaaatgtttgagcaattagttttcagggatttttttcatcagccttttctagtt

SEQ ID NO: 66519 - DNA, 1392 bp, Homo sapiens
tgcggctgcggcgcctcccaagccggtctgctcgtgaactaaatacagtgtcgaagttttgtattgatggcttctggagaccgagagagttgactctcggggctggggctccgcggcagccccgagcagcttcagcccgcagggtcggggagagggcgggaaaggggggcgtaggctgtggggccgcgcggacggccccacaaagggcgagcgcctcacgccctctccttccctttctccgcctgcccctcccggccgccggcctccctccgtccgcggctgcatcaccggcagcgtcagcggcatgtgcagcccttgtattaagtgactcatttgtttgtcccccttctttccctttattccgttcgtctctcacaggcgcctccccccgaccccggtgtgacactgcagtttggtccccgtggctggcccgggtttgggaccgggcagctcccgggtgtctggggtcgggagagatcgaggctctccgcggccaggtgttgccaaccgacagtgtttactgagatcgctggaacagccttttccctctaggtggggaactggcagcctgggggaggtggaacagcgtggcgctgagccgtggagttctggctttttttttttttttttttaacccctctccccagaggatgccttgcctggtgaggtcaaagtacaagatggtgccagttactgagatttggccgaaatggtcttggggtagtcgcgggagtttggaagtgggggtaaggttgctggaaggtttcaaggtctctcatctgctccctctccgtttcccatgaaatgcccttgtttaacgggctgtggtgccgaactccgggatcactcccacagcctggaagggagccgttgcctccagctgcagtgcatcaagggagctcggaatagaccctgccctctgtcagctgcaccagtggctgtccatggggggagaggcagaagcctaccagaatttcctgtcttggctccccagatcagaatcaagggacttctggcctctggactgaggaagtgacattctgtttttcaaaggaagtgttgttgttgcggagtacaagtgtgtgtcaatgaaatcaggctcttaggtagatgtttgctgggggaaaaaaatctaaggatttagcacatgagttttgaaagtggacgtggatttataggaggaatgaagcagtgaattgttcatctcagttcggaagctcatttttaggagtgtctatgtagccaaagtataattattaagaaataaacttttttcctcttcagggttgtatcagttcgttaggaaggttgaatattttaattaggattaaggagcagtgatttactattaacaattttataaataatttaaaaactttgtcccgaagagct

SEQ ID NO: 66520 - DNA, 1051 bp, Homo sapiens
caatccccgtgctagattctatgagtgctgagacaaataggacatactccctgctctcagagactcccattctgtacagtcttgtcaaagtttactgtgtatgtgaatcactgcggagcgtattaaaaattcacattatcttactcccaccagaagatctgattcagtaggtctgtgatggaactagctcacaatttacattgttttaaacagtcaccctgagtaattctagtgtaagtattttaattctgtactgagaaacctgcagtgagattttaatatttttacactaaacggtaagtaataattatacaaatctgctcattgaagaagttacctgttttctctgcatgcttgagctggtttttatgtgtctctatcaaggatgggaaggccagcctgcagtgataccccttggaacccttgcagtgtagaaactaccacacctctcaacttttatctcttttcctcactccatttctccccaccacttctcctaatgttttcttctttctatgcaagtgttaatctcccactctggttccttctatgcctagtactgtatcaacatccaggtgcttccccttcctttctccaccccaccccccagccagatatgtcaattgtattgaaaacaacttacatctagtttactaagtacaaacttgtgctggttaatgcttctcaaaaagtaggagtgggctgtttgttgagatcaacaatcatttttttaaaaatccgatatggaaatttttgtgtcaagtttcactgtcatttagttcttgactgattttcttctgatgggttagtagctctcaacagaagattttaaaagtcccctgctcaggtacctgtcctgccgatagagctggggtgtaccctgcaccctgactcaacattgcttgtctccacatgcctgtaaatgggcttgggtggctttctcaggctacacacctgtcacttcttagtcacccagaatcaaaatattaacagctctgatcacattttctgaacctatgaggctttatttcaagagtggtgacactccaaa

SEQ ID NO: 66521 - DNA, 1065 bp, Homo sapiens
tggggtgttttggcttctgatcaatatttgtattcagtctgcaatctatgtataattaaaaaaacaggtgagagtaacatctgattataatttctccccagttaatcttcagaattaaaagatagtaaaagcgttaagaaaagggcagaaagcgggccgggcacggtggctcatacctgtaaccccagcactttgggaggccaagacaggcggatcacctgaggtcaggagttcgagaccagcctgactaacatgatgaaacccatctctactaaaaatacaaaaattagctagctgtggtggtaggctcctgtaatcccagctccttgggaggctgaggcaggagaattgctggaacttgggaggcggaggtttcagtgagccgagatggtgccattgcactccagcggggggcagcagagcaagactccatctcaaaaaaaaaaaaaaagaaaaagaaaagggcccaaagcaaccttaatcactgtattgaaatgatttagtatggcttttgtaagaaagtattttaagtcatggtcagcatccctccctgaacttggacattctactgttgccaggagccctagattggcctgtgatcaactaaggctccagttagctgttgtgcagtttggacccagcattaccataaatggagtccagcgaatttctagccattatcagcacactggatagtttctgggggacctttataaagaagacaccaggagtttaggtggtttttaaactgtcattcaggcagctggtcattgaattaacatagctcatgacttttcaaaaattttctgctatacctttactgttcataattgttactaataacatgactattatttaggcattgctttacagttcacaaacatgtttcatgtatcttattttcttagttatcaagacaatacattgtggactttgttcctttgtatcttactggtcatgaaatttatttggtttatttgttataaaaattcaaagttccttttgggaggccaaggccggcagatcacaaggtcaggagattgagaccatcctggctaacacggt

SEQ ID NO: 66522 - DNA, 1053 bp, Homo sapiens
ttctcctcactccagcattcaagcatatatttttgtgccttcaaacaaaacttcatgtaattaacacctactctagagctccctggtgataaaaagttgaatgaagcacagttcctgccctgttgtagcttataatctaatctataggatatcttttcataatgtaacaggcaaaactctgcactctcctctgtgtattgaacaatatgattttgggaaggaaaagaaaacattgtgattaacctaccaagaaataaaagaggcgtatattttcaagaaaattagtaaatctatagaaaattttctgtagcctcctgaggcaagttttctgtcataaatgcataaatataatagcttaaaaaggaaaagggaccaaagcccatgactgtatgacaggatccactgctgtttctctgggtaaccttggatagattattcagcttcttcctttccattgtctgtctgtggaggggaaagactggtctatcacagtgaggtaaacaataacaaatgattgcaaaatacgtttgaaacattaaattctaatcataacatctggtcttatactatatatagatgatgattttctatttttgaaaaacaggtatctggaccttcgtcgatttggatctgtgccacatggaggttttgggatgggatttgaacgctacctgcagtgcatcttgggtgttgacaatatcaaagatgttatccctttcccaaggtttcctcattcatgccttttatagctggaagattggttaaggaaaagcaccccccatggcagagacactgcacatgattgtgcatacagcagaatgcatgtttggattttagaaatgcagatttcaatatgtaattgttgtgccataagatatcatagaaaaaatataagtggttgtgattttcttagaaagttgagggtatttcacgtaaggatgagctcccgcaagaagaggtacttatagcaaggggactctcaaatccattacctcaattaagaaatgaagaaattgaattagtctcaaagtttcttttaaactctaaaacaga

SEQ ID NO: 66523 - DNA, 1023 bp, Homo sapiens
tcggccgggcatggtggctcacgcctgtaatcccagcactttgggaggcctgggtgggtggatcacttgaggtcaggagttccagatgagcctggccaacatggtgaaaccctgtctctactaaaaatacaaatactagctgggcatggtggcgtgtgcctgtaatcctagctatttgggaggctgaggcaggagaattgcttgaacctgggaggcggaggttacaatgagccaagatcgtgccactgcgctccagcctggtgacagagcgagactccgtctcaaaaaataaattaattaatttaaaaaaatcctttgctcttaagcattatgctgcaatttctttatgtgtgaaattaggggcttgagctaagtgatccctaatgcccccacgaactatagaaatccaagctgcttagggaggaccacgtgtctgtacttatacattcacttcctcaaagttgttttggttttccttatgcagactttttcttcaagtacttttcaatatatatacattttttatttatatttctatattagcactccttcaggatcttggtataataataccaacaatattattaatccttgtgctgtgctcaggaagaggaaggggcaagttacctacaccctcgccttttggtatggaaggagataggtttcagagatgcaaaaaaatctaaaattggcttcaggtgatggcctttgaatgccttatattaaccagtaatgaccttaggcatatttaatctctccgagtcttgtttttttggctataaaatggaatgatactatctccttcacagagttattgtgcggatgaaatgaaacaatacaggttaagtatctacatagagtggaagcttagtaaatgctagtttcctaccccctttcttttctttgttctgagtcttgctattaggtagataagcctgatgattgagcaagcttatgtattttatagtttgtaaaaactagccttaaaaaaagctaaaccactagccttaaaaaaaagccaaa

SEQ ID NO: 66524 - DNA, 1044 bp, Homo sapiens
ctcatgtgaactaatagagcaagaagccattaccatcggaatggcacaacgccattcatgaggaggccacccccatgatccaacacctgcccctaggccccacctccaatattagagggtcacatttcaacgtgaatttgggagggcacaaatatccaaaccatatcagtctatgaaataaactagaaagaaaagataaggaagagagaagagtcacaagtcattcccataggtcatactttaattataaaaagtagagtggtgccgtttactgaaatgttgtcctctctcaagtggaggaactcataagtgaacctttgtggagttctcaactgatgttttcttctggttcacttgaaatttagagctcactaaggaaggaagcaatgtggtaaaacagtcttgaccatgagggaaagggaatacatgtttgggagcaaggtaagaatttcattcctttgaagccattagtagtatctttgcaaaatgtaagacttttgcctctttcagacagcagcagtagtaaaactggctagccattatagtagccaaagtccattttcagtcattgttgcctgcagcccatctgcatctcttcaccatcacatctggaaagccctctttcctaattgtacctagtttgtttttagggccaaaatactgtgtatttcagcagttacagcaaaaaccacaaacatgtttcctatggtttgtggaacattctttttcttctgatactagtgtgtaaccttgccccattgttggtaacagcctgtgagaaactgaataaggaggcgttcaatttgtggttttcatcaatatttaaaaatactgagataggtgagaagagaggtggcagaggaagggccattaaactttttccctctttcagctttagcgtggacaaggttatgtattgtaagccttgttcctatctagcctatgttttttttttaattcagggtctgagttttattttcagtgcattgattggaatcaaagagtcagaagggagtgtcataaatagaaatcagggtttgttca

SEQ ID NO: 66525 - DNA, 1100 bp, Homo sapiens
aagggacagatcatgggaaaatgaatctaagcaaatatgcaaaatgccatatgcctctgaggctggtctccaggtaagtccctcaaagccaggtggcagatgttcagctgggggagtggcttcacagagaagaatagtcttttattctacacacgtgtaattaggaaaaagtgactgcccctcagtccttgatgagatgccacaatcaccaggtagtgttctaattttcaaaattatatcagtattacttagcaaaccagagaaaggtcagcattagtgggcattcagtaaagtacatactgtgaagtcaactcagaaaggagaatactcagccaaggggtgtgcaataaatttcccagagctgtggctaattaaccaacctgcatcaaaatagctcgagccaccaaccaacagaaatagtgatgaagggaattgccaattttccccatatctaggactaaagagaatcctagaaatttttgtcaaaattgaaagtatccatttcagtctgtcgtaaaatactttgagattctttatcatgacatattttatattaatactttgaattgtagagttagggaacatagggaagagaaatccttttatgtgtgtgatacagacttctaaggttttgttaccaaactgtttctcccatttcagtcttcccagtgtgtcttaattgaacaagtttggttaaagcaactgagataaaagtgaacgtaaatgcctcctaagtcttttggtagagtaagagtgtcgaggaatcttcattattaaaagtagcaaggaaaagacatttagggagttgagaaattatttatattgtctcacttaactaaataagattaactttgtaagattagagattacttaaaacatggtagacagaggaaaatggaagaaaagattaacaaagattaaatttttgacgttccaaattgacatctattattgagtacccgtgtggcaagcataacgttaaaacattcaaaagagaaaacaataatgtttatcgagtatgtgccgataattaacttttatccctttcttacagatgaggctgctacctctcagtgcagcagtatagtcactcatgcaaa

SEQ ID NO: 66526 - DNA, 1057 bp, Homo sapiens
cttgctcctgctcactctttgggtccacactgcctttatgagctgtaacactcaccgcgaagatctgcagcttcactcctgaagccagcgagcccacgagcccaccgggaggaatgaagaactccagacacgccgcctaaagagctgttaacactcaccgcgaaggtctgcagcttcactcctgagccagccagaccacgaacccaccagaaggaagaaactccaaacacatccgaacatcagaaggaacaaactccggacgcgccgcctttaagaactgtaacactcaccgtgagggtccgcggcttcattgttgaagtcagtgagaccaagaacccaccaattccggacactgcacaatcaggcaaaggaaaagctggcttggcagagcaggaggaggcttagactgctttggtttggactatcaaatagaaatagtgaggggagggctatgaagggatacaggcagtctaggcagattttccctgtctcagctcttgtctgaccgtctcttctctgtctgcctgttttgtctctctcatccctttaccgtttcttgtcctgtggttttttttttttttttttttttttgaccttaactatagttgtcttttttttgagatagaatttcactcttgtcacccaggctggggtgcaatggcgtgatctcagctcactgcaacctctgcctcccaggttcaagtgattttcctgcctcagcctcccaagtagctgggattataggcgtgtgccgccacacccatcagatttttgtatttttagtagagacagggtttcaccatgttggccaggctggtctttaactcctgacctcaggtagtctgccctcctcagcctcccaaagtgcttggattacaggcgtgagccactgcacctggcctgccttttttattcttttggtttttacaaaattagctataacatggccaggtatagtggctcacgtttgtaatcctagcactttggtagtccaaggtgggaaaattgcttgagaccaggaattcaagaccagcctgttgaacataggaagacccta

SEQ ID NO: 66527 - DNA, 1067 bp, Homo sapiens
tcacaataccaataacagtgattgtgtgaaaggaaaggaactaggtttctctggaaccgcaatggaagggagatgtatactcttatacatcttgattttttttaaaactatgtagacaagttacctattcacatagttaaattaaaacaaatacttgctttgacttactttaggcatgagggtgtctcatggagagaatcagtattttcctacatagtcttataatgcttagaatatattaccaggcccttactatgacctgaaagagtccatgtgatctgacttctgactgcctttcctatgtaatttcctgtgcattcttcctcttgttcagtatgctctagtcacgctgactgccctttttgttctgtgaacaagccaaactgtttctcacttcaggtccttgtacttgctgttccttttgcctggaatactcctcccaagatacttctatggttcatttccttactcggtgcacgcttctgttcaaatgtcacaaacttaggcctttcttgaccatcatatctaaaatggcaccccaaaccccctctgccttcttattccactttatttttcttcatagcacgaatagctacttgtttatttatctgtctactctctcctcacctgcatctctcgctctctctctctctgacacacacatgcgcgcacgcacattgtctccatgaaggctgagctttatttttatctccagtgcctagaattgtgtgtagtgcctagtaggtgccaagtatatgtctgttggataaataaatgaattaatggtgaattttaggaaaaagtattttgctgttgtagtcttttaatagggcattggcatatcatggattcagagaataatctttacttgcttaagtgactagcttcactgtgtatattgcaagtagatgaggagttgaggttattgaatggttacttgtcttcaggcagatcattctttcataggattagatcagccttaattcctgattattcatgacctcacagtgtgatataggagtacgctttttctggttttaaaatgaactagttagcagctccattgt

SEQ ID NO: 66528 - DNA, 1037 bp, Homo sapiens
actatgcagccataaaaaatgatgagttcatgtcctttgtagggacgtggatgaaattggaaatcatcattctcagtaaactatcgcaagaacaaaaaaccaaacaccgcatattctcactcataggtgggaattgaacaatgagatcacatggacacaggaaggggaacatcacactctggggactgtggtggggtggggggaggggggagggatagcattgggagatgtacgtaatgctagatgacgagttagtgggtgcagcgcaccagcatggcacatgtatacatatgtaactaacctgcacaatgtgcacatgtaccctaaaacttaaagtataataataaaagaaaaaaaagaaaaaaaaagatagttcaatctccttattttacaagtgcaaatacttaatttttaaatgtttgtataatacattacaaaaattaataacatgctttcactacgttgaagtgacttacatagctagtagtagaatcagatgaagtggtagaatcagttgagcccattttcttttgttttgatggaacatatgaaactctaagtgtttcagtcattatcttagccgttaaaagcttatactctggagtcagcagatcaagatttactatttacttacatgagtaacctttggaaagttattgatcctctctaaccttctgcttcccttctgtaaaatgctaattttaaaatcgttattactgctactaccaacaccactgccaccaccattattaccttagaaattacctattgttattactagattttaatttgaatagattcttaggaaaaaacctgtctttcaaaacatagctttaggggctttattgtactgtatgacacaatacaactctttctggttagttgttatggatatgaacttcatttttgcttcagagaacaagtttgtgctggataaattattttttgagctcaaggtctttcaggaagtttgtagatttttttgtaaaaaaaaaaaaaaaaaaaatccaaaatactgatgcagtattttacctgta

SEQ ID NO: 66529 - DNA, 1080 bp, Homo sapiens
tccatctattttctacactaagttttctgatcttaatattatttggctaaatgacagattaggtgtgctcaggatcaaggatcatagctaaggagcctcaaacagcttgctttgttctaacaaaaccttaacatttaaagattaagtcctcaagaaatatttattacttcatatgtgcttgatctaatctcagctgttacttggtttgaatgtgagggaaacaataagtattaaagaatgacggatgtagtgtccacttcactataggagtttaagaataagggatttttctccccatttggatggttgagctatagtcctctggaatcaagggaataaagtagttcctcaaaatctctcacctccacatttcaggggtcattcaccattgattgaaagacaggtggtcgtcaaggacttgagtgggctttgaacaaggtgaactgcaatatgtatctgacgttcttttttcttgtgtttaaaaaataaatgaacacaccttatctacatgaaattctagttttcactgttattatctagattttctgtggggtttcttgggctgcggtgtttttttctttactttgttcttgattgctgtgaaatgtagttgcctgctgttttaaggcagctgcagtagagtgcacccagaagtggttatgtttctatatttagtaaaaccataggatttgtgaagcagttgcagattccttcaggataaaatggtttctataaatgtaacttttttttttcttttttttttttgtttgtttgttcatttattgagacaggatctcactctcgcccaggccagaatgcagtggcatgaacatggctcactgtggcctccacctcctggactcaaacgatcctcctgcctcagcctcccaagtagctggacctataggcacaggccatcacacctagctattttaaaggattttttgtagagataaattttcaccatgtttcccaggctggtcttgaactcctaagtttaagcagtcctcccaggaagtgctaggattacagacctgagccactgtgcccagcctcaatgtaacatttttaatgaaactg

SEQ ID NO: 66530 - DNA, 1066 bp, Homo sapiens
ttcttactctaatttttggaagtgagtcactaagtctagtctcccctcactggggatgggggtttgggaagagggagatggagttaagaactacccgcaggagggagaatgtttggaattctatatgaaaatttgttgtctctttatccttctttattttttatttgtgtaatcatttatatcttaatagacttgtatatttcatagtttgggttataattcagtgctgtgttatttactttgatgcttaaaactgttttagtttttgttgttgggaactcattcagattgattcttacgcccctttgatacgcccctgtactttgactaattccttattctctgctactgcaagatgcctcagctttgtttgttgtttgacattcattcaccacctttatttgtttttattttttttatagtcagtaaagttacactgacatattattattcctccaaagtccatagcttttacgagcattcactcctagttgtctgcattctatgcttttggacagatgacatacgttcaccattatagtaacatacagaatagtttttgctgccctagaacttttctatgctctgcctagccattcttccttcctaaccactggtaaccattgatcgttttaccatctccatagttttgccttttccagaatgtcacgtagttggaatcatacaccatagagcccttttagattggcttcttttgcttagtaatatgaatttaaagttcctccaggacttttcatggctggatagctcatttgttgtagtgctaaataatattctgttgcctggaggtaacacaatttatcagttcacctgttgaaagacatcttttggttgtttccaagttttggcagatttcccaggcttattttttattttcccttccctagtcctaaaaattagttatttctccaaagagccctagttccttttattagaagatggtatttagaagccaaaattgggtcactggatatgtttgctgttactgagagattattgcttttaaacctttcagtagacagagtttttttttttaaactagaga

SEQ ID NO: 66531 - DNA, 1104 bp, Homo sapiens
tttgtcccctcattgtgtaataccttgaaaggacatcacctttttaaggctacagcttttggccttatattcaaggtttggataacctttcttaacagccttttagtattcatttctattatttataaagttagaagcaaggtgtctcatccctcagaagtgtcatatgtgaaatatataaacttagcaaatgtttgtttctctattataataccactagtgtattaaatatgcctctttcccagtaaagcgcagtgaaccacagaacacagtgttctgtgaaacttgacggaagattaaattggtagaatactaggttttgtattttttagtgtgccatgaagtatttgtactactgtcattcaaatgttcctagtttaatatgcacagttctaggactattaatatgcagaacataatgtttttgattaaagtatgatttattctccaataagaaattgttagtcctttttccctcagctttgttttttcttgaattcaatttaacagactttgtaaaaggcaaaagatttatgcaatctgaagagaaaccagagtattaacagacttttaaaatggagaaaatggtagttaaatttagacagttaacattttccaaaaggatatctctgttgctttagtgggtttatggttccattttaaagctttttttaaagtaaatattctatgttggaataatttttaatatatagaaagttgaaaagataatgcatagttttgtgtattctctatccagtttcccccattgtaaacatcttccatgaccatgatacatttgtcaaaaccaagaattaaatgttatcacattactattaatgaagctctagactttatttggatttcaccagcttttccatcaatacccttattctttttccaggatccaattcagggtaccacataaaacttagttgtcatgtttccccagtctcttccattctattacagtttctcaatttttcttttttacgacctgtggaatgtactctaatctgggtgtgtctgacatttttctcatgattagactagggttatttgggtattttgaaagaataccacagaggcgaaggcttgtcccgtcac

SEQ ID NO: 66532 - DNA, 1060 bp, Homo sapiens
actagtttcagctcacaacaacctctgcctcccagagtcaagcaattctcatgactgagcctcccaagtagctgggaatacaggcgtgcgccaccacgcctggctaatttttgtatttttagtagagatggggtttcaccatgttgaccaggctggtctcgaactcctgacctcaggtgatgcgcctaccttggcctcccaaagtgctgggattacaggcgtgaaaaaattaaagttttatctaacttagatttttttattctttactatctgtatcgtgaaaggcatagcctccctctaatctcttaattgggatcaagaaagaaaataggatattcagtggttatatggagcttacagatggtgagtactctcccttttcttcatgatcttcaaaggaaattgcagattgaggtaaacaggacaatagcatgccattatgattttaaaccttttaaatttctgaaccatgcttcatctttatgtattctcttcccaactttttgtctctgggattatgagtaaatagaactgggtaaaaggtgggggtagggtacaaagtagaaaatggaaaaagtaaaaggagataaaaatagattgggtgtttcagtgattgtagaggtcaaataagttttccattgttgattatattcctttccactgttcagcttactgctatttactctcgctccttgctatatattttacatggagacagagtcggacttgtgtgggtttttctatttaattctcctgagattgtgaaactgctcagctaaatttgttctgctgtgagaacaaataactggagggcaattcaaaatacttgtttaatattttcttggaaatcctcaaagaaacagggaggattttagatccgtgtggtaagaaattcactgggatacacacattaaaaaaatttttttggtagctcttggtttcccctttcttggctgtgctatttactgtcttccagtggcagaataacctagcaaaaatttttgttttgcataatagagaaaggctaggttaagttttattgcactaacgtaagttttat

SEQ ID NO: 66533 - DNA, 1037 bp, Homo sapiens
atcacttgaatccgggaggcggaggttgcagtgaaccgagattgcgccactgcactccaacctggcgacagagtaagactctgtctcaaaaaaaaaaaaaaaaaaaaattcaagtggttggaaataacttgaattttagcaccattcgtgatagagtagttacaaaaatagacactttttgagtagtaataaattcacttagtatttgtaaagacctggagaatataattctgttacctacctttatgtgtgatagttatctacctttatgtgtgatacttaggattagttgtttaaagaaccctttctgtagtactataaggcatattaagtaatagttatatgttacctagtattttgtagtgtttctttgatctgttactttgggtttgctaaaagatgttaagcctccaaataaaaaattttcgtaagtttcagttttgttaattaaaatatagaaatgtgggggaaaaatggaaacttgaacagtacttttaagacactttaaggatctaaggttatttcttggtttgagtatgaaaaatattttttgtataaccttgtttgctcataaaactgacatacttgttatgtactaaaacttggctatttagaatcctcaaggaatgagtcattcagtaaagccaagtttctgaaataactgaggaattttctctttaggcaccaattttttctaaattccagtggaagtgttcctaaaatgaattacttactttcccctcttcctcagtgagccagtagaaaagattctgctctttctttctcagtgagtcgaggttcttcctgtgagtatcagggattgttcttctctgtatggcagcgttttcaaagcctgccactgactatgtgaagtatttttgttgttgttgttttgagatgaagtctcatactgttgtccgggctggagtgcagtggtgcagtcatggcttactgccaccttaatcccccaggcccaattgatcctcctacctcagcctcccaagtagctgggactataggcatgcaccactgtgcct

SEQ ID NO: 66534 - DNA, 1031 bp, Homo sapiens
tcctgcctcggcctccagagtagctgaaactataggcatgcaccaccacactctataattttttaagttttttgtgaagatgagtctcactgtattgcccaggctggtctcaaactcctggactcaagcagtcctcctccttcggcatcccaaaatgctgggattacaggcataagcctggtagatgttgttataataaatacttattttttgagtaggttcttgctttgtcacccatgattgtactgacacagtcatggcttgccgttgcagtgatttctgttgtcctcacatatcctttactttttagcggtatgaccaatctgctcctctttgagttccatattctttccataggtctgttggtctattgattgggtatacattaatgatactttgtgtgctagtcaagagaaaattcaaagatgaaaagagaacctgctgcccaggttagaggatttcagtttagtcctgtgaggtctgatatggtagctaccagccacttttggctctgagcacttgaactttgtctggtccaaattgagatgtgctataagtgtaaaatacataccaattttgaagaaccaaaaagaatgcaaaatatctcaatatgtttttatattgattatatgttgataatatttggggcataataggttaaagtgaaatatttcatctatttttatgtttaacgtggccacaaaaagaaattttaaattaaacatgtgactcacattatgtttctgttggacagccctgctccaatggttaaaacaaataattttagcaataggatagttggtagtaaggtaagtaaagaactataagaaaacaggaagttacgtaactgagaaggttaaggaagatatcttgcatgaggtgatatttcagccaagtcctgaaagatgtgttccctaggcagaggagctggggatggggcagaattataatagcatcccagaaaagctcgttgataagaacatgaactttgaagtaagaaattccttttgaatctcaactctactaatcgg

SEQ ID NO: 66535 - DNA, 2233 bp, Homo sapiens
cttttgacactcaccaaccaaatctgttcattcgatagagtgaccaggcctccctcacctgcccaggtgtatgatcctacagttcctgccttctctcctaccccgcacagctgccaactggtcctacatcctcagcccctctgccaccaccttaaataggactttactgattccccaactttgtttttttgtaggatgagatttcctttttatcccacccccccacaccccaaacagacattgctggagggcagactggaggaaggggaaggcatgcaggtaaattactgccttgtcagcctctgaccctcatctctcagaattgttggctgagaattaacccaaggaccacaccagtgcctgatttctacttagggagagaggattggaaacgatccctaagaaactgactgagggtgagaatggccaggaggtgtgtgtccaaataaccaggagggggcacagaagatgatggcaaggcagactgggcagtgttttgtagacacagaacaaagaatcagaatttgaaaaaagaagaaaaacaaatcttcgcagctgcaactttaaagtatcacctttatagatggcagggatttccattatgcaaatggaatctaagatttcaatgtgaaatcttagaatgcagttttaccacttgcagtcttgtatttgtggtggccatgtggtgagggcggtgatgctgagctttctgcccaggaggaatgagctttcaagctctcagcagggtgtcaggcttggggatttgagcatccactgctcaaagtccaggctattctccagtcctcacggcagccactaagcccaggagccagacctggcccggggacacatctcctgagggatcccagaaagaacccagtctttcctttcccttggggtccttgttagaatgaaaacctctctatttaaggcacatcattcccagctaggtttatacacttgtctatattttactggaggaaagggaattaaaaaagaactctgcagttcaaggccctttcatttaaccttccaaaaacagcaaactcattttaaagactcattgctgaggtgatagagagaaaccttatcctctccaaccttcacattcacaaaaaccatccttgtgtacttgactgccctagacagtggtgactcttaggtttcattacgaatgtggaatatcagagtgtgggaaggcccaggcgagggccaatgttgtgtttcttaccccctctggaatgccaaaggcaaggtactaggtgacctcctggtccccaagaaaatgtgatttattctgagggcgaacagccaagggaggactagtctggagcacgctcggccgtcctggcaggagctgagcctcaggtgtctggcggtgccccagcagccctggattcacccaacaccagaatcccacttttctaaatccacctgttgttctgagcacctctgaacccgcagcttcggcaaaaggagtctgtaccaagctgcttctggatgaccaacactggagactctggccttaccatgtggaaatcattttcctgaagtctggaactaattttgagaagtttttttctcaacacttttgtgtttctaacactgtatcttgactgtgtaaataccaacaaggctgtaaataaatgcagatgtagataccttctagaaaaaaaaaagcataaaaacaaaaccagaagtgatcccgtgtagccttcgttgacaaataaagactattttgtgtttacaggtgtctggtggcctttgcttggagataaaggcttcctcttgcctgtcccagcccccgagccatcctgggtttgcacttccctgctggctgctatcaggatgacctgggagaggactcagtcctaggccccagggtccctctaaatccctccaggctgcagctctgtcaagagggatgtccagagggtctctaagaccctgaagcttgactttgcaattgcatgacaggaataaatatcacagctcctctgacatcactagtgcagcgtggctccccatcccactgctgccctcgttcagggacaggctgaaggggccaacgaacccaaccctcccagaggagggagccttgctccaccactgggcacacagagtcatccaccatgccactgccttccacaagggatgtgagccgttgcactttaaaaataaatgactgtatattcatcatacaaataattgtaactacataatacaccttggg

SEQ ID NO: 66536 - DNA, 1023 bp, Homo sapiens
ctccatgatgttcctgttcatctcctcctttctcccaaagccagatgtgagaacgagcactgcacagcaagccttcaatgtgggcaccatgtccacagaacagaaggccacccatggcaaaggcatggcagtggtggcgagggcaccagcctgccttccgaggcaaagccctctctctatgactttgagtatcttccctccaccactcagccgccaccactgagacgtaggaatgtggagggaggtgcttggtggcctttgattctggaaaaatgcttaacaaaaaaagccagccaaagagaggaaggcataagctaagcatccttctaaccagttcccaaagtcccatctgcctccatgtaccagctgatcgcagagctggactggggcaggctgggcttccaggaaattcctgaagttctgaaacagcttcccctctagagaagcccacccaatgtgttttttagtgacaggaagaaaggagggaagagctgatgtggtgtggcctgcccatatcatacaaccccaccaggagcagggcagttcccaaggtgggtgcccgtagatctgggaggccaggctggcatgattcctgtgaagaactgtgcctgtgtcgtcagggagaggcctgagccctctcagaagcagggacagcccacacctgaagagcacgcccaagctgaggcagcagccagcaggctgggggagcagtgagggcagggggagtcacagccagagctgggagccccttgttcaaggattccattcctggttcatccgcctaattaccattgtcattaccactcacaggaggctctgggagatgggaggggaagccaaatgcttccttttaagctgggcttcttagaaaatggaacttttatgggttacatttacattaagtgtggaaaatgaattctgagtctgagctattccccgtggaaaccttgttggactgataagctcatggcacctctatagccttactcacatagtcttcagaatattacacaagttaatgaa

SEQ ID NO: 66537 - DNA, 1042 bp, Homo sapiens
gcttttcagaaaagcatgggccagtgatagacaccaatgtggtgcctccacagtgcctgccagaggttgttcaacaactacttagtaacccaccactaggaagctgctagggacgcagccatgaccacacacagacgcttacaagctgcagtaaggagctttgtgtgttacactgagtttggagttccacaaaaataataagccttggtcactatccagaacaaaagcacagggagagaaggtgggttctaaataaaaatgtgacattttctgagtacttcaatgcacctggccttatgtgagttattctatgtaactcacaaagatcccacagccgtattgttctcattttacagactcgtgcctgaggctttcccagtgccacacggcaaggaaggggtagagctgggattcaaacccagatgtgcctgttctgtatcctcttgctgagtacagtgcctggcatactgtaggtgctcaaaaagactcactttctcttgtctcgcttttataacccaatttcaaagactcagaattgtatagctggaaaggtctttaaaaacagtctcatcccacccactcacttcatgcattcatttgctcgcttctcccctccctactaccccaatccattcataaattctctatgagaacccaactctgtgccaagccccatgctgtgcccagtgaacgcagggatgaatcaggcagagactaagccttcaagggatgcttgcccaggggatgacagactaaggaggaaagcaggttgccagatggcttgctgctggtggtcagaaactttcatatccatatttcttactccagattgattcctttaggcctcagcatagctatctcctaccagaccccggagaatgggattctgcacccctgtacgctggtggcacttcccacactgtactttaatgcctctttcttgtctcgctactagattatgagccccaagagggtaagtactgggtctcatttagtacccagcatacaggatagcacacagtaggtgcatgaagcatttttg

SEQ ID NO: 66538 - DNA, 1024 bp, Homo sapiens
atttcattgcatagtgggtcatatcctacagtttgaaaacccatggtgtgcaaagaagagatttcatataagcagtttttagcaaatttaaaaagatgtgcaatcacgaataagaaccaagatactgttacttctcactaaaccttacctcttagcatccaggtagactacatgcatcttcattcccatccagcaacaacaacaaaaaaaaaattctttttttcccaaaaatttcttcaagggtcctgagatgtattccagtgagataggcttaggtcactggacaatccctgaagcacttactggtggctagagggaaagaatgcactgattggcttagcctaggtcacatgccaaccccttaggtggattcaacttccctataattacactaatactccagaaaggaaagagaaggcagaatggactgctgggaaggcaaccaaaaaatgtccgctacagatatatcatgtacatcattgcactctatcttcacttgatgcttgtgaggtaggatcactgaccccatttacaaaggagaaaagtgaggttctgaggttcagagagctaaagtaactggcccactaagaagtggcaaggctggattagaactctgctctgattccaaaaccctcattcttggattcaaatacattttgtaaagaacaaaaccacacacatgaaagagattattggctgggtgctgtggctcatgcctgcaatcccaacactttgggaggccaaggtgggcaggtcacttgaggtcaggagttcaagaccaccctggccaacatggcgaaatctcgtctctgctaaaaatacaaaacttagctgggcgtggtggcgcacacctgtaatcccaactacttgggaggctgaggcaggaggattgcttcaacctgggatgcggaggttgcagtgagtcaagatcatgccactgcactccagcctgggtgacagtgagaccctgtcaaaaaaaggaaagaaagagacagaggaaaaaaaaagaaaaagaaaagaaaga

SEQ ID NO: 66539 - DNA, 1097 bp, Homo sapiens
acagctgtcatgacccacaccaagcattttgatgcatatggcaggatgaaggaagtgcagtatgagatcttccgctcgctcatgtactggatgaccgtccagtatgataacatggggcgagtagtgaagaaggagctgaaggtaggaccctacgccaataccactcgctactcctatgagtatgatgctgacggccagctgcagacagtctccatcaatgacaagccactctggcgctacagctacgacctcaatgggaacctgcacttactgagccctgggaacagtgcacggctcacaccactacggtatgacatccgcgaccgcatcactcggctgggtgacgtgcaatacaagatggatgaggatggcttcctgaggcagcggggcggtgatatctttgagtacaactcagctggcctgctcatcaaggcctacaaccgggctggcagctggagtgtcaggtaccgctacgatggcctggggcggcgcgtgtccagcaagagcagccacagccaccacctgcagttcttctatgcagacctgaccaaccccaccaaggtcacccacctgtacaaccactccagctctgagatcacctccctctactacgacttgcaaggacacctctttgccatggagctgagcagtggtgatgagttttacatagcttgtgacaacatcgggacccctcttgctgtctttagtggaacaggtttgatgatcaagcaaatcctgtacacagcctatggggagatctacatggataccaaccccaactttcagatcatcataggctaccatggtggcctctatgatccactcaccaagcttgtccacatgggccggcgagattatgatgtgctggccggacgctggactagcccagaccacgagctgtggaagcaccttagtagcagcaacgtcatgccttttaatctctatatgttcaaaaacaacaaccccatcagcaactcccaggacatcaagtgcttcatgacaggtaaggaccacggctcactcaggggcaggaccccataaagtgctcttactacctaacaatacttagtcttctttgagaaagctggcataaggtg

SEQ ID NO: 66540 - DNA, 1923 bp, Homo sapiens
cccgagaggcaaagaaatcatcagaatcacgttcaggtatgacacaggtgttgaaactatctgtcagagaatttaaaataactataattattttaaaggctctaatggaaaaggcgaacaatgtgcaagatcagatggataattttagcagagagacagaaacgataagaaagaatcaaatggaattgttagaaatgaaaaccacggttataaggatgagaaatgcctttgatgggctgctctctctggaggacacagcatgacacagctgaggaaagaagatggttaatagaaattacccaaactaaaatacagagaggaaaaaaaagagtggaaaatgcagaacatggcattcaagatctgtgggacaacatccaatagtctgatatacatgtaattggaattccaggagaagagggaaaaaatagggcagaagaaatatttgaggaaataatggcagagaattacccataattaataatggacaccaaaccacagatccaaaaagctcagaaaacaccaagcagaataagtacatacacacacacacacacacatttctagccatatattcaaatggctgaattaaaaaggagagacagaaaaccttaaaagcagccaggaaaaaaaaaaaaagcattttataagaggaacaaaggtaagaattacagcagacttctcatcagaaactgtgcaagccagaagacagaagtgctgaaagaaaaaaaaaaagaaaaactgtccacagccaggtgcagtggctcacacctgtaatcccagcactttgggaggccgaggcaggtggatcacctgaggtcaggagttcgagaccagcctggccaacatggtgaaaccccacctctactaaaaatacaaaattagctgggcatggtggtgcgcacctgtagtcccagctactcgggaggctgaggcaggagaatcacttaaatccaggaggcggaggttgcaatgagctgagatgtgccattgcactccagcctgggcagcaagagtgaaactctgtctcacaaaaacaaacaaaaaaaattgtccactcagatattatactcaataaaaatatctttcaaatgaagacatgttatagaggtatagggaggggtaagggaacctagaaaggatgctaatagcctgggcaacatagaaatacccatctctaccaaaaaaaaatttaattagctggatgtagtggcacacacctgcagtcctagctactcaggaggttgaggcaggaagagcacttttcagcccaggagttcaagggtgcagtgatcgataatcacaccactgcactccagcctgggcaacagagtgagatcctgtccctaagcaaattaattaattaattaaaaataaaaataaaggacgctgaggcacccaggcactaaaaacagtgaatagccattaccaacccccaggctgcagagcaaggtgggaaagttgaaggatatcatgactgaagtccagtgggagctgtaatgatgaaggagaagccccctagttgaagctgaaatcatggatccacgcagccactgttagagattcggcactggaggaaagaaggagtgaggagtgaggaaaaccttctgaattccagtctcttgcccgtgcctaccacggacttagcttaaccagaagtgagccagccagagtgccccagtgacacagtctgcaggggtcagctgctctgggcagagagaggacagagaatggatctgggaggtagggggaacagagaataaccagcacagagactgactggctgtgtgacatgttagccatgagtcgccaagccagggttcagccccagatctgcctgaaccctaagcagttcccaccagaggcaccacctcaaatacagtatggcagagtgggccagatcttgggaatcctgagggctagaat

SEQ ID NO: 66541 - DNA, 1038 bp, Homo sapiens
gcaagactgtatatgaagccactttggacactgttatgggctacatgggctatgggatggattagtggtgggcatcttgccagtcatttgagtatcggtgtcttcattgtcaggttcacctggagtggcccacagacttagccatcaacccaatggacaactcactttatgtcctcgacaacaatgtggtcctgcaaatctctgaaaaccaccaggtgcgcattgtcgccgggaggcccatgcactgccaggtccctggcattgaccacttcctgctaagcaaggtggccatccacgcaaccctggagtcagccaccgctttggctgtttcacacaatggggtcctgtatattgctgagactgatgagaaaaagatcaaccgcatcaggcaggtcaccactagtggagagatctcactcgttgctggggcccccagtggctgtgactgtaaaaatgatgccaactgtgattgtttttctggagacgatggttatgccaaggatgcaaagttaaataccccatcttccttggctgtgtgtgctgatggggagctctacgtggccgaccttgggaacatccgaattcggtttatccggaagaacaagcctttcctcaacacccagaacatgtatgagctgtcttcaccaattgaccaggagctctatctgtttgataccaccggcaagcacctgtacacccaaagcctgcccacaggagactacctgtacaacttcacctacactggggacggcgacatcacactcatcacagacaacaatggcaacatggtaaatgtccgccgagactctactgggatgcccctctggctggtggtcccagatggccaggtgtactgggtgaccatgggcaccaacagtgcactcaagagtgtgaccacacaaggacacgagttggccatgatgacataccatggcaattccggccttctggcaaccaaaagcaatgaaaacggatggacaacattttatgagtaagtactaaaacaaggccatttgatgattttgtttcattaattca

SEQ ID NO: 66542 - DNA, 1026 bp, Homo sapiens
gcctgtagtaccagctactcaggaggctgaggtgggaggatcgctttagcctggaaggtggaggctgcagtgagtcaagattgtaccacttcactccagcccgggtgacagagtgagacccagtcatacacatacatacatacataagtaaattaaaataaaggtatacacttgcttaagcgcaccccagattggaccaaatatcaagggtttgtagggggctcaggaagtctaaggcagtgaatttttaggtggggtggaaaaatcagcagtagggtgcacctgtcggcacttccagcccacacaaaacatggctggacctcctagagacacaggtggcaaagggttccccttagtgccaatacctcctagtgtgatagatccaacaatccagccttcaagtccactgaagaaaacactcctcccctcagaccatgccagctacaatcccctgggtgcccacttgaagactcaccatgacctatgccagtttcccagcctggctcagaggaggttccacatggggcccagcacttctgaactcctagttcctacaaccagcttcagtaatcctttccaggtggacctgttctctgaggtactagaaccactgtctggagcagggcttcataaaccttagtgtgcacagaaatcgcctggggattttgcttaagtgcagatactgattcagtaggtttggaggaggcctgtcattctgcgtttatgctcagctcctaggtgagctgatgctgatgaccacacataaggagcaaggatccagtcatgattctcaagcccacatcaggatcactcaggaagcttttcaaaataatgccgatgcccaagctccaagcccagggatctgatttcacccaccaagggtggggttttcccaccattattttctaaaatcgccacagataatttgaatgtgaggccagatttgagaatcactggtctagaactatgacagacagaggccatggttagcttgtctttatgtctctagcagctagccagctgtta

SEQ ID NO: 66543 - DNA, 1034 bp, Homo sapiens
agggcttttcagttgttctccacacatgtgtgttctcttccccgccctcgtggccccccaccctcacacagatgaagcggcagtgcatttacccaaaagcctatgattaacccacatagaaatgacaagggtgccacgatatgcaggcactttgcagcagggaggagaaaagatgtccgtctatttaacacaacaaaaggagaaaaattaggtaattaatcaggggacagatcacttctattagcctgtgcagccaactctgtaaacaagaaacccaactattcatggagcactcatcagtccaaacagatggaagagaaagatggggcatagctaggcagacaagaaaacgcctgtcttggcacttacagaatgaaattaatgtacattcacgacaggaccatgagaaaggcttcccagccttgaggctgcctggtcctctgtgtgaaatcactctccagcctgaccagcctaagaaggaacagttggtgctccagcaggttctcagcactcagaggcccctgggcatcttaaagcaccctgctggccagtgagagacacgtgggtccccggagcaaaggccttgaaactcacaaagtgccagccactttctcatttttacaatggtcattaataattattgagggctagttactacaagtcagatgttagaatccctgttttatcaatgaggaaatgaagacttcaaagtgaagtaatatgcccaagttaatacgaccagaaaattttataattcaagtctctccaccttggtgaaggcttcctgacccttcttccactgccttccccagagaaaacatagtgaaacaaaagtgaccagaatctcctgtattttaccatgaccctcttgagtctgtcctttcttgtgctgctcacatggtactgattcattcctgtgcctttccatctaaactgggtgctgcccagggccatgtctcatctgtatcccacgacagttcatggttatgtctgattcttgcgattctgaacctgggatggaaattactatcacc

SEQ ID NO: 66544 - DNA, 1016 bp, Homo sapiens
aaaaaaggaggaaacatatatgtgattatttattgattaagctctgagcttcctggcagccagtgtaaataagaaaacataattattttcatactttatggcatcagaaattgaaaacatgcccatttctcagaagagaacatttttttcctgacactgaaatctgagattttcaatgagatttgtatggatgatactgaactatgtaatgacccatgccttcaacttcagttgtacagaaaacacagaagtacatttcacatgcaggtcttggattaaagcctagcatttaatgttgaaacattcagttagtggtggcggctgcaaaggacacagccatgacccagggggacatagctgggaagagtcagaaggccaggtgctgtccagccctgctgcacattcaccatatggccttgggctggttacctggcgtttctggtttccagtctcatgtataaactgaaagagtttgtggtttgggaacattttgtttctgatgttcagtgatctttttatatattcatggtatgactttaaacccttcgtcaattaattgttttcttcggtactaaaaactttctaagatgaaccaaagtagaaaggaaaaaatgaatcactttctgccttgcagttttctaaagacaaccagaagacagagagcctgggttcagctctgatattaactgccacctggatattggcaaatctcttcctctctctgggcttcagtgtccccatcagtaaatgttggagatggattttaaaaattatagagttgtatctcttcctccattaactgtcccagccactcccagtaatatgtctggccccatgactggcaactgtaggctgtgtgtgtgcttccccggagcagactcatgtctgccttttgcttttccagcctcagtgccagcctgctgtgtcgggcatgctcagtacagaaacccataatccatggggcatcttcctctacagactccttcaggaaataagcatctttgcctcgtcccaga

SEQ ID NO: 66545 - DNA, 1069 bp, Homo sapiens
accaggcttggggttctaacacccagatcaaggcttgccctactttattcactgacttttcactgggctttcagctctgacatggttgaaaggccctaagtaccagcagcaccactgtcagctcttgtgtatcctgaaaaatggctctccacagcagtggttcatttcagcaaattctctatgtgaatcattttatggggtaaaaaaaaactgctttctaaaatcactgccattgtttggagctgcagtcaaatatttaggcattagagcctccctcaagaaatgctgagaccctttggtgtaattttctcccctttctttgtctctctctttctcatcctggttcctgctcttcctgctccccgccccttctcaaccttcccctcccaaacagctttgacttggtgacaaatggcggcatctccatcatcctgcggttcgagcgggcacctttcatcacacaggagcacaccctgtggctgccatgggatcgcttctttgtcatggaaaccatcatcatgagacatgaggagaatgagattcccagctgtgacctgagcaattttgcccgccccaacccagtcgtctctccatccccactgacgtccttcgccagctcctgtgcagagaaaggccccattgtgccggaaattcaggtacccagctttcctaattgcattccaccatgcttttatttcattttgggggtggaggaggatctcagagacagtggaaagagaaaaaacacctctgtagggcttgggtcaggtcccatcagcctgttatgcaaaatccagccaccaaaccccacagcaggcatggtgtaagggcatgaggggcacccctcttacacatggaaaacacatgagtgcctggaactgcctggcacactctggtttatactaaattctctctgtctttccactctcctggttagttcacttctgcctactttccttttccccagcctcctgtgtccctctgtcattatttctgttaaaactacttaaaataaatggttctaccaagaggaatgtgccaaaggatcccgaagagtgagcattataat

SEQ ID NO: 66546 - DNA, 1054 bp, Homo sapiens
catgaagggagcttataagtctggctaaaattctgtttgacagttaaaaatgttctatcaaggcacagatgctattcagttctgtgacagaaaaattgttctttgagtatttccccaaaaccatgggtattctcctggagagccaaaacctgaattattgattcaaaataaaccccacctcaggtgtttctctgtcattgaatgatggtggtactcaacttcatctaagtgaatgaggaacaggcaaacgggtgatagctcctgcaaagggtggaagagtcaggctttggagcttggagccccaaatctggggatgccatctaccaagagcagaacttgacactaggaaaggatggttccatgcggaatcctttcagtctctggaggagagaagagcaagctgcagcaatgggcccattcccacatggtggatttatcagagtcaagatcagatcctgcattgaggtctctcacaccaactgcccagatgaaccttagatttaactgcagtaacagccaaagtaagaagggacgtagggtgtttagtagatgtcagttcaggagcagctgatgctgtcactcatgcatttattccatcaacttttaagcatcaagcactgggctagtttctgaaaagacagaggactcaatgtccctgggccagagagctcaacaagcaatgacagtgcaatgccatgcgtgtggggcagtggaacccagggaggaagctggaattctgactgggtaaggctgtgtgggggaggtgaagtttgagctatacagtttgatagttaggagttctccatccaacaaagccaattaagacaggctttgaaaatgcctactacagccagggtgtgacagaaggaatggactagtttgaagtcacccaggagacagacatcaggcccagtgaataagaagctggaaagagagggacccacactcaatttaaaaaaaaaaaaaaaaagttctaacagtcagaactaacctaaaacagaacagtcctcctgtggatatagcaatctcctcatctctggaattgcataagtag

SEQ ID NO: 66547 - DNA, 1070 bp, Homo sapiens
ttctggcaggagatggccttcagcctgagacaaaaatttcagtcgggagacttggccattagagcatcatttatcaaattgcaggtcacaacaaacccattagtaccttatgaaatcaattcagcaggtcgaaactattcttttcaaaaagagaagtaaatttaactggaatggagtagaaggaaatagaaaatatcagtgcatcactgtaaaaagaatatgtatttcatgaaacttatttcagttacatgtgtatgtgtatgcatgaactactggataagctgtattgcttactgtgggtttcagttgaacaggattgtagaaagcattctatactgcagaaccagtgtgagcaacagcataactttccaggacaatcagagaatggagaaaattttaatgtgtctggaggataattatggtgacattattttccacatcaaaggtcagaagacgtgctctgacatttgaaatcaagatgggcttaggaaatctgtggtatatgagcatggtgagcaaagggggcatgtgggagaaagaggaacatagggaactatgaggccagaaaagtgggttaggggcaggaactgagaaagatctgaccctcacccgttcactaaccaagttccagcatttcatctcaatcaggacctaaaactggctctaaacaggagtgaaataaccttgattccacctaagtcttagaattccattcacaccctatagaaaggcacaaagcttccaggaattttaaaagcaagagttttcaagagtgaaaaatgatggaaaagagaaatgaccatgtatgcaatgtgattttttatcagcccactgtgaacctaaagccatatgcaagcgtcagtggcatagcagtttcagaagagcatttgctccccaccccacacctccacccaggctttagacagccttcaggaagccctcaagagggcgagcagcagagatcatctaatggacttcaaataaacaccaacttcctgacagctggcctctgagcaaatttattattgaattatactcctgcattttcagaacaagctgagctgacaggg

SEQ ID NO: 66548 - DNA, 1066 bp, Homo sapiens
tgggaacccgggaggcggagcttgcagtgagccgagatcacgccactgcactccagcctgggcaacagagcgagacaacgtctcaaaaaaaaaagaaaaagaaaaaaaagaaaaccaccctggagggttagttcaaccatacaagattcccataggaaggcaagccttccgagaattaacagaatcatagaacacgtaggaaatgattgaccatgagctagaatcaacaactacaacatgcagaaggatgaccactcccgagaacttaacagtctgaaaaaggctataaaatgaatacacttttaaatgactaaagagagaaaacgatatataaaaaccatagaacaagacaatatcaagaaagaaacaggtggattttgaaaaattccaaatagcctattcagaaattttaaagtaagataatttatgacccgaagaacaaattaaacagcagaccagacacaaatgatgggaaaataagtgaagtagaatagagatttgaagaaacaaatcaggatagaacgcggataaaaagatggaaattaaggaagaggttgagtgacatgaaagctagaagatcctctaagcatttagtagttaatttcctgaagactagagagaaagggagaggaggatattcaaagagctcaaaaccaaactttgcagaactaatgagagacacaaatactaattaaacggccatggtgtggcctatcagttcctatgtggagcaggcatacatgctgggtcccatgcttgcagtcagagtctcagtctaaaagttcctctctagaaaatgtttgtctcattgtcacaagacatccaagggaagttttgtgcttcacgcttggctgtagagacagattggtgagtctaaggaattaaccatccttctttttctcccctattgtgcatatgaagaaactgaggtttagagaagttaagcaacttggaccaagtcacacagtttgcatgagaattgggaactggggtccaaatccaggtagtttgcctggagagagggctctcttaagcaccatatggccaccgatcacagaataaaagg

SEQ ID NO: 66549 - DNA, 1412 bp, Homo sapiens
aatgagagcagagcagcctggctgtacctgcgttgcactcacagacagccctagttagtgtttcacaatggcgatcacagctcctctgggtgcagggcccttttctaagtgtagctgtagacaagatgttaagaaaaagccccaagccctcttcctcaaagcaaagacagttgtttaggagaaaataagacaaaataaatgaaaagcctagggtccaataaaattgacctactacaagagttggaaaaagtaacaccctttagaatgatacccagaagtgatgaaggaagcaaggaataaacagaaagatgtttcctttgtgctaaacagccgccagagataagaggaacacatgagaatgaacaagaagcaaggatcaggcaaaaagctccattggttagattctgataggccaacatccactgactccggctccagaatcccggtcacttttgaaagaggggcttttagatgcagaaggtgtgggtttcagccctgtccctgccgcttctgactgtgcgaccctggcaagtcctttcacctctctgagcctcagttgccttctctgtaaagtggcaattcctaatgatacctacctccctgggctgctgtgggcattcgtgtgctgatggatatgaaggcattttgcaagttggcaggtagcgtgttagtgtgtgtgatggcagttgactctgggtgatcagacctcaaccctgtactttgtctttcagagggttgccctgggttgtgcaatggcaacggcagatgtaccttagacctgaatggttggcactgcgtctgccagctgggctggagaggagctggctgtgacacttccatggagactgcctgcggtgacagcaaagacaatgatggaggtagggctctggcacccatgggctccaggcggctccagagggtgggaggcccagagtggagaatggatattactgagctaacaggccaccaacacaccagtcatccagtcagggggacctgcggggcaagcaaaaaactgcacatgtggcttagggatgagtgcatatcacaggtgttccatttgaatcaattgaaattaactaatgtaaatgaaagtaattgatatccagcagccactatagaagagaaggcatatggaagaaagaggtttctaacaattcaacagtaggatgagatgtctggcaaagttatgggtccccctcactggagatggataagaagagaccatctaattctttatcacagaagctgcagagggacgcttctcccagggaaggaggttgagttacctttggtcaaggtctcttctcctctgattctggaggttaccctcactgcacaccagcagacaccttttgtaatagaaatggcctttgctttgggtttttttaaagtgctagacagtcaaagcc

SEQ ID NO: 66550 - DNA, 1098 bp, Homo sapiens
aggcaaatgtttcttggcaaaatcaaggtctgacccaagccctcatctggctgatattttggtataatggatactaattctaaaaaaataattcagagatctgtgtcatggaagctcaggtcttgtcagagtagagtactttactgttcaaagatgggccggattttgttcattgcttcccagttgctttggtagagactaaagaaacaatgtttactcaacaaatatgctgaactcctaagtggtaggaaatatgaataccacataacagatatggtccctgctctcaaggtgcctgcagtctagcagagaagacactaaaaccaataattccaacaaagtgtgatgagggttatgacaggggagtccagaggctaccacttagcaagtaaccaccccactaacttggattgttggggccttatagattgcggaatttaacatgagggtataagaaagcgtctgaaggtttttaaaagcaagatgataactaggtcacatttgtgatttggaagttcagtctggccctattgtgaaaggagaattgaggggggaccattgagaacaagaagaccgattagcagactattgctgtcatctaggtaagagatgatgatggctttgtctagggaagtgaatatggagagagaaaaaaagtacaagaggaccagtaagagaaacataaagaaatgggccatttgatatatgataagtgtattgcatagaatccatgccacttaactaaaaaataaataccttcaaggattctgaaagtcttctaatcatacctggtgctagctgcaagggggacttcttcataggcctaagcaggagattgaagataaagtggtcccttgtcatttaaagggcatcatttcttttgaaaagctttgttagcccttctctaaactttaaaattacattactttgactctagcaaatgcctggtgtgagtctttccgaagggattattaatgtcacgtgggctgtctgaattattgatgagtttcagggtttgcggaactagcctcagtgggtaaggacgggcatattgctttaagaaagtcagcaagtcatcctggaagagccttcctcatg

SEQ ID NO: 66551 - DNA, 1519 bp, Homo sapiens
aacgtggggcacaatccctttgtctgtgtagcatctggcatggttatgtggcaggcgatattgcacttactggatcctaccttaaatgtcctgtcttttatctccctagctcactatctggatagggtagttaaaggtatggtcttccttcctctattttcctgttgtctttgtgtgtgtgtttgtgtatgagtataaaagaagaaatgtgtatataaaaatgtatatacaccacataagcatgatgtctggaagctaatgcatccccagttttgtcgcagcatccattgcccaaaggggatgggttttcggtcacaaggtggttgatatacctggagtgtcattctccccacaagatgctcagatctgtttgtgacaataccattgtacttttgtttttccctccccccgccccacatacatacacctttcactctttccaccccatctcatgtcaccctgcccatctgttatggcccctggtccaccagaattaagatgctggcaaccagggtgggtggcctgagaaaggaagagacccaagagcaagttaagaaattttaaggactactttctagtactactgtgttcattcgtccaacgagcatctatggagcacccactgtgtactaggcacctgcgccagggtctggagacaaggggacaaacagatccctgacctcagggagcagatggtctgtttgtttatttgtttgttttccttttcagagaaggcctgactttggtaagttttgtctttgaagagtgttccctagaggcaaagtaattccttccattttaaacatttacattagttgggtggtacctgattttccaaataggccacatagctctaagaacaagtctcagaataatcagatatgtgtgctctgaaaagactctaagctccttgaggagaaataccatgtcatattcatctttttgttctcaggccctaacacagcacctggtacaaaatgtgtgctctgcagatagggacacatattctagagtcagactgcttgggtttgaatcccagcttcaacactcagggaactaagtgaccttgggcaagtgatttaacttctcttctcttgctaacaggacccacctcataaggctagtatgaggattaagtgaagtaacaaatacaaagtgcttagtatataggcaggaattatgctcaataagtatgaattatactgctttatcatcatattcttattcttattctcacccttaatttgaagaaggacttcattagctaaattaatttttgaaactgtaaaggaaaaggctaaattggcttttaataagagatagcaacagctgttttaaaacttatggaaagggttttggggaaacataactgactaaatgcttttcagctaggacagctttgccaaatacagcaaaggtgtcgcataggatccaacagatggaggaagagcaagggtcttcatatttcatgtgctggtcctcaactgacaataaaatcattccagcaagaaagagtagt

SEQ ID NO: 66552 - DNA, 1011 bp, Homo sapiens
agtcttcattgtttttgttttgaagcctaacattagtttgtatccttggtccctgcccctgcaacatccctgggttttggccatggaataccttacatttattaatattaataataataatggcttctgatttttaagtattcacaacgtgccgagagctgcactaagaactttagctgcattattttatcctccttacaatcaccctgtgaagcagtatgtattatttcctcattttcaaggacctgaggcttaaggtcacggaacttcaaagaggtagagcaggaatttgacactcgatttttccttaccagctgcttactctgcagcccttgcacgataaagtcctggttttccactgaggcatctgctcctgtccctcctggagactgtgccctgtcgtggcagctgcactcagagtccctcacctaatctgcccagcctccaccctcaacagagccactccatcacaatggcagccactgcaggttgtgctgcgtcatgttactgtgtgcaccttgatggcttctttatatcggtgtcatcctcccttacacttgtcctggaaaccccttagtgagaagtggccctggtcatctgagggggcctcttctttaaactctgctttcccctcaccttcccttttctgcatgactgaggatgaaccaacctttcaacctcccagcccagaagaaagcccacacctatctaaaaaacaaaaacaaaaaaaaaaaacaaaaacagaaacaaaaaaaccagagcccagagagggcccattctgtttgctgtctcttgcttacagagtcctcagctcatcttaccaaactccaaaacgtttgcaaatgttggacaaaaatgttataagataaacgcatctcatcttagggaacctctcccttcgtctagtcacacatgactcatgttggggcttgtgggcaggctgttttacaggcagtgttttctggatattcatcagcctggccttaagaatgtcccttttattttgatgcc

SEQ ID NO: 66553 - DNA, 1055 bp, Homo sapiens
tgtgtgctgggcattcactgttttaggcaccgaggatcagacagccccacagcctggtcaggaaatgagacgcctaattattcagcatgagcagagctctgattgttgtgtgtacagtagggtttgggagcacaaaagcagaagcagtgaacttggccagtaatgggatgggagaggaaatggagaaggttgtcaccagccagagatctgtgagccagaccctgaaaggggactgaagggaggccccctggtggccaaggaggagagggcagtgcaggccaagggaacagcgtgtgcacaagtagagagcatgcatgatcagctggacagtcgcggctcagtccagctggagatagaagctgcaggggtgggtggcaggaaagaaggccagaggtaggcaggatccaaacctcggagcccgctgaatgctgtgccgaaaatcttggcttaaaataattgtcaatgaacattgactgttgccctttcagactccacatcagatctctttctttggctctctcaactcaatctggcctagattctaccttaacacagtggaaccctccagaattcacactcagatcctctaagctttcagtttattctctattaatctcctcccctacccaaagggaaagagaatcacaaagcataaataataacaataacgactagatggatatggcgctgaaaagccctgttatcaaattaggtcacaatcgacagcaaaataaactcaatgctttaacaaaaataagcttaaagtagcaaccgggttaaaataattaaagctctaaacatagcagttgcactagagctaaattcaattttatttacgaggcaaaatataattacatttaaatttgagggaacagaatttaattcttattaatgacagaaagactgagtgagatgctttaatgccagagaaattgtcttatgttcatggatgggagagaaaattagattcagcattgagcattctcccctgttacaagtctcatttgtgtagctagaattgttccttctctgagaagcattagcttctcagtcca

SEQ ID NO: 66554 - DNA, 1092 bp, Homo sapiens
tgccagccagccagaagccctcctggacaagagctggcatcatttcacctccttcaagccatcttccctagggagcaggcctgctgggctgaatgcctcatcaacttttgcataaagtgggtacactcagcagcactgctgagcagaacaactcctcccatctccccttccttgtgctttagttggcttttcaccctcttggctcagagctgtctcagaaaagggaaagaatttaatctctttgagatggtccttagaattggaaaggctcacctttctttcagagcttaatggcttctaaagattttagcctctgtggcattttccatggtacgctttcaaaagccatcccttagactcatcatttgtccctgttggttctccctcaggtcttccttccccacccttacccccatagcctctctcctcagcctcataaatttattcctcatttccactgctatatgagctctctccagtcttgtctcccataaatgacttttatttgagagggccctctccctatattttattccttagggttgctggctcacagaagcaatacatggcagagattttgcctgtaaaatgctcatgctgcgggtttatgattcttatcatttgattgcaattgagttttgtggaataacaggtggagatgttttagagattcagtggcacaggtttggaggtaacacgtgcagtcagcaagaattgcatgaaatttggagtaggaccaggctagattttcaacactaagcttaagcatagactatggctaatgacacctgccttgcagggttgttttccaaatcagatttcacatgtatatggtggctgcattcagtaagcagtcaataaatgaagtagttttatatagttttagaatgcatgattagatttaagttatccaaacagtccttagactctaacaagtgtaattcttaggacagtttatacagtgaaggtttggagccagaaggcctggacctgaatctgtgtaaccgtaaacaactcacttgctctctcagaggcgcagtttccttgcagtttctgaatctctctaccatcccctttccccagccccaacac

SEQ ID NO: 66555 - DNA, 1037 bp, Homo sapiens
caaagccccagcccaaggatattatcatcaccagagaccctaccccagacctattaaattggaaactctggtgggtagggcccagcaatccatgttttaacaagctttcagatggctgacaaggataaagtttgaaaatcacagagcttatacaggagtaaactaatatttcctgagtatcttttatgtaccaggtgcatatatatggtggttttatttttcacaactgtgtaaggcaaatagttttctcatttcactaataagtaaactgagactcagatacagtgacttctccaaatcacaccctcagaagtcacacggttggaattcagacctagaccggtgtagtgactctaaaggctaaagccttcccagtgctcctcgagaataaggactatgctttggatcctccctcctgacagctttaacacagtggagtcaatagagacttgatcaacaaatcaatatttttgtccaagtgtgatacatttgcgagtggctggagcagcattttgatttttgaatactggtaggcatgtttgaaaaccagagtttcagttaacaaagccaaaatagataccagttggaatgtactggccctggcagcatcctctgcagtagtcctgactctataattgactaatctacaggcaaaaggaatgggatcagcatgtgatatagtttagatgtgtgtccccatccaaatttcatattgaaatgtaatcccctggtggcccacgcctgtaatcctaacactttgggaggccaaggtgggtggattgcctgagctcaggagttcgagactagcctgggcaacattggtgaaaccccatctctactaaaaatacaaaaaattagtcggacgtggtggtgtgcgcctgtagtcccagctacttgggaggctgaggcaggagaattgcttgaaaccgggaggcggaggttgcagtgagccgagatcgtgccactgcactccagcctgggcaacagagcaagactccacctccaaaaaaaaaaaaaaagaaagaaagaaatgcaat

SEQ ID NO: 66556 - DNA, 1050 bp, Homo sapiens
tattatggttcctggttaaatgtttgaaaaattatctttaaaatcactaataaaataaggtgcaccgattagttagcattgttttagaagctttgtccaagataagatatgacatagaaacaagaggctgagaaaaagtcatcgttatttgtgaagggtgtgtttgtattcctagagaaaaaaaaaacattaactgaaaaactattttacttaataggaattcagaacttgtaactggggcacaagatagcttttccaaaagtcaatagatttcccatatacctgcaacaaccacttatgaaatataatgaaaaatgccccagtcaaaaaaaatcaataaaaattaaagtatcatctgaatgaggactacatgtgacctgtgtgacaaaaactgcaaaattttattgagagctataaaacaggacatgaataattaggaactataacatgttcctagatgggaaggtgaaatactctaaatatgtcaatttataagtttaatggaatgtcaaacagaatcctaaagggaattgaagagatttgattgcatggctaaagacttcatctggaataataaacagatgaaagtatggaagaaattacaggaagaagaatcatgaaagggtactcatctttaaatatcttaatatatcataaatccttaataaatgagaataggagtcaagcagattagtgaagtactacaaatattaccagttacatgtaaaaatttattatttgaaaaatgaagaattacaaattaatggagaagagaaggctggatcaataaatgtttttgcaataacttggaaaagcatcaaatgtaacccgagtctgcaaagtggcattcagtgagatggatgcagttgataagacacagagaaggagttttagcctgcagtgttggcccactatttaacattggatgaccctccataaaactacaggtttatggcttcccttaaaaaattagaagaccaaaattcctgtgagaacaaggccctgccccctttggatggaactcatactctgtaattcacccatctccac

SEQ ID NO: 66557 - DNA, 1618 bp, Homo sapiens
tctgaagtgtctcttcgaacatctctaacatcacaaaaaaaccgcttggaaccaggatacccaggaagtccttcataacaacaaataaaatacagcctgttgacttgatgctggtctttcagtgtgctaagggtggtcttcctaacatccctagagtctctcctgttccttctcaactcttcaggaggctgatgtctggcaggaagttagggtttgtatttttcacatatgagtgtgcttaattactaaatagaaggagtttgataagctgccttccttgcttgcatttgtggtgcccccagagagctgtcaccctcctaatcagtatagaaatggccgagagactttactcatgacaccctgcatggatgcttagcacagggttgggagcctgggtggaatttccaggtatggcataggcttggtgtgtgaacttgggaaattccctcagcttgacccattttagcacagatattatatttaccctcatccaaagacaaaggaacattttgcagaaatatttcctcttttcagaagtaccttttcctcatcttccccagcccctaaccctgccctaagcacaaccccccatccacatatcagcctcagaatttggcttccaatgtatacacaaattagtgagctttttaaataccttactccatcaagtcatgcttcccactgctgggggactcattctgagttggaaaattaataacactttgttcccccatcctttctattttaccgtgagccccttaacacaccaaatcacagagctattttcatgtgaccacaaatgattatttttaggatcaaaatatatcttaacaagctgtggaattatgcagtaaacagatggcccttggggaggacccatactgctttggaagaatgcatatttttagcagaataatttgagcatcgctggggggaaaaaaaagttctggacctttttactcctccatgtggggagggccagggtggggaggaagctgacagcagaacattatagagaaggatgtgaggctaaggagagtcccgggtgttcagatgccctggtttctcgtttcccatgtggctaaccgagatgtctttgtcttcccttccctctatcttggtaggaaagcccagtagtttctttccagaggacagtttcatagattctggagaaattgatgtgggaaggcgagcttcccagaagattcctcctggcactttctggagatctcaagtgttcatagaccatcctgtgcatctgaaattcaatgtgtctctgggaaaggcagccctggttggcatttatggcagaaaaggcctccctccttcacatacacaggtaaccagaaccccacataccctgttgatctgcatgggctcctacctcaaatcttaacccaaagttaagaagcccaatccagagccttaagcctgaagggacatttatatattttatagcccattcattcatgtagtccctctcagacccaccctttcagatgagtaaggttatatcactggggctttctaggaggaaagaattctaggaaatctcttaacagcctttctgctattactcagtctcctaagttaaattatccaggaaatgtgatctaga

SEQ ID NO: 66558 - DNA, 1870 bp, Homo sapiens
catgtataagtatatctggaggaggaatttctagaattggaagctttatgtcccaggataaagggtatgtgtattttaatgttgctagcttttatcaaattgccctccatagattttgtacattatattctcacaccagtaaaatatgggaatgcttgctttccattctctgccaatatagtgtattttcaaccttttttatctttgccaaaccatatgtgaaaaatagtatttcagagtctaacttacatttcttttgctatgaataatgccaagagtcttttcatatgattatgggctatttgtatttcttattcagtaaactgttcatatccaatgcctattttcctactgagttgttggactttggttattatttgtacaagttatttttgcgttaaggaaattaacattgtcataccaattgcagtttttcccccagattgttatttatctttcgaagcaaagaccaagacctcctgagactccccgatcctgcctactcccagttccaccagactgtgagccccttgagggcagggtctgaaccttgatcctctctgtccccagtctcctttgcagggctggcactacaagagcttccttttggggctacttgttgaactgaactgaatgcctgtgttcccccaccctgcccacctttcccttatggcttgggagtcccgtttctgcctccagcagaaaaagatgacttttctcattgctcaccacagccatgcacctgtttggcctaaactggcacctgcagccgatggaggggcagatgtatgagatcacggaggacacagccagcagttggcctgtgccaaccgacgtctccctatacccctcagggggcactggcttagagacccctgacaggaaaggcaaaggaaccacagaaggtagggttgctgcgttgtccgtgttgtgagtcctctgtgtctgcctctgagctgaagagccctccataacgtgcgtgcatcatgtgcctggctcacagctccatgctctggcgctccctccatccttccacactccacgccagctgtcaagctgccagtccacctgtgtcttcatcgcagttccttgtcactgagagttcgtgggaggctcaggaagggctcatggtgctcagcagaatcccatcccatgccttgagggaagcattaggggcttcacactgctggggtggccatctttgtgtggggtgagaggagctcttctgggcaaacctcatgggacagttgggcatctgtgggagtggggtatggggaggcaggtagatggggtgttgtaatggaaagattcttggactcttgtggtttaatagaaacaccagtttaagtggtctgtcatttactaaacgtgtgaccttgagcaagtcacttatttgcctgagcttcagtttccgcatccgcaataataacaataatcattagtgttcgtacagcatgtttgttttaaaactttttgccaaaagcatttcacatttaattcccacagagatcctgtaagataattattttataattattctagatatagaaactagaattggtgcaaaggattgcactaattaagtgatttggccagagtcacacagccagtaaatggtagagtctgggatatgagcccaggtctgtgactccagggctctcgctatctccataagcttccccacctgacttaccccaaggttacaaggccctgaaggagatgtgggtgtgaaattctattgtacaatgagacatggatatttcctatcaatgatggaaatggtggtggcattgggtttgctattcctgagtgggatatccataggcccatgttctcaatgtcttagaaatatttctaacatgccatggac

SEQ ID NO: 66559 - DNA, 1064 bp, Homo sapiens
caagcaggcaagcctgggccttgatgccgagaagactgacagtgcatgttttcaggattggaagagtttgggattatagtctcgtctctgcaacctgttagccatttaaccttgcgtgtgttaattagtcttgttgtgccttagtttctccatctgtaaaatggggttattaatacctcataggattattgtgagagttaaaggaattattgcttgtaatgctctcagcctaatgcctggcatatcattaagtactcaataaataatagttttatggctatcttaattttaattaaccttctgagccttaatatgcacctctgtaaattcagtctggtgagattgccatgaggattaatatatacaagttcccccacatactgcctgtcacacagtaaatacaattactatgggccttcatctctctgaagatccttccctgtgttcttctagcccccctagcgggtcaggcaccccctcctctaggccttctggtcttgctgaagagactttgttatttgtctgtcttccctacttggctgtgagctcactgaagcaaggactctctgatttcattctggctctccagaatctgccatggagtgggctttcagacagtgttcaccaagcaaaggagtgaatgttacatccagggtgtcatgagggtccagggacttgagcgcttacttccatgtgtggggaattcagatgggcatcagaagaggggagcctgaaccactgacaaggcccaagcctggaatcctaaaatgggatttaagcagatattttgtgctagatcacaaacattattggagatgaacttcccagccttctcaagcatgtatatctcaagggacaatgttcattcttttgcgccttatggtctctttctagattgtcgtacaagactttttagcagttgctaccttggaaaaatatctttttttttttttttttttttttttttttttgagacggagtctcgctctgtcgcccaggctggagtgcagtggcgggatctcggctcactgcaagctccgcctcccaggttcacttcattctcc

SEQ ID NO: 66560 - DNA, 1052 bp, Homo sapiens
aaaggtgcccagaaaacacagctttcttattctattactgcaataatagcagtttattctgtacaaattaggtttcagttccagttcccctacaacttgccttgtcaccagttttcagtgccctccagttaaggtgacattcctcctctgtattggtggtgggctcacctgttccctgcctctgtggctgactgcacctgatcctctggctcgggaccaactccgccatgatttaaagaaacattgagcagcacccatgaatccttgctgaaaggcctccttccctataactttgcatggcacagagaaatgattaactgtgccagaatccattctccagaaaacacttaatttgggagtgagagacagtagccctgattattgcagccaagtttttccagagacaggaggaaaagcagtatatttacttgattaaaaattacccccacgtagtcatcagtgggatcctgacaggcagttttatagcaatcatgcttttaaaagatgtttcatctattgggcaaatatctctagttcccattaccaaagtctgtcagctaatgggagcaggtgagggccctcaatttaaagaaattggcaactggcatggaagggaactaatagggaacatatagaaagaagaaaaaggcagtatcacagagctggcttaaagttttcagtagatataggaattagggaaatcagcatagcaaaatgacagtgatgatacaactgccatttactgagctcctggtatgtaccaggcatagttctaagcaaattacattatctcattcaatcctttgaggtggatattatcagcttcattttacaggtgaagaaactgagattcagacaggctaagtactttgcccaaagtcacaaaaccagtaactcaacaagctctgagtgcttttatagaaagacccaaacacagactgactgtgcctgtggcaagttgcttactggcatctacatggtttttgtttgtggggatcagttgctggtcaggcagtcaggatatgaaaggatgggggcccatgctttgtccc

SEQ ID NO: 66561 - DNA, 1098 bp, Homo sapiens
gcaggcagctagattgatcatgcccttgagcctagagttagattttgttcacagcctccagtgggaaagaaaaaatgccagtatcattaattgtagtgtggcctccatttcatcacattgtctcaaattttaccactcagatcatctgtagaatggagtatattcctcagacccctgtgtgtgtctcagcctgtgtgtggcactgtgtatataagcacacacttgattccaactctctttgcaaaaagggtatttgagaggagatggagtaggagggtaacaaagctttaaatgaaaattttaggataattagcacttttctttacctagaagctgaaaattcttcttttctaccttgtttatgtcttctgacttttctgtagtgcagtaagtctattaaatagcactatgcatacacctaattgttgaggtctgaaactgtgtgggtggtttcacatataaatctttgtaacagtctgtgtattaaacacagactgtattacattaggacatttgggtgttctttcattcattaactattaagcaatattataataatgccttatattttcaatatactttataatctctaaattctaaattctaaagaatcctcattaaatttaattcttacaagagcctgggagatggttttctattatttccatttccacagatgaaaaaactaagagtcaggttggttaagtgacttccctgttgatgcacagctggtaagggccagagctgggagccttactgtctctctacagatctgttccactgggtactaagcctggtagagaaatcagcaagggacaggaagcacaggtatgcataccatgagggcagtgtttatgggagaggggcagaaataatgataagggcccagggctgagggcagtggctacttttggctgggagtgatggtggaaatcctcacagaagaggcaatatttgaagtatgtcttgaaggatgggggaattttttcttaatagagaaggtggtgaccgttcaagcagagggcatcgtatcagcaaaggcatggaggctagatggccaggcaggctcaagagacagagaaatccacacaaagtgag

SEQ ID NO: 66562 - DNA, 1080 bp, Homo sapiens
gtgggcgcagggtcacaagtggctctgagaccaaaaaaggctgaaggattcctgaagagagctgcccatcacctcctaccccacttctaccaatcagttctttctcaagagcttagctcaagtgtcgctacttcagggaagcatctgtgagcctctcctgctgagccaggaacccagttctatgcctttatggtgcttgtggtgctcctcacaattgctgctaaatgactgtgacgtggatcgtttaatatctgtccccagcattagattatgagctccatgagggccgaaaaaatttccgtcatacttagtatcatagccacagcttcttgtgccgggtctggcgtgatgttgcatgtgtccagcaaaagtttgttcaaggaaagaaaggagggcaggatgacaagatcagaacccaacagatgttgcaaggcatggagaggggagaaagaaaaaggaaagaatagaggttccaagttctcacagagatcaaaggtggaaagtgtatatcagtgagtgaaaaatggctgctcgaaactatgtggagggaaaaccagaggagacaaagccagaggcggctgctgaaacatagccggcacggggcacaggctggctttgccctaactgctcatctgctcctaactacttatgactcaagcaagaagtgtactcttcccagacctcagtttcctgacccatgaatgtagataagaggctgctgtggagatgaaatgattctcaggcacctagttcttaatagtaagagccactcataaatgaaatctgcctgccccttccccctggcaaacaagatgtgttgaatttgagggccaagcagtttctgagtttggaaatgtgtcaaaaagaagggacccacatttactcatatattcatttttaataataacagcagcagctgcagaaacaacacactctcctaggggttggaggccctgggggcaatttaaagcccccaggggaggcagcacagccatggttggtcaggaaggacccccaactgcatctctgggtgctccttttacaacattgcccagggagtatggaaaaggagttgatttt

SEQ ID NO: 66563 - DNA, 1133 bp, Homo sapiens
agggagaagggaccaactcgctctgcagggctgaagagggaagaaaatgaacgttttccagtttgcagagcctccccatgatagaagagtttgacagtgcccttcctggcaatggaagtattcaggcagcgggttatggggtttgtcatttgatcattcatttgcttttaatttgaggagagtttaagaagctgggtacaaaagtgagggcagtgtgtcaaggaatggtactaccccctggctaatggttctaggataccatgaaggggcatgaaggggcaagggggaaggaggggttactagaacctggagaagttagccagctgagagtgctgcttgacatggatgtatggtcttcaatagaggcatggcggtgagggagccggagaacggaaatctccacctcactctcttcccaccctgacaacctcctcctggtggtggaacccaaccagaagtcacagctcaagggaaccattgatccaggccatgtggaccagcctcccagggcacagagcagggtgaaaaaggatagagagtgagtgtggaaggcagcgggatgacatctgtcttcccctgtgtcataattcctttccctagccatgcacagggctctgactgtgctcttagggacctaactaggattgaaaccccagccactgctcagacattgtcccttacctttgcacccactcagccaccaggcccaggccacttccttcatatcagatttattgagatataatgtacatacagaaaattaacacattttaagtgtactactgtatgaattttgacaaactggtagagttacgtgaccaccaccacagtcaaaacacataaccattccatcacccccaaaagttccctcatgcccctttgaagtcaacccccctctcattctcagcctctggcaatcactcatctatctattctctgtctctgtagtttcaggcactgtttttgagaaatatagtaaagaagtgatttatttactggctttaaaatcagatattacctaaaataatctccaaactcagatatttcagtgttgttgagaaattttttaaggtatcatccagaattcaagatactggggcaaacaacagaaacattctgcggttttctgtgtg

SEQ ID NO: 66564 - DNA, 1049 bp, Homo sapiens
gtgctcagtaagactagcctttgagatggggatctatggcataagtgtcatggattgagtcaatacaactaaatgacaagttggagaggctgaacagcaggtagcctctcctgttgggactgtgtggctgcagtgaggagcaggaaggaggtggagcaccctgggcttggagggaaactggcaggaaagcacgtctgaaggtagatgtctggcaaggcagtctgagggtattgtgggaaccaaggtccagagttaaaccatggtcaggaacccagggaaattctgactgagaagcagaaggtcccagccagcacagagagcagagaacgctggctgagggcgcacagacacggagcagtgctcacctgaccctgggtgcaaacacagatataaggagctcctcccgacctctgccttgatacagcagatggctccccctgtgcagtcttctgatgaatttgtaacacagtctgaccccttcctacttctgaccccttgctttggtcttttcccaggaaagatattaatccaaagagatctgtgggtgttgtgtagcatctgctgcctctatataaatcagcctcttagtaaaggcattggaagggagattggcttaaccctagaggtcctttcctgtaattcaaaggcttaaggtaggttgggccagcttgagaaggcctcgaacccatgctaaggaattctaagataattctgcaagcaaaggggactttttcagcacaagcccagtaaacagaaatagaactaactggcagaggccaaaaaagacagtgctgcccactgtgaaaaagaacttggtaaccagcaaagtcactgtggctgaacaggggctgtcttgagaagtagtaagaggtgtcactaagaatgattaatacaacatgggccatcacatgttcaagagatagagaagtggttcaagcatggatggggtttgagtggcataagctgtaaggtcaattccactcaagattcttgaattttataaaaataagtgaccaggaagatgacagtcctgcaaagagggaggtccc

SEQ ID NO: 66565 - DNA, 1041 bp, Homo sapiens
gccaagctgtggaggagctcctgacacctagtttggtcacaaccatgtgctttgaccataccccgctgccctcatgactaggctgtagggtgcagttgcctgtctgtcccccgacacagctttcaccttggacttgggaggcagcagtctggcttctggacagagtgctttgaaggcatttgctgccattggctgtgtgacagccactaggggactaatggccatggcataacttagtggtggtttcttggcttcaacaccaataaaaccccctttaaaaagaagggtattccaatcctcagttgagatacaccggcaacagaagcattggagggagaagaacaattttaagtctcattatctccagggtacacaacaggattttagatcctttccaagttactgtaataattttagagaataggaagtttattccccaagaaacagtatcccagccccatccgttcccaggaaaaggatctcagtgccagccttctgttgagttggttaacaccttctgccttgccgtgggtgggttttcccatgggtagggctgtcccatccgtgttcagtggaaacgtgtctctgtgtgccctgttccatggtctagtccgtagctctccttgttcctgtcctttcccaggtctctgtggtgactctctctatccaggctcctctgcatgcttcttctactgccgcctctggcctccaggtttgtctgggtgcctggtctgtgggcagcccctgacaccctcttgctgctctccatctgcaggcacttcctcttcaagcctggaggcacctccccgctcttctgcaccacatcaccagggtacccactgacgtccagcacagtgtactctcctccgccccgacccctgccccgcagcaccttcgcccggccggcctttaacctcaagaagccctccaagtactgtaactggaagtgcgcagccctgagcgccatcgtcatctcagccactctggtcatcctgctggcatactttgtgggtaagcacctcttcaccccagctccccttg

SEQ ID NO: 66566 - DNA, 1042 bp, Homo sapiens
cttccctttgtgtatcctgaattcagcagtattcagcacatatttattgagtgcctgctaccatgtaccacatattcctctagactctgggcacatagcagtgaacaagacagataagacttctgccttgtggaacttaaaatgcattaggaaaaagcacaataatcagataagcatatatatattggatatgtgtgtgtgtgtttatcacttcctaatcacttcctggccccttgctccggtattgctttatttttcatcagaaagagagagagagaaagagaggagtgtgtgtgtgtgtgtgtgtatgtgaagtcctgaaaaatcagtacaaggggccagggagtgattgggaagagtgggctgggagctattttagttagggtaagaagctaatagttgaggaggggaggaaggaggttatattccatgaagatattttcaggagggttctgattcataaagatagttgagggaggcagaggaaagccaaggtttagcttgtttaagaaacagcaaggagaccagtgtacctgtagcatagaaaatgaggcttgagaagtactagaggccagagcttataggagcttgtgggccctggtaaggactatggtttattctaaaatgcttatgaagccattggagggttgagagcagagaagtgatatgatccaaattacactttgggttttgtaaaatgaacaattatccccttctgtggatgcttagagagattgggtcacctgcccagggccagtgaatgatgattatgggacctgaagctagatctgtctggcctcagggcctgtatgcctcccattgggccaccaggcctcccatcagcagggttatctgcctggtgatggaaatagagccactctgagggatgtccacacctctgaagctcctcccaggcactggggaagactttaggggcttgcacaccagcagaacagactgccacccaggccgctggcccagacagtgcttcacgactcaccaaaagaggaggtccccaccaccactgcatactcagcactgt

SEQ ID NO: 66567 - DNA, 1029 bp, Homo sapiens
tcaggggctagtccaaggcctccccacatgcttagagggaaccagtctatcccctctttaagaacagcccaccacttagctgaaggttcctctccaagtactcaggaacctctttcctgagaggcagctcagggctgtgaggtcagagagatctggtttaaatcccatcttcacctaatttttcctgtatgctgggcacttaacctttctgggccttagtttccatatctgtaaaatgaggtaatagcacccaccagtgtgagggtcaagtgaatcaggtgcccacacttgagctctcagcagcagtgagcaggagaccctgcgtgactatgacccaaggtgggctctgcagcttagggtccccatcaagaaaggtgggcatttgtttctcagaagaactagacacctagagttttggggagtgggtggataggagatttgaggggaggttcctttaactggaagtcagggtgcctgggttttagtttcagctctgccactgacttgctatggtatgggtatgagggcagggcacatgtctctctgggcctcagtttcctcatcaatcaaatgacaccaagtaatttgacccagaactaagtttaaaagtacagaacaagactatttcgttttttcttttttttttttttggagacggagtctcactctgtcgcccaggctggaatgcagtggcataatcgccggctcactgcaacctctgcctcctgggtccaagcgattctcctgcctcagcctcctgagtagctggggttacaggcacccgccaccgtgcctagctaattttcttgtaagagacagggtttcaccgtgttagccaggatggtctcgatctcctgacctcatgatccacctgccttggcctcccaaagtgctgggattacaggcgtgagccacaacgcccagcagaacaagactatttcaaggcggtagtagcattctgaatagccagaattgtcttcttttttttttttttttttttttttttttaaggccgagtctcgttggacc

SEQ ID NO: 66568 - DNA, 1079 bp, Homo sapiens
cactttctgtttctcaaacacacctggtgccttcacagctctgcagttttccacaggaacacctttgctaagcacgtaaggtgctaagtgcttttatgtctctggtctcatttcatcttcacagcagttctaagacaccagcattgtcctcttttcacaagtgaggcaaccgaggctcagagagatcatgcaatttgccaaaggtcaggcagctagcaagtgtcaagcccacggggatccggtgctagagctgacagtctttgcacccgccaggctgtgagctccctggaagagctttaaggctccattggcttgcgggggacatgcctgcctgggcattcaaaatgcaggatgtttgttcactctttcacttgacaaagtgaggcaatttgtcaggttcttttggtaacttttcaggcaaaaaggctcaggtgaagacagctcttggctttaacagagaatggcttgagggtgctatttctggtaggcctaggaccagggagagaagagaaagcagctgtagagattgggataagtgcttggcttgtcagaaagataatctccccacacctgtgccctggaaacacaatccaggccctgagatgcactttcatctgtcaccatggcatccccagggtgacctgcccaagcatatccaagccagtggggctcaggttacagggcccattctcagggtccttgagtcccaacaatgcctgtttgtcctttggtactgccatctcccaggaggaatgttaatgggatggagaatggaggggggctgggaggaagaagagactgacttcagtctgagcctgctgccctgtcagcctcttgagtgagctcatccgtgaatgtctgctagtccttccaagagacacttaaaccatccccaggaaagaggaattcgtcctctgctcttctagaccagaccatcatcactcctaagtggggatgggggtcctctgtttaatgtgggacttagcctaccccttggcagaacttatgattcaagtcaagaaatatttccaaaaacagaaaaactgaaaatgacttagatgtctaatagtaggaggttg

SEQ ID NO: 66569 - DNA, 1116 bp, Homo sapiens
ttctaggaaggaagggctgccatggcaaaggccagctttacagcccactctccatccatccccttccagctctcagggagcagcccttgagcacgctgcattttcccggggtttgatgtgggaggagacaagcaacataacctgcaggcaggtgtgctggaatcaaagagggcctgatcacacctttggacagcagaacagatgagcaaatcccattcctgagcacctacagtgtgccaggggcttcgcctttctcattccattgagtctgctcagctgggaggctctagagcagaagagctaagagtgtgggtttgaatgttggctctgtcattattagctgtgatctttagcaaatgcttttaacctcggagttttcatttttcccttatgtgtaaaacagggataatattaataatacctacatcattggtggtattagaattcaatgtgaaataatatatgtgaagtacttagcaaagtgcccagttatcgtacagtcttaataaatggaaatttctatcattgttgtcatttttctggttagtgttttactcaacagagcctaagaaagatacaataacttgcccaaggtcacagagatagtaagtggcatttttgcatcccaggtgtgcctggctcttcacaatcttttctcactcccaccagactgcctcccttatctaacagccatctctccctttcttgacaaccctcaggcagccatagggtctaagggaacctctaaagcagatcagggatttattctccccccgccctgcactataccctaccctgctgcacagaggatcaagctgcatgcacattttgggagcagtttatgacccctggccagaggcccctgaatggaaaccgctgagttgcactccggctctctgctctgttcagatgcctctattgggccctgtgtggatgacaagatgatgcatgaggtctggctaagcagcttatttgtctgagctggtgatggcctttgtcctgaggtgggttaatggtaaggggcagtggccctttaaggcctggacaatgggcaggcttctcaggtcatcaaatcactcagtggaatggccctgagtcccttagagccccctcaga

SEQ ID NO: 66570 - DNA, 1041 bp, Homo sapiens
gtatggcagaagagctccagggtgaccagcttgtatcccctgatcaggtgctgttagacttgagccaaggtgcttgccctctctgtccagcagaggccagtcagcttctttgcaaggaaacccaggaaggaattcaaacctctaagaggtggggcaggatgtacatgaggtaacctaggatcaccttaatagccccaggatttcctgatgtttggagaagagaggaaatgaaactgtttccccacaaataacactgtaggttttgtgttgatttggcaaacatttatttataagtgcttgtgtggtactaaattccaggccagattctgaaaaaggaggcagaggttcaaagagggataagacagtctatgggctctggaaccaaacagctttgaattacatacaagctttattgctgtgggacattagataagtcacattgcctctccaggcttatttcttcaagggtcaagtggccattgtagtgcccacctcatgatgagcacccatcacagtgcctggaacacagaaggagtgtggtaactgttagtcattgcctggtcccctccacctgcctctaggggatttacagacagcctgtctgtgaaagctcccagcacactgcttggcacttggggatgctccaagaaatgtcagatgccatcttttctcttgggagtacatcattatagccgaaggtggcaaaggcggtaggaacctagtatgttctgtgactgaggaagaagcctctactctgcctaagagaattaggaaatgcctcctaaaggaggcacttacaggacttgaagaaattagtgaggtgtgccagacagagattaccaagggtgttctgggcagagggaacacatggacaaagaacttgaggtggggacaagggaagcctgccccagctcttttaaacctgagagcctgggctgtaaataggtgtgaaccttggaagggtatggaaggccatgtggtgaaagtcacctgagctcttctgagaactggcttgagttcccccaccaaatgacaatgaag

SEQ ID NO: 66571 - DNA, 1040 bp, Homo sapiens
tcacactactgcactccagactgggtgacagagaccctgtcaaaaaaaaattaaaaattacaaatgaggagctggaagtatttttcctaatatcataaaactaataggaggtaagtctgtgatacaaaccccaattctgttgaactccaaagctcattccacaagtgcactgtaccccaagaatatactatatactttcatgtaggagacagatacagataaatagaaatatagcagagcagatatatcagaactgaagacaaggttaattcagagaaaggaatgcagaatgttcagccctctagtactgggtggtcagtggtgtcagggaaggcaggctctcaaggtgaatcgggaatgctggcttaaaagattgtacggtgaatcatagcctgaatttttaggtaaagaaaccaaaacacagaggaagaagccacccagaggttgtaccttggtcatttatttctgctgcttcaattcttcttgctgaatttctaatatcaaccagccaagtggcacacacatcaactctgtaaaatgttgtcacataaagttaagctcaggggttaaccttaagagtcatggaacctggggccaggcacggtggctcacacctgtaatcccagcactttgggaggtcgaggcaggcagatcacgaggtcaagagattgagaccatcctggccaacatggtgaaaccctgtctctactaaaaatacaaaaattagctgggtgtggtagtgcacacctatagtcccagctactcaggaggctgaggcaggagaattgcttgaacctggaaggcagacgacgcagtgagccaagatcacaccactgcactccagcctggcgacagagcaagactccatctaggggaaaaaaaaaaaaaaaaaaaaagtctgggtgtggtggctcacacctgtaatcctagcactttgggaggctgaggtgggtggatcacaaggtcaggagttcgagaccagcctggccaacatagtgaaaccccatctcaactaaaaatacaaaaaaagaaaaaaaaaa

SEQ ID NO: 66572 - DNA, 1048 bp, Homo sapiens
atgctttgggttttcttccccactggttggttttttgcctggttcattggttacacgaatccctgactgtcactctaagatgctatggaaggagctttagctgtaggctcaggaggcctaggctggaagcccagatccacacctcactaggtctgtagctttgagcaaatggcttcactttgaacattattgtcctcttcccagggctgatgaaagatcaaggaagtaaactcataaatttacaaatgtacattattatgtttattactattatttattaaggttattttagtcggaagcatgtgggcatagggttcagcagaccaagattcagcacccagactggtacccaccggctgggtgaccttaagccgcctctgtttgagcctccaagtctgtatctgtcagctggagaagtcttcacactttcaaggggcatgagggttgattaagataatttacatcaagggccttccacagtgctggacacatagtaggtacccaattaatatccctgccctcccaccctcccacagttgctggtttccctcagaatcttcctatctcttgcccctttcctttgtacctaatacccccatcattcctccagtatctgagtaggaggctggactattagattctggtcttactccatcttgaggcctggaattttgccactgtataaattgaatggagggaggaaaacatatatatatatatatgtgtgtgtgtgtgtgtgtgggtgtgtgtatcccaaggaagtaataaatgacttgaaaacagctatttggaaggactttcttagtcaaatctcagtaccaaagtgcagagcccaagcctccctgttgaagagagcactctgtgaccacagattattcaaggtctgccataaatttcagtgactccttggtcacgttggccagcagattttgacagtcagagataatccagcttgctttgtgcgtttcctctctcccacatcccatggaaactggcctttccatcagcccaatttcagcctccagaggtgtgaatgaaccatctcaca

SEQ ID NO: 66573 - DNA, 1039 bp, Homo sapiens
ccggtggtccagattccctcatgaggaaggggacttttgtaacttgccagtcaggatcttccaactgagacacataaccacagtgtggctagctgagcaaagtcaggattctgttaggagggcagtaggtattgctatgcaaccaagagtggctgctacaaatggaagataatataattagctctacttcccccaccacaggactgtcgtggggatgcaatgagataatgggtgtaaaaggattttctgaatcatagagtgttctgcacatgggatgggttgttactatccttatagaataattatatttctgttatagaataatagatgacacttgaatgcagtcatccatcctgcttgtggtgtgctttcttgttcatcatcccctcctcgcatacacacacctgtcatagagatataaaaatcatcagcatttaaaaataggccagatacttcatagtaatgaggttatggatgtcagtgctctctgcaaagccgtatacatgggggagagattattgtgggatataacatagatttggaaatcagtcacaggttccaatccagcttctacacctttcatgccatgtaactttagatacattatttaatttctctaagcttatttctccatctagaaaacaggaataataatctctttccaaaggtttctgtgggaattaaagataaagtatatcaacaccatacctggcacagagcaggtagcaaatcaatgacagcaaacacttcagtagagctctcatagaactctttaagcccctgtacaaccctgtgaggtaggtactattatcccttttctataagtaaagtaactgaggctcagaaaactaaaactttgcccacggttgtacagctactaagtggtggagcgaggattcagactcagacatgagttcatgttctgaccaccctgctaagccagacttcgctactgttactattgttgatattaatggcacaaaaccatttccactgctgccttcctataggaccttgggctcattctgtcaccttccag

SEQ ID NO: 66574 - DNA, 1028 bp, Homo sapiens
gggtattgaaggtcaaagaaatagtcaagcaaaggccagaggccaggaaagtgccaagtgcctcgggaaaggtcacagggagctaactcctcagacccaggccactgtgtggtcagtaactgcgagagctgccctggagacccttgcaggggaccagcaaggacaatgctcagggctgctttaaaaaggctgagctcagagactttgccagagcatctcagagaataacaagtttccaaagggcaggagaaacagggatttagcactaatgggcactgcagggtctgggacatctcagctgggcatcaggaaataatttttgacgtggagagccatctgttgcgctttgtataagcccttctgagggatgtgcataagtacaggcctggctggattgttggatgttgcagctgggtggaaaattggcagcaagaagaggaacaactttccagtgagtgtgaatgcatccctgggccacagggcctattgggggtgtgaggagagccagaggggcagggcccagcatgaccacttgagatgctgtgattcccggactcactgcaggggaccctctgagacttgcgcccagggtgtcagccagttgtcaatcacttaagcagacaggaaacaggagcccagggtgagtccatggactctggcctcatccctgaggaagaggacaactcctgattactggttttcagaggaggccacagccgcgagtggacctggagctaatgtgggacaaggcctccaagcatgtattgtatctgccttgttagacaaggagtgtcacaagaacaggggtggctctgctcactcaccactgggtcccagtgcctggcacatggtacttgccaaccagaagatgcaaggattattactgattaaggcaagtggcatttccttggagggagactgaggatgccaccctctccctgccccacaagcagtctgcaaagcggatattattatcctacttatcggttgaagaagcaaaagcctcagaatcattatgcaaccaaact

SEQ ID NO: 66575 - DNA, 1011 bp, Homo sapiens
aatcactgccaggttacagtctgatctcacctatgcagcatttatcatctctctgggccctgtgtcctaacagcactgctataaaacaagtattcagatgcagaacattattgctcatgtgtatttctttttaatatcctttttctaattatgcaagttaacacatggtagttgaaaaagtcaaagaacagagaagcatgacaagtaaaacaaactgaaaatccccggcatgaacattttaaatatttatatgatttttattataaaagtaataaaatcacatggttaaaaattcaagcgctgctaaagggtgtaaaatgaaaagtaaaggtctttagcatcaacacccatcctgtcgttcacagttttatatgtatctttctaggaatttctatacagactcctatctgtgtgtttgtgtactcctttcaaacacacatggaatcgtatactttatttgctgctctgcaagttgtttttttccactgaacagtatatctcgtggattactccctcgcagtatatttagatcatcctcattctttttaacagcttcagaatagtccatggcatagggtgccccggggttttctgtcttccctgtttcaaacagcgctgccatggagattgtcctctgtgccagcggcagggtgctccggtcctattgttctcagtgggaatttgaggacagacattcagagcaggtgggaggccacagccaggcgaccccaagctgagcagaagagactggagactcatgatgcgaagtcagaacacctgggttccaaatacagctcagccactctgtctgagtaaccttgagctgtcttctttgacccatgcttcttcagctataaaattatgggttagaacaaagtgactcctgtacctctaacatatctgtgagtctaaaacttaaaataagttctaaagtgaccctgggacccaataaaggaggccaaaatgccaaatcatctttttttttttttttaaacaaagcctcactcctgt

SEQ ID NO: 66576 - DNA, 1129 bp, Homo sapiens
ggcctcccatgtgtttgagaagaactcttctttggcaccttcacatcgcaccccttgttaatattctctctgactacaagccactgggaaggtggaaccatgccccggcccttacagctggagccctccacaagaccaccattcttctgccccagggtcatcccaaagctgcaaacccttaatcactgcactgtctacagtgtaccataaacatgctgtttcctagagaagggaagagaaggagcctcaccttgactccatgctaaccttgattcctaggccccaaagcagcactgcttgggtccactatttaatagcttcttcagcttcccaataaggctcagagctgaccctgggcccaggcaggagagcaaaccttcctatcccttctgggtatcctttgctgtgtaacaaactatcctaaaacttaaaggcttaaaataacaaccatgtgttatttttcataattctgtgggttgactgggcagctctgtaagttctgctcagggtctcttatgaggctttagtcgcatggtggctggagctcttggctggggctaaaacatcgaagatggctttactcatgtgttctgtgccttcacagggtcagttggaaggctggcaccgctgtctctccatgtggtttttccacttaactagcttagacttcttttcatgatagttggatctcaagagtgttccaatagggaggaagcataggttactagttctcttagggtgtgggcccagagctagcatctgctgcattcaattagttaaagtagtcacagggccagccaggattcaaggggaaagaaaataagccctagctcatgatgaggttagtgacaaagaatttgcagccatctttaaaatccactgccattccccctagtttttgaggctgttcctaaggaaacagtcctccttgcggctttcttctctccacgtaaatcagctgagcaaaggagcagctaaggagctgatgaccttacataagcgatctcagtttaggctcaatgggaaccactccactgatctcttatgagtcttactgcaattcagccaggtaggttttcttatcccccattgtgcaggtgaagaacctaaaattcagagagcttaagtg

SEQ ID NO: 66577 - DNA, 1015 bp, Homo sapiens
catgctaccagaaccattggccctccccacttacctgctgccaagagtcactacttttacgacaatgccaccagccatgggcatcagctgctgctcccactgaccttgtaagccaagttgccaatcctcatagcaacttcaccctggcagaactgtgctggccaaggcgtggtggacagaacaagcccaggatgataacaccactgagtcccactgttcttacctaaaatatagcagtttttcaagcataatcacttcggagatcattatatgccttttgtcaatttccagaaaattaaaatagttatttttgtcaattttgtcaaactttacatttccttttgagaagagatgatttgtcaacctcctcatttggccataggccaaaatcccccctataatttctaaagtcctcttaaatctcttttgattctaacaacgtctaggtgagactgacagagcaatgttgttagtgccatttcaaagataaagaaagtgaagctcagagaggctaagtgacttgcccagtgtcctccagcttgaaactgactgagccaggttttcagcctggatttctgtctttcagtgcttttctactgtaccatgaagcctgggtgtggttccattgaccactgagcaaataagctaccttagtcagcttggggtgctataacaaaataccatagactagtggcttgaacaacagacagttatgtctcacatttcttgaagctgggaagtccaagatcaaggtgccagcagatttggtttttggtgagggcatacgttctggctaatagacagcagccttttcactgtgtgttcacatggcctttcctcggtgtatatacaccaaggaaagagagaagagagagagaagacttctcttttcctcctcttataagggcactgatcctgtcatcacggtcccaccttcattacttcatctaaacctaattacctcctaaaaaggctctaccttccaatgccatcacatcatgggtagggcttcaac

SEQ ID NO: 66578 - DNA, 1005 bp, Homo sapiens
tccaccaatttaaatgttattcttgttcaaaaacaccttcacagaaacatccagaataatgtttgaccaaatatctgtgctctgtggtccagccaagttgacacataaaaattaaccatcacaagaactcatcttttaagcttctaagaaaattcaatgttctatgtgctttttcacattcagagttttctgcaactctattctttgtaacaaaagatagcaaagtttctaatgtaggccttaaggcctgtgcctgtatatctaaatttggtggatatatatcccaggcctgatgcaccctatgtggctttgggtggtgattgacttaacctatctgagcctcagttatctagtgtgttaaataagagaatcacgtctacacctcatagagttttggtgaagattcacaggaatcagatattaaaatgccttgtgtgatacctgaccaaggttctgaactcagtaaatgagcctgccctgtactttcctgccttcttagtattgctagagcatcacatttagatctgcgtatatcatagctatcctattatgtgtttggggtcatgaaaatgaatactccatctttatagtttctgacactgaccatcaaccaacttgaaggtatcccaataggtaaggtgccacccattttcttggggttgcaatttctaactgaaggtagaaagggaggtactgagtagggggtagaaagggaggtactgattagggaggggaaaagagaagtggtgaggaaaacattatgactgcctcaaaaagcaagtattcccctcccaggagagggatagcttcccatcacctggctactgtaggccatgttttgctgaaccagaaagcaggtagagttcctacatttctttttgttggtgatttctaatataattctgttgtggtgaaaaaaatactttgtgtgatttcagactttttcttgacttagctctcagcttaggcattgttagtgtatagaaatgctactgatttttgtac

SEQ ID NO: 66579 - DNA, 1009 bp, Homo sapiens
tcacctttatggaaagcaacttggcaatatataacaggacactttaaaatatgtccatcccttggccccattattgtgtttctagaaatctattccaaggatctcattcgaaataggaccaaagctttatgttaccagatgttcatgatgtcattatttataatcacaaaaaaaaatcagaaaccagctccatatcccacagtatggaaaatagtactaccactttatggcataccaagctaatgtaatattataaagttacttaaaatgagtcctacaaagaggctttcatggcttcaaagtgtttatcataaaatgttaagcaaaaggtataaaactgtatcatagctatgtcaaaactatgtcaaaaatatgtgtatatataacaaaatgttaatagtgttgtgtgaatgatgtcactacagttcattttcctttttttctaaatttttattattctatgtttaaaatacatgtttctaaagaagggaagtaaaagtttgctggcagccagaacgagtaggacccatttgtctttgcaatcaccagggaccgcctgctaaggaagcccgttaaacccggggtggcagagcccttgtgctgaaatcgctctgtctctggagcatattttttctttgctaaggaaattgctttccataaaaccagctctctgacacctctgagtaccagggaaccatgcaagcccactttcctggggacattctctaatgggtaactccatcacgttccagcttggcgcttccaacgaatcccagccagccataaaaatttttagcaccctgcatgcaagactgattccagcggcctcataaaaatcccattcactgaccaagagctgcgggtttgaaactctcaagtcccctgctgttttaaacccagtggcttggcgcattgctaagtgatgcctggtagaactccaggcatcaagtcaagacagggatccagggcagaactggtgggaaaaaaaggaagaaatgggcctgtgccg

SEQ ID NO: 66580 - DNA, 1073 bp, Homo sapiens
tttcatgttttttttaatgccaggaaaaaaaaaattgcatttacattccagggtttaaaggctttcagaggtgggatgggaaggaggaattagagctgcaagctattgttcatgcttggctgatatttaatcagtttgttgggtcataatagagaatacagctccaatgacacataaatttgaatgatcaagtcaaagccagtgagtcttcctcattatttatcttacagtagagataaccttttcattattgaaatagaattgccaaatgagatagttaatattaaaacagaattagcgacatgagctcaacatttggaaataaatttctaatagtgctttttgtgtctgcaaaattagtgttcggtgttgatcttgcagtagtgttaattgatggctaaggctggtcccagctgccctgctctccagcaagggggctctcttgatttctctggatcagtaacacacactaacatcatctgtgccagaagacaagaagctttgttttaccctgagcgagagccattgttgatctgttctatttaacaaagaagtgatgagttttgggaaagggcaagggattgtggggataagaaaatgaatgagccgtggcagtctccacaaagctaacaggctggcagggtggtgggatattgagaaaagtaatagcaacagaataccaggtactcaggtgcctgaaggccttggcacctgtctttcactttcacctttattccccacccccaggctccaggcttacctttcaagatgcaattcaagtcttgtttctcctaggaatcttgcttggaggggatgttcccttaactcccaatgctgccttctaatttcactgtctaatgtcatagtgtctgtgtctccacttcctcaacccccctctcacaagactgcaaacttgaagataatgatggcatcttatttgcctttgtagcctcaacttctagcacagagcctgtacatggtatagaacacagtgcatagtgggtgatgaataaatattcactgaaataataaattagaatgtgggaaaagtacttagagagcaaagtaaagga

SEQ ID NO: 66581 - DNA, 1914 bp, Homo sapiens
aaagtgctgggattacaggcatgagccaccacgccaggctgataaaccttgatttgaatataattcaccctcattttcatttatccctaatgtgagggtggtggcattttcttgacaaatggggattaggaaggtctagcaggtatcataggtatatctgagaccaagtaaacattcattcaatagatgaataaattttttaaataaatgaaggagtaaacaaatgaagtggttatgttagtggttagaggcacaggatttggagtaataattcaagcagtaatctctgtcaatcctttttcatgcctaaggttgtgacctcaggcaggttacttcacttctctgagcttcagtttctcatgtgttaaatggaggtgctaaactttgtcttacagggttattgtaataattagagataatgtctatagagtagccaacatagtgagtggcacatttatgtgctcagaaaatggtggttgctgctaccatcatcatcaccatcttcatcttcatcatcttcaccttctcaatatattcatcatgcttatcaccacaatcttcatccatcatcatcatcaccatctcttcattgtcttcatcatcttcattttttacaaagttaatttttgtccttatttggtatatcagtttctgaaaaccaaaaatgctatcgtgtgtgtcttttaaaaaccttttatttggaaataattgcatttccagacaggaccctttattctgcagttggcagagtgattgccacagccactgccacactgaaaggtttccagggccatgtgaattgaggaatgcatgagagtgcggactgctctcccctggtcctgggactcattatcttgtttgcctttaatcacaaatctgcacaaagatcctttgccgggactgtttactgcatagctgagactggtggcacatcctttgaaggtctgtggatgaacagctgtagagaagggcaccacagggtcacggaatgaaaaacagattcacattcccaccttggttttgtgtcgactattgggcctctctgaacctcagtttcatcatctgcaaaatggtatctttataacatcttccaaggttgctgtgaagattaaataatacaaattcatatatgtgaagagtgaaacacagtgcctgatgtgaaataggtggtcggtaaagcatcagattatttggtggaggccagcaaggtgattggacctccctaacgcttatgttaggacttaagccatccatctctccatgactatgggttatctcaccatcaatgtcccttggtttctctagagacagcacgattgagccaaattgtctgcgtatcctctgccaccctcatgccacacacacacctctccctgggtcttttacttgctcaacccaaagacaaagggattttcttctgaaggtgatttgtactttaaaagccagtatgctgaagtcatggcattctagaatgttagtactgtaaggaatctctgatgtcctcttatctaacctccagacctatgagtgtctcactttccctttgaatgttctggaggcatcccacatcatcatgtgatcacaattactcacctgcagctgtggcagtgggcaccccatttataccctatgaccatttcagtacagccagcccaacttccaagtctactttcttctcctgaagctctttctggcctctaaaggcagctttgcccatacatggagcagatcagaagtgaaaaggtatgaacaccccctggaagcagcccccaacaaataactgatgggcaggcatataaataccccagctcccccgcccaccatctgatggcacaattctgcaacacacccattcttaggggccttcccttccctatctcacatccccactcctttgcctataagtagtttact

SEQ ID NO: 66582 - DNA, 2175 bp, Homo sapiens
tgttagaatctatatagagtggccagctttgcacagggttgtttggatggaaggatcccaggaaatttatttgttttgcccttttaccagagtccaagaagctggcttttctgctgcgtgatcatcttgattaattcattttgtgaaggaagccactctgtaaggtttggggatcagaccacccagtacttcattcaacctaacaaggagtgattgaatcccttctctgcgaagctggactaataataccctttcttggttgctgtgagaagtagctgaagtaattcatagaaaggacccaacagtgcctgacccaaagtagatattcaaaaaagcactaaaagtactacttctaacaccactgattaggttctaggacgtctgatctctccaaagtttgactttgaagggctggaagatgtcctccctgctcaattccttttcctaccagatgcctttggtagaaaatagtcctatgcactgtgtccatggcgctcttgttaagccttccttccactcgcttccttgggcaattgttagttccctgctacctgatcactgtcagaaagagctctgccttgaattccatctgcacacgtttgcttttgtttctccctgagataacagtgcctggttgaacaaccctttcaagttggttttactgtaatcactgttacatttttaactatttctggcctcacacccagggtcatgtaggactggtagaatacccttaatgaatgttatacataacaaaatcgactgtaccacctgtaattcctttcagaactgggacatttgccctcgtgttcacacctggccaggcactgccctgaatcctgctcacacatgctgtgatcactgacatcgttgccctcgttggagcacagagaatcgaaggcttacagcatctagaaatatttaagaaaagagaactggatgggtctgttgtatttttttcctcagggaagacaagtagacatgcatacacaacactcccccacatacactcacaagcagagtgcatgtgtcccggagccagccccgtagcacacacacagattcacattcattgtaatcgagagagatcgggtttgttcctgttgttcctgtaaaattcccaattagcctccattcagcagagagttgtcagcctgacagcacctcattaggacatcccactccaagcttcaggaatgttgattcaggcagattagccgtaaagagcaaatgcccacactggggagccagatccttttggctttacataaaatgactgcccatgggaccttacacaggctactttctgcaacctcagtttcctcatccagagaatagagataataataatacctaccacagagtatctatccttgccaaaggctaaatgagctattaccaggaagctcattaaatgatagctacttatgctgtctccatggccttgggcaaatctcccaaactgagatgataatccttgtcctacagaagtgtttacaaaacttcacggagctagggggatgtctattattattaattattattaaaaagcgcagaaccgtccttagggcctgttaggccacacctatgtgaaagcctctagatgtccccttctggcagactgaatcactcattcattcattcattcattcattcattcattcattccagtgttatgccaagtcttcctggatgtgataggggtaggggaaatagacatgaatatgacccctaccctgtctcagggaattctcaggctagtgtgagagacagaggggtacttagccaaatcttatggcaagaagtgggggttctttgaactggaagagtctccccatccctttccttcctcccctggcatcctccaggggttcccaaaggagcatgccaattctcaaaatgctgcctccggcaggtttttcaagggatgttgctgtcttcaagagaggcatatcctaacatcttcccccttcttctgagggaggaattggtctctctctaagatgctggtgacaagagccccgggtaagaatcaagaggcctagacccattgctttctggtgtgtggcccttggccaaactgtttggctcctctgagccctcatttccttctgtagaaaatgaggatagtattctcagtattgctcaaggtgaactctgcagtaatacataaag

SEQ ID NO: 66583 - DNA, 1072 bp, Homo sapiens
gcctatgagaaagctcctttccctgctgactccccaccctggctttaaattcccaggttcagaccctagcctggaccatctgttgggtgcagctgttgcctatgagccttcatctctcattacttcttttccctattgaatctacttgggctcctgtcctgaaaattgggtatctcccctgccccaaatacattatctgtatgtaggcattttgtcagtcagcgagcctttgctgagctcctctaatgtgccaggatttgtgctgtctgtatccttacatctctttatctgtgacatcatttgctaagtacttctgagcccctcctccatgtcaggcactgtgctgggtgctacggatacaagattaagcaaaacaagacgtggtccctacaatgcagtgggagggacaggctttcgtcaaataatcgatcacccacatatatgtccctttatccaccttcgtgtctcctttctctgtccttctctgccttccccccactttctctctgtctcgctcctctttttgcctctgtctcctgggtctctctggtgctttccatcctacgccccatctatatccagcagggccttggcgggggcctgctgagaggcttctcaggggcgctggatcttggtcagaaatctgtcaccctggcttcctcctggtaggagaattactgtcgtttaaggaggtctgccgaggctgtttgacaggagtcggctgggctgggcagtaagtaagaaggatcactccttcctggggattgtggaaggatacggggcccataaatcatccaccaagagtcctgcctgagcagcacacggcttcactctgcttggcatgcagctcgaggaaatttctaaaattggagaggactgacaccctgagaaggacaggctgccagatatccagtggggagctgtctctcctccctgcctgctgccgagtttcattggtggtatgtccagccgaaatgactctagctttttgatagcagcacagccttcccatagaatcaagctagggtggctcccaacctagcatctcagccaaggcagtgagagagggctt

SEQ ID NO: 66584 - DNA, 1051 bp, Homo sapiens
gtccttgcatgttctagagcagtactttttcaagtgtttaggggatgtgctctgcaagggatgaggggaccttagccccagccctctgtagctcctcagaccccctccagtagcctctgggatcctgttgagcacagtgtgaaagccagttttgagcagaggttctgaaagttctatgaaaactagttccccagatgtcctgaggaataaaggtttccaggtaagtttgagacccttcgctcaccatgtctgctcttagaggtccgtgcatatcatcatggtccacgtatgccagtcccacagccatgtgctcaccttgttatccaggcattttccaggcccgtctgaccacagacagctttctatggagcacccgttagcatcttacagatagagtgttccaaaagacagttttgagatgctttttaggccccatagatacctaatttaaaaaaaaattttttttaattaaacttccacaatattttctacatggtggtttcagatttcttcagaacattttgttctttaaaaaaaattcctagaaagctaaaaatgtctgtaattatcctcacaacaagagcaggatctccagcgtgtgcctctgagtgctggaggttaataaggattgcgccttcataaggcagcagaatagcatttgtggttacactagttaaggatgctacaaattacaaggccctctcagccccagcatgcagtgggaaaggaaagacagtgaactcagaaactgacatgcagaagtggtccaaccactgtacacacttcagggtggtagtttttaactttttccatatacatgatgaaagcttctttgaaattgagccttcataagtgggcataaaatgctgaaatttctacaactgtaaaaatgcttgtatgtcgctctgcagtttgcaaaaatgctttcacctccatgtcctcaaaatagacctgagtgagctgcatgttattactcccattttacagataaggaaactgagaatcagctcctaaaaggcagcatggtgacccaaccctgctcttttcacgc

SEQ ID NO: 66585 - DNA, 1022 bp, Homo sapiens
cttccctggctctttctcttctatgaggctaggcttcttgcaacctacctgccaagttaaactcttgcatagttttaagatggttttttcccaagccaggatttgaacttctgcagttagtgcccagaggtcttggctttctctgtttcccccaaatagggttctgtcctattgcagctagaaaagcaacagagagaaatgaaacggaagagaaaaaaaggagtttctgcccttcagagagagctcaactgcctgtgtgttgctcagcctcccttccctgttcacaaaaagtcaaagtcatcacctcaaactcaaatctatttttaaataagaaagaaggccagtgaagaggggcaggcaagatgtggccaaggaaggcattggggaaaaggtaacatttgtactgggagtttggtagatgaagaaggtaagaaggagaagtacagacagttaaagatggcattgaaattccagagtcccagaggaggagtttgcagggacagcaggtggcacttgatgagttagaatttcagatgtgatgagtttgaagcacctgggaggcatctaagtagacatgattaccagacacctggagctgaataagaggtcctggagatattgatttagaggtgattgttctctcatccatgtatccattcattcacccaggcaagggaaatgtgtacagtacctactctaggcaggccctatgctggatattgggaatacaatgatgaacaaaacagatgtctcaggcgatggttgtctccggcttcctttgtccagctttgactttgcaggacctctgggtaggatggtctggccaaatgtccctattatgctttccctggagatgtttcataaaaagaaggcatcttagagcagaggctgactgtcaagcattggttctgagtgcaagcccttctctctgttccacaataggaatcattttctagtacttgattctgatttgattagggaaggagtctttatgatgattctcatgcaggtcaaattcatga

SEQ ID NO: 66586 - DNA, 1016 bp, Homo sapiens
gctttttatagaagtcttttttttttttttaatcattttgcctcttttatttagccgagaatatagtagtggtccccaaaagattcagtgaataggtgaattttcatttgctaatatgattcatcagaataatataagctagcattagcaagcactgagtacatgtctgacactgtgttgaatgctttagatacgtttccatctcatttcattctttcacagtttataggaggtactattttgtttgtttgttgatttattttattttactttaagttctgagatacatgtgctgaacgtgcaggtttgttacataggtatacacgtgccatggtgatttgctgcacctttcaacccatcatctaggttttaagccccacatgtattaggtatttgtcctaatgctctccctccccttattatagatgtcttaagtgaaggcttgagtgtctacctctccctctgaggggttcctgcccatctgctgataaaagggttcttttctgtagaggagttctactggggaccatgtgcaggaccaacacactcagtcctatgacaacatccacatctgaggatctgcagtttataagtcaaaaggtatcttcttgcccacagagcctaaaactggcttctttctgcgtctcacagcttcctgaaagatcctgaaatgtgagccaggctgacagctgtgctgacgtacagcaagtgtggggctgggatttgtcctctgttggtggcattcactttgccatcaccacaacaccaaaaaccctttgaggctgtaaggcaagtgggcatgactcagcagagcaccaggcacagatgctgcaaatcacaaaatcatttttgctctggatagggcttaagggttgtttcttcacctagctagaaaattgggcaaaggggacagggcttaaaaagcaggtaacagctatttaagctggaagaatggggccccaagttccaagagaactttctgcattctctttagaatgctccaacacaagccccta

SEQ ID NO: 66587 - DNA, 1887 bp, Homo sapiens
aaaaaacaacccagggcaccttattcgctttattcacttcagcatccatttattgagtgcatccgtaggatcaggccccggggatacaaatgtgtttggggttaggggatgcagactaatatgctgctgaaatgtgttttccgttttaacccaagtagtctgcgtaatcctcaaatcactgagatgttgttatattcacccctactttatacatgggaaacctaaaaatcacaaaaacaggagacttatccaaagccacacagctcttaaggaatgtaataggatatgaacccaccctgcgtttagtacgatgtgtttcctccataatagtttcaggcccagcactcacaagctaactgaagcatagcacagctagaggttgcagaaaccatgtattactgacatattagcaaaacagaccttggctaaggacagttcctctgcatcctttggctgaaggctctaccatcttccctacccagtcctgccgcctcctatgcgccccaccctattcccttgtcagcactgctgcacagggatccctctgacctgattagctagatttggcctgctagatgtttttattagtgccctgaccttcttgccaagcagtaatttcacaaacctgtgactttggaatgacattctttatgtttgtgtttgtttttgaaaatatgtagaattcatccaaaattcacagccctgcttttgtgtttaactgaaacgtgttgaaagatttaaggataattattgaatattttccccacatgtaaacatatatttggtctaatgaggccattctttaatctgatggggttgggagagctgttagaattagcagcctttggttcagggagctcaggaatccccatccttgggaccgagtccagatgtaaccctggaagcatgaagttcaaagtcagtgggattatggcttagtgcaaaaccggcaaaatatgtcaccagttcacctcctctagacagtgagccataagccatggtctgcatgcagtttgggttggcatcagtacagagatacttcagagagcagaatcaacaggttaaatcctgcctctgaggccaaatggagataagaatagcactgtggggcaagagatgggggtggttattataagctattttcttttgactccggatctcatgttcatttttctaggcttatttgttcattcagccattcattcattcatcagatgtttatagagaacctgatatttccatgtcctgttttagtgattatagacaaaaataaggtttctgtatttgtcagcataggttaacagctaaattaacaacagagggttaatttatggtgcagtgacaaacaaccctaatatatgagtggcttaacagagtttatttctcatgttatgtacccaacatgctttggggctggggggagactttgttccacacagtctctcatggacccagggtgacagaagctccaccatcttgtggagctacccactctggagcaaatagcctttttggctgcttctcacagcccataggcctgaattactcatatggccccacttaactacaaaggagcagggaaacgtgcaccttccatgcaccagaagcagaagagaaccagacacaatgagtacccaaagtctctacacaacatagaataaaaagatctgaggtatgaacacaatagaacattatcctctgaggtgtttccatctagcagaagagacaagtgaacagacttaagtaacagctgagggaatccaacaatgtgttggagagggggaagaggaattgtgctgttagctctgagaggagggagccatttactggaatatcccagagtggggtgggattgctggcagtctagccaggaaatgtcatggcatg

SEQ ID NO: 66588 - DNA, 2006 bp, Homo sapiens
tgatagctaacccagggctatccaaatccaaagctcttaccctagtcatattacctgatggagacaggaatatagaactacttgagtgaatgactgccagtaattttacaggttaaaaaggtgttgatgtatcagactagcccctgcaaacacacacttggtgactccaacttataagcacatactctggagccaggctgcctgggttggaaccctagcacttccacttattagctgtgttaccttgtgttaaacaaggcaggtctcttcatctctccatgcctcggtcttctcacccgtaaaatggggataattctggtatctctctcacagtgtggttgtaaggattaaatgaggtaagaaagttaaagcacttagaatcgtgtctggcacacaggaagtgctatttaagtgtatgttgttaaatgcattgcacttcgtgatttacaaagtgttttcatattttgtttaacatttgtgacaagctttgaggtagatatcggcctcattctcatttggaagtgctcttgagatcatgcagctggcccatggaggagatgggattcaaccccaggtctatctgactccacacgcatgcacagctgttcataactctctctggcagctggtcagcctggctctaactgccagagatgattccctaggtaccaggaccaagtgtgaaaaggctccagtcagcctgattttcttcaggccactttctcccagtttgctctgtgagaaggatccttcttctggaagaaactctccctcaaataaatagccaaatccttttggtcccaaacaccgaagagggattttctttctgccattgctcagcagcctggcttctaaatgagtttgctgtacttagtttgtgtagtacctaaactacaaaacaaattgctttcctgaatgtgcctccaaaaaggaaataagtgtatggaacaaaccaggttcaaagcatggtataaacaaagggaaattgtttgcaattccagctgcttgtaaagatgcaagagggaggagagaagagccctcatgggtgtgaagtgggctatgaaagtgcaaaagaaggtgcttcaaatgggaaccaaatgggctaagtcagaagttagacagcaattagaagtgaggtgcctccaggcgtctctctctcactctacatgcggcctcacctggtagcaaaaagagggaaaccgcttaagcccaaaggatttgcccttctctctacctgcatccacagccttcaataatttataaccccagcactagagctagtgctaaaagatggattttattttgaaaaaagatcgtgtcacttttttccccagatttcaaaagctcttcaagagtctgctctggcagcctggccattattattcacatttagggagtgcataatagctcacaatgccctttaatacctgacatttcataagtcatgacatcatctccccagtccagggcacctgagcccataccctggctttaaatgctgacagtggccctttggccttggagcctgggtccggatgtgcccaaggttcaataagtcactaaaagcatttacaggacacaacatggagtggggctcacaatatttgttacagcaaaagggaaaaaaaagcaaatcagcaaagggaaaaggttcatgggacaaagttcggaggaagccgggcaaaagcttccaagagtttttctctcagcagagtcatgcgggaagtgctctgttcctacagccaggagctgtgatgacacctacaaagtgctgtttaccatggaagctcaagactcagggccccaagtgttgatcaggtgctagtcacataggtgccctctgcctagcatgcaccaaattccaatctcccggaaggaaataaggtgtttaacatacactcattattggtacaatctaggcataatacaatctaggcacagatagcccctcctatcatttaggacctaggcaactgtttaccagccaggttctcaggcaccagccc

SEQ ID NO: 66589 - DNA, 1406 bp, Homo sapiens
aagcaccatgactcatgcctgtaatctcagcactttgggaggccaaggcgggaggatcgcttgaactaaaaataacaacaacaaaaaatagccaaggatgatggtgtgcttctgaaatcccagatactcagaagactgaggtaggggcctgggtgatcgaggctgcagtgagctatgattacaccactgaactctagcctgggcagcagaacaagaccctgtctcaaaaaaaaaaaaaagatggtacctggaatatgcctggaccttgtgaatgttaattcccttccttcaaggaccccttagctcaaaaactccatgattcatgatgtaaaagtcttggtcaaaaactgttggcctagtatttctaggatcccctttctgagaatgactaagtatctgggcaggggctcatgattcagctgaaagaagattgactccgggatcagaggcttaatcaaggtcacacagcttgtacagtgataaagctggaatccctaatttgtagaacctgtacatctctcctctctcctctcccagttccctcctatgtaaatggtcattgggatgattaataagccgtagagtaactatgggctgtggggacagcaggaaaagcatccccgaacagggagagctgacttaggaagatacaggggctagatgaggcataagctgggttcacgcacccacctggatctctccactgagcacaaaggcaactggagaggaacccagagcagatagcaatgggcacaacatgaaactagcatgtcaagagaaatctggcttcttccaacccatagatccttaccacaaatttaatttcacactaatcaacccaggcagatggacagagcactgtatagtaattggttgctttcctttgacttcagtctggaagggagcataggaagcaaaggatgaagagggactccaggagtttatatgggtttgatacatgaagcccaggaggcagcaattacccataccccacaaaatatctctttcaggaagagcccttagggatgaccagaccttcccaaaactctccccaaagtgacaagcctggcttcctctgatggtgggaagcagcagcaatcaggaaaaggggcattggactgcagacagagaacatgggtctgacttctggctggtggagactatttaggaaacagcaaagatctattatggctaaagcctgtgagattaagaaaagatgaggccagagaggagagctgggttgcatcatagcaggagatggttctgaattgctggctcaagggttcagcctttgtcctgaaggtgataggaaccacagggaaattttaagcagggagaagttaaaggtgacaaatgccttctctgattcaggtaagaacagacatgacatctagagtgatcttgtt

SEQ ID NO: 66590 - DNA, 1928 bp, Homo sapiens
tccagaaaagaaattgaacccataacctattagaaatgatcaggacccagagatcatactgggccactctcaaattatgacatgctagaaaaatgacatttgaagtacatgttttagaggattaagagaaatatcccatcagaaggtatctgagaaagctttatggaagaagtgctggcccctaggttttgagggctggaaaggactgtaacaggcaaagaggggtaagaggggacattctatgtgggcaaagcttgggggtaaaccaagagaaggtttgtcatatgaggctaggacataagcgcgtgcaactgggaatagggtggcagagtgtactaggaggtaaggtttgcaagttagctggattgtctgtcattccacaactatttgttgagcacctactatgtaccaggcactgttttaaatactggggttccagcaatgaccaaagcagacaaaactgccccctctcatggagatacattctagtgggaaaattgatgatgaacaaggtaaaaaataaataacataggatgtttctctataatagttgttatggaaagggggacagtaagtccccagggtgagtctgggcagtgtcatggggaggtgcagttgtaaagatggtagccagagaaggcttcacagagaaggtgacatttgaacatagccttgcggtaggtgagggagcaggctgtgaggatgtctggaagtaaaacaatcttgggagagggaagggcaggtgctagggccttaaggcaggagtgtgtgtgtggctagtttgaaaagcagcaaggaggccagagtggctagatggtagaggaggccaaagaggggagggagtaggggtgtgtgcaggccagtgcaggggagccacggagggttctgagtggagaagtgatgaggtctgactaatacttgaacaggatgattctggaagctgtgttgagagtagactaacaggcaaaggctgaagtaggcagctattgcagtcatccaggagagagacaacaggtgctcaggtcagagtgagccataggtgaggaatgggcaagggttgtagttcactgaggtgtggcagtgagggtagtacctgtacctgtggatggggatagaactttctcttccctgctcctccccaccatcttgttagcattgaggatgacttcaagactcttaaattctgtgaccaaaatggcttgccagtactgtaaggacggggggcttgcccctgatccttctcccagcctcacagctaccttggcccagttccgggtcctttagccatggcctgtcccatgccataccctgtgctttcttgttcttagtccacagctttggtgatgagccatatcccttgcccactcctcccaccacgctccatcctgctgcagatcatcttggtttctgaccttggtgcctgactccctcacccagccttgccttatcttccacatgagactcttggaaccatcattttttgatacaatctcagcttccctttaagccataattttagcctttccttctgcttggttgcctcaagctgccttagtgaagtttgacctggggcctcctccgcatagcacgaaattggctggaattgcctgtgatctgggagccaacactgacggctactagctttgttgttcttaggagtccctttaagaagtcctggcccagattaaatgcaccccataaccgcttcctgctggcaagctctgtgactctccctggtggcagcacatactaacacaacagcaccttgcttctgaaagggaaagggaggaaaaggaaggctcagagccatggtaaattaagacagattgcattcccgaaactgggttgagacctgctgagtgtgcagagaggtacagcaaatgagagttttgtttttaatttgagacaacacgattttcaattccagt

SEQ ID NO: 66591 - DNA, 1058 bp, Homo sapiens
gctgagctccttcagtgtgcagcatgattctaggatgtggactctagatgaccggtgagggaggcagggctgtgaccaccttgcagctctttaatagaggtgcagcaggcagtgttgcagagtggaaaaagaatgctagtttcagagtccaatgtggagacctggcctcaagtcctggttgccccagtctaagctctgagatcttgggcaaggcatttcacctcttggagccacagttttgtcattttaaaaagagcacatcagtggttagcaggaactaagaagaggctgttggggagttattgtttaatgggtacagattttcagtttgggataatgaaaaagttcagagataagagtaatggatgcacaaccatgtgactacactaatgccactgagctctattcctcaaaatgattaaaaagattaactgttatgtatttttcacatgataaaaaattacaaaaacagcatgccatcttccttccttgaagtgttgccgtgagcctgtactacagcatttgtgaagcgtcaggtctgtgttgggccttaattcacgggagctattaatattaattttttaagaagctggatgatgacaataaaggagcagttcattttgccctgagggtgcagaggctcattccttcattccactcatgttatgcatggggcttgaaagcctagtaggatttcactgagtgtgagggatctgagagaggcattcccaatagagacaattgcatgacccaaggcttggaggcacgcagaagcatgatgggtctggggaacagtaagaatgtacatgatttaatcccagaggcaaattaagaaacctactttgaaaggaaacaatgaaacagaatcacagttacccctgccccaaattgtcaagcagcctggtgtcaaaagggaaattattggttaacctaattaggcagccaaattgctcattcagagtcagtagattaggtgagcatctccaaagcacagtgagaaaggaactcattaccaattaactccatttatcctctgctctccttggccccatacccaa

SEQ ID NO: 66592 - DNA, 2232 bp, Homo sapiens
gaaggtgtgcaagaggaaaatgataataataacagcattaatacttaatagttgtatggctgggcatggtggttcaggcctgtaatcctagcactttcagaggctggggtggatggattgcttgaggccagagtccaagaccagcctgggcaacatggcaaaaccccatctctattaaaaatacaaaaattagccaggcatggtggtgcacacttgtaatcccagctactcaggaggctgaggcaggagaatcactggaaccccagaggcagaggttgccatgagccaagattgcaccactgcactccagcctgggcaacagagctagactctgtcaaaaaaaaaaaaaaaatagttgccaccgattatctcaacctaagcacagtgctaactgctttagctatattatctcatttactccccctacaaccctttaaagaaggttttattatccccattgcacacagtaaggaaaccgcagcccagagaagttaagaaatctgcataggtcacacagcaagcaaaatgagattggaactcaagcctacatgactctaaaatctttactcttacagccctagttacagtgagttccctctgtagcaaaatacttgggttatttgttcttttgaaggcttcttgccatggtgacaaatgatcacttaacataaagtcatgacagaaagaggtgcacacttgcgcacattattgtatattccctgagagctgaattacagctgaattaagcctctgttgggtgataatgacatattaatcaagcctgaagagtttcagcctttgatagtgggacagagaaatggctgcctgctcccctggccatgttgtcatttctttgtgatcgtccatttccccactggccacagaactcaaagcctcactgtactcagggtagacgggtgggcagaggaggtaggcagatgaatctaataaagggcttctgtttcccacatcccttccaagactggactccctaaacctagactccccataggtgcccaaaggctgtctacttgctcctggttaggaagttacattaacagcttcgttatgcggtactcagatctaaataatgacagcaatcatgggaatggctcccttttattcactgattaggttcaggttcctcttacactattatctccccaacttatagcggaggaaactgaggcacagagagattaaaggctgtgcacagggccacatatctagttgagctggagccaggctctatgacaaaagtcttggttccttttaccctgtctctcccttttcttttaccttccccttctcccatctttctctagttcccactgacctcaacaaacccctgggccccagccagacctctccttttcttgtgatgagaactcggatctcaccatcagaacagggctcagttccactggacctgtcagtgaacacatcacagtgtggtcacttctcaggggtagagcaaaggcagcaacctcatgctatgggcctaccactgtacatgtgcaattgcctttaatctccctggcaactcagtggcattcccatttgccaaatgggaaacctgaggctccaaactgagacacaatagcctgcgagtcagcaagttggcagagcttatatttgaagtctggtttctctgagtcctttgcctgcctccatttgagtctgcaggcgtcctcagctctcagttgaggccaccaaaaatgtgcaaccaagttctcagagatccttaccagataaatgtaaaatgtgaagcataacccccagcaacctccagccacaggaacatttactctgcctccacaccctgccttgcattagtcaatagtaattgtcaacagtattgatagcggtagaggcttttgcagaggtcacactgatgctgcatgcagctgccatcaataataacttttatggggtccattaaagacaatttctgcccctgaaggttaatgtcagcagcttttatgtcactgcttaatatctaaaataaatacagaattgactgggtaatgtaaacacaaatcttcctactcggggccttcaggcagagccagccctcaggcctctcctcccctgccgtgagaggccaacaggctgggggtcgggaggcagtgagaagctggcctgtcaggaacagtcggcatgcaatagatgttttttagaaagcagaggttgcaattcaagcttcgctcccaagcactgggtcaagctgac

SEQ ID NO: 66593 - DNA, 1062 bp, Homo sapiens
agattatcatcccattttaaagacaagaacattgaagctcaggtgatcacaagcccaagattgcacagctagatgttgagtgagatgggatgtcaactcatgccccgggcctcagaaaagaggccaaaaaggacataaagcaagtaaaccatgaggacttcttaaattggatgaagtaaatcttccaaactcacacatcagaggagctgactggctcaacaggatcatggaacccttagagtgagcccttaccttgcattttcctaggagttaagttcctaagacatcctagtcccgagatgtcttaactcacttgtattgatgctgagtctggctgcttaaaagggcatgcaggacaagccagatggaaatcaatgcagcccaggctgtttgttgcaaataaatttgatttttcacttaatgtaagagtcattcttcataacacgtgagtggcttctctttgagagggccggccgaacagagcacagatagaactgtggatggggacagggggcgagagcaggacaggagagaggagtgtagatcagagagcggccagggagtgtgatacgcagggagagcaggaagccgactgaggaatttaggctctaatttggcattttctttttctttgaaggagagcaaaatcggagggcagattggagtagggcacggaggagtggtatgcaaaatacttaacatctggttggcccagcctctaaccaatcagaatgtctgcctggccactgagcagagcccacgggcttcttttatgcctggtccgcggacattaaccctttgtttagtaactggatcatgaggagattgggggtattgggaaggggctggaacagccagagcagaggctgaaaggcactgggtgtggaaggaggcactgaggtggcttggcacaagttatttaccaagctgtgtggaagtacttcatgactgtaacctggcatcaaggctgtcccagcctgagccagctgagtaggaggcctgagatacacctccacccaccaccacagcctagcatagcagcttgcatttcagcagcacccc

SEQ ID NO: 66594 - DNA, 1032 bp, Homo sapiens
aaaagggccagtttccagccatctagcctgttgtggggcctggccctcttgggggctaatcccctttgtgatgctcccttggagcaggcacagagtctaagccaattaaaaccctccctttgaaggtggttcaggtttcccagagagcacaggcctgcacagtgacccaaggtaattgtttcaaggattgctctcctctcctccctgctggccagagctggaggaagaccagggctttgtctgggaaggctccatcacattttcccgctccagacccccagatgaccatgtgggtctgcaggagaggcaggatggcagggatataaacaactgaccatcttacagatgaggaaagtgaggcctgggatggctatgcagggctgagattcaaactgcaacatacctgctcaaaactggtgcctgctctgtctttctaggacaagaaccaaacccttgtcaccttcaatcccagcacagatggggcctatagtaggtttctagtacatatttgttcagtgatgactgaataaacaaataatgctgaacaggaacattcgtcttaatgcaatagtgtgaatgggccggagaaatccagaactgcatctgggccggagtgaagtattaaatacttgataatacttagcaatagtagtcataataaacagccaagtgcgaagcctgttctaagctccttctaactcactcagtccccccaacaaccctattgggtaggtcaattatctccacttcaaagatgatatagaggaataaagaggttaagtgaattgtgcctggcacacagctggggcgcacagagctgggagtcgaaccttggcttcctgactgcagagccaatgtctgggctgctatgcacccctttctttctaacaggaatgtcttcctctgtgaggttcagatggtgatgaccttcaccctccctgtctccccgcaatacagggtctcagtgacatgagatgtgaaggagctttccattagaaacaccatactagacaatctggaccattgccggcc

SEQ ID NO: 66595 - DNA, 1114 bp, Homo sapiens
tttggatgcaggagatgacaggtgtgcaggccagagtggcactaagtatatttgaaaaaagagggtggagatgaaataggagaggtcacatcaggtgtgaggatgtgaaggtctgtgttggcatcctgcagtcccatgtttttcagacctcagtgtcataggagtcacctggggatctaattgcagattctgattgagtaggtcttggggagagcctgtgattctgtatttttaacaagcatagtaatgctgatgctactagtctatgtgtcaccccttgagtagcaagactttaggcagtagagaaccatttaaggttctgagcagggacaggattgtggtctgatttgctttttagaaaaattacgctgaagactgcaaagaagcttcctccgcagggtagaggaatgcaggcaggatgagagatttatttttttttatatctccaacacctagaatggtgtctggctcataacagataatcaatagatatatgtaaaaggaataaattagccatttatgacggacttcttaaatgagaaaacaggaagaatgaatgaatcaagttatcccaggctgacaagctgatactttataaatcattcattcaggccagtccaaatagagaataggtcttaaggcagtggtttttctagcttgtttttagacaaagatctgattgcttaaatgaaactcgaaatggaagcccaatatgtgaatcacataaaaaataagtaagcgcctaggctggaccgggagtaagagctctgaaacctaacaacctactccttcccctttctcctgactgccagcgtctgacatttcccactgtacctccagactctcacaagtatcagccaccccaaaaagccagcctgactcccccacaaccccagaatgggtgagggaggcagcccttcagcaggatctgggatggggattatctgtttctggctcagtttctcccactaaacagtgaagtcccacaagataggaccataaaagacccatcttggcagcctcatgcccaacacagggacgtcggttgaatagggaacttaggaaaggatgatgggcagagatggagtggtgagccaccaagtcccaaggccag

SEQ ID NO: 66596 - DNA, 1044 bp, Homo sapiens
gtcatcttattcaatctagacagtcaccctttgagggagacctttctatccctactttatagatggggaaagtgaaggtcagagaagttgactcatttccccaagttctggagctgggattccaattcaggtcttactagctgcaataccacgttcctttcacactgaaattgtccagggatgatgatgatgatgttcctgatgtcgttgatggctatgaggtaggactcattagcctcattttccagacggaaggtctgagccccagagaagacccatcgcttgcccagtatggcacagctggtagctgggagagatgggtttggatgtacacttttcgtctgcaagccttgtcctctgtctgcttttcttccgtacaggtgtgcatgagctcccggttactcgagtcatgggagcaaattctgatggactcagccagcttacctttagggtgagtcctcctcaggagagaggttgggagtagatggtagctaagtgtcctgttttctacttggactctctcagactcgtgctgagtggaggccagtgcacaggcaggtcccttgcttaaagcaaattcctgggaagtgatgagcaggggttggggagtaggctgtcaggagccaggggtcaggagaagggccctgggggcagagctagctgtttggctttgagaagggaagccaggagagataagcagagctgggagtgatgtgatcaaactgtgaaagatgattctcactgagctgggagatgggggggggtgggggagacacaagagacccgcatgcagggttttgaaggcagcagatacaggggcctgggaagcccagaccaggatcgcagacaatcctgggaatggatgatctggtgagttgagaataatccatgtacttttacgattatacttagttctttgcagtcttcattagttatgggataaatacttcccttccttccttggcttcaacctttatgctgcaagtttaatttatcttgggccactatcgttttttgttttactaagttatctgtatagtttca

SEQ ID NO: 66597 - DNA, 2000 bp, Homo sapiens
gcctcacatttggggggcactttatgtcattttcagagtacttttctgccagcagtgcttatggtaatagtcgtcccacagttacagcatgttttctggtttataaagcaccctcatttgcatgttctcattaaatcctcacaccagccctgagaggaaagtgaggcgcagagcatcatttacccacgtaacacaaggaacccagagaagtaaagcactgtgcaggattactcagccctccaggacgcaacggtttcttaattctgcttctatcaatcaagagcctctccgccatgtcaatccatttcaaagtcaagccaaagtaagggctgtaaagccaggaccctgtgtgttagtcctggagcatgccaaggtcaagacatggcccaacaatcagaaataacatcagaataactcagacttccacctaatatttctcagaagttatcaagaaccaccaaatccacagaaaaactgcttaaaatccgccttttctctctgccctctactgcatttactgacatcagcttctcctatatctcttttaaaatattttttatgaaaattttttatattctacagagagtgtttataacaaatatgttcagtgtaaacaataatgagaaactctcatggccccaccagctagcttaagaaacagaacatgatgccacctttgaaaccctggggatggcccccaataccctcccctcttcccaggtagctgccctcctacacttattctcttgcttttctttataatcctggatgctttgcaaccctcccccagagaagcactctccccagtccagcccacacgcctctgcagcttccatttttgcttctttccctaccccagtctggtgtgaccttttctgggggatgggaaagggcctggagaaaatggacagaggacacaggcagactcctttccagataaggggagtggaaggttaagaacacccctgctaaataccttttgtccacttgaaaacacattgggaggagagagggaggggcttccttgtaagtttattcctggagcaggttgccacttgtcacttggagcaagtcccttcaccatatggacttctaaactggagggggactggcacagattggggtttcctaaaattgtcattgcttctacagatatttactgagcacttactgtgtgccaagcagcgccataggtacagggatgatgtcgtgggaaatgagacagacaaattccctgacctcaaggaatttaccatcgagggcaggcctcagtcctgccccacaactagctatgatcctccctttgtcattgtaagctattcaccattaaaggttgaggtggggatgaaattagatgataaatatggaagtgcctggaaaatcagaggcaggtcttggctaacactacttagaagacaccccacaatccctgaaacgaggtccactgggcacggaagaggctggagctttgggtactcacacctgtagttacccagatctgccactggatgtcagtgatgtgtaggagggggcggggacctaagggtgatgagctttttaagttgagaaaagtgcgaaataactgcttacagtgtgctatatgctgttctccatgtatttgttatagcatttgatgtttacggaaaccctatgatttgcatatccttatacccattttacagacagggaaacgtgctcaggggagggatataagtggttgtctcccctcctccacctgagagtaccaggcaaagattgctaaagatgctaaaaacggccctggcgtgaaagtgctcaaccagacagccctttactgctgctaaactgctatgaacagcatctccccatacttggggcagcaaatggctgcacaaatgcatgagaaacaaaaagctccacagctgttaaaacccccatgggcacccatgaaggttacagtacaagtgtttgctaggcagatagatgggtacagattaacaagagccacgtggtgacagcag

SEQ ID NO: 66598 - DNA, 1033 bp, Homo sapiens
gcctcatctgcaaagtgagcccttgttttctcagccaaccttcccagcatcaggagcaacaaaggtggaacttatattatagcttgtgatgtgctgtttttatatgaaggatcagcatcactctgctatctgacctcaatgaaggcaggcagggcagagctgggagggctggggagaattggatttgaattatgtgaactctagaggatgagaagtcagtgtttccacacatcctttgttcctgtgtttccaaactgtagttcttcacccagtgtcagactggatttgcttgagcacacaggtgatgggaagttgttgtatttaatagatttcagctcaactagaattgcaaggaagcaataacagaaaagggaattccaaatgaagccaaattatattcatttgttttacaacaactattaaatatgttgagagggtgaaaataatgatttcaccctttcgaactgaaattggggttcgttggtggctcacacctgtgctatattgagttgtgggtttggtcaggtgtgattatagaacttaattgtaaattgcatctttctggcacatgcatgaatgtatttatgtattctaaaaccttttaaaatcatttttgtaaaaataatgtctatgactaaaacctctaatggctaagtcactagctccaagcagccgttcagttgaggcttagaaacttcacaagggtgctggacagtatttgcccaagggatggagatgagcccacctcctatctccttctcaacccccttggagccttgtaaagtgctttgtgtacagtaggatcgctcacctgtgaaatggccccattctcactacttagccaaagcctagtaatatcacatactctttgacccactaataacgttttaatggaaataagcagaacatcatgcaaaggcatttgcagcaagatgctcattggcagcattgcttatcataatgggaagacctggagcaacctaagtgtccacctgcagggtccggttaaatcaatgagggttactccatatgg

SEQ ID NO: 66599 - DNA, 1046 bp, Homo sapiens
aagtaaatcagggttgatgattcattttcagaaacaaaatcatttacttgctgtataggaagagtcctttaaaaagtaactatcacctagtgtgttcaacataaaaccctgattataaagattcatttgggggagagcattttcaacaataatccttcccatctgtaaggctacaatactattttactatttcacagcaccgtcacgggtattatgttcaacgtcaacttgacttagacaaaaacttatcactatttttctctgtggcaacagcatgcatttggcatctgtcagtggttaaacaagcaggctgtggtgccgaagtcctgaatttgaaccccagctttactccttactagctgtgagtttgagcaagctacttagcatttctgagactcattttcttcatctgtgaagtgggcagaataactttacataatgaatgttaagttctgttccaaagtgtcaccgaataagtgagaaatgccatttatgatttactatgcccacccaacaacattctgaggataatgtggcttattctttgtagaaacctacggtaagaccaatgtggacaattttgtttctcagtgtcaattaatatattgttattctgctttgtgcttcagtctcacaggaacttttcaagtgtcttcaggtcctattgccattggggtgctgataaatttgggtttctgaaagggccaagttattgtcctgactccaaggcagagaaaattcccccagattctgcctctcctgtctgcccatctggggcctcatcagagtagagaaacctagactcttcgagtcagagcagaccttggagattacatagaaggacatatcttggcctgtgagggataggtgaggtgcctggcagatatgataggaagagcagaatttgctactgaaggcccttgggcagccctcttcactcatctgtgcctcagtttcctcaccttgcttgcagggttctgatgtcttggacaagcactttggaatgcccaaatagggacagcatctgaggccagcatggaacatta

SEQ ID NO: 66600 - DNA, 1052 bp, Homo sapiens
acatttgcctcttgatttaatttcagcagaataagtgagtacaggtgttactgtgtgtttttctatgagcatttgcagagaaagcctcagctatctctatcttagggaagtagatggtcctagttacatattttgcatattccctcatctgttggtttataaggtcatttttcactgaagtcctttcagctgtcctgcgttgacaatagacaagcactccctcttctactcccatgccttcttcatccaacaatgagggctttgtgctgggaagatgcctgtggatgcttccttcccaaggcttcaaagcctcgtctggcttctatcaagggtattgatgggggaggggacccagacagttggattcagggagcagtgcctgtggcctggtgccaacggaatatgtcaggctggggtagataattcaatgtctattctgggatatagacagcctggttacctgagctggttatcgagctatttgcagccactgccctgcaagtcatcaagctctagtttaccagagccttttgctccaggatcaggagaggatggacatctggagaggacagatgggagagagtagaggggcgggctgccagtctcagggtgtgaagagtcttaccccattggagcaagaggctgttgtggctacttcctcttagggcttcagttcactaatgagattaaaatgccaacagcctgcctctgcgcacacttacttaggaacacattggtttgaactgcttaatgagcgttaggaatctaagaaaggtctgggcaggcgcctggctgatgccttgatgattagaatactaaatgtgtccccctttgaaagccagcagttgctggagagcaaagccagttctgagactttctttccttgattatccttgcattcccactgttttcagatagttataaatcaatgacctgaagtgggtatggaattgttatgacaatgatttttataacaacaaggacaataatgataatgattatcacaataataatgattatcaaacctagatgctcaccagaaatacccagac

SEQ ID NO: 66601 - DNA, 1283 bp, Homo sapiens
gcccatagtaagcactatgtaagcataagatacatgagacagtcctcatctattgtcttattccagtgtttacctcccagggtctgagttccctttcccaacgtttcccagcagactgaagattctcatattcctgagtgaggcactctgcaaatttgttttctgcccccactggcatcaggaagagccaggatgacgttgcttcatttccagtagtcagggctgtttgaggtaaggctcaggttcccttcccggttattggtgcttaaccatgcaggctgggtaaatatttctgagggagtccagcacatctattattaatttactgcaagcagttgctgtactttccagaaatacctctgcctacagatgttttctagactgtgtagagttctcctgaccttaatgcttttcacagggtgtggtgggaatcagttcctttagtgggggaaggatggacagttgtgtgggcagtggacaaggggtaccagttggatcttgttggatctgatcatggaggcagtggactcttgttctttttatgccctactttcagcttcaaacctggcttacaggccagaaacctgggtatcgttttttggtagcaccctttactgtcatgaccccatatccagtcagtcaccaaggcctagagatgctatctccaaaaggtcatgaatccagtcccctctctgtaccgccattgctaagctagtcccagcggacatctctcatcttccaagtctcagcttccttgattgctaaactcaatcagaccccctgctttgtgttcccatagaaccccactttttaaaaatcaccttttaatctttaaatgggctgtccaggctccaacttctctagtggacgattagctccattctcttcttagtaacagtgcccgacaaatataaatctcccagtgataaaagaaaagagtgctttcccttcctcctttctttccctccttccttccttatttccttgcattatttttattaattaacattaaaaggggactagcaatcacctggtcaaattgcattccctagaggaacctcaaggcccactgtaggaagaaaggagacacatttttaagcagaaccctgaaccccacaaacccctcaccaaccagcagcaatcctgaatctctgttagacattgaaattttaccttagtatttttcttgagcggtggggaaacaaaaagtggttatcctatgataaaaggtttggacaacatcaatctattcttatattctcatttttcagagcaaaactgtg

SEQ ID NO: 66602 - DNA, 1029 bp, Homo sapiens
tgtaggctgggaggctaggccagtccctcctttcacatttttctgcctgcttatattctagccaggaagctgattagattttgccaatccatattaagggtgggtctgcctttcccagcccactgactcaaatgttaatctcctttggcaacaccctcacacacacacccaggaataatactttgtatccttcaatccaatcaagttggcactcaatattaaccatcacaccattgtggaagaaaacttgcagagaactcttctgatttaggcctggctgaaggcaggagcttggcagagatgcaggacaaagtacccagcctcagagtcctgccaacggacccacagtcaaaacccaatatgaatttgacatagtaggtattattgtaggacaaaatatcccaggctcccaagctgtgttctgtgatacatcagccctataaaatgggtttaaaaaaagaagaagaagaaaaagaaagttttccctgttgagtgatctgagaagccctgtacactgactcctcttggttgatctcagggccactagcacactaaaggctctgagaaggcctgcagtaagggtgctagcctcatgtttcccaaacttatttgccccagaatcccttttgcgtgtttattcaaacccctctgttcttcagttcatcctagagaatggcctgaaggctaggttagagctctaaggaaggagagaggatggggcttccccgaaaagggacattttgtgtgcattgcacaaggcccagtccaagcctagcacagtctctgtcccccagtgagtgctcagtaaattcttaataaaaaaaaaaaaaaaaggggctactgcgtttgtctggagagaagagtccagagttctcaacagaggctggagacagagaggatgcatatagcagggtgtcgtccaagtgtacttttggcagtttaatgtagggcctttttcctctgacttgaccccctctcttgactactggcaacaaggggcagccaaagcaaagtggtttagggcatata

SEQ ID NO: 66603 - DNA, 1050 bp, Homo sapiens
tcttctctgtttcttagtcttcaaatgtatttcttaatgttgagtcacagtcagaaaataagagccgctgatttaatctaatccttccattttcaggtgaggaatctgaggcccagagaagaagggaattaggagcagaggtaggaggaagacagagctaggaagaagtctctaggtctcctgctgctgatgattctgtgttaagcctgttttcactgccttgaatggtatattcacattaataggctccgtctagcaccttaatctcagggaggcaacctggtacttttggtccaaggggaaagattgtttttccacccacagacggtagagtcagaggcccagctacctctgcagggacctggctccaggtccacagatcccctccctcttccttcctgcctcttctgtctaaatcagcttccctcagagcagcagaaacgccactgcactaaatcctgttttcatttgtggaagacgactgtcatgccaaagctgtttgatggttttagaagttagaaaactgtgaagaaaatacatttggagaataagatctgacaacgaaggcttctattctggcttggtgcttttattttattacaaaaatgtgagtccattaagcagacttcttctgtggtggtcaaacagtgctaccaggcttccagagtacaagaacaagatgtagccctgtttctgccaggcagagcagcccagaaaagggaaatgtggggattttaaaggctcagtctgagcctcacacaagacttggaagcgtcttaaacaggagggtaaataagatcagtggattgctgactattttgactatgacccacagcacaaaacacatgggatatctacttaggacacatccccacccactcaggtaaataggtgaggcttaggactgaccagtccagaccatcaaagtaagggcatttagcccaaccttgggggtagggagcccggagggaaggggatggtatgtcttcaaagaaggtttcaaatctcaagaggcttgagcaaaggattaaagaaagggaaaccacacag

SEQ ID NO: 66604 - DNA, 1073 bp, Homo sapiens
ctgacccaggaaagactgcataattgtgtatcacagggtgcttcaaattgtgggttgtagtccagtaacaggtcatgaaattaatttggtggctcaagatcagcatttattaaagtaaaaacagagtaacctagtaacccacagagtgggtaaagatgttgtatatttgcactccatatactcaacaaaggtctcatatccaaatatatatggtagaaaaaaaagaagaaactcctataaatcagtaagaaaagacagacagcctaatagaaaaatgggcaaaagactcagatacttcataaaagaagatgtccaaatagccaaaaaagcacataacatttttactcttcagggaatgacaaattaaaaccataatgaaatactactatgtactcatcagaatggctgaaataaaaaatatagactctatctagtgttggcaaagatgtgaaacaaccgaaacttacacactgttagctgaaatgtaattggtttgatgacactggaaaactgtttggcaatatcagctaaagctgaacatatacataccagcactttcactccttggaatatacccctgagatatgtacacagatatccaccaaaacacatggccatcagccctggaatggatcaagggtagcatattcacatagtggaatattgcacatagcaatattgatgaacctcagaagcatgaaggtgaaagaaagaagcaggcacaaagaaactttatgactgcactttaaaaaagtacaaagccaggtaaaactactctgtgttttcagaagtctggatggtggttgcccccgagggaggagttggtaaatgggaaggagtgcaaaggggctctctagtcacattctgccttttaattcagaggtaggagggcaggttaaatgggtgttgtcaatttgtagaaatgcatcaatctattcatttatgatatgtaccctctactgtacttaagtcatacttcaataaaagtttataaaatgagcataacagaggagaaaatatagcaggtcataaggacaaacatcattaagtgaaacttcagttacatgtccctc

SEQ ID NO: 66605 - DNA, 1046 bp, Homo sapiens
aagttgctgcttcttaccatctcaggcactggaatgggccaggtcttgggaatccatggaatctgggtccaatccaagccctatcacttgctgactatgtggccatagactgccatttctcatctctgatcatctgtttcctcatttgttaaatgaggatgccaataaatgttgcaaagggttgcgtgaggatgtactgagataatgtacataaagcacctagtacctggtacatagaaagtgttcaaaacatggcagttgctagtatgattataagtaatggcagaactacttacctttagccagaggagaagataggaggtgctagagactctcataaggagagaaaagaacgggcatactcattagggatacagtagtgttcacatctcataaactctcatgcaaacataagcccaacctcagaaaattcatgaggttaaaactctacttctcagagtcagacaaggatgatgggttgctatggaaatatacagttaaaagggaaattttagagtgggtccgagaagctgcacaaatcctgccaatctctcactgatgccatagccccggtcctagatggtaaggattagagccccccagaatgaaggtccttaaacacacagactgggaggcctgcaaatcatcaaatatttatatatgttcagaaggctggtggtgagtgttggatgagagattgagtgttttgtaaactgtaaagtttcctacaaatatatgtgcctttgtgtgattcatgtattatggactgtatcaatactttgcaaatcagaagaaaggggggaactcagatgagctgactgtgtaatgaacctgtagagtccagccccactgatttctgagtgaaatagcatatacgtatgcatgcatgtacatatctgtatacacacgtctatgcatgtgtgtgcatgcacacgtgtgtgtttgtgcatatgtgtgtgaatctttgaccctttggaggtagtcaccactctttatccagtgactggctgcctctaaggagtataacagaggaatgaaaacacagg

SEQ ID NO: 66606 - DNA, 1448 bp, Homo sapiens
atgggctcctgcacactgcctgggagccaggagggagaccttccaggacctgccacctggtgccagggaggggtgagcccgcaaacccaacaactagaccagatgggtgactgggcagccagggaatgtggaggaggactcgaaggctgtccagagcttgccatttcatctctctcagacctagtttcctcatctgcaaaatcaggctaaagaaaattaaataagttttgggattccggtggagctagaaaataatacttatcttcctggcctaaaatcaaaattaattaagacatagaggagtcagacagataacaataataataaataaataaataaataaataataacagcaaatactttatagcatcatgaccactagttaagcattaatacttatttagtatttcctatttgtcaaactctgttctaagccctttatgatgttaactaatacaacatttctataaggtaggtactattcttagccccatttgatggatgaagaaaccaaggcactgaaagtttaattaatttttcccatatcacagaactagtaactggaagactaggatttaatgccaggtggtctggcttccaaggccatgatcttgaccactgccctccaccaattaccatggaaagcccacagggcagctttagatctgcacacagggtcttgctaacacttcgacctatagttagacagacttggccatcccgtcaaggagaggagaagagctgtgctttccataggccacttcataggccatacagggggtactgggtgaggcaggtccggttccttctcccacacccaccaacccaatcattgtcactcagattaccacaaacttgctaatttgtaactgggggtaatgatagtacctgtgtccatgttgtgctgtggattagctgaggtggtatgtctaagtgcgcacttgggtcattttctggtgcagagttagtactcaacccatgttagccattcttgttatcatctcttctctactgcaaacccttcaatgggtccccactgaccacaagataaaggttgaactcctttcacagagaacaagttgttgctgacttaaaacaacagaaacatatgctatcacagttggacaggctaaaagtctgcagtccaggtattggcgaagtggctccttctggaggctctgagagaatccactccatgctcctctcctagctatggcggctgtcagcactccacagcactccttggcctggggacacacatcactgcagtctccacccccacttcacatggccttcccctctgtgtctttgtgtgtcctttctgtctggtaaggagcccctcgttggatttagagcccaccctaatccagtgtggtcttatatcaatcttttaattacatctgcaaaaccatgtttccaaataagattacattcagagattttcagtg

SEQ ID NO: 66607 - DNA, 1039 bp, Homo sapiens
ttaggcactaaccacttactttctactccacagcgtttccatggctgggtttccctctaggaaggcacagtcttggaagataatcctcactcatcctggctctgaaatactttgtgaaatgcaaagatccactttccagctgcctttccttcttaaggatgtctaaatatgcagttgtgcccacagaggcattagcatttcacacaaataccatatactgggtgaggcatgctgatatttggagaaggacatttgtagataccaaggttctaggccctctctaccctttcctgctgtgggactctgacacaaattcttcccctctctgggcttttatcttctcacaggtaagataggagaagatgcctctctgacctctgtgtgcttctacctctgtgcttatgtccttcatgtaatgggaaaagatgcttcaacatcatactcacggggctgggggagttatagcacagtcctctctttctcaagtcaaatttaaactgacttgagctttcacacagagattggggcatgtccagatggttctcttatgatccctttccctagttcctcttccccaccttgtcctagaaccaaggaaatgtatacaatcctctcccgcataaaaaggtctctccggctcctactcctgtattagtttgctaggttccataagactgtaccaaaaactgggtggcttaaacaacatagtgtcccatctggaggctagaagtctgaaaggcaggtgtcagcagggttgcttcctttcaagagctgtgagaaagacttgttccatgcctctccattagcttctgggggtttgctggcaaccttgggcattccttcgtatatagaggcatcccccagtctctgccttcatcttcacatgacattctccctgtgtgcatgtctgtgtcactatttccactgcttaggagaacacgagtcatattggattaggggcctgccctacttcagtataacctcatcctaactaaactaattacatctgcaatgcccctgtttccaaataaggtcacat

SEQ ID NO: 66608 - DNA, 1088 bp, Homo sapiens
tgacccagtggttaaagagcagccttgcagggcacagaacaggctggaaaaggagagcagtggatctggaagagccgatgaaagacatgcactaggcacagctgtagctgtaagcacaggcatcgattttttcattttaaatcagtctgaagacaaagggaagaatgggttgaagaaaaaaaaattaaagatagtgaggaaacaaaatcaaaattccagcccagtctttcacttgctgtaggggtatctgagacatagggaggtatgagtcagtacatctctcccccgagagcatcatgtacaacgtttcacctttgccacctcttgcaaacccctcccagcagagtgttggtttttagaagcacccgggcaaagaacagacaaagggaggataagctgtgggggcggggagaccaaggtagtcttatgtaacttacatctttatgaaaactcattttgcttttattttaagaagtgctatttatgaattccccagggggttaaaaagcttaagagatgggttttttatgtgatgtcaatagaaaaatctctaaactcctggaataaatgatgcttttgttttggctttctgtttttcaaaaaggccatctgttttcataaacataaatgagactctctagccaccttttcccttataaccctctgtctctttgcacaaatgacaacattcccttcgtgattcattcctgaagacattcttctgggctaaatgcggctgctaaatttgtacttcagttttcactgtgagtcccacatgatccttgctcaggcggcaactgcactattacagctttcacttctcgagtcccagattgctatacccttgggttgccagcagctctgcaccaggctttatgcaactggcttctcctgttttgcaagggtatctgaggtctttgaggcagcccaataagtagcaacccttctctacctaagtcctaagcgtgttgagaaataaatggaagatagcagatgaaagctaaaataccatgtttattattgataatgaataatttagcttagtgtaacagctaaataggcttgataattggacccagaattaggca

SEQ ID NO: 66609 - DNA, 1009 bp, Homo sapiens
atatattttattgtgatatttcctcatcagtaaattatacttattttttcttgaaaatttagaaactatagatatgagaatggaagaaaattttaaaagtagctattaccataccacactaaaataaataccgttgagctctgtaaatatacacacaagtttgcctttaatttctaaaaataggactgcattccacattaaattttgtgatcttctttttcatttaacaacatatagtctacctttccatgtcattaaatattcatctcttaggcttattttgtaaggctgcattgtattgcgtcctgtggaatgccagagtttattcccatttctctagctgttagacatttagattgtttcctccttttatttattcttctattcaatactacaatgagtacccagcactgatattcagttggcattgacatattaatacaacctgccccacttcaactagtgagtgcccataccagtcattaaatgtttttactatcacccgtggaaaaaattttatataaatccatggcttgcttgggatattttttagaattattataatttctcagctataggcattggacatttttacaggtttttgctatactttggcaaattaacctctaaaaaacctgtactagttaacaccaggtttgacggtccaatatgccctgctgaactcaaactttctagggtatttgttcaagaagtctgatggggacagcaaagaaagaaatagagctctatttgaagtcaaataaagacagatgtatagatagagatattgatatagagatagatagtatattacttaggatcctggcaagaaacagtggcattgtcatatggggtagctgaggagagtgtagtgaagggattattttaaaagtatgagcaggattaaggacaaccactaaggttggcaaagtaccctgaggctaacaacagctgggagctgtcactcctagacctgatgagcaaggtgaaggagaagttcctgcaactt

SEQ ID NO: 66610 - DNA, 1518 bp, Homo sapiens
gaggaaaggaggggaggggaagggagaggaaaggagaaagaaaagagaaaagagacccagtctggtggaggagcactaaagtaaggatgatgggtgcactaggtttgaaaaccaagggggctccaaccctttgcccctgctttaatgagaacagttcttctatctgtttatatactgaataccaatataaattttattttggaggaaaagtttccactgctttgaaaaaaaaaaggtttaaacaattcgtttaaaacaactgttctaggccacgggtcaccatgttagggcttagaacagataagtggcacggtcatgtctgcatattgtgaagtttagtctgtcaggggtatggttagtggagaaggggtgaaaccagagcagagaatctagctggacaagaggtaaaagcaatgttatcctttcaatcagaaaaccaaaggaacctgcccccaccctgaccggtctcctacaggaacctcagtaaattcccatttatttctctgttcttcagaccgatgttagatgcattctttggtctgtgctttctcttcctgaataaaatgattgtatttacatgtgctaaataccatattattatcactgactatacactatataacatatattactatatactaaatactgtattaaaaggaacatatcttctcatacacatgaatatgcatacagcttcatgttggctaattagtttcactgagtcctttggaaaaggaggcagactaaaaaatgaaggagtaaataattaggtgtcaagtaattaaaagtactattgagaaagaatgccttttaaatagtttttttaattgggtttttaatatgactgacttggaaagtttctctcagaagatggtgttgattgacagacaatatagttattaataacatgtagtcaatctgttaggaatatattaagtgttcaggagatagaacatctgaaaagaattgctaaggattcaggcaacagattcagtgtggaatgcatctttttcttggcaaggagtcagtggccattgagcagaactggagtaaatggagtgtagaagatggcccaaggaccctgttggatcagcatctcactgtttggaaatgcaaccacctttaatgagaccagaagtcatcagttgaatgactgaccctatgggcagtacattgagtaaacagtttgtaatcagagattcccaacaaatattttatgaacatctgagtagcacatctctaaaacttggttgggtgatttatttatttatttattttgaggcagggtcttcctctgtcacccaggctggagtgcagtggtgtgatcacggctcaccgcagcctcgacctcctgggctcaggtgatcctcccacctcttcctcccgagtagctgggaccacaggtgtgtgccaccattagtgccacccagcaaattttttaattttttgcagagacatggtctccttgtgttgcccaggctggtctcaaactcctgggctcaagtgatcttcctgcct

SEQ ID NO: 66611 - DNA, 1022 bp, Homo sapiens
tatgcagtggtccttgctcagtcctcatatgactcaaactatttacgtggttgatgtcacgctccttctggagcatttcctttttgtttgctgagggtctctgctctcccctggttctgcctcaccacactactcactacttcttccacctctttcactggttcttcctcctcatgaatcctctgaatgcaggggtgccccagggctcttctttctgttctacactccctgggagatcttatacaacctccaggtttaaacccatctatctatcgatgacgcccagatttatatctctagtctggacctctgccctaaactccaatttatatatccctctaaacaggcaacagctcttctcaaacctaacatgcacaaagcctgttccctgattttttcccacctgcttgccaacctgctcttcctgtgttagttctattccttgcttcactcaagcaaaacaccttagagtttctttgtctcccctttctctcacatcccacatccaacccatcagcagatatcttcagttctgccttcaaaagtatgtgaagtatatgatcggactacttcctttcaccttcacaccctcaccttggccatctctctcctgggttattccaggagcctcctacctgttcttcctgcttcctctttgctcttcttcaatctgttcacatcactcctctgcctaaaaccttctaaaggttccccatctcagaggaaaagctaaaattgctgtcatgtcccatggggctctacacatctgtcacagcagggcccaccctgatgctgtgctcccatctcctccctcagtccttgggtcacctttgtctagccacacctgcctccttgctgcccctcctacgtgccaggcacccttgcacctctggacctttattgtcctagctgcctgcagggatagctgccccattcccttcaggttcctacctaatgccaccttatcagagagacattcccgccctaaccataccctccttcctccttatcccactctactt

SEQ ID NO: 66612 - DNA, 1960 bp, Homo sapiens
ccttccctccttcttcctctcctcctctcttttcccttttcctcacctccatcatctcctctctactaggacttcactgaaactctctactctagggttcataagctggggtctatgaatcctgcagagtctgtgagtgagtttccaactgtgcattaacccttgaaattgaagtcagcattctggattcatggccatgaatgtgttttgccagggagaagttttatagcttttaccagatcctcagatttctagacttggatctcccacttctcttctcaattcctagtcttcggtttcttgtttccccaaattcccatgacaagtgagagtcatagtttatctacaattgactttaaaatttgcagctgtggagaaagtaagttcacagaagcccttcgtgaagagagctcactggttggaaagtgcaaatgtcccagcagttgtgtggattaaatgaggtctcatgagtgagtgtttggcatgcaggcaaagctaaacaacagtgagtttttctccctcccaagctctactgaaacactgttctttgcagatgagtagaattatatatagtctgctaggctgccataacaaagtagcacagactgggtggtttaaacaacagaaattaattgcattccattctggaggctggaagtccaaaatcaaggtgcctgcagggttggtttcttctgaggccttccttggcttgcaaatggctgtcttcccaccatgtcctcacatggtctttcctctgtgtatctgtgtcctaatctcttcttataaggacaccaattgtactggggtagggcccaatcatatgacctcattttaccttaattaacttttttaaggccctgtctccaaatacaatcagattctgaggtactgggggttaggacttcaacataggaactagtgggaggcaccattcatctcataacaaattgagtaaaattcctttccttgtagagtctcactagtgtcctgcctagggaggcagtcatgggaggagggtgagaataaagcctatccattgaacactattgcatctagaacttggtcttaattcaaaccactattgacaaaaggttatttaggaagcactttctggctgagtgggtccaggataattattaaggacccatgcatgggttgagcaggagttgtggacaccatgttagcaagtagccagcccagtggttgcctcgtcttcctgacagataggaagaaactgtgttttatttatgtgtgctgctattcttagtcttgcacttttccctttatccccagtggaaaggattattgtaactactctatcttgaacccgtctcatagtcaaattaatagatgaggctcaagtcgttgccctggagttcaacagcaaaaacatattaacccaaaagcattatcatatcattagagcagtgtgtgtaaaagtttaacattcagaacaagaatgaaggggaggaatgggaaggggttgggcaatggggctaaggaggatgtccaaatatcttgtataaattactctactctccagtgagagtttcttaacaaaaccttttctataatatcacctgcaatgtaaatacatgatctgagaagaatctttcaccaaagccaatagccagagaatcgggctccgaggggctgtttcagatgcagtaaattagagctgtgtgcataataatatacactggaagcaggtgaatcaataatctcagtgcattcaagtatagattcaaagcagtttattccaggaacaataacacacggtatttatttgcataggtctagaaaacttaggcaatttctttaaaaaattcaagatggcaaggttctctttgccctcatcatcctacccaatcccccaatatttaattcctccagattgcctgtctcatgggtgatagcctagtttatcatcgcaccaccctctgcttttctccgtaaactg

SEQ ID NO: 66613 - DNA, 1046 bp, Homo sapiens
ttattcccattttacttatgaggaagctgagacttgagacataaacacagtgcccagggcaatttaactggtagctgacaagaggcagccacgggagtttgtgtctaagcgaaaaatgtgaccatcttttaaaatgccgtggtggtgaggtctaccaagtaagacaaacaggcaaataggggagtaccctgtaatggggataaagttagaggatttcttttttcctttcaagctgcagtaggagcacagagaagggagagattcacgttgcttggactgaaggttccagaaggctccccctttaaaaagaatgggagtcatctctatctaaatcctgctacatgtggaaaagcaacctctaagcctacaggtgactgcctctgaagcatttcttctaaccgtcagtggcgtagagatcccagagtgctctgtgatctgacaacaggagtggggccatcaacggaggctgcgcaggcaagtctgagttggcaaaaccagcaggactgggcaacttctgatgttgcgctctcaggcctctcttctattattcttgccagctgtggtcagtcaatattagctttggttccatttcaaatcaaaggaaaatccacttggcaaatacttatggaggccctacaacaccttacacaggcactacatatccagagcataaaaagacgattaagacctagctttggacttcaaggggctctcgttctaggagagagagtagtgctaaatgacatgggaagagctgtcacaggacatcacaagagtgtttaaaaaaggtatgtttgattcatttgcagtgtttgatgaacacctactgtatgctgacatggtgctaaggcctgggaaccagaaaagaacaggacacagtccctactcttaggaagcatactccttcactcgagaaacagacataaatcatataattatgataaatgcttgtgtgatggaggagcaggagactgtggtgggaacacagagagatggtggctaactgcctctgaaaaagggaagggatcttgtatttgccaaatacc

SEQ ID NO: 66614 - DNA, 1038 bp, Homo sapiens
ctcccctctcattctgagttttctccccgctcaaatgggcatgataccacttgaagaaacaatccccagtcccttccagcaagacgaactgctctcagtaacctgtggtgagtcagtgggaacatcccagcctgtttccagtcacacctttgcctccaagagaaaccagtgccagccctacattctagttggctcaggtaaaatgaaagcatgggggaaaagggccccagtctggcatggaatattgaggactcagagcctttttgctttttgctgaaaacctcttaaccctgggcatgaccaggcgccatctgctgaacacgcatccataagccttgctgagggaggcagcttgtttcctcctcatgctgaggctactgctacaaggctctgtcagtgaggctggttggaaagttctagaaatgtgggtcaggtgggctctcaggcctgtcacagctgagagacaagtctccaggcctggaagaggagagaaaatgaggcttccagcctctagaatgttctgtttgatgagcagcacaatggggccagaagcctgagaacaagtgtgactgaggccctgttaagaagagaatgcaccccctggaaatgtcctcaggaaacatggggaacagtgtctgatctgaacacacacctgtacagaccttgtccatgataggaatggcaaacggctaccatcaacagcaccagccgggggctgactcctcagacacaggcactactctccacaacaccccgataggtcgggttaggaccccagtttcacagacagagacactgaggcttaaggggacatagaaccagtcagtgctgaggctgaggctgtggacttccatagtagctttcagacctgttttcccatttgatcttctcaacaagcctacgagatgagccaaggtgaagaaacaggctcagagacacacggtgacttctccagtgtcacacagctaaggagcagcagggcctggactcagagccaggcctgttgggctcaggttggtgctatctcccctcagtcca

SEQ ID NO: 66615 - DNA, 1560 bp, Homo sapiens
cctactcacaagatgatggaatagcatgaggccaagcccaaacttcccaactgccttcttccagccaagatcatattctctgtgttgtgtgatgtcctacttctggaattactaatgtccatgagtcctaatgatgggccccgctgtaccagttggaacaaaagattcttcctgcagaccctctgcagcacgaactttttcaataatgtcagaaagctgtgtggggcataattataatagtgttcatccttcaagcatactttctgctgggactgattaaacaaggtctgacaagcatctctcctggatgactctgggtattaaggcaaccagagtatgagtcacttgtaatgccccagctagaagtttttccagggcataataatcccctagtatggacagaaactactagtgacaggcaaaacgttcagaggctgtgcttgtgcctggagcaacagctttgtcctcctctcctgcccctgccttgactttgaaatgttctgtcaagaacgatcagcctagaattgaaaggcatccatgtgtcagctgagccaaagagagatgggatgaaaatagcagctgcctctagtgttttaatggatgcccgtgtcccttaagggcaccaggcctggccacacagtgatgaggagtaagcctggaaggcccagcctgcattgctctgatgtgtgactttggatgacccttgcccttcctgggccaagtttgctctgggagtaaatctctgaggtcccttccagcactgatgaaggaacctatggcatgtcctgggggacactagattcaatgcggagtaaggtgaagtggacttttaaaagtggagatatttagaaggagataaacctgggtgagaagccccagctctagctctccccactatgtgatgcccagcatcggactgctgccctgcctctgggtccttctgaaggattctgagactggaggaagagacagctaggaagcacaactgattggggttctatttttgaaagaggcctgcgttggcatccctagagacagagcacggtgcatttccctgaataaccactgctatttttagagggcagaaatgaacggcaccccaggagagaaggcgagaagagtgactggatgcttctagagatgctgcaggtcctgagctggatctcagtcagttttttccaaggtgtctgcctgggaagttgcttatcagcctcaccgtgaccttggttggtatggtgaggccactgctgtcctgtatgctgcaagggcagagaatgctgggtgccaaccccagggaaccacttttcacccttgtgtggcacacttcttacagccattgtcagctgctgtggaggaggagttgtctggattgaatgtctcccaaccacagcaggaaaacaggcagcagaggattactgtctgggactaaaccctccgggacatgttcctgaaaaattttagagatgggtggaaatcaatagagattacagatgagtagaattgtggattcttagactacaagggcaccacatccagccaccctgcttaagtgagctgtcc

SEQ ID NO: 66616 - DNA, 1089 bp, Homo sapiens
agccacactgtgcttctggaactttatgtgtataattgatatagtagtaataacaaaataatgttgttgttagggtcaaataagataatacacataaagcacttgggacaccacctggcacatggttaacactctcactccgtgttagttgggatattattattcttggcaacagcagcagtagttgtagctttcatagcagtgcttcctggcctttgcacctttacaaagctcttctctcagtatgtgcagccctttggataccttgagcctggcaaactcctgctcattctcccaggtccccctggaggtgaacttgcaggcagcctgccccgaccccacaggctcattgccttgcttctgcccctgtcccacagccgatagtctctgtggccttcccagcatatgtcaccattctctgggcacatgggggcatttctagatgtcctgactgggagctcttgaggtcagggagatgtctgagcaccacgaaggcccccagtaaatgtttatatcatgaatttgtcactgtcccattcttagtcctgcccaggactaagaaattcataattggtgtttgcagggatttaggcaaagaaggttaaagctacatggtgaggagcgtgtattagtccattttcacgctgctgataaagacacctgaaactggaaacaagaagagatttaattgttccacatagctggggaggcctcagaatcatggccggaggtggaaggtacttctaacatggcagtggcaagagaaaatgaggaagaagcaaaagtggaaatccctgataaacccatcagatctcatgagacttattcatgagaatagcatgggaaagaccagcccccaggattcatttacttccccctgggtccctcccacaacatgtgggaattctgggagatacaattcaagttgacatttgggtggggacacagccaaaccatatcagagtgtaagaagtacatgggaagccagggctacacctgtgtcccctgcacctgagtgtcacagagaatcagggagggcctcattatctaccactggcaacaaaagccccacatagctttgacctcaaa

SEQ ID NO: 66617 - DNA, 1042 bp, Homo sapiens
aggctaagagtatattgtcccatatggtgccaattatgtctgttaagtaaggataaataaacatttactgaactcttactatggcttggtatctatgctaggcatattgtatgttttatcttcactataaaaacctatatatttttggctctaagagatagaaatgtccccatttccagtaatcaaactgcaatgcagagaaggacatatagctgatacctggtaaagctggagtttgaagccaggcctgcctgtcttgtcctttggaaataccatactttccccacacagggagaaatgctaaggctggttctagcagggtgccatgcactgactggtgaggttggagcggtccttagcagtgctgcagtggccactggtaacctcatgccggtttcagctctttctttccagaccatgtctatcttcctaggcttcttctgcttccctgtgattgcacctccagtctctactcagagcactcaggatgcccgcggcctccccataccaccattgtcttccagcacccagtgttagcttcattactattcctggtggactaactgaacacatgaataggcttagggaagaagaaggagcagtgaacctaagatgaaatttaaaaggtgccacagattgtgctgggaacccaggagttcccgatttgcttaaaaaaggaatactgtgagggaacgccttctggcccagggctcccatgctttgggaaggagcagcagacagccacagaagctaagtgtggaattctgccctttcccaaggccggccgggttggggttagcagagtgaactcagccactgctgtggatgttgctgctcttccaaaacccctttgatgcaatccttctttacctatcctgcatcctcggagtagggaagctgcacagtgctgggtgtgcagtcagaatgattgcagagccatttacaagccaaatgctagtttatttccaaatgggaaggtcagtgtcattatccttggtggattcaattaccaaatcctcccaaacattgggctcgcttcctg

SEQ ID NO: 66618 - DNA, 1040 bp, Homo sapiens
gatcccagtcatgggcagaaattgctgcctgaggaggctgcccaagaacactaatataccttgtcctcccctgccttcctgccttcttcacagcatgccctaaagcacctgtgctcaaactctctcatttcagcattctgttttactcttcaacgttattgaagaccccaaagggttttcatttatgtggattatatctgtcaaaatttgacatattattaattaatactgaaagatgttaaaattgtcatttatcacttatttaaattaacaataataaacccttactttaacataaataacatatttttatgaataatgacttttccaaaagaaacagaaatgaatggagtggcattgttttacattttggcaaatcccttcaacgtttggctatatagaggtatctgcttctgcattcaacctcgaaaactccaccgtgagttcataagaaagccagaatgaaaagggaaaatgatgttgtagcattgttataaatagttttgacctcacagacttcctgaaaggttttagggaccctcagggatccctggcgcacactttgaaaactgtgggtataaaaggtgagatactcccgagtccagcggggagtgaggaggaagtcaaccgtgaatctagtaaagagaagacgggaagtgggaacagtctcagtacagaggggacaggagttctcctggaatgacgcctcactgctgtagggagaccttaggcctttgcacatggtattctcttggcctagaatgcttttcccaacttagtctgtttagcagaatcttcttggtgctttaaggtcaagttggtgtaactgccttcagattgcctttcttaccatctttccaaacccaaggctgaactgcactccccacctcacccagaaccctggtgggtgagcatttaagcagaagagtggttgcaggtgtggttccaggttggggtcggtgcctaccggggaaaggtttggatgccaggccaaggaggtggggctttttgtgattgttgtttaaaaagtaagaagccat

SEQ ID NO: 66619 - DNA, 1049 bp, Homo sapiens
gtgaaagagacaagcatgaggggccagccttgctttataacaacccatgattgagataactcactcactgctatgagaatgcattaatccattcatcaaggcagagccatcacaatccaggcacctccattaatccctacctcccaacactaccacattgaggaatttaggttccaacacttttgaggaacacactcagaccatagcagcaagagagtaagatttagagaaggccagtgacttatttgtctggtgaatctgtgacagaactgttaacgggggccactggccactaaccctagaccttagccccatgttgcattccttgtctactcccatcacagtatgcagtcaatcctttgtgcaaataacacgcagttcctactttgctccaagccctgtgctgggtgcttgggttgtataaagggcagatcttcagtccctgtcctgcaagcttcagttcactcaaggaaaggtgtgtaaacaattattttaaggcaagaccattactcccatagcacaagatgagatgggagaacagaagaaggtacatttgagcctctcaggaaggctgcatagaggaaccatctgtgtgggatttgcagggtgccaggaccccactttcttctcttcattgctgtgggaccaggaacaagcctcattttcccatagtgtgtgtttgcaatgactgctggagcggagggtctgtgagaaaggattggggcatcttgccacctcactcagttggatctgtgttctctgcttcaacagaaaagatcccgcaccatcctccaggatccaatggccttggagagagggctgcagggcccacggacattgctgactcttcagaacgtgctgacatggagccaggtcagtccccttgtctgctctgattttctgtcattagctgcaaatttgtggccttgatgagaaatgcaatctcagactctgaacatttgcatgttttttggttggaggcttttacgacttggcagcatagaaagtagaggagttctggccagagtaaaggtagccttctccgggaa

SEQ ID NO: 66620 - DNA, 1069 bp, Homo sapiens
gggcatgtccagagctggttggcttgacccacagaggacgtgtaaaaaaagaaaaaaaacaacaaaaccttttcaagtcttcatgaatgaggactctcagttcaaaattcataggaagattacataaaaccatctgctgcctttatttccccttgtgtgcattaaaaatatgcagctgctcaccgagaaacattccattacgctgtgtggctcacgagctgctctttgacgttcaggacagagaggaggcaaggtgggaggagaggcaggggtgagcacgcacagggatttccactgggctctgagtgtctagaacagggcattccagatttttccacctcactgacgtgctctctgaaggagatgctcttctgtgtatgcagtgaagtttctcggtgagtttgtgtgtgggtgtggatgtttttttttccccctttttaatgtgaaaattggtctttgagtccacaagcagcagctgcagctgccataattaaagtgaaataacctgcttcatccagtccttagaaaggcttaaaaaaaatccatattctaaatggactcaggaatgtggtggatcttctctccctgtttatttgcaacaagttttatttctttacttttctcaggagtcaggagaagggtattaacctttactgagcatttatcctgatcccaggcactatgctggcttgtcccaactgcacagccaggatttgaatccaattttgatgcttcgtttcttcccccgctgccatgccccttcaggatgcctttgaactctggatctctccacctggtctgattctgtccagaggcctgggaggattggcattattaagatgttattgaaaatgctggcacatataatcggcttggattagaaaccaaagctcttcgcagagtaacaaggtgaagtattttgtgctaataatttacgtgataatgagatggttttcagaagattggatgtgctcctaaaggtgttgcttaaagtcactcttcaaaccaggctgggagcataaaaatcccagaagaactacagactctgtagtttgtacagatctcaaaa

SEQ ID NO: 66621 - DNA, 1070 bp, Homo sapiens
ctgaaggtgccagggaagaatctgtcctggacttttctttctgctgtttctttggcttgggacagcgtgaatcccatcttcacctggcatcttccctgtgtgtatatctgtctctgtgtcctaatttcccccctcccccttttttttttagacagagtctggctcttgttgcccaggctggagtgcaatggcacaatctttgctcactgcatcctctgccttctaggttcaagtgattctcctgtctcagcctcccgagtagctgagattacaggcatgcgccaccatgccggactaatttttatattttcagtagaggcagggttttgccatgttggccaggctggtctccaacttcagacctcagatgatccacctgcctcggcctcccaaagtgttgggattacaggcgtgagccatccacctggccaagtttcccctttttataaggacactagtcatattagattagggcctgccctaatgacctcattttaacttgattgcctctataaagaccttatctccaaataaggccccactctgcagtactgggggtttggactccagcatattttcttttttgaggatacaattcaacccataacacccacatggccaccaactgctctcagtttttgcatcttaccatttgcactactagatactacattcttccttcacttactgatttcagaaatcccagggaagaattctaattggttcatctttgatcaggttctggtctcctcaagggaagaaaccgggtctggaacgatgactaactcggcgttgttaaggtgcccagccctgaaccaatcaatgacagccagtgaggcaggattgtttaagaccatgacaatcgtcatgggacccatgaatctgtcagatcagtcagtccatgctgggtacaaatcatcctctaaatcatagagaattgatagcaacaaggagttcatcctgtcttacactccacatcttctatgggcaatagagatggtgagaggagaggggtttctgcttattgtagtccccagggacccagactgacaagccatcccaactgtgct

SEQ ID NO: 66622 - DNA, 1020 bp, Homo sapiens
cccagtcttatcatgagaagaacattagacaaattccaatagtggggcatcctacaaaaacctttccaatactcacactaacagtcaaggccatcaaaaacaaagaacatctaaaaaattgtcatagccaagaggagcctgaggacacatgatgactaaatgtaatgtgtcctgcatgggattccagagcagaagacattagggaaaaacgaaagaaatctgaataaatcatggacttcatttaataataatgtttcaatattggttcattcattataacaaatgaaccatactgatgaaaggtgttaatatggggaaaactaggtgttaggtatagcaggtctgtgctatcgtggcaatttttctataatctctaactggtttaaaatttttattaaaaaacaggagacttttttaaaattagaaaaaaatgaagtgggggaacatatgtaacctccaaattttcttgttttttttttcgtctccagaaaggactctttgttttccaacttggcttctcccctgacaaatgcgttcagcttcaccaaggtagaaataagcacgtgtgtctgcgtgggtgggcacgtgaggtctgagaaggtgggtggggatggcgaggtggcaagcaagtctgcactggagtctcggcattggtttcctccctggaaccaagagaggtttcccgggaggtgaggcatgcggcagttcattaacagccctgctgttctgcacctggtggtcctttcagttcctgtgggcgacattggtctgggacacttgggtcagtcaataaaaggccacctgtgacaagggcctgagcagaagcaaaaagcaaatgtgtcctggctctgggattccagagtcccctgttctgacagtgggaagctgacctctgctgggaagctggcccaccacccgaggggcctgctccatggagagcttgcaagtctttgtcccttcatttctagtgggctttattttgcccttgtctctttctcagtcccggcctgtgtcggtctg

SEQ ID NO: 66623 - DNA, 1050 bp, Homo sapiens
tgtttactgaatatatgcatatttgctatgtgtcagagttcatgctagacttgggatgcagagctagataagaaatagaccagtctgtagtggtggagagagatatgttagtaaataacattgtttgggaagggaaacccaaggcatggcgtctgactcagtctggcagcctcagcggaggcttctagaggggctggcatggggtcagggcaactgtgcatatacaaaggcttgaccctgcattgcccatgtggggagctaaaaatgcccaacaagcctagagggaagggtggttcctggcaaggcagagaccaaaccatgaagtgctttgtgctgtgaatctggaatttcacctgttggcaatggtacaccccggacagttttaaccaagggagtgccatgggcagggagctctaaaccactccactctcctgacctcacttgggtgtcctggtgagcttttgcccaggttccaacctccaaccagatcactgattcacctccttttctggctgactgaggatctatccaaacagcaattttattctcccagacactgctcacccacaagagttcggaatcacccttggagaaattcctttatattctccctgtgttctggacacaatgtgtcttgaatattagcacaattcactggactggtgcctgttgagtgtgtggatggcgaattgttttgggatgcactcagcagctcctgcctcaccacatctgcccatcatcctggagtgcctggtaggagcagataataaatgggccagctgccacctcctgcttttctaatcatctgtcaaagaaatggaaaactcactcgcagtcactgctgaatgcagatggggtcagtgcatgttgggttcagaagtaaggaaaaggaggggcacaggctggggctgcccgtgcagggtttctgcgcctgaagactctgccccagcatgctctcttggccttaacctgccctttcttcatgcgtcctgctagcctctgtactatctgaaacagtcctcaccagcttcacttcagggccccttacac

SEQ ID NO: 66624 - DNA, 2082 bp, Homo sapiens
gcgtcacaaagtgttagattacaggtgtgagccactgtgcctggcctgcacctaattcttgagtcctgtattagtctgggttcttcagaaaaacagaaccaacaggagagagagagagagagagaaagagatttattatgaaggtttggcaattatgagggcttggaagacccatgatctgccaccttccaggaggcccaggaaagccagtggtgtagttctggcccaaaccctaaggcctgagaaccaggggagccagtgtaatatgtcccagtttgagtcaaaaggctcgagaaccaggagttctcatgtccaaaggcaggaggagatggatctcccagcacaagcacagagcaaattcaccctccctctgcctttttgttctattcaggtcctcaagggatcggagtgctgcccacacacattgttgaggggggtctccaatctctcccagaaacaccctcacagacacaaccagaaataatgtttaaccagatatctgggcattcctcagccctgtcaacttgacacatgaaattaaccctcacaggtcccatccccctgagtccccaagtccaggacagctggacaagtcaaggaagggcttccttacaggtaaatagagaaatacaattcagacagcactcccaaaccgtgagtgcatattaatctgcggggacaaatatcataacataattagtacagcagtgctcccagcttaattgaaaatgctgcatatgaggggcagttaatgagaaatgcaagatgtgatgattcagaactgctgagatttagcagctcggtggctgtagcgaggaagtgttgggcttttttccctttgctattctctttgtacatctggacaggaagggggctgaaaggagttactaacagtgtgtatggttagagaactttgattatctggaagtccctcagctatttggaatgcagcagagagctagccaagcaggaaacgaaaaagagcctctgagccgacaaaacacatttctatttggccgtgcactgcagtcttcagatttttgtgatacgaaatcctctcaacccacactcacaactgatttgtttgtgcttactttatttttttatttttttgagacggagtctcgctctgttgcccaggctggagtgcagtggtacgaacttggctcactgcaacctccacctcccaggttcaagtgattctcctgcctcagcctcccaagtagctgggattataggtgcctgccaccacacccagctaatgtttgtatttttagtatagacagggttttaccatgttggccaggctggtgtcaaactcctgaactcaggtgatccgcctgcctcggcctcccaatgtgctgggattataggcatgagccaccatgccaggccctatgtttactttataccagagtttaataagccaggtgatctgatttcccaggcattagcagaactgtagcagggcatcagggcagtggtgggtggggcctccggaggagcttgtctctccaccctgtcttagtccagtcatccagttaatacaggtctttaaggcgcaatgtatgtttggggcataggggagataaagacataaaaaaatctcttctctttaaggagcttacagttttgggacagacgggtgttggctcagtcaatgttcttagtttcagacaacagaatctattctgtctagtttaaacagaaaaggatttaatacaggatattagatggcctgcaaacctttcaggaatgccagggactcaagcttggctgccagagaaccagagaagtacctggcatggcatagggctcctttaacggaatcccctttgtctcactccttgggactcaacattccgggaaccagacagcagagcctacgccacagctgtccagataaacaaacacctccaccactgtgtgggtgggaagatccagtgcacccgagcatagtcaccacctcctgtaacaacatccgccctctacaatcctgtgggtgcatttgctccatagaacttgggtctcgccgcaagggagtcagtatattgtttccagctgtctaggctcgtggaaaag

SEQ ID NO: 66625 - DNA, 3829 bp, Homo sapiens
ctctcagttgccgcctgctcttggctggcacatgacttatctgagcctcagcgtcttggttagcgccctgcattagtgcattggaaatatttgctctcctggtttaggaaaatgcctcccacagtcccggctccacgggaggctctcggcactgttcttcctgcctgtccctggtgagcgggtgaccttctgccccctctgacactggcccaccctggagacagtggctgtgttcttgcagccctccctcctcttgtgtttctgtttgattctcatgattcaatatcccctgcagcgttttgttgtcattttctgttttactcttggaaagctcacagggtttcccctttgaagtgtttcattttttgtttgtttgtttaaattcagcattgccctctgattggggcacatccagtgactttatagcacaaattcagaaagagagttgctccagtgccattcaaaatggaccgcaaaatccactgtgccgagatgtgtccgagtacaacgacaagacagcccatgcacaccgtggtgcctcacaaaaggagaaaacacaatacctggagtctgataaatgactgaaaagtgctaaaaatgacccccgaaacacagacacctcctcccctgttccctgcctcctaccgtgtcatgaatttgtgatggggacaaggagcacacaaggcccccctcagtgccccgatgaaagtcactgaagccaggaacaaaagtggagccccagacaaggggaggggagcagaaagggggatggaaatccactgacccttcctggagctcccaaggggcactagaggaatgaaaacccttcctagcccccaggccccgaacaagtggcaatctccctccccagggtacagagtttaaaaatgcatcagatcaaggcctgcatggagggatacctcacacactgtggaaggggcagatttgggaactaaagtttggcaataagactcaagagcctcaaaaaagtctacatgccttgacccagtaattctgcttctgggaatctgtcctaagaaaataatatgaaatgcagacaaaaatgaatccacacgggtgttcactatagctttatttatgtgagtgaaaaattggaaaccactaaatgctccactttagggaattggttaggtaaattatggttcattcatagagtggaatattttgtagccgttaaaaatgatgtttatagagcttttaatgacatggggaaatgcttatggtatgcttatggtgattttataccctgtcttttgcaagatgtaaaatcacacacggtgtgatctcagccatgtaaaacagttacagaaaaataacaggaaggaaaaacacacacacaaactgttaacggtagttgtctctgagtggtaggattgcggatgatttttcttcttttctttccacctttctggttttttatttttatttttttctatatttggaaactattggtcatcggtgttgggtatttatttaagcctcacaggcaatgaaggaaaaaaacatcaccattagtctgaggcctggcgagggatatgacagctgtttttccctcctgaacatgcattgcttttgaaatcagagaaaaaattaaataaacgttatttaccaaattaaaatcaaatcaaaataaataaagcatctgagcccctgtcgaggaaggcctctgctcctaaaagaagcgatcgcctgcttccagcttatcatttttcagggatcttaaaaaaccagccactgtgaaattgacttctaactgatcttaattgagatggggcccaaatgcaaggatcagaaatgaaattcgggctggttgccttatggctgggctgccaaagagactctgcacaatcccaggtcacagaggagctaactggagttacttctctgttccggattccacctgccaccttccatataagactccagggtcctgccgcccccttgctagttttttaccagctcagggatgagtgggggttgatttgagactatctgggcttgaggggattcttaaggctggtggctgagcattcactccttaaccctaccaacctccgccccccaccatacacatgcacacacacacacacgctcacatgtgaacacatcatcattgattctgtccctctgcacaaatgcatgctgcgtgtagtgacaggctacaatgagtgggcaccatgctaagtctctaaagtgctttaccttgtttaattcccatgacgactctgtgatttaagtactatcaagcctcactttagagtgtggcagactcaaacattcttccttctgctggcatgtgcagctcctatgattttgggagtgagcctgatggtctcatcggggtcccctccaacttcagagtgacgaattctcttaatgttaaaagccagccatgcaggccccaacacacaggctacaggatgctgaggccctcccactctctccaagtcacactgccagcccgtccctgcttgccaccttgctgcctggccctccttccctgtcttcctccttttaggtttctccctcccacacacaaaacccctcttccagcagtctactgtcagattcattcattgctttcttagatagaacaacataactcttctttgtctaaacccaggaggccttccctttcatatccaaacaaactcatcatggtatttttccttgaaaaaaaaaagagtgctttatcaaagatacattctgccttcttttcaagccactcagcatcactggggccagcattttaaaactactttgtgtgtgtgcttcttattgctctgtatgctgcaaaataaatacagcgctggaagacttctaatattaaaatgaagagaatatatgaaaaaagaaataaagcaactgatgtgatttaaaattgcaccaatacaaggtgctgtggtactctaatacatctgaaaatctctgcaagataggtgattttccgggaaaatgaaaattagtcaaactgactcccaaaaaagtagaaaaacttgaaagaaaaaaaattatatgcaaagggcccgttgagaaaggttttaatggaatcatttatttttaaaagaccccaggctaagatgattcaatgctgaaactttccaggtagcaaaaaacataagattcccatgcttgcatagcagacaagcgttggggtcagatggccggactgaaatcctgctttaccatttaccagtaaatggttactagtaacctggttactaaatggtaaaccagtttaccatttattagttgtgtgaccttggatgagttacttaatttctctgaatttcaaatcccatagaaattcagccaaggaagtagtcacaataagacagcatagtccaggtgggctttctggaggaggtggcctatgatggatttgatttattggcagtggctaccagtagcctttccacattattgctcagacctgttaaaatcaagggatggacttataaacttataagtttataagttataacattgcccagccaatgttagggtagagtccatgtcatggaagtgctgagaatccacaagtcccattgttgcttcttgacttaggcacagcagcattaaattctatgggcagcagtcattcagtcctcataatgaccctgtgaggtaggtgctgttatcaccctcctgagggacaaggaaactaagctaaagccagtcacagagagtgcctcacccagggtcacacagctattaaatagcaaagccaggatcgaaactcaggcagcctggctctagagcactttaccaccatagttttctgtgacgagtaccttgcgtttggaaa

SEQ ID NO: 66626 - DNA, 1033 bp, Homo sapiens
gctaatttttgtatttgtattagagacagggtttcaccatgttggccaggctggtctcgaactcctgacctcaggtgatctgcccacctcagcctcccaaagtgctgggattacgagcgtgagccactgcacccggccaattgttttctttttctatcttcctttctttttctataaagtgttatatgctaggtacttttcacgtgacatctcatttaaccttttcaaaatgccacaatgttggttccattattatccctgcttttcaggtgaagaaactaaggcacagagaaggaaagtgacagtctgaggtcccccagttaagtaggtagtggagccagggatgatatgctcacttttccctctagggagggcacccagccaggactctacatgaaaaaatgtattttgatgctggctaatgccctattgacaactgcacactgatccacgtcctagttcaagttttgttactgtaatctgggctctgacaacatatgaagtttcttccttcagtatgagaagaaagatagggagactgagaaactttgtcaagtcagtcagtcaatcaaacatgcaatggctgcagggcttctgctacctctcagaggcttccacgtgcaggatggcaacttgggagataaggtgtgcctgcattcagtcagctcagaagattcagtccagtaggagagcaccatggccataaacagttggcatgtacagagctgggtttctgtgctcagtgacaaagataaagggctgtgaagtttagagccattcttcctggagaaatcaaggaaggctttctgaaggaggtaacctctaaatccttacttccttagctaccttctgctgttagagggtgagcccaccattaaagaagcattttcccccacacacagcctctttgggctctgtcttccttcagcctgaaggtctctggttgtttaagaaaactccgggcaaaaatttcaccccttgccctgagtcttttccccaccttccctttctcccacctctacagctagtctgc

SEQ ID NO: 66627 - DNA, 1258 bp, Homo sapiens
gtgccggccaggcgtggtggctcacgcctgtaatcccagcactttgggagactgaggcaggcagatcacttgagaccagaagtttgagaccagcctggccaacatggtgaaaacctgtctctactaaaaatacaaaaaatcagccgggcatggtggtgctcacctgtaatcccagctactcaagaggctgaggcaggagagttgcttgaacaggggagacagaggttgaagtgagctgagatcacgccattgcactccagcctgggcaacagagcaagactccatctaaaaaaagaaaagaaaattagtgcagggcacaaataggcagtgtgctgggaatcactgatgcacaataaaagtttacgtaataaatgagtaatgccgccactactgctcatagaaattgcctgttcagctcctatttggtgccagttactggaatagtcacctgacatacatcttctgacttaatcttcaaaacttcctgagattgctcctattttaaatatggggaaaccagcagagagttgttagataaatcccaaggccacatagctagggagtgacagatctggaattcaaatccaagtgtctggttttaaatgaccagcttattaacattgtgtatagagaaagtaaaggagttggtgtagtatttctcacataaatactgcgtgtgaatattgcgatacctttgggttgctgagaggctttttggcataattcctgtttctcagaaaagtttcagatggctgagtttggtgggtaaatgaatttgaaatagaacccagcactgtccctgacacatagcagaggcctaataaatatttatgattcaatctattcattaatgatttacttgctggtgaggggttatgctgtcataccttttaaaaggtagactagaagcatgatggaaaatgcatgggctagatttggaattacagggacctatgttcaaatctcggcttttgtgcttactagctctgtgcccatgggtaggtaggttaaatatttctgtgcctcagtttcctcacctgcagaatgggaatgatgaatatctctatagtttatgtgaggatttaataagttaacacatacagtgcacttagaatagtccctgtaggtagtaagtactagataaaagctattattttttattgtaagcactcaaacaaataagaattattagtaattgttactgcatgctactagggttgtgtcaatgatgctaaataaaaattgaagaccaaattat

SEQ ID NO: 66628 - DNA, 1092 bp, Homo sapiens
agcctctttgggaacattgatgagtttgctcaggccttacggtggtcaggccctgagtgtgagtttgagtgagtgcagtttatgtttttggccccagtggatgggctgttattcctttgtctgttcatccattaatccaacaagcatttgctgagaagcaatttggtacagaagttaaaagttggggcttcacagacagaataagccttagttgttgagtttactttcgtgtgacactgggtaagttgcattccttcttggagcctttgtcttttcttcaccgtaaaatggaggtaacaatgtctatctcagaattctaaaatctgttgatataatatatgtattaagcaactgtactgtcacaatcatgctgcattaacaagccacttgaaaattcagtagcttaaaacaatcattgactcttactcgtctgtctgggagtgagctggggtcagctgatctaaactgggctctggggggtttaactccaatcagcaggtggatccgggtctgctccatgagtctctcatcctccttggacccacaggagagctggggcacattcttttcatggcagcagaagggagaggtcaagctccctagtgggtagggaaatgcactccacctgtagtaggaagtactgaaaagtccagggcaaagggcacgaggagaagggtgaagaattaggagcaatgattcaatcttccactatagatagttcacagcacccagtagttgccctagttttctggccgacaaactagagagtagaactgcttcagccaggcgcagtggctcacgcctgtaatcccagcactttgggaggccgaggcgggcggatcacgaggtcaggagttcgaggccagcctgatcaacatagtgaaaccccatctctacttaacaaaaaaagaaaaattagccgggtgtggtggtgagcgcctgtaatcccagctactcggaaggctgaagcaggagaatggcgtgaacgcgggaggcagagcttgcagtgagccaagatcgcgccactgcactccagcctgggcgacagagcaagactcagtctcaaaaaagaaaaagagagaacttcttcgc

SEQ ID NO: 66629 - DNA, 1047 bp, Homo sapiens
tccttgaccaagctgtgcaaagtagtctgcgtaggtacataactgatgaaaccctccttttggccaagcaatattctcattatggcacacctacttctgtcctaggaacaccctccaactcctttgagaaatacgagctaattcaacactgagcacgtgacctagtgcactgtaattctctgcattgtgaaccaaatatgtgtgatcttcactattttggaatgaaccagaagaatgaagaaactatccctggccatacagctagtaggtggggggggccaggactggaactcagcttcagattgctcatctcgggcatgtttttcttcagatgagcataaagatgatttgcctgcctagagaggtgggcggcttgcatgaataaatgacagacacatcattctagtgagccagggagccggtgggggagcacttgcttaaaaagagacaaacagctttgcctgagcctccctggttgaaataactgcatccgcttaagcccctggctctgttagcagacaaggattatgtgatgtgctcagaagcccagccatctattggtatttaatgcattcactgtcagtaaagattccctggtgcaggaggctgataggatttagagatgcaggcaggaaacttctcacatttggaaactggtgtattacaagtcaaggccactttcacttactgcacacttgaccttgtgaaataaagccctgtcctggcccttaccaaggaaggatgagaagttgtatagagttattgaagggggccagccttagaattcacaaagacttgagtttgaatggaggccccactgcctactagcttggggaggctggaaaatggaagaaagtaatgctttctgaccatccattgtataatagtcacctgtaccagtgtggagatgcattaattcacttaaacctttggttagccctgcagaatgtagatgtagttgtctccattttacacatgaaatcaaggctcagaaaggttatgcatcttgtccaaggtctcatcatcgtaactaatagagaggcctat

SEQ ID NO: 66630 - DNA, 1144 bp, Homo sapiens
gtaggccatgcatagggaggtctaggcccacttttctcatatgtggttaagtttgcacagatttcaataaactggagggtgtgttggaatcagtttcccatatataccaagggagagctgtattcgtccctggttttagtagcattaacagtggtgctggtcctgggttactagggttactgttagacattggaaattgtgatactgattaaaactaatcatgtttactactttccattggctacctggacatttaggggcaaacctgcataccacctgcaacaagtgtgaaggagttctcagcagacattttctgtagtaacaacagctcacattttactgagcatttattgtctacatggactctttgcacctttctttctgcaaactccatgtttctggaaaaactagagtgcacgtctcacttttgtaaaacaagcaatgttctcaatgcccttgggaaataaagaaactcatttgaattgtagatttttgtgctgtacataatgacctcgttacttcaccatgtttgcggtgccatttgctggtttttcagactcccccttgacttacagacaaggccaggtgggcccagctgctgcctctgagttggctgtgaactcagcttccttcttctcagcccagcaaagtctctgctcttgctaggagtcagacggccagagcagagccctgacggggcccacagttgtggacagctttgcactgtcatgcactggcccagagacaaagggaaacgggagggcttttattggtcacctgcctccatgcattgggttcctgatagatagcagatggagagacacgggagttaatgaggtctgcgttctggccaaatgctttccatcttcctctcgccactgagcccattggaaaagaatgttgtgctgggcaggtggtcagggagagctacaaaagctgagctttcagcaaaggtgttagggaagggagagagatagcatgcactgattcaattcgactcaattcagggaatatttattaagcactgcctctattagtcacctatatgtatcatctcatttttttcctcgaagatatcctcccatgtaattgtcattatcctcactttacaggtaagatacttaaaagactcagagatattaag

SEQ ID NO: 66631 - DNA, 1012 bp, Homo sapiens
tctctcatgctgttttattataatcctactggaagatgagaagcgagaaagatagagtttattgataggagagaaatgttaaaaaaaaatcacacacaaggctgacatggatatatatgtgaaaagtagatgaaagcaaaatggctcagagccgcacactccaatggaaatataatatttttaattttctagtagttgcatttaaaaaaatgaacagaaacaggggaaattaattttaatcatacatgtaacacaatctattcaaaatatcatttcgacatgtaatttgtttaaaaatttaagaaaaatgtaaattcttgttttcactctaagtctttgaaatgtgatatgtattttacactttggatgagccgcgtttcaagggctccatagccacatgtggccaatggctgcagtattgaacagtgcaggcctagactcctaaagtctttatcacgcaatgtgaaactgaagaaccaaggaatgtccgagacccacccactcaccccttcattcatgtgcctagggcttctgatataaagtcaaacaagaaatggcctgtgtcaccagggagcatgcagtttcatgcattacaaggcagtgagctagccatctaaaaggaactgagatctgtcagtttgtccggggtctcaaactgagggctgtaggctgtgtgtgccatttgatttttcctgtactgtatctcaaaaaacattctacccaggcaggtgttatgcttcgtctacaggcagctgaacacctttggccccacacctggctgcctccactcattaggttgcctgcagaccctctgcagacatttgcctttgataacccaggaacaggtgtctctgagaaatcctaagtgttgacaagaccagaggtataaacagaatggacttagagggcatccaagtcgtggtttgcagcccctgcttatgttctagaatcacctagaacagtttttgaacatactattttgggaccccaccgtcggagattctgattccat

SEQ ID NO: 66632 - DNA, 1042 bp, Homo sapiens
cgagggccctgaggagccctgaggagccctgaggagccctgctctctcccaggtaggggtgcagcctcgagtccccacccacgcagctccctattcccctcctggaagatgctgctctcatctttgcctaaaattgtggctctagagagtgctttatttctgctttctgtctgtagaagcccctgggagacagtctgtaggaaggctttatttttgtttttattctcttcaggaagccatgggaaaaagaaaaagtagacacattctctggctaactttggatacaaccacttaatagcagtaacacagcactcttgttaaataatacaaacagaataaaacgaaaatggtgaattagttatagctttattgcagcattaggagataagactatcacagcatagtttttaactaagaattttgtaacagtaattttagctactactttgaacagcatgttcatgtacaggtgattctcattttttacagtagttatgttatataaagtaggtgggaatcctgaattagtgagtgtggaacctttgctcctaagggaaatacagggttaggttcctgtaagcctctgatcaaaacatttttgtcagctcattaatacatcatctggtttcgtgtgtgttctatttaaagacatcttatctaatatatgtttttgattccttgacattgaactctcagccagcaatcctataactcatgcctgaatgaagcttatctagcacatacattttgcatataacacatattacagccttcttgcacttaggaacaccagctagcacttcagcactatgcttggtggacatttcaagcaatgaaatcaccaacaaaaagcacagcacaaaaatgtgaaaagtgtagtactaaatagattgcaaaaaggaaactttttacattatgagagttgggacaagaaggcagagtgttgttttgtttaacctcagctgggaactttgcacctgatgagtcaaatttttcacctctttatgcatggtccacaaatgaccatgatagtgttgggttt

SEQ ID NO: 66633 - DNA, 2867 bp, Homo sapiens
ctagccatcaaaataaagaagaccctcagaaaactatgcagactccaagagtcagggccaaaagcacctttggggtttctctgtctgcacccctattttctaggtggaaaaaccaaggctcagacaggcctaataagttactccaagtctgcctgacagcagcaggcccccagttcacatcccctcactccaaaatcagcactttgcttccctgcccctaactatggaccgtgcagaagtagcacactcacaccattttcaaaagattttctgccagtgttgaaacaaacaggcctgatgacatggtgaaaagccagggctttggagtcacaaagacctgggttcaaatcccatctttgcgttgattagacattgtcagggggcaagttactttcacttctttgagcctcaatgcctcatctgtaaaatagggataattctacccctctcatagagttattgtaaagatacaatgaaatcatgtacacaaaatccttagcagtgttcctggctcagagtaaatcgtcaacaactgttagtgccccctctatctggaagctgacaaattcaattaaccagaaccacccatcctcatcccaatgccctgcccatttcccaaaactccctgtttgcagaatcataaatctcgtgtctgaaaaggagctccataaatcacctggcacagcccctggtagcagagctctctctgtatctggctcagtgtgttctgcagtcttttgctggctcagcctgcctcactccttactgtaagcagaagaattcccaccagcacagccaaaaaaacagaataatgctgtcagtggattctacaaaagggctaatattagctgggcaggaggattgggggtgggggtgtacctatatttggaatctatgtcttcagccctttcctgaggcagcagaagttggggggatgggggaaggggttattgccaggattgggcagagcagctgggctaggtctccccttctctctgttgggtgatttccttctccccaggatgtgggtggcagaggaaaaaggctgctgggagggagaggggaggctgcaaatggtacccccaaagcagcaaggagtatggcagtggtagaggcccccaaagtctcctgtaaggatgacagggccattggaacctagctgtagagagtcctggaggggtgggttctgtaaccttctactccaagatgggatccaaagagcatgtttctggctgtgtcttcctggagaggccttggataaaggcccaggcatcagggggcgctgggcctgcgctaggagaaagatgcatgccggatgtatccctagcagcagctctttgcacattctcccacccccctccaaacatctacactttctttctctgctcttaaactcatcttggggctccagtgtccccctctgtgaacacttcctgcctcctggagaccctgctagcccttctgtgcaggttagaagacaatgcccttcctccaggcagacatagcccggcaccggggcacaaggctgggtgagcagagtgtgagctggctctgaggtccctcctgtcctcatgtcttatacagtatgccattagcaagtgaaggccacagcatactgtataagtatacttggcaacagctttggggctgaatgaaatggccagtggcctgaggtccagtctcctaggtagtatagcaggatgattctcagtaaggatccttcccataccaggtcttgattttcctgcccttaaaatgaggagggtgggtgagatgccctccagggtctctttcagctttacagtctatttatctgctcgtttttaggcggcataatgaagatataatcagaaaagcatgtgtgctctaccttccccccacataaaacccatatgatccaaagagaaatggaaattacttttgatttattcatggtctgatgttgctgttatctgctcccttctgctagggtcttaggctggaccaggaggcctgtctatacaggatgctaaggattacctgtcacccagggagaaccaacttctatttgccctcaagctgcatctgcagctgtggcactatgatggccctgggtctggaagtttaacccaacaagacttgggaaacttgaacaagtctgcagtggacttaatgactgttttctagcatcatgtcactgttttgaaacggttactgggctgcattttctgtcttcctttttctatcttggagagatgggcaggaatcagggaaggcctggggagtggagacaaggctagcaggaaaatgaggaaaccaagggtgtgagtacctgcctggtggagttgtgttgctctcaattggtttgcttgtttgcaggccgcagggcagcagtgtcttctcacctgcagagtgcaaagcgcatttctgggctggcacagaaacatgcttgccctgctttgcctacaggcatcttttgcacataaataacttaaaagcaccaaactttgcaggggaaatgtttgcatgtggcttgcgtctgagaagcacaggcatacacacataaatgttgaaggattaaacacacacaaacacatgcccgcatgcgcgcgcacacacagacacacacacacacaccccgctcacacatacccagcaccttctaacttctttgaggattgtttattcccatgaatagattttaacttggtgatttttagagtcagggaatgttagggctggaaggaatgtaggagattattcagtctgtcagagttccaacttttactgaccacaaagacatcttcaaaggaagttttacagggatccaaagtgtataaaatacagaaaagcagagatgttctggataaagtggtgaagtgagggag

SEQ ID NO: 66634 - DNA, 1012 bp, Homo sapiens
gttaattgggacaggtgactacaggagccacaggcttggaggcagggacacggagagatgggaatcacagcctcctatgtgtcccggggccaggcgtgggtgattacagcagccctaaagcaggtgtagtatagtctgtgctccggctcgcttcttccctgtgtggttcccatgtgtggcatccactgcttctcctgttcccactcaaatgggagggggccagctaagggacttacaaagcccagagccaggccctggagctgtggtggcaccttgctaggtctccagcaacttcacttagtgggtggcaggctctggaatgagtaggatatgcctgcccactggagccacttgctgtggggagatggccacaaaaggaggaaggtaggccttttggagctctttggaggctgcagtgaactctgacttgagaagagagggaaggagaaggaaaagctgtggaaactacagaagactggtatcttcagctattaataatgctgtaacaaaatacttgaggttgggtaatttataaagaacaaatttatttctcacagttctagagactggaagtctaagatcaagatgaaacaggtttgatttttggtgagggcttggtctctgctttcaaaatggcactttttgctgccacatcctccagaggggaggagcactgtgtcctcaaatggcagagggaacagaagaggcaacaaaagggggccgagctagttccctccaccccttttataaggcactaatctattcacaggggtagagctctcataacctaaccacctcccaaaggtcacacctcttaatactgttgcattggggatcaagtttcaaagtgaattttggagaggacacattcaaaccatagcaagaggatatttgatatgcatctgaaagggtgaaaaagagctcaccagacagaaaagtacgcagagggaaagttttcataaaggccctgagacctggaaggccctggagtcctagagaaatggggagaggc

SEQ ID NO: 66635 - DNA, 1112 bp, Homo sapiens
ggatttccctaatgatgaatgatattcagcatctttacatgttcagaggaatgtcagaggaaatgtgatccacatggaatcatgaaagatgcataggaatctgcctagtgggcctgtgggacagggccttccaggcccaagcagaaccagcagttcagtgagaagagtctaactgcacattcagagacattcacaagggctcaaaggtacagcgctgaattggagagaccccagaaggcggaccttaaaggacctgctttgtgaaggagtctgaactttatcctgggacattaaaggttttaatggtttgggacctttttctagaacccagttatgccagagaggcagaattgatatgagatttggtgacaaaggccattgtagcccttgcagaattgtccttagatgggatgcaggcctcctggggacttgtcatcaagcatacccccgctaggagccttattttccctccatggccctacagagagccatcccacatcaccaagaggtcaaactaaaagtttttaattctgatcttgactatgatttccaagctggggcagataactctgaatttcactttctcagtgataaaataaggaccttgatgcctacttcctagggttgtcgtgataaattaaaactaaaaaagcattctccaaaaactttcaacaatctccactggactaaagatggacccatctcttatgaaaataagactatcaatgttgggagctacacagacctgggttcaaagcccaactctcccaatggctgcttgaccgtagacaaatcagtgaactttctgagtctccatctcctcctctgtgaaataaaaatgatcataatacctccctatggggattgctgagaggagtaagtataataatcactgtgctgttcctgggcatatcaaaggtgctaaggagttgcctttgagtctgaatgtgaacaaggaagctcccggaaggctgaggtgcatctccttcatctctatatgcagagcgtaacgccatcatttgacgcctaaagacagcccagtgtttttgtagttgaattcatttgcagctctcaaccctttactcattccaggtttctgtccagtggaaaaa

SEQ ID NO: 66636 - DNA, 3691 bp, Homo sapiens
cttgcctgttctgaacattttatataaatggaatcatacaagatgttgcctttgtgtctgttttttttttggtttttttcacttagcataatgtcttcaaggtttatccatgttaggcatgaatcaatactttattcttgatacaccaacacccatacccacccacacacacacacacacataccacattttgtttatccatttatcagttgatgggcattagggttatttccatttttaactattatgaataatgatgctatgaacattcatggacaagtttttatgtggacataaatttcagttctttggggtatatatctagcagtgatattgctaggtcatatggcaacactatgattaacatttttagcaactgccaacctattttcaaatatagctacgccatttcacaataccaccagcaatgtatgacatttccaatttttttacatccttttcaatactttttatgtcttttttatttccttgtgggtttgaagtggtatgttattgtggctttgatttggatttccctaatgatgaatgatactcagcatctctctttttttttatttatttatttttttgaaactgagtctttctctgttgccaggctagagtgcagtgacaagatcttggctcactgcaacctctgcctcccaggttaaagcaattctcctgcctcatcctcccaagtagctgggactacagatgcccaccaccatgcccagctaatttttgtatttttagtagagacggggtttcaccatgttggccaggatggtcttgatctcttgacctcgtgatctgcccacctctgcctcccaaagtatgctgggattacaggcgtgagccaccgtgcctggccaatattcaccatctttacatgttcttatggcaattttttcttgtcttctttggagaaatatttattcaagtcctttgcctattttttaatttgggttttatgttgtttattgttgagttataagagttctttatatattctggatacaattgtctgatatatgatttgcaatttttttcccattctgtgagttatctttttactctcttgataatgttctttgaagaacaaaactttttcattttgaaagagtccaatgtatctacattttttcttttgtcacttgtgcttttggtgtcacatctaagaaaccatagcttaatctaaagtaatgagaatttattcctgttttctcttaagagttttatatttttagatttacacatggatctatgatccactttgagttaatccttgtattttgtgtgaggtctggagcaaacttcattctttcgcatgtggatattcagttatcttggcatcatttcctgacaagactttcttattgaattgtcttggtactcttgtcaaaaatcaaatgactataaatgtgagggtttatttcaagactctaaatttgattccattgatctatatatctactcatatgccagtaccacattatcttgaatactgtagcttcgtagtaaattttgacattgagatgtggggttcctccaacgttgttcttctttttaaggattatgtgaatattctgtgttccttgcatttccatataaagttcaggatacactagtaaatttctacaaaagagaatccagctgagattttggtagggaatacattaaatctataaataaatttggggaatatttttatccaaacaatattaaatctcccaatccacaaacatgagatatcttcccatttattcaaggcggctttaatttctttttaatctgttttataatatttagtatacaagtctttcacttctttttttaaatttattcttaaatactttatcctttttgatgctattataaatggaattattttcttgattgcatttttggattgttcattgctagtgtatagaaatacaactgattgtacattgatctggtatccttcaaacttgctgaacttgtttattctaatagctcttttgtggattccttaggattttctatatataagaccttgttattgatgagtagagatagttttatttcttcgtttctccaatctgaatgtctttatttctttttgttaactaattttcctggttagaacctccagtacagtattcaaagaagtgatgagagcagtcaccttgccttgtttctaatcttagggggaaagcttttagtctttcaccattaagtagaatgttagatgtgagttttttgtagatgacctctatcaagttaagtatttcttctatttatagtttgttgggtttttttgtcacaaaaggatgttagattttgtgaagtgctttttccatgtctaatgacataatcgtgtggtttttgtcttttatggtcttaatgtggtctattacattgattggtttttgtatgttaaaccgaccttgaattccttaataaatcccacttggtcatggtgtatagttctttttacgtgttgttggattcaatttaatgttatcttattgaagatttttatatttttataaaaatttgtatttttctatttttgggagatattcatctgtacttgtgtgtgtgtgtgtgtgtgtgtgtgtgtgtgtgtgtttgtgtgtgtgtgatgtctttgtctgattttactatcagaataatgctggtctcatagaatgagttggaaggattccctccttttgtatttcttgtaagagttttataaagaatttgtgttaatcttgactgtattttggaaaactttaaaaggtggtgataagaacaaggcttactacagctaatagtcatgccttatcatgtgcttgtgtcagaaaaacaacaacaacaacatcctacaaatgccagaaacaacactgcagtgaagcctgaaaatttccttacgggcagggcagtgagtctctggccattatgccaggcaaggtgcttaatactggggacccagcctgggacagaatgctataattcctgcctttttcctgcagtttttttttttccaattttaaatatttccacacaaatgcctgaataaatactccattgaagcaaaactttctccttcataacagataagagattggcctctggaccacatgctgaacaagaccaatgcttacaccattatctcccctggaatccatcctgtcctcctagaaaatcaaaatatccacaagtattaatagcttgccattcaggttaacaaaagaatcaagtgtttgtttttgttgttttttaacacgtaaaaatgaggaaagaatgttactggctgaaattggttagaacagagaagcaagagtatgagattgcaccctggaagccagcagtttctctgcagtaaagataatgatgtgagtccctgaacatgtctaaaagagagttttgaattgtggccattcatttattcagcagtcacttcattaattcattcagcaacgatttatgaagctcctttcctgtgccaggccctggagtatcgggtcacacagaaagaaatccatctgggtctctgctcctaagggccacccaatctgatgagggatattggactctatacaaacaattgctaccaaacatgatcaagactataatgtaggcataaagggggccacagaaatgtagagaaaggagagatcattttacatccttttcagtactttttaatgtcttttttgtttcc

SEQ ID NO: 66637 - DNA, 1161 bp, Homo sapiens
gggtctaagggttggggagacactgaagccaagtaaagggctggttatggcttttgataaatgagaactgtggccagtccagctggccaggtgccaaaagcctagcagtttcacaaggggaccaacctgggtttctgtgctgaatgcctgtgcctatatctaccatccttctccttcaaggaagaggtatttggtagagaggtcttttgcttttagctgagggccagttccattgaaaccaaagatcaattaggctgttggggttcccactgaggcccctattctgtaccagatattcagctaagcatcccactccttcacccttaaggtgtgggctgatgtgtttttggtgttgcttaaatagcagacatgggccccacagcttcctgatgcagtgtgacttctgagctctgacagtttgttgataataccctctgcccttgagacaattacttttttgcctagggaagaatctagaatcctcatgatgagtgaaaagatgggctgatttgagtcctcactctcttttttgctacagatttgctatgtgatcttagacagtcacttgacctttctggtcctcagtgttacctcagtgtcagtgttgaaaatggccattataatgcatcaagcaccctacttgttggggaaccaggagtataatataggtgctctataaatgatggatgtttcccttcctcacccccaactcattacttagtgaggtctctggagaagtgtttactagacattcatgatctacagaacatggatattttctcaaggactacattaaatctttgttggatgacccagggctggatgggtctgggggtcatcatctggcacgctttctcactggaccctgaggagactaggttccgtacccaatactttctaccagccatgatgtggagaagattcctcttcattttctggtacttcacctattccatcttcctttctaatggcatgtaaccaagaatgttcagaagaggccaccagggcagagtgaaagtcatcctgccccatgtgctggttttataaaacgagaacactctcatgatccctccaagacttagtcttctcgtttataaagtagggcaatactactttccttagtagcattctctgagaattgcatgtgataatacacatgaa

SEQ ID NO: 66638 - DNA, 2297 bp, Homo sapiens
acaaacagctctaaatgagcaggatgtgccagcttttctgggaggattccttatgagtacctactatgtactttgcattcattctcccatttaaatgtcacatctttccctgtttggtgtcattccagttgcacagatgagggaacacagaataagccactttctcaataatgagtttcccatcaataaaatggtccaaagaggaagaagacagtcatttgttgtggtggtatcagggattctagcactggatggttagatcatcttctggattacaggatgctcatcagtgcttgttccaggatctgatcaccaccgagatccctggatactgcagtggtacaaagggagcgatggtgaggggagttcccaagccacttccattgttttctagaaatcacacactgatttctaagaaagcagcagaggtagacactttctgcctgtgactggattgatcggatgccaaaaaacccagattctagtctaggttctgcaataagtcttctaggtgacttgggaaatcatttagcctttctcttccttttgctcaaaagaaataacaataaccttaaagagttgctatgtttataaaatattacatacatataaattgaaagcattatgccaatgagagttattagcacatattcttcatcctcctactgacacctttgatctaaaatgattttaaaaagtgagtcacggataaatgctatctcttctagagttggaggctgggaggagaactgactgagaatgagaggaatagagccaacccatcatttatagattagagagcctccaagcctaactaaagtagaaactgctgggagcagtggctcatgcctgtaatcccaaccctttgggaggctgaggtgggcggatcacctgaggtcaggagttcaagacccgcctggctaacatggcaaaaccccatctctacttaaaaaaaaagaaaaagaaaaagaaagaaaaaaggtagaaacttacctctaacctaggcaaaagagaagaaagaattgataacttatctttgaattaccttgccaccaagggaaaaagagaaagctaatggattacaaattattccccttggttaacgttgagtcttcctttgttgaggagtaagtaaacatagatgacaagctattagctaagcagagagaggtatagtttgtgcaggaatggcaaatacttgatgtagtaggttgaattcgccagaaccagactctaggacagagatttgcatgcagaaagtttattggagcatgctcttaggatcagcacctgtaagggagtaagggaagaaagggaggagttgagctgcaaagcaatcacagcaaaaatgtcagctgattccacagggaactctggagctgggatggtcttcagatgtctcacattgagccaaagggagttggccttgttgcccactgcagtgacagctgtggactgcccacaggtgacagctctcttgggctgaaggccattcctggagactcaactgatacctgtcagcagccaacagcaacagtccctgcagctggaggaatgagtgtctcagtcccaaagaaggtagtcagggtggcacatcacagcattaactacatttggcctgtgggctgccattcttttctcccactcccctgcaaacaccactgttgaaacaactctttaccactgcattcagatgagggctcagaattttttcaaacacaatactttggataaacattatcaatcatctggaatttgctcatgaaaaaggatcctatttgctacctttgccctctacacgtgtaggaaacatttattgatggtgtcataataagtcttgagtgttatgattgctctttcaagatcaaacagttggcaaaccttagacaattccctgtacgtctcctgggagacaagattttctcttatttttccttatgatggcctctcaccacacttcatccaagctctgacttattttccccttaccctagtaaatgcagttttccctatggttcattttttttttctcttttttaatttaccacacactatcttgtcatctcacccattcttatttcaaccagcagcccaccttagacatccctccttccccctagttttatatttccaatcatccactaaatctgtccacctgcttagcctctctagcctccatacaaacagcaaattacattcacattagccaggaaagaagctgacacttagctctctcaagatgctttcagaagatgtaacgtcttgcaagagacggagccgggtgttatcatggatct

SEQ ID NO: 66639 - DNA, 3519 bp, Homo sapiens
cctgcctcagcctcccaagcagctgggattacatgcaaccgccaccacccccagctaatttttgtatttttagtagagacagggtttcaccatgttggccaggcttgtctcaaactcctgatctcagatgatttgcccacctcatcctcccaaagtgctgggattacaggcacaagccaccgcgcctggcccccaacttagcttcttactgaacgagcctactcacattctctgtgagattgcagaaaactgatgttgagggtgtgtcctgcacaagcctgcttattcaagggctagtggaggctaaaaaccagcctgcattccacctgccaagccatgtgtcccagaggggctacatctgcccagaagaagagacatctttttcaaattcaggtaaagtcaataacggggctggtagtagccttgtttctttcagcctcaatttcttcatcatttacctaaataggctttagggatgatttgtgattatccataaagtataagtgacacatagagactgacaaatcatagtggtcattagtagctgtaattgtagcagcagtagtagtagtaatgatgtcagtaatgataatgccttatttttgtagtactttatattttgcaaggttcttttgtatttgattatttcattagccatgcattaaagacaggactaggattgctctctctgggacaaagagaaatatgatgtgacttgcctactgtgagcccctgaaggcctgacctggagacagcataagccatcctggcaatgatgtgaggtcaaggtatgcaaaactggggatgcctgggagagctcagaacctctttctgcctacaggtccatgcccattatctaccttggtcctagagggcctgccctatttagaacattctgcctggttcttgccagaaaccccattggtgtgctagcctctggtccctgtggctgcagtcattggctcagaacggggtccaaaccgggtaagccattgagcatcagagtcctgcctcacagcctaggtggacatgttgcctgggccttcaaagccacccagacagactctctaggggtgaggaacaatagccatctcgcatgcattttccaaacaccccttagtcgctgcacttcaactctagccaacagacatttatgaagcacctaccatatacaagacactctggtgacatcttacatacaatttttccctaacacttttttttctttttttttttcttttttttttttaagggacagtgttttgctctgtcacccaggctggagcacaataatgtgatcacagctcactgcagcctcaaacgtctgggctcaagtgatcttcctgcctcagcctcccaagtagctaggaccacaggcatataccaccatgcctggctaattgttttatttttagtagagatggggtttcactatgttgccaagtgtgacccaccgtgcccatcctactttttctgacttctgtacctatttacaagatgaataaccaagtgtcaaagagttaataaatatgccaaagatttcataattattcagtggtaatgctgggatttgaactcacatatttagactagaaagattatgtacttgacttacataaagcatgtagcacacagtggctagcaaaaaatggttgtcacccattagtgatagtgttttaaaaagtgattattaataaagtacttaccatcctgcatcctaactgctggttctcctgtggtcctttcccattggactgtgaggtttctgagggcagaaactgggagtctcagcctttaacagggtacagggtttatagcaactgattgataagtgaatgactaacaatattgaaaatggctacatggctatttgctaagcatagtgctaagtgccttatatatattattttaattctcaaagcaaccctataagatagatactattattaaagccattttacactaaagaaaagaccttaaagagttttgaataactttcccaggttgcatagctggtaagtggctgagctgggaatgggacccagcttgactgacatgaaagcttggtgcttaatgtctcacccagatatactggcctcctgcaggtgttcctgcatgtgccctagccacagccgatgcccatggccccttcagagaattactgggaagctaccattcaaatccattgccttctaatgcagggctatgagaggtttccatttagaagagacaaagctggtgaaggctaggaagctgtagttatgtatgaaagacagcatgaaaagccactgatagaattagcaagaaaagggtgacttcctggggaacaaacccaatttgtaagacacaagtaggggcaaaatcagcctcaagaggtacagtcgtttgagctccatggaaaacagtggggaaatgtttcagtggcatttactgtgagtatttcttgagtttggcaagtccactacagcatgctcattggtggtcgagggcaggagaaaggggaggtcttggtgcattgctctcaagggagggcttttgcttctagtgccttccccaagacctcatggaccgttgacttgtttcatcatgtggagcttcatcttatgcaagctgaagaaacagtatgccggtttcattgctgcaagataattgaccccttgtgacttcatccagaaggtagcagcaacatgtgctcttagtgaaagatcagcagctgggagacacatatgagctgggaaagagaggggcttggagtggctctggacgacctgggcaggactaggattctgatccctgactcctgccagcaccagggctcaatttgcatgaatcaaggctgtgttctaagtcctgggactgcagtgaggggtgctagtgccctcatctataaaagctagaacaggaacaagtgcttggggagactacatatgaatactcattggcagagggagaagtatgctgattaacagcatgatgacctgtcagagccttcatggacttgtctttgggtggaaccagggctttgcccttttggaggctggccctgtacactggagtaataatactgcgcctggaagctggacactgaaggcacttacttccccacttccaccccctcggcccagcaatggcttttaaatcatgctctgcagagccctgagaggttaatgaaatcctctctgggatttccataggagataggcagattttctgctgacttctaggcccccaccctgcagatcctcttctccctgtttgcagggtgggcttccttgttgctagggtggatgtttggctggcacacccccccatgaccatgctgtttggttgtagctgatctccattctcattggcagtgtgcctgtaccacagcaattattaaatgttttgaattttactcttgtttgcaaaccttctttggacagaggaaaaccgtgctgttccatgccagctgcatcctaacttaggcacatcataccagtgatcaaccttcaagccactgctacacagaactaaagc

SEQ ID NO: 66640 - DNA, 3014 bp, Homo sapiens
acaggtggcaagagaggaaaatcatgactggcgtggtgctttttaatatgggatatcttgatagcctctgctctgaaaaatggtaaactctatgtatagaaggaaaaaaaaaagaaaaaaaaaagcccaaattgttggacatgaatgtgttgagattgtggcccttttctttgctttatttctcctggtatttttaatggtcttttatattttgacatctatgaaaaataaaaagtgcccaaatgattggaaggctgaattttctgtgctgagagttgggcaccatcagcgagcgtcctgcttgacacataactattaattatcatgcgtaatttattattgcacttcattttttagttattttgcagcccctgaccactcacagttttcccagttacctggaatcataagtagttggtaaccaattccaggcataaaaccgatgatgcgttttagtccagcgatctcaaggcattaattgtgtttgtcttcttgttttgcagatggaaaaactgagaatcagagagggctagtgatctctcagacacttggtcggtaggtaagtaatgatgctgaaagtgaacccaaaacaagatatgcttctagtctgcacaacctaacccctgccaggcccattgtcccaggcttgtgacttttctgttttgtgcaattcaagtcagtattgcacgagtcagtaaataagatgagccagtttgaggcatttgagtattacttgcacttgtggcttctgtttgctcccagtgtggagttgacatgtttaacaggtgagtctgtgaagtccttttaggccatacatggccaacattgggtctttctctgggaatagtggggcttattgaaaactggtccatgctgcagttgttgtgacactcactctcccttcaatagacccaactgtttggtacgtcaagaacagagagctctggactagtgtggtcaagcgttctgggctcaagtcctgcaatgacctgctctgtgaccttaggcaagccacttaactcacagattcactctttctgctttctttctttcacactgtttttcccagggtatttagtcccagtctcggcgctgggcactgagaacaagataaataccacataggcctttgaggagttcacaacccaatcagtgagttcctccattttcccattattgtctcattatgagactttctagcatctgctttggggtatacagtttgaagggtactttgtgatctttcccacaactctataacgtagaaggaagttgttcctgccattttgcaaaggagaaaacgatggctgaaagagtgggccaaagccataccttgagtaagggttagagctaggcttgaaacccagatttactaaatctaaaacatttgtttctaataacagcagactgttccacctggtagttgtagcatctgaatggtcattgttgcattctaccacttggcagtgagtatcatgttggggagattagcagcactctggtggtgggataattttctgcaagggattcttttctgcatctagctgattcttccagaaagcaatgttttctccgcctgagagtgaaggcagctgtgagctcgcagtaagctgagaaccaagggaaacctgctccaggcccagggctggctctaccaagtggctgggatttagcatatcagagagaattcaccatgggtggaaggagtgacacagccccccggcccccttcttgtgcagtgaccttgctgtaaaactgctgcttttttaccaaagcttaatgatcctggactccaagcatggtagcttctgcttttgctgagttgtcttgcctcaggcaagacacagagaatgctgtggattagaggctatgctctttgtttatatggatcacaacttcttgaggatgaagctctagggttccctcaatgtctggaatttcaaaaggtgcacgaatgacctcagtgatctggcttttctgtcttacaatatatgtgtatgttgcgaattatgaccatggttgatgtagatgcacctagaatgctgtaatgtacatgatacgcagcttttgtgggaatgtgactgtgaatgtgtggggtatgggattttgggggagtgtgtgtgtgtgtgtgtgtgtgtgtgtgtgtgtgtttaatccctgggaggcaattcttattaaaaaaaaaaaacacttacgggtgtaatttttcaacaagacctagaaatgggcttttaataagcctcattaaactctttgattactaggggaggccaatcactctttcatcttggctcagatcacagctctcccttgccctcttctttggggtcagacaaaaatgcctgctattcatattggtctctccaaagccttttccccttcacctgccctctgcagcccccactcccaccccagtgcttgtctgatctctttgcttcaacctcagcacagacagtgctggtgtcaggactgacagatgatagctgcaggtgctcctggaacctgagtgtcccatgtcttgagttgttgcggcaggacacttagggtctttgtttaggaagcactttgagctgggagagctggggctccttcctttcccggggcgggggtcacttactactgcaggctctcagcagaattgtgtgtgtgcaaaccctttcctttacaggttgagtttccccttgtctgacatgggaggaggcgaagctctgttgaaaggcaggttttgctctggactgccagcattctgccaggtctcctgaggagagctggttcccagagtgattatctttcctgagccaagagccaggtgctcagtgacaggaagaaaggtaggcttagcaacaggcttatcaagccctgctacaagaatgttcattcgcctaaacaggactgggtttgtgcgtttttgttcctctctgggcaccgtctcagttctggggctggtgtgttctgagcaggagtacctctgctgcttctcagaggcaatgcactccctggggtatgggctcctg

SEQ ID NO: 66641 - DNA, 1012 bp, Homo sapiens
tacagtgtcatacaaccctcaaagatgagcacaggatccacacaaaaacatcatttaactgcatggaattgaattaattggactggtacaggctagggcagcagcccagtcaccctgtccgtggctccagacttgagtggtgcagggatcagagggcctgaagcagaggagcccctgcgccagcagagtcagagaggaacagcttgggtggatggttttgcagttggttcctgaaaggaccctccacaggtcggctctgaggcagccaggcccacagccttcaggatttgggctgctgtggccaggctgctagaagttgctggcaagggtgaccagtggcttcacaaatgaagttagggacactttccttgggcctagatcagcctcggctctgcagctctgtcccagcttccctcctagcctcatccctctagtctgtctcgaatgcagccagactgattatctcaaggacaaatctggccttctctttacccagcttaaaagcctttggtggatgaccgcattgctagaagctggcccctgagccctttgtagtccctgtgctcggtcagaggttccgcatctccttctaaagcttgtacttctcaggatgtatctacgttttaagcctcttgccacagaccttttgttttgaaaagattgtgctcatgagtctcccttgaagtctgtcttgcccattccatcccggtagagttgacctcttcctcactggatcccactatagataacaggcttcccatccaccagtaacactttggacctttttagtgcagtgagcatgtcttattaaccatgattagtagtagaaatggtaaaagcagtgagtattcttaaggactgacttgaaggcctcagctagatgtttgagaaatgctaattctcacatcagctctgaaaggctggcataaagatcttcactttgcagataaagaagctgatgctcagaggagttaagtaactttctcagtgtcacacaacttacataagccag

SEQ ID NO: 66642 - DNA, 1035 bp, Homo sapiens
tcaggtgaggaaaccgatgctataagaaatcagaagtatctaatgaatcttgggaagtcttgtcttttctctgggcctgtttctctatcctccaaatgagggccccttccagccccagtgagccacgattctctaagtctatggctcacagcctgcaactcagtatgaagccgacttggatctctgcctgcttatcttatcttcgtatttatatttggaaacctgcttcttcttcatctgttagaattgcctacagtacacaccctgggaatgtctctgtttaccttgatgtgctatgagcacgatccagggttattaataaaaccaggcggtcccccagaagccaagggctggagcacaaatgtgtagctaactttcttgtctgggaggccttggtggctatcacaagaatgcccaccctgtatgggccccatctgacctccagggccaggatgggatgaggaccctcttggcctgtatgggaaaaacactgacctgcttcatcttttccttcccaaggcaatgaaattcgcctacctgtaaacccaaggggctgcaaactgacagcatatagatatgttttggggctcacattctgtttttaataccaaagaatttaatatagaaacaaggacattttaccaaacatgtggacttccaccatctcttagaaagtcagatttgttaacactaggctcgccatcctccactggtggtgagtggatgctccttttttcagaagggcatgagttctagagtttaccatagtccccacccctccttattatcttatctctataggcattctgctttgccactctgagcttcatatcctttggtttctcatcagatagtgcataataattacttgcctgttactgatatacccaagtacagagcactgtccaggtaacaaggccctttcctgctccttttctcattccgtcctcacagcagcttgcaaaagtgggtgtggttattcccattttacgggtgaggaaactaaggcccagagaagtgaaatgattgttctgt

SEQ ID NO: 66643 - DNA, 1059 bp, Homo sapiens
cttcctggaggagggagctcttcctgtgggttttgaaggctaggaggaactcctcacatgaagatagcagggtgagggtccgcaccagccctgccttggaggctctcctccttgtgagtatgtggaggccttgaacagttcagagactcattcaggaccctgaagcaaataaaaccatcccagggaaaaagaaaatcaaaattatggccatttatctgaacatcacggaattccaagaaggctgcaagggcttaagttgcagggcaatgtttcacacaggtgggcaggggtagaacctggaagggtttggattgctccaaaagaggaagagcatgagcaaaggtgtagaggcagggatgggcagaacctgtctagagaagggtgagcagacgtgtgtggtggccaccatgtacacactaggagggaggttcatgggagagtcatgaaggttaagctcaagggctgggctttagtctgtaaaccagaaagaggcacataaatttgatttcactttgaagatttttatggactcataaaaaactgtatattgtgggcttgtaaaatatcagcccaatctgcaaactaggattcacaaagtacgatggaggcaaagcctgaggaaacaagtagcacatccgctgtgtctgttcccctcaatgccccagctgcccccagcacttagcctccaatggctctgaggtgagtgccatagggaaccagggagaccagcacttaatgggcagacactgtgctagctacctgacctgtgtcactgtcatcgcagaagtcctgtgaggcataggcacagaaaccaaggatcagagaggttaggtgggtttgagatttcattgtctctgactccaagcctctgcctcatccatttaggatacgggggaattcagtgtactaattattgttggatgcaggattttgtccggtcagaagctagaaatgccctatgtacactctgagcaatcagaatggtttccattgtgttagctacgacattcgccaagacccgtcttgtcccatcttgctgctatttgaatcgttagtatt

SEQ ID NO: 66644 - DNA, 1888 bp, Homo sapiens
tttgcctgaaagtgtagcagccggggtggtgggggatgcatgtgttgagtctgaaggcagcacttttctcctcctgttagtgtaggaaacatctcattagttgttttggtatccaggagtcctggtgtgtccaggctggatgagataagaaggatgtcctgattaaagcccctcactgtcctcatgagtaaactgaggcacagagaggccaagggacttgtctaatgttgtacagccagcaagtggtacactaaccctgaagctaggcctccttctacttctgagatagaataattgctaggataaatgcacatctcttaccttctccaaacctcggtttcctcagctgtgaatcagggatgcttccacctttttgtcaagattgagaagaggatgctaagagaagcatttatgcagagacacctagctcagtttttagccctgtggccttggcaggttgtatagcctctctgagcctcaatttcctcatccctaaaatgaaagctatagggagaatttgaaaacctgaatttcagcagtgcctggagcactgtaatcactatgtaagtgttagctattttcattattatcattatcattatcttcattcttatcatcattatcggcacagaataagcccttagtaattattttttccccttttatgtagacagagttgcaatgtggctaaaatgcgggttctggatataagcaaacatgagtttaaaacctggctctgccatttactggcagtgtaacattggacaagcttctcaactttcctgagacttagtttaccacatccaagaagtggaatagcaatagttaccctgaggagctgctcgtgaggactagaaataactcacctgtcacatcatttatgtaaaaaatttacaacgtcattatttctttctcaactgctattttgattgattttaaagtaagattcctccaaccaaagccgggcagccctcctcacaccctgtgtttgtcgcaacaggagccattgcccacaatttagatagtttgcatcatgcagctgtacctcagtaattccatgctatggagacatgatgaaaaagcaactaacatgcacagctcagggatcttggttaagtgggtgaccgaaacttccacaggtaaacactgagtgcaaacgcttgcatccagtttcactcctggggatgttttcaggagtcagagggtgcagaagggaagaggaaggggaacccatgaactgtgccttgcgtatgcgctctgggctctccatgctctacgatgagctatgttctcctgccctgccaggaacctccactgcagtagaaggtaggtgagaaacacatggagggagggaggtacactgcagccaaattaatcactggtagagcctctacctaataagaaaatcttgtcaaccaactacaagcccagttgtggtggtcacctagtgtggactaaggggactagggatggagcttcaggaccggacaggttggagggctgctggcttagcatgggatcctcctcttcactgcacagtagagaaggtggtggcaggtactgggacaaaacttcagtacccacttgcatctttcaacacagagataatgttgtcctgctcacgttaggtatctagtttgctcatatttctcatccctttgctatcgtctggataaaggaaaagcatttgttatctgttagcatcgatactcaaggcttcagatcaggctgcgcgttgctggcagtccttccagcatgcccaggatcatccatttggtggaacaacattaagttgcacatacttgactttatattttttcttacaaagatggtgattttatatgaatctatttaagattttagggttttttctgtttattattaaaca

SEQ ID NO: 66645 - DNA, 2451 bp, Homo sapiens
cagctaaaagatgccattgccagcctttccctaaaacatccttcctctctctctctcttccacgtgccaacgttggaatattccaacaatttatttgaatcctggtagatgggggagggccactagagcctttcagtatcctccttctcagaaaaacctgtccctggctgagtggccattggcatttccctgaaagggactgaaggcacagagaggtggggcctgcctcttgggagtggtcccttctgacttccatttcacctgactcctaaggcagagcagctgatttataatactcattttggttctggaaactcccttttagatattctctgtgtcctctgctatgaacccttgatggagatggcctccgggggacagcagcagtgtcatctacccagaataatcaagagttcttagcccctgtagagggttctccagggaaacagaaccaatagaatgtgtctttctctatatatctatatatacatctacatatatatacacatatatatgtgtatttgtgattatatctatatctatatccgtatccatacagttggccatctgtatccatggattccatgcatccatgggttcctcagccaactgtggatcaaaaaatatttgaaaaaagaaacaagccaggcacagtggctcatgtctgtaatctcagcattttgtgcagccaaggcaggaggatcacttgaggcaaggaatttgagaccaaccagcctggtcaacatagcgagacctgatctctacattttttttttaattagctgggcatagtggtatgtacttatagtcctggctacttgggatacaaaggcaggaggattgcttgagcctaagagtttgaggctgcactgagctatgatctcaccactgcactccagcctgggtgacagagtgagaccctgtctctaaaaacaataacaataaattttaaataaaggaaaaggaataagaaataacacaacaataaaaataatgagtaaaaaatacagtataaaaactatatagtatttacattatattaggcattataaataatctataggtgatttgaagtatacaggaagatgtgtgtaggttatatgcaaaaactatgccattttatataacggacttgagcatccacagctcttggtatctgtgaagtgttcctgcaaccaatcccccaaggatactgaaggacaatggctgtgtatatgtagctttatgtatgtatgtgtatctgcatgtatgtcagtgtatatatgtgtgtgtgtgtgtgtgtgtatagggatggagaaaaatagattgattgattttatggaattgactcacacgattgtaggaactggcaagtccaaaatctgcagtgcagggcaagcaagctagaaacccaggaaggatttctaagttgaagtttgaggcagaattgcatcttccttgggaaatctcagtcttttaagtcctagttggatgaaatctacccacattatggaagataatctgctttacttaaagtcaggtgattgtgaatgttaatcacatccacaaataccttcacagcaacatctaggctagtgtttgaccaagcgattgggtaccatagtttaatcaagttgactcacaaaattaaccaccacagtccttgagaagtcttgacctagagggtgcatcaccttttttaggaagctcaggggtctgggaaaggcccagtttgctgctgagtcccccaacccagggaattatcaccagatatgtagctagagagtgggtcaacgtttctgagcaagtgttcagtcctcatcatgctgtagtagaaagaagagcaggtagattattagaagtttggttcacttattcacctgtcctttcatccagctgcctagccaattttactatatgctgattatatgttgagtgttgggttaggccttctgggatcaggatttagaagaaaaaggtgtctgcctcaagaggggcccatacacaaataatttcattatagcaaatttccagtaccaaatcaataagacttgttgtgtggaactgtgctttgtggaaacattaacctggattaaaggtcattatgacaaagtatctactgtgagtgcccatgattacagcacagtgaatcttaattctttttgagtcttaggcccatttgagaatccagcaccagccatggagctttctccagaactgtgttcaccccaagagacactgaatgttgtagactatttcaggaggtgaaggtactgggttaaaaccctctggtttacaaggtcctttttatgaggattctcaagagaaattgtatctcttctcaattttaagaataaatatgcctctccagagaagttgatttatttttatgcagtaaacatggaattgtgtgaacaataacatttcattgtccttgtagacttctagggaatatacagtagaaaccaaggt

SEQ ID NO: 66646 - DNA, 5739 bp, Homo sapiens
caactcttgcctgagtttcactttattcatgttgtttcatctgcagatcttggtgaggcagggatggccgacatatcctcatgaccccacgtgtctctgttgctcctggtaagaaagcagaaactggccagcccttggccttgtctgcggtggccccaggcgctgagaatgtcatctgacactggggctgtttgaatcccagctctgctgcacattagctggatgggtttgggcacattgcttaatggctccgaacctcctttcctcatctgccaggagggatagtaaaatttcacagggttaatttgcggatcctgatgtcatgcctgtggaccacatagctctcgactctgctggctgttatattatttcccatttgattctcacagttacccttggagggtgttaatgtggccattccgttttacagatgaggaagctgaggtcactcatttgttcttgcatttgccctttattaagttctgtctgtgcaccaggctgaatgctgggtgagaaagagggaggattaaggcctgtgatcaactctcagagagcccagggcctagtgggtgtgcttttccccctagccccctgcctttcaggattctagaaggcagggactgagcagaggccagcgattcaggaagtggcttctctgtgcttcgcatcactcaagtcccagtcctaggagtccccatcaattcttccattttcctcactcccatggccagtccattagcaaggcttatcaagtctacccctgaacctggttgtgtgctggaattggcagctcacaccagcttcaagagttgcttgtataccattcttcccagttctgctttcagtgatgccatgttgctagcttaaagtctgccacagtaagagtgtttataccatggaaataggcaaacagggcttttcccctagagagccagtcattaagcacttaacaacacaccattgcccggatctctctccactgctctttatttccacttctaccattttagtcaatgccactttcccctcttctcagcaggttctgctcagccttgccgctcacccttctgtgatccattccttaccaggcagctggagagatattttacaaatgtaaatcagctgctgtcattcccttctttaaaaccttcccgtggcttcccagaacactcagaatgagaaccaaactccttgctgagacctgcacagcctactctacctgccctgccaacttctgatctcatcttcccttccctgctaacccagcctctgatgcactggccttcttcgtattcctggaaaaagctgacaccttcctgcctcggggctttgtgcttctcctgctgggactgctctgccccaggtctttgcatggctggcttcttctagttatctcgatcctcgaccaagtaccaccttctcagagaagtcttccttgactaccacccccagcatagacaagtcctcctgtctacttacctctgctcctgctcaaagccactttctatcatagctcctcatgtcttttatgtttgctgcttaatttgccatctctccaccaaaacaaaagctctatattgccagtaactgaggttgggatgttggaggtgcctagcaaatatttgatgaatgaatgaaagtctgtctccaagagaagatgttcccagcaaaggcctctcccgtcactgctgagcctcagtctctttgaatccttaaagaacccagctctgctctgaagaacttcttctattcctacccttgtgccaactgtggaggtagcaccagatctggagacgacggaacagaaatctacatgccatgagggaaaaggaaaaatatattgaggagaaaacaaaaatgctcatctagtgaaggctgccacttgcccagaattctccatggcttttgaacagcttagctgcttctgaatggtgtctaagaggtcagtgcctagtcacatggttcactgggacaggtcagttgggatggttctctgccagctagaaggacagttttgtagagacggtagcttttcctatgggaaacttttatgttatttccaaagaatctctggagtcagcccagccttgggctacatcagctctggaatgctgggtaagtccctgagcccctaggaacctcagtttcttcttctgggaagaagaagaaactgtgaggtgctatgttacctacctgtgcttacatatatatatgcatgcttaacatcaggcatggtacatagtgggtgttcagtaaatgttatatttctccctcagttctccaactcagaacagaagcgggcacgttgtagaagatgatcccctcgtccaccacatcgttgcttacaggcttcttcccacactcttcctgtgtccccgcctccctcggtccccacaccgccaccaccaccgccaccgcctcttaccaggcatacagaactggaccctgtggcagctgcagggtcacagttgtggggtttgctgtcacaggaacaagaagccacttagcatgaggatagaggggctttcttgcagtcagctgggcagtctgcaatacctgagagacagactctgtctttccagctgctgtgattttctgaggcttctgagggttacaaagacaaagcactctcttcccagcttggggaaggaagaagaacaatgttagagacccaaaaacatgggttggagtttaagacctgccactttcttcttggttcctgggtaagtcacttgatctttctgagccatagcatcctcattagttgaatgagaaccatcacatccaagtaggaccatagaaagagaaggtgattgtctatgcaaaatactgagcctaaatgttcattctcttccttcacctttttcttaacttcaatagagctgatggctaaatgttaggatgggtctgaaagagaaatgttttgacttccagaaaacaaaagaaagagatgcctttcaaaggaagcttttcaaataatctccccatgcttatgtacccttgggtcccttaaggtggcagaagggacttgatcaggttgtggggctgtcattaagtgcactgacgcatctattccctaaattgtgccctggaaacattccttttcatagttcatggtcagggcttgaaaatttttagttctcaggcactgtcccattttactggcatttaaaagacaatggtggagttgcctctttcaggacacccacagaggactctgaggtaccaggattcagatcactggacttagatttcttttcgccactatgtttttccattggtttccttagtaggtctggtttggggcaaagggtacaggacttggaggttaaaaaaaaaaaaaaaaaaaaagctttccaattctgactctgctttatctcgctataagtgatttggggcaacatgcacaagtcactaagactcagttttcttatctgtaaaatgggaatgttaatgaaacttaagtcactgtgttgcataactcactatgaactttaagattgacttaaattcaatgagctaataaatatggatgtcttttagagagaacatctgttgtggtagtgatgtatgaattgagaaactgtaaaatggtcctttccaatgtacttttgctattggccctaaaccttcatttcttgcaaaggagtgaaatgaaaggtaattgacttgtagaccttcctcattgattcaaatttaaaattcactatcatctagtgatgaaacccggggccactgtctcaattatagtgttttatttttgtagaaatactgtatccattaaaattatctatttctatggcacttaaaattgtcaacacagtctttttgcttcaccttctggctgacttatataacctcactttactaaggctgggggaaaaatgtctgagcatttctggagattaatgttctgttttaagaatcaagtcctgagtatcactcagttcagggcaaaccatatatttaattgagctctttctgcagccagagcattaaagggagagagaaaaataagtgagatgaggctctgcccgtaaggagcttctgatcaagttttttctttcttttttactcatttgttagtctgtttcctaatttatataatggtgaatagatatttaccaaaatgctccatatgcctggcactggagtgtggagacagagataaatagacctggttccttcccaaaagaaggtgtctgcctagcttaggagacagccatgaacatgaaaaagctctagggaacgggacaaagagactcagttaaatgggaactgagtgtggaacaccaagcttcatggttctgtgtcagaatatggcgattctcaggggagagaggttgcttattaatcccaacctagttcctggttgctattggagaatccaacctgaatctggtggtgagcaggacaggaagaggatattggaaggatacaagaaagtgacagttttccatgcaatacaacaggtgttgcaagagacaaatgagtgaggagctgtgggtctttaggcgagggggaggttagtttggaatggggagtccatgcttgctttgcagaaaaggaagcctttgagaagtgtcttgagcacttgaggagcaaagatacaggcaaggaaggcatttaggcagtgttcactgtgagcaaaggttcaatgtaggaaaggtcattgagttgaccttgggtggcctggcagggctgggttgatgtgtataggagaaatggaagccaaggggaaagggggttagggacttatgataaaggccttccacgactgtctagaagcttgtacttcattctgcaggccgcggggggcccaagagggtttttgagtcaggttctacttcagagaggtgggactttttaaacaacttgttgatcacactatattaggaaatctcttaccccacaatatgttcctgggataaggcgcacgtttgctctctgggggtggtggttaataataggcatgcaacccaaagcgggaacaggagacgcacgcagagatgcgagcaggctcatgtttaatgagttcacaaagtgattttggttcctaattttcacatttccctgctctcccaccctggtgcgaaatttcctgatggagctggtgtttcatgctctcttaaggatggtaggagcagcagagtgtggtggtgtaacttctactgctggggttaaggagccatttgggtgtgttctcgtggagacatgatagagatctggtgaatcatctgtatctttgacccagtgaattataaaatgatcacaataacctctgttcactgagcgcctgggtagagtactgggtactgggtactttcctacagtgagcctttgctcataataaacactgcctaaatgccttcctgagcgagtactgggtagcctgatctcagttaacagttaatctcgacagagaggcatttgacaggggaggatgcagctgtttggagacattgtgttacctgcccatgctcacatgctcacacagctagtaactggtgaagccaaggttataccagtggggcattcctttcagagcacaacacaaacagcagacaaggcagaggggaaattttggggtcttttcattcaaacagctgtgagttctaattccatattggccacttcacttctccaagttccctcaaaatggatgtggtcattcctcctttatagtgcacttgacaggatgaaggtagcctatgtatggcccgtgttgggcctctagat

SEQ ID NO: 66647 - DNA, 1350 bp, Homo sapiens
actaatccaaacctctttcccttaggtgttattcagattaggagttctgttatagaataagaaattcaggcttaaaatgaaacagatctctttatgacaggatttctcagtcatatgcaacatgctaacgttcattgtgattgttcaagatcataagattgttggcagcatttcctagacttactgatgtctcaggacacttagactatcttttaggagtaggatttctttgaacctatcttgcaaaatgctaagctacagatagggttttttcctgaggatggttggagacaggcaagggatgcccctgtcagctgtgaggagcctctagcagcatgaagtgagaatgggattttaccctgacagtgctgggcagccatggaaaggtttttgcaggaccctgtgttagaaagtgctcagggaatagagaaatggtgggtcagggaggggagcctgcagactgaaattctaggttgaaggctgcggtgaaagttgctctttggtatctcttgctgtggatgtacaggcatctcctggcacctggcctaggtcagggcactcagcctcaatccagggtgatcacattcagagacatcattgaggatctccagatgggcccactctgaggtccagctgagtcctgccagactatatgcgacactgtaaggcattcacctgctcagcagcagttctttacctggaaagcagctgggacctgctctttgattctgttgcttgtttttgttggggctctcattccatttactttgtcccacaagcccagttaggtagtcaatgatgtttgccatgctcggtgttgctgttctcatgaactacagatgacttagacgatcattctgtgtgctagaaaaggcagaatgtgttgtcagcttattagatcaaagacaatagtccacagcaatagcccttttcaagggagaggaaattgaacaggtacaagtgtgaaacccattagggaaaaaacaggctctagagccagacagccttgagctcacatctcagctccatgacttactggctagatgatcgtagacaagtcacttcacctctttgagtcttactttttaattgctggaaaatgcaaatagtaatacaaaatgtaagatgttgataaaatctttactacgtacaattggcttcatagatattaggtgtagtttcatttttcttaggccttcaaacccaatatctgaagaccagacatggtttagtagcagcagctgtgaaaacaattgttatggttttggttgaaaagttgcttgtgggaaggccgccagaaactactatgtgcataggctctgtcagtaaaaggagagagccctaagttag

SEQ ID NO: 66648 - DNA, 1027 bp, Homo sapiens
catctgttctggggcaagccctgctctagcctgtgggggtgcagcagtcaccaagctggcatgatcctgtcttcacagcactcacattctaggggaagagacagttgagaagcagtcatcccaaatacgtgcttgcgcaggaccctctcttcctctgagacttggtggatagtcatacaacttctcacagtctcaaaagcagtgaggggccatggaggaaggaccctgatctggctgtgagatgccagcaagtctaggtaccaccccagctgcaggttccttgtctgcagagtgtggatagcgatacccactttgcccctgtccttggcaaggccttcgatggcatggggcagaaacccactctggcaaggatggctgtgataaggtctcagagatctttttgagagtccaaaggtgagaactccaatgtagcatggccccaccaaaacaaaaaaatggaagttgctagaaaccagggagtccatgtggctctgtttccccagtttccccatttcctttgctttttcataggttatggtccacagagctttaccttgcgaaggtccgtcctgcctaccctggccttctcaataacctacaactcttagcaaccctttctggctattctcccctctggtaactaccccagtctctgctcctcaattccaatttcaaatcctcaaaggaagaacctaattgagacaaatcacaggtcactggacagccaaaggttggaccttccaagggacaagtacccccttctgacctaatcagctgtgatcacggtgaggcacgatcacatggtatacacatggctgggctgtggatggaacagtttctcttacaagaaaatgttgttatgcagctgccatcaaacatctgctcctcccagtctgccctgaccaatgtaatgtggggttttctaaaaagcctctggcaggccgattccttgtatattgaaaggatttattgagtgattgctgtttacagaaggctttggtaaattgtaagttgctacgtggatgca

SEQ ID NO: 66649 - DNA, 1027 bp, Homo sapiens
agaaagacctgagaatctatttcaataagttcccaaataatgatgctgatggtttgtgaaccacactttgagtagtaagggtctcatctccaagctcctcatagctcaaaaactgttcacttggaagtcctattaaaatacattcccacctgtgtgtgctgggtcctcagatgtggccagataattgaaattatcggtaaggtataataacagataatttattaagcacctgtgatttgcaaggaacttctcaataatgtatgaagtaggttatagttttgtctgtttacagataaggaaactgaagttcagagagataagcttacctgaactcctacagctaaatggtgaaactagaatatgaaccctagtctttgcccctctgaagagtgtgctttttccgtagattcaaattatgaatataaactaccccataagtgagagattaagcctcttgatacacttggccattatttcgcttgttatagagattacataggtgaaacgtgtcttgcaaattgtcaggactttgttgatgttaatttttgttattagtaatcaaataacatggaatttaatgacactagtagcatggaaaaatgagagagggaagtgtgtaaatcagtatttaagcaaagcataacatttgtaataatgtcacgtaaattcaggaataggaaaacccaagaacaatgaatatccattgagaaaaagcccatgacattagagaagaataaaacagaaagaaatccacccgtgtttcttggctttgctccctcccctttgggttcagagaatagaattgagacaacaccaaagggggtgggtaaagagtttgaacaatgaatacacattaccagcatccgctgagtatcttgttaacattaacctgatgcattgcaagtgagctgcagttagaacagtaattacagtaaatagaatccatttggaattctcaagcaaatatgagtggggaagaaagatgggctgaaaaaaaatccattacccttaggaagttatggaagct

SEQ ID NO: 66650 - DNA, 3753 bp, Homo sapiens
acactaaataaatcagacaaaagtctgtgtccttgtggagcttgcattctagtaagggaaggcagacagcaacacaatcagtgagtagatgataccatatatgagaaggcaagagtgataggaagaaaaaccaggaaataaggaaggttgtgatgaggaaggcatgtctattgcaaattaaaagagggtaagatttgaacaaagccttaaaggatatctcctttcagggggaaaaccttaaaaatacctgcgggaaaagcattcctggcagacaacagcaagtatacagccttgaggtaggcccatgactggtgcacaggaagaaagcgaaaaggaaggagagtatggccggggaggtcaagcaaggaggcgagtaggaaggcagtgaggtctgagggaggtaggggaggggtcaggccacatagaatcttggaggccagtgtgaggatttagcttttactcagagagcatagagggtaattggagggttctgagcagaagaatgacatgattgatacactttttaaaaaatcactctgactgctgggttgagaacaccctgaagggcgtggtagttgggagcaggagcagcattagaaattagaagttagaagactgtgacagggccaggagtggtgacttatgcgtgtaattccagcactttgggaagctgaggtgagaggaccactcgaggccaggagttcgagaccagcctgggtgacacagtgagacccccatctctaccaaggaaaaaaaaaaagaaaaaattagccaggtatggtggtgcacacctgtagtcttagctactcaagaggctgagatgggaggatcactgaagtccagatgttcgaggctgcagtgagctgtgattgtgccactgcactgtagcctaggtgacagggtaagaccctgtctcaggaaaaaaaaaaaaaaaagccaagaaaggaaaataaagagggctgtgacagtattctgggcaagagatgatgacagcacggactaaggtgttagcagtagaggttgctggaatttgcgtatgaggtgcctgggtgggaaagacaaaggtgatccctagcagtggtcagtatggagttggcagctaattcgtgattgttgattaaaaagaagaaaatctgggaggttggagacctttttcttagtgtgtactggagaagcagccccgttctgaagccccattctgaagacttgggatttctaacaggaggcacagttatgtgtgaacttgtctgatattcctcactcgtctggaagtttcctgagggcagggactatgtctgctttatcccattagtcccagtgcccagcccatgggccagcacacagtaagcgatagtaggtgggcaatgtgatagaatgggacacgagaacttgatctccacgcactctcctcgtcctccggtctggcttcctggatccagacatgagacttggcattatcacaggctgggatagagagagtatgaattctcctctaggccctactatctaactgctttgtgagtctggactgtgtttctgtatctataaattgaggtttcagatatttattcagcaatattaataatctctgcctggattgcattccagagagagctttcctggccactcaaaacaagtcccctaactctctctcccctttccctgccttattttttccacaatacctgccaatatctgaaaacattgtctgtaggtgtacatgtgtgtgttgcatttattgcctgctagagcataaaccccataaaagcagaggtttttttctgtcttattcactgcaaaacctctggcacctggaatggtgtgtgctacatagaaagtgctaaatatgtatttatgaacgaaggaatgattgattgattgattctggggactcaacaatatgtagaaatgtgctttgcaaaccacaaagggcaaagcaaatgaaaggtgttcagctattattataaatctgctgcacactttagcatagttttaactcctcccacagcattttccaaggaaacgtcggtgaaatcttttttttctatttgggttttcttcaaaaagaagaattctgacaacctaatttaagagacttcctaggtgtggaactcagtgatggatcctcatctcttagcaacctcacataggagctgctcaccaggtaaatggggtgacaatttcaagtgggtgtgctcagtgtcagggatgagacatgtgataggaggaaggatgagaccttccccagccggtggaggggaacaaacctaaagcaggagtcgggaccctggtattgtagtcctgggcaagccattcccctttgagcctcctttcctccatacagtgaaggggcttggcaagatcccttccagctctagcattctatgattggcatttccagttaggcacttcgataaaaacgatcatttattgggcaagtccctgtgtgaagcactttatttgtaatattccatctaatcctaattttaaatctgtaagataggattataattatccccattttctggatgaggaaactgaggcatagagaagataaggtcactgttcacatgggctgccataacaaaataccataaattgggtggcttaaacaacagacatttatttttcacagttttggaggttggaagtccaagatcaaggtgccagccaattgggttcccactgaagaccttctccccagcttgcagatggcctttctctcttcctcttcttatgaaaccactaataccatcatgagtgtctcaccctcatgacctaatctaaccctaattactttccaataggctagtgtccaaataccatcacagtgggggttaattcaacaatgaattttgtgaagatgcaatcattctgtctgtaactattgcatagctagcaagtgatagaaccaaaacttaactgtgatcagtagctggaattttgactctgaggcatcttgtatgatccctgtgttttggtatgggataccaatgaaggagattctgctgtgttggaaaagttctttgggaggcaaccggtgtttgctatgagtgccacctccatacagttgggcaccatggcagtactgcacaccactatatcctcggtgtagccttataccagaacgtgaaagatattcaatcagtgtctattacataaatgaacagatggctctgttaaaagactaatgactatggttgggcacaaaaggctcaaaaaatggttttgtccaggtatcctgggaaatggggccccttgagtcttatcaaaagaagtgagaggggccgggcgcggtggctcacgcctgtaatcccagcactttgggaggccgaggcgggtggatcatgaggtccggagatcgagaccatcctggctaacaaggtgaaaccccgtctctactaaaaatacaaaaaattagccgggcgcggtggcgggcgcctgtagtcccagctactggggaggctgaggcaggagaatggcgtgaacccgggaagcggagcttgcagtgagccgagattgcgccactgcagtccgcagtccggtctgggcgacagagcgagactccgtctcaaaaaaaaaaaaaaaaaaaaaaaaaaaaggagaggatagatataattaaacatctgatttatactacattactccagctgcatgttcctgtttttatagacagggaaatggaggctgaaggaagcataggtccctatgctaagcagcagagaagcggcttgccaaagttcacacagatgt

SEQ ID NO: 66651 - DNA, 1549 bp, Homo sapiens
aacaatctcaattcaactaagacataaggtcatggaatgtcaatgacgatctggtccaggaggcagatggccatcttcctccagccctcagcaagtatttctcattggtgcctcgtgctggttaagctttgttttcctgccccataaggtaaaagtatttagggcccaaagagccctacatcctttccccctgcctgtccccctacctgggagacagctttatcccaacatttaagaagtgatcttgttcataaattgccagccttgccaatgagggtatccgtctgcctgtgtctctctgtcatttttctgtccctgtctctgtcatttttctgcccctgcctctttctccggctcacctctctttccctcacactgcctttttattttctacttcttaagaaagaacttgggcctggtgcacagaaagccctcaaaaaccataatttgttgcgtctctttttgtgtctcccatctgtctgcccttttgtctcccgctctcttcctcccttcttctctgtctcctttttcttccctttggaataaatgcacagaggccagagaggaggctgctatgggactccacagctggccggcaaagagagcaaggggcagaattttccccttgcctctctcgcctgcccaggcctgtctgttgggaatgtcccactcctaatcttccatgggggtcatgcacatccttctgtcagcaactggcacaaatcaatttgctgcaggcagtcatgctccgtggctctctctgttcccacgatgtcacccaggcagtggtgtgaggagcccatttggaaggagcaggtctattgggtgggggctgggcatgattggggcagcagaggggaggtcactcttggctccatgggaacccaaagcctctgtggctctagacggttgtggtcttacccttgcctatgtgactggtgattgtgtttgggtcaggcattcagctgaaaccaagagctggctggcagtcagggtcacccctaaccatatgcctctccttcctagccctcagtgctctctgctccttccagccttctaattcattctggcagcagcaggacagggaaagggtgagacattggcatgttttggagatattcaggaacaagactccagaattcagtgccagccgaattattttttcttaggtatttactatgcagcacatatgtttcctgaatcttttatacatgttatctcttttcattttatgaaataggtattattatcttgattttacaaatcagaaaactgatgtttagtttggatttgagggggctgaggaaatcaggaactagaagtgactcccagtttcatttgtttccatggcacccagcacggggctcttcacctccttggctccaatctaggcttgttgaactgttgcactgagtcacaagtgattaggtagatgatcatgccctcaacagaaaaaagggatgtcagaggagaaacaagtttgggatggagaagatgattggtctggatgtttattccacagagatagatttatttatttatttattta

SEQ ID NO: 66652 - DNA, 2290 bp, Homo sapiens
aaataaattgtcatcaattatatttgtctcccccatctttattttggaaggttggaagaagttggtgaatggtggttgtttttgaaaagatttagtacctgctgtactatgggcaatactgtcttccaatatgacttgcctgtttaaaatttggcctttaaacatgctttgagaactgcaaagtcaatgggttatgatcaggttggggtaccaccatgttcaagagcaggaattttgacaaagtcacatttgcaaaaccccacatcatcatagttggattaaggcagaatgctaggtgggagtggacaacacccccaggtgaattcagaatggttcaagcgattccctagaaaactggatagggattgtccccaggttaggttttacaaacagaatgctctcacagcaagtcaggctgatgtaagagttggctatgaaagtggcctcaggacagaaggagaaatattctgaaccaaatctgcaacacaggcatctttggggacaacctaaaagaatgtgtagcattggagatcatgccattgctttgggaacttccaggtaagtctccagtcctcagacaaggcatgtgccagttactgccctgtttagtggaccatttaaaaggacgctgcccacagtcactcaatgaagcatctcgcaccatgtggaatgtggcaccagcacctcatttgctctgtctcctagccttttgttgggggcagagtgaaagaagagaagagggtctctggcctgggacagatttttcttgttggtaaaattaagataacaccttcccacccaattccctccagcagcatactgaggtctgagaagtagattctcttactagaatatggtagacatcaaaaaaaggaaatctctcatattataatattcattatggatatatagtgtggaaacgattgctgagagcaagcaccagatcaaagacaaaggaccaaaaaatggcattattctattagatataaaaatgaataggaatcattctgcagatttttttttttacccaatacaataacacttccatcatttaggactaataatagtgatgatgatgatgataatgaccttgactcatttgtgaacaccattttttacaaagccctttcgttatctattatctttcttgatcctctgaatgaccccactagatagatattacagggctaattatttccatgtgataaaggagaaactgtaagcccagagggcttctgtggcttaaccagggtcaaatggagaatagagtcaagctagaagcctgaacaattccagaagtggtctttctcctaaactgtgctgtaacctagccccacgctgtagtagtagtggtgatgactctacaccaggcactgggacaaacatttcacatgaatgtgcttgtttgatccttacagccagccaggaggcagattcaattagtatcccttcttagtagatgaggaacttgagggaggagaaggttgtcacttgcctaaggctacccaactagttggggggacttgatccagggctcccctcttgaccactaccccacactcttgcagaagaggtttaaatatagaagggagagaagttctaggtcctctccttggattcacgtccagatgcaaggcagggatctgctgatgggcacctacaccttgcattcatcttgcccaggtgatggtcatcatcctgaccactgatgagatccaccactgggtggctcacagtgctactgcctggggtgagtctgtgggccctcgaggcagtagacctaagtaatatgaaagaagttctgccttgggcccctcaaacccctgggataggaaatgtgctcccataagaagatcagagtaattttcatttctaatatcttgacaaatactgtattgcataaatttgttccactgaggttccgtaatttgtcactgtggtctcatgtgtcagtgtgagctgcagctctattaaagccagctagctatatgactttggctgaggtacttacttttctagtctcagttttcctcttctgtaaaatgggaggctgtgacatgtgtctcaccatgctcacatgattttgctgcagactgtgaacaaaggttctctgaaaaggaatttgagggaaagagactttattccagtgaacagtttgtataatgggaagacatggcctttggtgtaaacagaagaaggtgtgttccagagaacagagagggttcaattgttttgtttgtttgtttgtttggagatggagtctcgctctgtcacccaggctggagtgtag

SEQ ID NO: 66653 - DNA, 2924 bp, Homo sapiens
tggattatcaggtaaatacctcattagtaagattttgaaacatgtctcccaacagtttttgctttcttcataaaaacaactaaattttaaagaaaaagcaatgtatctgttgtactgtaaattcctctagctaattttgattatccctatcaaatgcacttgagaaaagagatttacaaagtggtaaattatgaagactgatatttaaagcaaatgtaggacaattagtacagtagacaggaccacaggcatgagtgttagactgggctggggttaaactgtcactgtggcatttacagatgtgtaacttggggcctcagtgtgatagaagcctcagttttcttgttgtaaaattaggatgaaaatacttcaaagagttactggattaaattagatagtgcagatgtcatgtaacagatgtttaataagtgctcattattttttgttttcattgttaaataatatcatataatatttcattgcccactaataaattggcctcattcagatttttaccatagctttcccatacctacggagattttaggtagagctacatgaattttggagccaccttctgatggagacatctgggggttttggggaaagggaatcagacttgggcagggaaaaaatagtgagattatgagggaacaagaggagagagagactacagaggaaccctttcctccaggccttgtcatccatggcaggcccattgggccggggggtgctgagatttaaggaaggtgcatgtgtctgtcgtattcactgcttcctctccagtgcccatcaggtacaggctctggcacatgcggttatggagcatgtgtgtgtttaatgaatagtttccatgacagagctaagattactcatcttttcttttcatagacagtatctcctcaatgatgtaacttaggtaaaataagggtcacccaaagcatttttccatctcgatcagcaaagtaaccattcatctctgggaatatgatggcattcagaaggtgacagccaacagctccaagtgaaaacatcaaagtaattgaacattaagttgaaggaccagacccagaaaaaattctttcagcttatgtgtcacttgcaaccaagccaacaaagtcacggtcatttcactgaaacaataaaggaaggaaatcccaaagtgcttctaagtagcaaagattggtgtatgagatgaaatgtataggatatactacataaaaattagatggataaaatagattttttcctaagtatgtgcaatctattatttttagtatcatttagtaaaacaacatgaagacattttattagtttattcataactttggtcccccagctcaatcttttccaaaagaattactatgataattatatcatatgaaaatctgcactggccagactctgtgctggacactttacacacattgtctcatgtaaccctcacattgcctctgggagataagtgtttcatccccatttatcagatgaggaaacatgagtttcagagacagcggatagtcacaacagactgcaccgataccacacagctgggaagtggcacagccacaagtcaaactcaggttagtcaaattccatagttattacatcgcaggttattttctgataatgtaatacctttcccagttccacatttttttacattccggttgggagaaaacctcccaaggatgagttctaaacttaaatgcctgtaggaattgggcagatggagcaagtgggctggatgggaatggagaacacacagcaattgccctaaaaggggcagctgccgctgaactgcagcaccctgtggtcagaaaggaaggtgagtgttttgtcattataccttttattgttccaagagaaactggaaatctagatttttaatgtaaagttttattattttaatatattttcagttaatttaattaaaagaaaaaagcaactgtactagccaacaaaacatatcaggagttgcaatccacctgtgtgagtcagtgtccaatgatctgcttgtcatccacgtcagactaatcgccagtcaggcaatgtgcttgttccaacattattgccactgctgacatcttagagctctctcccaggaatattctttggaacaagaaggtgggccacaccagaaaatcagtctaaaaataacggttaaagctcattgactgctacgtatttgtaagcattttgtctatgttaatttcatttaatcctccaacactcccatggtagactatcatgcttctcttactggtgaaagaacaggttcagagaggttgagagacttacccaggtcacagagctacaaaaatagtagaataggacttgaacctaggtctggctggcttctaaatctgtgctcttagcctctgcgctgtactgtctcccacaggctctataaatactgatgagctgccccaggcattgctttgttcagttcccgttgttccccaggattggatgtcagagagtgtgggaacttgttctggaaatgaacaccttgcctggaaaagcatcagtcttccaagtaaagtgctctgtgcatcataaaaccttcaatttagctccattatattttaggtccatgagggatagattgcagttcctgccttcccactgattagagcatcctatttccgtgtatacagtacctattagatggtgcattttgcagaattagctccctgatgaacaggtattatttccccctctgctgacatgcagcagctgtctgcgctcattgtgttcaagcctctgcacctgaaattgggaagtgaggtgaaatggtgcaaaactcagcagttacacatcttaccttcaagcttaaagatgtgtaagaccaggttctactgattgtatctcttttgctacttatatgaacttggacaagccattttatcagtcttggtctc

SEQ ID NO: 66654 - DNA, 1368 bp, Homo sapiens
aaagcagtgttaatcatgctgaaatgtaatgcgcccctctgaaccttggaagatgagaaattatacatgctgatttcatccgctacttaactcagggggtgacaggctgcaattgaagaggctttggcaggttaagtgctgcaaacccttgcccaggctcttaagcatctctcggaaacctctgagactcgttggtaatttggtggtgtcatttggagtgactcctggccctgccagctgcagggacagttcccagttaaaaaaaaaatgatttcattctcagctaggatgtggtctgttctttttttgtctggggaccggagactgttaagggaaaagagagtggggaggagattctgcaaagaaataaaagcagacaagaatgggcttgtgtacattgcaaccaccaaagccccctcaacaaagcttcatcattactggaatcaggaaagaaaagggagaaaactaacatttatttgacatttactgtgtaccaagtacctgtcattcctgaacgtattgactccacacatctccgcgagacagctgttgttatgtggagaaattaggctaattaatttgcccactacgatgatgacaacaatgatgacgatggtgataaaagcttatatttatatggcagagactattataaactccttatctgcattattcactcctcacaataaccctgtggggtaggtgctgttatgatccacattcttcagatgaggaaaatcaggcctagaaagataaaataacttgccccttagctggtaaatggcaggactggggttcaaatgtaggcagattgcctgcagaacctgtgcttttaaccactaggatggaagttggaaagcaagactgacatagtctaaacatccttgccctttcagccacacctggctgtcccatctcatactgatataaatagtattacaggtgagcatgtatggaatgttggccaagggtggcctctgtacttggttgacattactgcgtatttaattctcactgtctctgtcgaggttggtggacactgaagctcagagaggtcagctgatctgcccaggatcacaaatgctaactgtggctctgggccactttttaagctacgtggtttcacttgctggcttatttcattaaacatataaaataattcctggaggcttggtctgttgaatgagcagtgattcaacaaactgagtggctgctcttggcttctctgtggtgggagaccaatgagcacagtgatgagactgacccagtcctgccctggaggagtccctagtcttggggtgggactctggcgttggtgccttcctgccccgaatccccaagggccgcagcgaactcacatggtaggac

SEQ ID NO: 66655 - DNA, 1054 bp, Homo sapiens
taagaacatatgacttctgtaataaaaataaagtatcaatgaggctcctttgagccatctgctatcttggtccttcctcaaatgcagctttaatcttttacacacattacaggctcactaggaatgaattggaggcccccactagaatgatttaaccaatcaacttgttcattaactgtcatgatatcttctgtgtgttagacaaaagatttagaataatccttattatgggctggacaaagaaaatatttgaaatccctctctctcatttctttccagtctttctcatggaattcccacagggactaatgcccagaaaaaagggcaaagtggcattagagtctttgaaaggagaaggagttcaaggcttgcccgtcgttgcagccaaagcagaactcccatgaagtgcgtgtgtgtttactaattacccccggcttgcaaccgcattcgcctgcttcgtaagcactttgggactctgttaaaacttcactgtagtaatgcctttctctagactataactattttagaaattaacccattatcatttttttctcttaaactaccaagagtaaagcttagtaataatttctattagtgagcctgtgaaaaaactaggatcctcatataaaacaaattttagaaaactttttgaccaagcttataccatgacttagtgatatcatttttgaactcttcaggatataatccaaggtttatgtgtagatatatctatatctatatagatatatagatatagatatatatagttggaaacaaggtgaaattaatatctgacactaaggaaatgggctttccagtaattgtgctcactcagtgggctaaatgcaaccatttgaaatgctagttttaaataacaggagtcagtatgtaaaatgtttatcgccttagtttctatgtcgatgtgtgggtgtgtgcaaatttatgtataaagattgaggcgacaaatgactttgccacatagggacacagatgtcctccccacacccacctcaatccctgcaaaagtacgggtattgctattaattatgtatta

SEQ ID NO: 66656 - DNA, 1649 bp, Homo sapiens
ggaggcttccttcaggaagtattccaggattgctgccagtagagttcctgaggctgatctctgcagggcatgggggattgcagatgctggtaaaaactttcttgagaactccatgtttgctcattttgactaaattctggactgagagtggcatgtacataagtaggaggctttcattccaccgaaagcgaagcctgcacaaggcagaggaaaagaaacacaagacagaaggaacaaaagagcatgtgtctgaagcccccaggttaaggaagggtgttcacagagaccaccacctctaatccccagagaaccctctggcacggccactgccaattccctcagttgatttggctcaggtgtggctggctgaaggctgcccggccagacgagttacatttgaatcttggccctccccctaatgagctgtgtgtccttgggcaactccctgtacctatctgatttgctattttctccttcggaaaattgtgttgtaattatgtctaagttgagataatttatgcaaaaatattctaccaccatatctggcacgtgccaaatgctccctaaatgtgacctagtttgaaaccccaccttggaatgaaccaaagcctggaccctcttgttgtcattgaaatttgtgtatagcccgtccattgtcaaggcctgttcaaggaagagcagtgtggtgtgtgggctctggaacaggacggccttggtccagatcctgcctctgccacttactcactgtgtggtctgagggaaatcacctaacctctctggtcctcaattttctcacctggagataacatgagtactgacttcatatggctgtcaggaggaacatatgaaatagtgaatgctcagagctttgtaccgtgccaaacagcgctcaagtgaacgtcggatatcacagtactccttgaacccatccaattcaaatatcccaatgcttactgactcactgtctaccttgcacactagatgggctgctcatttgcaccctaatacctggccccaaattcggtccagagtttaatgaactcaattcggtcaacgggttgaatgaacgcttgagtggtgagcaaacgttggggactcttgaaacacagggctaggtcctgtgtgttagccactgcagaagccatggttacaacagacaaggagccttggagcattttagaaacctgatgcatttagaaagctgtgcacactggttctttcctcctggattttttttttttttccaggccatttgagctgtgggacataattgcatcattggctataaagactgctttcctgagggggtacttgtttagaagttccaggccggacttggctacccttgattgaccacttgagaagcctgataatggcagggaattgggctacctggggagcactgttgccaaggaaaaaagcaagctggtgtagcaaggaggtcagaagggctatctgacctgcacggatcatgcactcaagagtcagggctacaaggagcctgccagaggcctcggaggatctagagaggcctgttgtgttctaggctcctgcatttggggccttagtgtgagttatctccactaatcctccaagaattctacagggaagttattctcattctcaccagacagttgagaaaccaagat

SEQ ID NO: 66657 - DNA, 1092 bp, Homo sapiens
attttattttttgagacggagtcttgctctgttgcccaggctggagtgcagtggtgccatctcggctcactgcaacttctgcctcctgggtttaagagattctcctgccttagcctcccgagtagcttggattataggcacctgccactactcccagctaatttttatatttttagtagagacagggtttcatcatgttggccaggctggtcttgaactcctgacctcaagtgatttgcccacctcagcctcccaaagtgctgggattacaggcgtgagccactgcgtgctccgagttttgtgggttattgttaagctgaccatccattttaatgcctcactgtgcaggtgggaaatccgagagtcagaaggaagaagtagtttgtgcatgttcatacagcaggtgagtcagtgatagactgggactgaaattcaacccccccgcatctcagaccaggagctcagaatctggcacggtcagcagaggggtgaggatgatgagcagcatggggaagtgggtgtccctgactggagggaaggacaccaaatggggatgctctgaagcccacagatcaagtgcgaggctggacgcagaccaggtgctccatgactgttgttgaatgaaaacaagaagcatgcctgcacagcatcgtgttattactatcaatgttactcttcatttcgcaaaagaaatactgattaggtcctattgaggaaaatgaaggaattgtatggattcaggccctctgctatgttcagtttctattcattcctccacaagctgggtctaaaacactgtaaattaacactgctgtggcactgaatgaaattcctggtcatcaggctggcatgtgtgcctgtctgtctggctggctatttggctggctggctggttagctgtgttctagcagatgaacccatggggaagaaaggaagggggggcaggttatcttgattctagtgcagaaggtttccttggttgcttcatagaaatatggggctcaatattctggcagtgctgaagggcagggacgtgccttatgtgaacattcatttctgtgccgtggtttcttgttcaaggcttgacacaca

SEQ ID NO: 66658 - DNA, 1100 bp, Homo sapiens
atatcttctcccattctgtggcctttttattatctcagtggtgtcatttggtgaagataagttcctaattttaatgaaattcagtttattaacctttttcctttttgattagcacattttatgtcttgtttaagaaagctttgcctgctgcaaggtcaagaagacattctacattttcttgcaaaatctttattgttttaccatttagatttaggtttgtggcccatttggaattgatttttgtgtgaagtatgaaatcgtgatcaaggttcattgttttgcatatggataaccaatagacctaacaacgtctattgtaaagaccactctttccccacggtaccacagggtcacctttgccatagatcaggtggctgatcatttgtgggtctgcttctggactcctgcagttaaagtttcaggccagggctatctgattctaaagtgtatcttcttttcattattctataatagaaagaatttgagtaaatgattttggaacaatctaaggatgaaagaacataatatgctgtttttttgagggggattgttctgtgctgtttaatagagacacaacaggtactcaaagtctcaaatggcaagtggggtttggagggtgcaggtgtgtggtaacttggagggaggaggggcacagggatcctgtgtccacagactaagagagatggtgttaggaaaagtgctgccaacaggctgaaactgtgaaccaggacctttgaaaagctctggggattcccaaaggataggggaaaaatatgtttttcatggaataacatggataaatctcacaaatctttctatattttctatagctgtaaagtaaagcaaatttactttagaaaaggggttattttttgaataagaatttgtaacagttagattttaatgagggtacataatttgtaattaggcattattcgctcttcaaaatcttgttctaactgggtaattaattgcatttttgattatagaagttaatccatatatactctcatcttaacaggggattacttttttgtagatgaggcacaaatagagggtttaataacctagcttctttcagtcttctatgattgaaaaat

SEQ ID NO: 66659 - DNA, 1579 bp, Homo sapiens
catttcaagactatttgtgaaaggccctgtaccacctttcacactcaaaacatcttctgtttattcaagttttgagtttctttgtttattttgttttattttctgagacagggtcttattgtcacccaggcatgatcatggctgactgcagccccagcctcttgggctcaagcaatccttccacctcagccacacaaggagctgggaccacaagcacatgccaccacacctggctaatttttgtattatttctagagatggagtttcaccatgttgcccgggctggtctcgaactcctgggcttaagtgatccacctgccttggcctcccaaagtgctgggattacaggcatgagccaccacacccagcctgtttgtttattttctaatgttcataaggggaagagactaggtctcaggtcataagaggatattagagagtttcaatagggtagggaagggaagggaagggaagtgaaactcatttatgaagtacatgctatgtgtgttccatatgtaagtgtgggtacaagcttcccccactgtcatcctgcaacaaccttgcaatatatgtggtattatacttccaactattacagaagaggaaacaatgctgggtagattaaatgccttgcccaaggtcatacacagttaaaaggtggaacagccaagtttgtgtgtataaactttttatggacataatatagcataaagaaaactgcccaactcctaagtgtatagctcagtggatttttcataaaattaacataccaatgtaaccagaactttaaatagaacatgaaatagaatgtgatcccccctcccagtctctatctttccccttacttcttgcaaagttaactgctatccagacttagaatactatagatttggttggcccattttataatttaatgtatatggagtcacagagcatatactcttttttgtctgctccttttactcaacattgtgtttgtgagatttatccacgttgctccatagagtcggagtttattcatttcattgctgcatagtattgccgtttgtgagtatacataatctatttattcactctgctcttgctggacattcggttactttctagtttggggctgttacaaatggtgcttcggtgaacattcttatgcatgtcttttggtactaatttggtcttggggtggagtttctgggttataggatatgtatctgttctgatttagtaagtactgccaattttccaaagtgattgtagcaaatacccagaagtgcatgagagttctgatatttttgctcactaaaaaaataaaaaaaaatttttttgctcacttaaaaaaaaaaaaatgaactcaacggccgtgttcattttagctattctggtggttgtatggttgtgtctcattatggtttaacttgcacttccctagtatctactgaaatagggcaccttttcatgtgtttactggccatttggatgtcttcttttgtgaaatgcctgttcaagtcttttttccagatcaggttgtctgcttttttcttaattatttgtgggaattctttatatattctggcatcagtca

SEQ ID NO: 66660 - DNA, 1048 bp, Homo sapiens
cacagctgccagagtcctcctcttaacaaaaacccaccatgttacttttccatcaactatagcaggagtcagcaaacgttttctggaaagggccaggtagtaaatattttaggctttacaatccaaggggtgaaattgagtctactatgtgagtacttacctaataagagagaaaacacatttcacaaatctgtattgatgacattcaaaatataataataattgagtacttttttgtgacacaggtctactgatgggagaaatggaacttctttttgtgggggataacattttgcctaattggagttcaaattggagtttgcttaattggagttcatgctccctacaatgaaattgattgcaaatattgatctgtaaaaaccattcttagttctcaggccatacagaaatggatttggcctgaggcccatagtttgcagatgcctggactatagcaatgcttctcaacattggctgcatgctggaatcacctagggtgcttctaagaaacactgatgatgggactcggggcctaggcccattaaacacttatctctgtgctgggcacagtggctcacacctgtaatcccagcattttgggaggccaaggcagaaggattgcttgaggccaggagtttgaaaccagactggtcaacatagcaagacccttgtctacaaaaaaaaattaaaaattagtcaagcgtggtggcacatgcctataatctcagctactcaggagactgaggcaggaggatggcttgaacccaggaagtcaaggctgcagtgagccatgattttaccactgcactccagcctgggggatggagtgagaccttctcaaacaaacaaacaaacagactaaaaaaaccccactcgtctctgggcatgagggcaagatatcagtatgatttgaaagatgcttcataattctgacctgcagccagtactgagcactgctggcctacaggacagaggccaagaaccttccctgatctggtgctgccaacctctccaacctcttttcctggctcttcttgtgtccagcctt

SEQ ID NO: 66661 - DNA, 6228 bp, Homo sapiens
ggttgtgactcataaagctattcaagccactctattttctctgcccctgagagactaaatggtcctatggagtgtgaaccagagaggagagaggtcttgggagacccagtggccaccatgcctgaaggttagaggggagaaccatgcatgcgtcatacaaaagaaagggaagtggacgctttggcttggccgctggagcgctattatgcctctagccattcctttgccggcctcccaattatggctgcaatttggcagccatttccttgccctggggtggaaggggtccctgcaaaggtatgaacagttgggctgctttgggagccaggaaggcagaagtgaccatttaggtctggggatcacagggcttctattaagaatggtcctgttgtctcaacttttaggagggactgaaccctgaatggcccaattttgtgtgatatttttacctcctactttctgggacttgcaataataaagtaattagcaaaccaatctatagctactccttgaacaagaactagatataaagcatgatacaaagaaccatgagagataagaagctaggatggggtaagacacaaatttaaaaaatgcctaattggaccatacagtgggggagaatattaagactcatacagttggagtggttggaattctaagaagccattaggctggtcaagaaaagcttacagaaggatcaagctttcatctgagtcttaaaaatgtgttggccatgaagtactagagatggatgggaagaacataggcagggggaaggtctgagcaaaggtgcatccaggaaaataaatgcatgaggacttgatgtttgttgcacacctgctgagagctagacacttggtatgcctaccaactataaactaagactaatattattgcctccattttacagatgagtaaactgaggccaaggagctccaactagctctttggctgctcaagaacagggacaaatatgtcttacttatctctgtatcctgagtacagagttccagaacaggcctctgataaatattcacggatattaaaggccataaagcagagccaggattcaaactcaaaatccccccaaggcctgtgttatccagttattggagtgagtatgaaagtgtttctaaaagaggagtgggcagtaaatgtccagagaggattgaggggaattctgagtaaaatccaagaggtaggacctgatgctataccttctgggagccatagaaagcccctgggctgagtaatccgatgcctgtggccttttggaacttgggcgaatttgtcaacaacaacacggagctggtgaccgattgagtgggtcatgttttatcctcttgctgcatttcctcagagcaccctgtatgcccggtcctcttcaggaatgtgttcctggtggcaagttcttgtccaaagtatcctccatctagactgtgaactctgtgcagttaggaatggagtctgtgtgattcacccctggatcctcaatgcctggccctggaatatagtaggcactcaactatcacctgatgtgtcaattttagataacgatggttggtacctatacagatcatttccagaggcgtcttgctgacagcaagggactggaaggaaaatagctgatgtgaagagatggcaggagatgtaggaattcagggaggaattagttgtttttttctctgtgttgcaacacttggctcatctgtttgggcaccttctccctgtcttgattggcatattagcttcctacagctgccattgcaaagtaccacaaatggaatggtttaaaacaacagaaatttattttctcacagttctggaagctagaagtctgaaatccaggtgttggcaatgttggctccttcttgggggctccaggggtggaatctgttccatgcctctgtctggttcctggcttctggtgattgtgacactccttggtgctccttggcttgcagctgataagtccagtctctgcctccgccctcacatggctatcttctctctatatcttcatgtcttcacagggtggtttccccactctgtgtgcctgcttgtgtctcctcctcttcctataaggacatcagtcatactggatgaagggcctaccctattccatcaggactacaccttaacttacatcttgattacattcacaaagaccttgtttctaaataaggttgtatccacaggtaccagaaattaggatttcaatatagcttttggaggaacatgattcaactctcagtagttcgttatcacatattagtgttaaacaaaataatacctctatatggtgttttatgggtcatgcgacagtgatgattgcattaaattctcacactaaccctaagggtagctggcataatcagccctattatatattctgaaactgaggttcaaaaagtgatttgctcaaaattatacagtgtagaagtgacagaaggaggaggacctgaagctgggacttccaactcatatattgttctctccccttgtgcttctgaccttgggagctgctgggatgcgggggtaggcatgccaccctcctcacatccccacagggctcacaggatgcttgaggagaaccaggtgctctgtaaatacttgttggcttgaattgcattcagaagctcacccttgctctggagagaaccttcaagggtagcaaacaatgacttttactgaacatgtcagagagtgtaagccaaattttgagagaactagggtttagtgagtctgtgggcatttccgcaggtgaggtgttgaattcactgtacctcattccaagctgcggggagccagggttcaattctcactttcttcctttcagagaacaagcctgaggcccctgccaaggcttcttctcccctctcgtctgctcccctccctccttcagtgtcaccctcttcctccaggcctgttcttactctgatgcatcctccaaccccccactgccagagccagacagccatctgctcctcactcccccgtgtctccgatggccccagggcaaagtccagactcctgctgactgtagcacgcactgcatcctctggcagcaccacctattggaacacaccctcacatttgtgtatgacacaaattgtgaaacacaccgagtcccttcagtaagacttggctcttcagtggtgcccatatgcatcgtggagtgcccgcctctgctcctctgggcaagctttctgaaatccctgtttcctcagcctgccttttttgcatttcaatctcatttgccattgttaaaataaaggagctgaccagagggctgacgcagtcccatcagtttaagacttcagaagtgggaaacagcaggtgtgcttttgccccttgttaggctataagaagccactctgacagccactgaggactgaaggatggctttgctgttgtcccattttgtctttaaaagcatcctgtgaaggtgctaggattaacttagtgtgaagatgaggaaacggagacccagagagatatctgtctaggaacttgcccaacgagctgagtttgaatatcgcttccaccagctgccagtcatgtagttttgggcaaatttcttgatctcggagcctcttcttttttaacaggaggatctctgagactcctcttatattccacaaggctgttttgaggtctaaacccagtaatctacctggcatacagtaagcactcagttgactgtagctggatttcagagtggaaagaagggaaaaccgtgacagaaaaatagctacaaggaaaagaggttaggagcctggagggtgcagaagaggcacgaaaaggggagttatcaggcactgtggggggtttgggaaatgacactagggcctgatagtgctcaatatttggtgtccaagataggagccaaaatggatttctcactaaattcttagttgtgtcttcactcccttgctgtatgtggatcactctgtcccttcggaatgttaacatgctgggaaattcatgtgtcattttggtcaaacggagagaaagggagagacaaaggtcaggatgggtgactgaagcagcccaagaaagaaaacatgtttaggaagaccttaaaccctacgtcatgctttataagtctggaagatgacattcagaggggctctgtagcttgcccagagttgcacagcaagtagatagcagagattaggacacctgtttcccaggacctatttatccctgctgtgtcacagcgatgcaggacagaaggggcagggcccaggcagcccaatctgggaagccgggacctgtggttgattgcctatatcctggtttccttaccccaaatccttgtgatccaggagcacacaaagaaacatgtgggtgtatattctccctgcgactttccttttctaaagggactttcactagcaagcaacccagccatcctggctgctaatgtaacctgtcacttcaatgccccaaggccatcagcaattcacaacgtgcgtatctcctaattagccaatgaagtaactgttccatttcccttgctccctctgcctccaagttcacaatatgttctctcctgctcagcttcagctcatgtcttctgtttctgcccagaacttccctgtgagcaaacatcataaggaaagggttatcttgggatgtaagacaggggattaaggtttccgctctgagacccagctccatctccaaacccatccttcagagttcctggggctaagccactgtggatgttggctgtccttgacctcagaactggatttttctgtctgagaacaggctgatggagtctgtgttggttataagtaaatgttttctgtaatatcaactgcatgaaagaggaaagccaattttatttcttggatcccaataatatattgatttttttttcaaagggaaataaaaaatcatttggctatgccaaaccaattttctgtatcttttggtggaggggaacaataggagtgctcacagctgtcccatagaaataataaatgcatgtccacagtccatcattgaaagcccttggggtgaggtgtgtttcagaatttggtttgtttttagatttttgaaaggaaatagggtgcatatactgtatattatgtgatacgtctgaggctgtgctccataatcaaagccattaatttctctgcagcaaaatgtatgattgtacacactaagtaggaaagataaagacagtaaatagcttcacattacttcatgtcaggtttttcacccaatgagttataaaaaaaacccaaccttttggttttagaattttttgagtgtcaggattgataagggcctgtggctctctgattaatatttgctactttactatataaattcatagagagatgaagattgcctgtatgagactgcataaatcaattttcagtagttcccaaagacatgtggacctcaggtaccctaggggagcctggttccacttggcatcccacaggctagcacagatcaggccctgaggaaggaactgagaaacattgggtgagtaaatgcatctgcaggctcactgttggcacaaggtctgttgggtcccaggaactggcctactgttgaaattatgatggaaaaaaaaaaggaactataaaacaatagcaatagctcacccttgtagaactcttactattgccaggcattgttccaaatgccctacatattttaactcactgaattttcatgactacactatcaggtggcaactatttttagaaatgactcccccaagttcacatagtaagtggcagagccgggcttggcaccccagcattttggcttctgagttcacacttttaatgacgctgcctcttatgtaaaaaccatgtccactaaagccaggctcaagcaaacaagagttagactggcaagaatgaacctccttaataaaataatatgcattattgaatacatactgtgtgctaggctctatactcagctctttgtattattctacttaagcctctaaataactatataaagtagagtttcatcccccacttcccaggtgaaggacctgaggctcagcagtggaggacatgtggggcaggattcaaacccaggacacattggcctggagccaaggatcttggagtgaggtcacagatactggccttcaggagcttacatggaagcccagggactaatgtggcattctgagaacagctggagccagaccgatctctaggttatatgccagcatgttga

SEQ ID NO: 66662 - DNA, 4612 bp, Homo sapiens
gtttggggcttaattattatgtcaggtgatccagctttagtccagatgaggaccctttgtaagaagctttgccatgagggcagcagcttcagcggagggtcaaggtccttctgagctgggaggctgaaatggaacacatgtggctctgagccagtgaagtgctttcttgggactgccctgctgtccaggaactgaagctgggttcaaatgctgactgtcattctctgggcatgtgaccatggccaagctaatacacatgatgagcctcagtttctgcatctttgaaagggtgatcattgtgagtattttgcagaggattaaatgagataagactggtgaaccacccccaccacccccctcaaccccccggattttttggcctcatagctttgcttctatgcatgaagtgctgaatgccatttctggtactgactcagattcttcatgtgccagtctgggtactgacttgtggagtggatagtggttgagggaagacaactgggggtgggaggaatgggagaatgtgagtgtcgaggggtgggctacctcttgggcactggcaattacatgacagtggaacagcattgcaatttagttttgtgtttttcattgtaacccaactggcaacagaacagtgatgggagatggaaagggtatcaaatttgactagtgagttgccccttttggtcccttccttagagtaagcctcagtttcttcatctgcaaaatggaactatcagtgccttctctgactacctcgcagagttgctgtgaagaaaaagtgagataaaaatgtacctgaaagcatttgtaaaatgtaaagtgctgtataaatgtaactgattattgtttcatttaaaagacatggttttgttgatatctcatgaaaaacagtgctagtcctcccatttagtcatggcgacaacctttttgtcataaatgtgcatgggagaatcgttggttagtaggtgttttcctttatccaagtggtctgagctggaaaatatggagaattccttcactaaagggccatatcttttgactctattgacagcatgtcatgtggaactcaaaactgccttcgtgaatgcagatagattgcatctattagctgcctcttgtcatcatgacctgccagaagggaaaataaaatgtgcctacaaatatttcaatatttatgttgtgtgaaggtttaatattcatttggagcagtgaatggggaaagagaaaaaaaagtccacatcctttactttggaaattgctcagttcaacaagaatttattgagtacctactatgagctagtgagtgaatgatatgctagtgtctaccaaagaaagacaccaaattctaatattgacaacttcatgtttgcatactttgtcagaagccttggagaatcccaaggtcaggagtctttgctcattcctatgggggaactgatgaaatctgcccagaggttggggaagagggaagtaggtgaaatggctgcagaggagaggtgtttgtagtaaaattggggaagagaggagagtgggagggggtggatcagacctcagaaacacactcctacctgttaggatgtaggtgtgtgcttgcacttgtgggtgggaccaagagacaggtgtcagtagcctggagttataaaaaccaaaatgcattgaataattggatgggaaaccacacataagaaaaggactcttagcaagtgtattttttccagcaatgcaaaagtgaatttacaagcatattgttgtagctgtgaaggggcaagctctactaaagggatagatggtacatgaaaataagttgtaaaatgttgttaattgaagaatatgttgataatttgtgtcactgatattcagtgttttgaatatgttgtcattgtcatttctcattatgtaaaaatataataattttacaagttcactggtgacttcattcccctaaccctattttttccccaataaggtcctaaattcctgaagcctgacttctcctgccccaggggttttcagaaacctaacccccatggttggcgagggactgctgtgtgtgaaatggtaactgccctcaaggagcttacaatctagctgggggtaaatgacttgcacatgaacacaactagactgtgagcttctagagggcagggaccttaccctagtcatctctcttctcaccctgcacaccctccctgagggatctcatccatccccatggcgtcaaccaccacctgaggaccctctaggcctgaattgtctcctgagtgccacacccagctctccagcatcttcagtgttcctccccgggtggaatgctccacagcactgccaactcaacctgctcaccaaaacccagcttgtcatatctcctctgggccagccctggcttccaggctcctggacttggtcccccagatcaaagatccaggggtcactcatttggactgagcttgatggaaaagtgcttatgtttcaatgttaagtaaactggggagcctatcaaatgtatagacatgatgaactcattgatgttaagtacatagatggaaagagaaatgcttcagaatgtattagtggttgcctctaatggtaaaataatgattgacgttttctttttctgacacccttgtgctttccaaatctcctgcaaaaagtatttattacttttgtaaccagcaaaaatgcctaataaaaatgattgacaggtctccatttgagtgtcaccttttctgggaattattgtttattcctttgcatctcaaagagtctgaggctccggggttagacagcctcagcacgtgtgcttaccctgttggggaacttgttgcactgtgttctttctgtaaatcggctcttccattagtctgtgagctccgagagggcaggaatcatggttattcatctctcatttccagtgcctagcacaaggcttgcatacataactgctcaatacatgcttgttctttaaaggaagagagggagggaaggaggcaggaaaacaaaaaggtgaaggacaccagaattctcaaatgttatacctccatggatcccttgtattatttcctgtccccaagatcctttgtttattaagcttttgaatctactgtaccactgatttttcactcggtagtttgaatttttctgttttttagtaatcataggccttataaatcccaatcagagcttctcagggccaagtctggcatatgccacctgctgtcccaagtctgacttgggcagagtgccccctgcctgacacctaggtcatggcatgcagggctatctccagttctctggagctgagtgtaccttctggagcttcttttaaagtggaacgatggcaaactgcaatgtctgtgggaggaggagagcaagggaacagataacataagaatagaagtgacaattgcaaacttcaattgtgtgtttcctctgtgcaggcactgtgctatgcatcaacacgcactgtcccctcagccctcacagcagctctgtgacacaggcactattacaattgccattttgtaagcaaggaaactgaggcttaaagatgcattagatggggaaactggaatttgcactgattgcagagcttaagtccagcactgcatccctcttctgaagttccaggaagagcacagggaggagagggcaagagagatgcctgtcaggagaaaggagcagtgtttgcaatttcagagccttgtttggggatgtgccagcatagaggagtttagccccgaaggcacaaagcccttcacaaagtctgtgacactcctgaagttgtaggcaatttgttccaggtatgtgcattgtctgggaaggtcttcaaaggagtctgtgtggttaaaaaaaaaaaaaatggttaaggaagcggaccatggagcagaaagttgcagtgactggattctggctccaggctgcaaatttaaccattgaatatcacccaacaggatggatatggggatatggtcttgttgataaagcatctccctcacacaagacttggagaaataatcctggagggtgtgtgtgtgtgtgtgtgtgtgtgtgtgtgtgtgtgtgtgtgtgtggtgtgtgtttatgtgtctcccaggtatttagaatcaactgattaccaaatcaatcaacaaatatttattctagcagagacttgatagctctctggtttgtcagggttgtttaaagaaggatttctgccttgggtgggagtttgggctaaagagataataataattaccatttattgagtgttggttgtgtgccagccaactctgctgggcactttatatacatgattccacttaatccgcacaacaacaccgacaaggaaggttttataacccattctttacagagaaggaactcagagggtttgaatatcttgcctaaggtcatagtaattcaatctgtgtaagtagaggagccaaatttgactctacgtctgtttccaagattccacatgtttctgtttctctctttttttttgatgtgaatgtatgtgtttccaccagaactaagatccatcaagttatcaaattaataaacaaatgtattcaagcaagactcgatgcctgttaattagccaggctgtattataagggagccttgc

SEQ ID NO: 66663 - DNA, 1042 bp, Homo sapiens
tactgacacagtgcctggctgtggtgcaaagaagatgctcatggaataggctgcagtgatccagagttgtaagacagaatgttatgggagcagataggagaagaaaaaataaatgaatgaatggatgcatgcacgaaaacatgataatcaggagtgttttccaagaggttagtagttggaagttactgggagatgggatgagtatttatttgatacatatttataaagtatttttatgccatagtgctgttttaatcactttataaataatgaatttaattttcttacaaacctaggaagtaaggactgttacttttcctacctcgtatgtgaggaaaccaaagcatagacaggttaggtgacttatccaaggtcacatgggtagtaagttggagctgggacttgattccagataattcagctctagagtctactgttagccacctcactctgtgtggaatggggttgggtgttccaaagtcagggaaatcacttggtaactggtggaccccaactgtcttacgagggctgtcgctaaggctgtcctgggcttacagacaacagagggtctgtcacccagctgggccatcatgagggagctggccatctttgccattcctggggcctgacatctcacagcctgttggttatccttacgtggcaggctttcagtgatgcggatgcttcttgagaatgctcttgggctttaccaaccggctaacttgctagcagagctgggaaggctgtgtcctcttggggtgttcgggagggctcctgagctgtcctggtggtggcacccagtccatgccaggcctggccaccagggcctgacttctaacaggaaggctgagccagtgcagctctgtggttgtggctgagccaagcatcagtgctctgctagactcctttgtgaagctggagtcaggaatatcggctcccactaccatagaatttcctcttgaagatgagcatttgttgatgtttaataatgttgttcagtggtttgaattgctgcccaatacttgtcttcacacattgacag

SEQ ID NO: 66664 - DNA, 1072 bp, Homo sapiens
gtggaaaaagccagactcaaaagcatgtatactgtatgattccttttatgttaaatttcacaaattgcagagtaatctattgtgataggaagcaggtcaggggttgcctggagagggtgaaggggtgggagggattatcaagggggatggggaaatttgggggatgatgtgaatatggttactattttgattgtagtggtgttttcacagttgtatactgatatcaaaactcatcaggttgtgcaatttaaacatgtacagtttattgtatatcaaatatagctcaataaagtatgtttaagttaatgttcagtacaaggaaagacaaatcacatcctcatgctggagtttgtttacaagatgatgagttctcttcagatgccaccacagtgagtggagtttgactcccagccccagcactcactgtcaccttgggcaagctacttaagctctctgagctgcagcttttccatatgaaagtggagatggtaaacctacatcacatcattcctggggcctttgaaggagttaatatacataaagccctgagcaccgagtctgacctatagtggatgacccaaatgcttgtctataatgatagcattatttattattttcaggtatgcggaatacttaaataccctaaaccacctgtaaacgaatgaaaattcacgtgagtcaacctgggtgaaaaccaaaatgcactttacttccttgggggcatagacatgagtgcttccaaagtgctctgaaacagtttgttctttttggttgattaaacatgctttaatttcacagatcccagttctgttcagcagacattctttgaggattggaaggacttcccaaaggaagtgactaatcatagaatcttagaatcggacaagagagagacagtcttaatgcaaccctgtcatcttacagacatggaaacagaggctgaggaagaaaggtgccttgtccagggctgcaaagtggtggggtgaagagggaaccggcctcctggccccagtcagcatgcttgcccctgcaccacgaggcctctcccctaagccaggccgctttccacaga

SEQ ID NO: 66665 - DNA, 1035 bp, Homo sapiens
tacgtaagagtcaacgcatgaaacacacctgcctttaaagagcaaaagtaaagttcttttaagccatttcttcagcacaacataaatgtgctaaacattgacattcttatgccagcccttagatttgagactctcagttaactactttccagatatctgttttgcccttaatgttatacagtattgagatattgatcaggacctcagccacagtatatcttggctaaactgtcctaggtttctagcaaacaaggaatgactgtgtgagtggcaagaaagcgttgatgttacagttgcctgtagtgtctgtctttttttttcttttttttttgccattgtctggttatgtaccaaaatcctaactgtacctgagatagaagacgcaagctttgcgcaaaagcagtgttagtagcaggcataccctacaggatttggagcagagacctggagagaaaccctgagcctgccaccaattaatttgtgacttgaggcaaattacctgaccttgttaagcctcagtttccccatctggaaacccggatcttaataccatctcgttaggttgttatgagggtgagatgatacagtgcatgtaaacctcttagcatcatatctgtcacatagtagggttgtaccttaataaacagaaaccagtaatgttaattttaccaaatttttatgttatagctgaagagtttcttttgtcaaaaaagaggcacatgaaagaatgctcagtatcattagtcattagagaaatgaaaattaaaaccgccacaagataccacttcaaacccactcgaatgtctaaaattaaaaagactgaccatacacgtgttggtgaggatatggagcaacagaaatgtaaaaggagactactacttcagagaacagcttggcagcttcttaaaaccataaatacatacctaccttgtgacccagccattccactcctaggtatttaccccagggaagtgaaagcgtattgagatacaaagacctgtacaagaatgtttgaggcacctctatttgtaatag

SEQ ID NO: 66666 - DNA, 1034 bp, Homo sapiens
cagaattggcgtttagagccagcttgtaagccacatgattggctatgactcaacagatacaagtggcatcttgcaaccattagtatcagtattcttgttgttttcatgtcctgcatactgtagtttcagtgtttttgcttgtttagggaaatccattataccctaaagaagcaagttgataagaaatccccacagagagattctaggtaggtgcttttcagtagaggtttctgtaatgatggaaatgtcctgcatctctgtcctccaatagggtagccattggtcagatgcaactgttggacccttgaaatgcggctagaatagaattttaaattgtatttgtatcatatataatatataatttatgttacttattatgcatccttgtttgtcatatttatgtttgctttctattaggcagtactagtctagtgcgaggagacagacaatcccactactgatacatacaccgtttaaagtatactgtaggaaaagggccttccttgaagcctgcaccccagccaggaagagtgccattaaagagtgacaagatctgcctggaggtcagtaagaaaggctttcaagaggagagaacttcttattactgggctctgagggttttggcaatctctgagtagggaaatgtggagtgattcttccagaggagagagcatgagaaaaggtgtggaggttccagaaaagcacatacctgggggatatggagtgggatgaggcgacctcaggaagaaagaaggccacaaggagcttggattctattctgatgaagcaaggacactttacatagatgatgtcatattgcaagtatgagcagggatgtcatgagcattatccaggactataggagacatacatagtgttcttcaaaggacaatgtaattctttggacatggggcataaacaccatggttcaaagccaagcttttagaagcagaatgcgaagttgaaacttcttctactcaggtacagctctctttgctatgtggtaatgtttactaccactgtggtcatgttta

SEQ ID NO: 66667 - DNA, 2409 bp, Homo sapiens
tttcacttacagcaaagctaagtgaaagctttggaaggtttggaaagctttggaaacttctggaagttgaagtatcatccctgaggctacactgctggtggaattagcattgaacctgggtttatctgactctggagtgactgctcctacctctgtcccatcccagctccagggactaggtttcaaatattttttccgtattgtgtggatgtgtgagcatgtggaggggtaatagttttttcttttttccttttcaccataggagcaaataaccatcccccaccccccaaaaaaaaactggtttgtgtccaaataagtttgataaatgccaaattagagaggttaatgtattttcatgctgcagaaagtctcagagtcttcactatgcttatgcgaatctccaagagaggcataaatagcacataagagttcccaaacttctaatatgagttttcttttttctaaagcaaaaccatttttagcactctcacaagagtagggtttcttcagaagctctttgggaagtgctaactttgtggatttctgaatctgtagggttctgattatggttcctgtcttagtgatatggtccaagcaggaagcttggagagtcctgcaggggctgagtgtttccctcttgggaggctgcaagctgcctctctttctgacatcttagtagttcagataaatgaaatgcgtttttgttctaacccttcccaacctattttatggaaaacatcaaagtatttaaatacaaagagtaaggatttaacatgttaaaaaaatgtatttcaaatgatcaggagggagaaaacctttaccatagattgggaaggatttgcatccttgaaggagctaaaagacaaagataagcttttaaaatacatatatggaacaaagagaacacagtgggttggattcaaaatatttaaatctgtcttattccattaagggaactttaaaataaatggtttctcattcattcattctctctctcactcacacacacatgcacatacacataaaatatcacataggaagtctcatactcaaactccctccccgcacccaccttgtatcttgaaggaactaaggaataatttggctcacctaggtagctggggaaactgaaggcccagagaagggaaggagtttgtgccaacccacgaagccagttcatgggacgtcaggccaaggagtggagatgtggatgatgtctgacatgctttgcacccctactgtgtagcagacctaatctctttacctccttacaaccaaccaggttatgggtgttatcttcattaaagctgaggaaatgaaactaggaaatgtcaagcaacgtgacccatggctggtaactggcctcatagtgggatttgagcccatacaaagtacatatcacactgtcaagtccagaatgtgagtttcctttttgccaatctaatttaaccatctcatccactatccatccctgacttactagacagagcaaggtagccacccagttaccttctgatgagtcaggagggaacacatccatccccgtgccgtgggtgctaagggtgccattgggaacatggaggaagggagctgacctcttacctgtgggtgtgaacagctcgactgccctgttcccaagtgctctggtggtttataagcagtgaggtgagtcacaaagcagacaaaggccactgactcagcgggtagagggaggtgccctcagttcttgattcaacattgccatgacttgctgggagtggtttttgatccttccatgtgtttttgaaaagccaggtaggcttttcatctccttcaccactttagatgcgagtttgtcctggaggcagggaaatggctcagctgccctcgtgggcttctgtcaatcctatgcttcaaacaagtatgagctaagcctagtctagatgtgacctggaatataaacaatccaatgagtttgacttccttcagaggtggcacctggagaggccatacatttattcaagtgatgccaccattgctaaacacaaggctgtatgcctctttgggaatgtgggagttcagtcattcaactaatgtctgttaagagtgtccaatttccaggcactgtaaaagtgctgggcaaagtcagaggaaagccaatccctgccttcaaagagatgacaacctgttggaagacacagccacgtaatggagtaattggagtggggtgtaaatgtacaggggacatacaagagccacctctgcatgggggcagtcaggcagggtctcacagaagaggtgaagcatgaactaactgtactgaagggtcatcagagttcaccagggtgaccagagaggacattccagttgcagggaatagcatatgcacatccacaggaaaatgagaaatcatgtttcagtagggctaga

SEQ ID NO: 66668 - DNA, 1628 bp, Homo sapiens
agtgctggcattgtaggtgtgagctactgcacctggccaactttgccacaaatgaccagataattctttgttgtagggggtgttctgtgaatcacggatgttgggcagcatccctggcctctatctactagattccagtgccttccccgccaattgtgacaaccaaaaatgttgacagacattgccaaaagttcactgagcaaagaattgccaagattgtccgtccctggttggaagccactggactagcttgtatgacttttggcagacaaactaaactcttggtattagttccatcttttttaatgtatgacaacaatacctgctgtaagaatgaaatgaaatagcattaatcaagcttctaccagggagcctggcacaaagtagacagacacatctgagaaagaaccttcacacccaggttagtgggggaggcagggaagcttcaaaaagtgggaagcatttgacgtcgacttgaaggatgagaacatattttccaaaaggactagaagtattgtgattattattattcatcctccttcctctacccttgcaggcctcctctcacttgctggtcactccttcttctctcctgtaaaaatcaaccaaagagactcttctaaatcctcagctcctggaaacaggagatttggttctggcctcacatttaaccctccctgcgcctgctgctccaggagtgcatagactcgccccttgttctggagcaggccaagaatgacccgtttccccaccttgttaagtatgaattggaaatttgtacccatgcagtttccttgcaaaaaaaaaaaaaaaaaaaaaaatgcacttgtaagcattcagagctggcttgaacgagacaggagctacaaatgcagttgaatatttcatgaagaccctttcaaaccacatgctctgctcttgtggatggtatgggggagaaagcacaggctacgagtcagaccaactcagttttagccctgactctttagtggaactttgccgtaggaagtgtcttcacttccctgggcctcggtttcttcatctgtacaatggcgggggtgggggttgcaactgatttgggatatattgtgagggcttcaggagataatataggtaaaggatctggcagggtgcctggcacatggtaggtgcttagtcaatgttacctctccagttggaatcttcctgttctcttcccagtatctgtgcttttagggacagcatagtctttctggatgacacaggccaatggcatgggactccttgggggattgggtttaggacagcctcccagccttctccttttaacttaagctttgggattgggtccggcatccttggaaggctcaccagttggtctactttagaagacaggatgcaaagaattccctctgattcaaatggcccagctgagcatactttcagtttaaaaataagtcggcctatcagaaggctgttttaaaatgtagaggtgacaagcaaatgcctgccttacctttgtacaaagaggagtgattagaagagccaaaatagaagcccagagaggctcctgggccacagtccctgccccaggcccagaaccagccttgggtcagaccctccctccctctgttctaccagggagccaa

SEQ ID NO: 66669 - DNA, 3029 bp, Homo sapiens
atagagggaggttctataggagtctattgcaggttatttcaggtcagactctgagaggacccctagctttcttgtcccctgaaaataaagttgcctgtagacatagaaaaaccaaagggctctagattgagacagcagatcctggctcaaattccagctctgtttctttgccaccttgcaccagcttgatcatgttaaaaatgagaatgatattacacctgtttctctgagctgctgtcaggcactagatttagagttacttgaccctggcggtgcattagaatcacctaggtgctttttaccaaagactagcaccatgcccccaccacagattgctctacaactgttccaggtgggaactagtcatcagaactctgtaaagctgcccaggtgattctaaggtacagcaggcttgagaaatgctgcatagaatacagccttactgaatgttagtctcctccattttcaaagcagcataaagggatcttatattgagtaatttatgtacgaggtgagtgacctaatttgtttgagccatgggactgcagatatggtaatcaaggtttctttcccacccctgccctcgtttttggcaaactggggcatttgggtcagaaaagtggccttcttactcagcctgtcctcttctgattccaacacagctgccttctgagtgctgggaaatgcctggcccttgcctggagatgtcatgatagtcctttgacctacttttgtttcttttctgttcacttctgggctgtgccccattaaccattcatgcacaaccctccaccaagctggcaaggcctcagcattcttcaagtggaagagagaatgcttgatttctgtccacatcctataaaatgcttatcagatgataatagctttccagggttagtgacagagacttagcatgacccaaaggcctggaggctcttcacttatgcatgatttggtgattttacatctcttagacaataaatttttggttgagaagtacttctactcagcggtctgattttttcttgagatcttctcaaacccacctcaaactggggaaatgtgttgtattttggagagggcttttaacatttaatgtgcataggtaccatctgagaacttattgaaatgcaagttctgattcagtgggtgggagcatgggcctcagctcctgcatttctgacaagcttccaggagatgttgatgccgccagtctaaggccacacttggcttagcagagctctaagaccttggtcttccttcctgcttctgctttctcccttctgtcttcttaggtccaggagcatcagatgcagactgtcattgagtgaatggaatctgtcagttttgtgcaaccgtttgtcagtattgttgtagcctcagtggaggcaattgtagtgtgaagtagacagagtaaatagtggccattatcatcatgccgtggaaagattccagttccacgtattatgttatactctccaggcttcttttatatcttcaagcacattaagcctcatggcaccttgtggaataggcagtgatttttattactaggataagtattactttgaaaattttataacctttattatgtttttgtttaatgtggttttcttctgattatgacaataatgcatataaacaacagaaaatttaggaaacctaagataacacagagaacaagaaaaagaacccataatcttgccatggagaggtagtttctcctaaccttttgattttctttccagtattgtttctatgtaaaatcctaattctcaccactaccctctcccaccataatttggagcacattacacacattgttttgcaaccttaatctatcacgatcgtttccccgttccattaatttttcctccaacatgatgtttaatagctatgtagtattccctcataaggatataccattatttatttaactaattttctattgttgtattccatttctcaccaccataaataatgctgagatcaacattttcatgtagttgtctgtttattttcttcagtccaatttctttacttgaaatttctaggtcaaagataatgcagctttttaaagcttctgacaatgtgctgatccgtgatgggcctgtggaagcatggaaccaagaccagggtccctctagtctggtagtagtttgaccagggaagttttcatcattcttgtgttgtgtagggagtttcatcattcccattttgtgtcaccagggtaccatggtggcactggagaagccctgagcagacagccccctctgccacttcacctcctggttcatgtgtgctgaactgcatcacacaggggtagatggtcactaggtcattaagattgatctaggccatatcttgcttcctggatctgtgaaggtatctgcagttttaaaggagagaagaaaaggggaatgaaaggtaccaatactgtgtctatcaaattctagattcatatatccaactgcctccttgctatttttatttgaataatctcatatgtgtctcacacctaacacatccgaaactcatcttccctgaaagacctgctttactggcaatccttcctagctcagctaatggtaactccgtccttctggttcacaggcctcaaattttggagtcatctttgactcctgtttttgttttcataccttatagctcagccgtcaggaaatcatattggctctgctttccagccataacctcacagcggaccactcttcatgctctccactgctaccacctgggttcactccgatcttctctcatctggatgatcacaggatcctctttgttgaattgtgtgaggcatttggcctatattatcgcatttattcacatggagctgagtaaggtcttgttagttcccattttccagaggggcaacagggactcaatgaggttagacatcttgcctgaggtcactctaccagtgagtcagggagccagggtcccctacagacatccacctgtccgtaaagcaaatgttcctctccaggaggtgctggttgtaagttcat

SEQ ID NO: 66670 - DNA, 5278 bp, Homo sapiens
tacacaaattctttttccaagaacatttttcttccctggctcttggaatcatcactttctggagtgcttcagccagcaatggagttgaaatatgtaaatatgttcctcagcgttgtaggtggggctggctccatggtgaatgacaaatagttcctccgagaagagtgtgtgtcttcagcatttgctgaggctgtggatttccccctcccacctttctccttccctttggttcagaggccttaaactggcctgggagatcttacaaagcaaacagttgagactctaccccacagcaagcttatctccacctgctgtatggcattttactaggaaaaatcaaccccacggagtctcccttcacagttccagggcccaatcaatcaatcaatcaacatgcctacatgctattttgaaagtggaaattgttaggcatcttgtcccctctttgcatggttcaatcaatcagagggtgcttttgccgttaccccttctcaagtgtgggatttctgtgaccagaaaagatgtgttccctgtagttagatagctagtcatctgacaaagaattcagtggaaccagtgggggaagtccagtcctcccatttccaaggtgcccccatgctcagcaggagacatgaggagttcctttagatcaggtagagaggtcacctcaggattgtttcacggtgtggtcaccacagagggagcccgctctgttggttgctgactctgacttcagacaacggtttagatgctgctttgatacttatgccactctagtttcactagggaaggtgaaggggtgtttctgttctttgtcatgttctgaacatcaaatcagagcttttctttcatttggaaaacagaaaggaaacaggccatatgggatctccagagcagtggtcagcaccccggttccctttccctgtgtgttctgcactggctttacacaatggcatcactgtagcctcacccaatagtgcaaaagggtatcagaggcaattggttaatcattaaaatccttaagaacattaggttttaagaatgtttttctttgaaagtcgatttttctcgctgtgggatgagtgttgatttctgaaaggctggtcttgcaccctttgaaagtcaaacaaaagggttgcagttagtacatttatggcctggggtaaaccttgccaattcctgatgccagttttcctcactataaaattggtttgggagaagagagtggtttccatgtcttgttaagttagtgcaatctcaaactctaatgtgcacacccctagttctgggatcttgttaagatgcagattctacttcatttggtctggggaggggcccaagaatctgcatttttcgccagctcccaggtgctgccatgctcctggtccattgtccacacatggagtagcaagatttcaagctatctactgctctgactttatttcagaaagtcataatcatgacccctggatgtcaagaggagttgcttatatttgtagaatgacactataaagggatgtgcccattctttcattttagatttggggaataatctttatttccacaaacagtggaaataaagtgcagaggggcagcatcagtcctctcatcctgtgatcctataggagatggaaaatgaggcaagaacaaaacgaacacatactcaatgctttctgtgtgtcagagaaactgaagctcagtaaggctgagcccagggtcacaccactagaactagcatttgatggtaggcctctctggctcctaaatccttgtttctcctagaatggcaactttgtaactttcgagaatatgccatgtaattcaaactgataatttagcaaagtgtttccctttagaggtcctttttctgggcctactttgaaagtggatcgagacatgtaaaaatttgcatcattatcatgcaagcaattaaagtgcttaagagcttaaaagcaatttgttcaagttggttaaatatccaccctccccaaccttgtttgtattattaatttactcatcaaactgtgacatcaaaactattgtgaaggtaaatttcagtatcttctgttcggtaaaaaacttttaaatgtgaagggcttgtattgatgaggtccacagtgaaaggatccagttcagggtgagtcagagaaaccagctttttactaaataaacccagctctgctttgacctcaggatgagaactgatcatttaaacgttttattaatgtgcaattattctgagaaccagtcagcaatgcagctctttgcaaacattaattagctgaccctcacatcatcccacatgacagataaatagcattcacgttgcattggagaaaacaaatggacacacagagatgagggaggaagaaggcagctcttgccttgaaagaaatgtggtagaagtaggtggaattagaagaccatgtaagttttttacttcataaatatttattgagcaatgcactagataatctagagctattctatgcaatatagtagtcactagtcacattttaaactaaatttaattaaaatgaaacaaaactaatcatttatttccttggttgcactagccagatttcaagtgctcaacagccacatgtggttagtggctgccatactcgacagtgcagttatagaacatttctatcattgtaagacattcgattaaggttgggattaaaaaaaaatgcaaggatccttgccattgtgaactccaatgtaaaatttcctaaaacaatagctgacacatggcaactactgagtaattcaagttgtggttaagttctttgggctaatggttagggacccagcttctggagctagaggactgggttcatttcctgggtatgccacgtactgaatgtatgactacaggtagatgactatttaaatgatgtatgactacaggcagactatttgaatgctctatgctgattcatgctgctatttttcacttgtcttactagctgagattatttttaaggcagtgttggatcctggagagggtgctgggagacaggtactctcctttgctgctggttgaaatgcaaattaatatacccttttaggtaagcaatttggcagtaactgtcagtagacttcggaacacttattccgtttagtccagtattctgattctaggaatctagccaaagaaaataatcagagatgggcagagaaaatttaagaataaaaatgttcattgcagtgttatttataaaagagaggaaaaaggtaaacaattgggtggaataagtaaaatgtggccaagcctagcagcggaatattattcaaagattacgtattgttttgaaaatgtgttttgtgacaagggaaaatgccatgataaaaattatgtttaaaaaatactaaacactatactgctaaaccccaaaagtatttttaaaagtagatatttgttgaagcaggactagagaaataaagtactgagtagtagcttatgaattaatagaatttttgatggtttggggaagattgtttcgacttttttctttattaagttttgtgttttatttatttatttaatttattaattgaactaacctaagaaaattggcaacggtgcgtccctgtgctctttctgctatagaatgcctcagagactcctagctgctcctaatctgttttttctagcacgtttggaacttctggcttatctattctagagtttgtctgccttcaaggcctagatgttctttctaatgttaaaactgaattctctttatggccatttaagtacatttctacatgtagtaggtgattctgactgagcagcatggggtattgcagaagacatcaacttcaaagatggaaagaactagattcagaccctgaaccatcatcacctccttgccatgggaccttgggcgacccttctgttcctcaatgtcctcatctataaagagggaagcaatagaatctaccccatatctcatggctgtgtggattgtgctcacttcagtgggacatctggcacatatgggtaaataaaaatgcaaatgtcttccatgcctggggtgcagcaccctttagaatgtacactccttttgtgcttgtgccactctcttgagattgtaggatcatcactctccagaagagggagagtaggcatcaggtggttactcaacatgacccctgccataagggcttgtgaatggcaggctcaggacctggacagatgtctggctgactctgagtcttatgctctctctggtacaggtttggaagttctgttcccatctgggccattgtattttgcttattggtttccctgggctgcagttcattgtggtgccattaacccctcaacatttcccagccttgctacttgttcctctcaaggaataaataaagcagacattccttttttttttcttttttctttttttttttttcgcaggttgaatgattgaaacaaacatgcctaactaaaaaagtagcccaacgctgctaagtgacagcagccaagccacattccaggaagaatgtaaactgctcactagtggttcagctcactttttgccaccttgaaacaaggtctcctcccaaatttcacctcttggtggcttgaaagaggcactaaatttgtcatcagctacaactcccagttctcacactttctatctgtgggaccttggtcaaattacttaatgtctgtgtgccatagttttcttttccataacattgggataataataagtctttggcagggttgttggtaggattatcatgcagtaatctttgtgacagtgttgtgagtccttgccatccttgaatcagcaccattatttccaaagctttagaagtaatttattgaggtaccactaagtcactgcttcatttttctctgctactgatggttctcccatatattgcagttaagtccatataagactaaggccatataagacagtgaaaaaatgccaacaggttttgggttgaattctctgctttgctacctactagctgtatgcattcaagcaagttccttggattgtctatgcttccatcatttttttttttcagttagaaaatagaaaatagaagtgtctacctccaagggttgttgtgggattcacgaagtagcttgggtagtgcctgataatcactgtctatgtgaatggtagctcctggcattgctcttttccccactatctccccacctctcagctgctggtccgctggctcctgcttctggaccctgtcagcacagtccggtggcgagtgcaggtgtttattggggaggaggcgg

SEQ ID NO: 66671 - DNA, 5809 bp, Homo sapiens
ggggaaggagacagaggaaccgagactggggtgagggagcggccgcgcgtggcccccggagaggcgcccatcacctgcgtggcgcccccccgcgccggagtgcggccctgctcccagcgccagtgcgccgcgcggctcgccggcctcgtaggattggctaccgcctcccattcatgtaacctgcgtgtgcgtgtgcgtgtgtgtgtgtgtctctctctcgctcgccctctctttctgtgtgtaagagagcgagggtgggggacggaggcaggcaggcgagcaggcagggaggggaagaagagaagggaagctattaaacacacacacacacacacacactcacacacgcgcgcgcacacacccgccccaaccccccagaagcctcgggattgcagctgtttcatgtggggcagcagtgctggcagggacgccggccgggagcggccgggagcgggagccggtcgtgcgcgcgcggctggaggctcgctggggctccgctccccgcgggagctattgttggtctcgctggagctgagcgcagagcccggacctgctccttcctgggcgccccgctacggctcgcggagcagaggagccgcgccgccgagagagagaggagccaccggcgcggcgccttgcctccctgccgccgtcctcgccgcttccccggcggtagcagcctgcagccacggtaaggcggcgtgatccgctctacggaaaagcgccttggggaccgcggcgacgcctcgccagctccatcgccctctgcactgctggcccgggcagggttcgggtagctcacgcggctgccgagggctccgggagatgtttgcttgctcccctggcccaggaggagggaggctagggcgcgggtggccgaagaggcaagctgttctggagcctggagccgccgcagcccccggagcccgccgcggactggagcctgggagcaagggttgggggagggcagggaggtgggaagcgggtgggagggaggcggcgcgccccaggttcgtctgcctctcccggatcccgttccccgccccggcccggtcgcctgcagcccctctgcagactagctcgccccaggcccccgtcgggcgctggaggagcccgcgaggcggcgccgggcttcagcggctgcagcctgccctgcggggcaagtgccggctgcagcagccccgcacgggcggtggttggagctcagatcctggagatgcgaccccagctcctcgccctctgcaacccgcggggcgcccgcctctcctcaccgggcgcccggccgcggtattgatgttcgtctaggagccaactgaggctgcagccgccagatggacgcttggagggctcccgggtgtgagtgtgactgtatgactactctcacccccagcttcgggaaatgtgctctgggttgaaatgtgatcaccgagctcctcagtcattttaattgccatttttaaatgcggtcgttacattggaggagcagactggaaggtagtggggcggcgtgtgtgtgtgtgtgtgtgtgtgtgtgtggacacacacacgcaaccgaggaatacacaaccaactacttgggtgaagggcggggggttcacctagtgagtccttcttggcgggggggtcgggcgagttagctgcccgctgcccgccccttctctgcctgcccccgcctaggcgaggttggaaagtactggaaattcagctgcgtggtccttaactttggaaattggctccgctttcagggcaaaatgttaaggcgatttatgcacccgcgtccatgtggatgagtgtattactgctcagttgggtgcagagccctcaacagtaccgcgccaagcccccacccgatctctaactccctcccaccccctaaccgtggagagagggtttatagaaatgcagttatctgtaaaccatcgacgcagtgaaaggggcgcagggaggcagccagagttttgcctgaacctgcatactggcttggtgtttgtagcacacgagatcaccccgctgctttgtagaaggcggtggtggggcaagctcgggattccaatcgccggggtggggggtggggggaagagggtgcccatgtactgagctctgaggccgagtaaggagagagatctgctgagcggcatcgcgggcaattacataagctgcctcggtgattacccggaactgtgatgcgagctcccggttctcgaaagacaagcctgaaagtttgcctgcttggggagtgtaagtaccggggcgcccccaccccggcctgggtagctaggatacgcctcgcaccacggcgcccacttgtgcgatgggcgtcgggtgctgatgctgctgtccccaaagaaccggttaccgaggcagggactaagtgggggcatccggaattgatcgcagaggaggagtcagtcagaactgaggtttcattgggtcttcagagctccaagtcttccctcggaggtgttggaaggccttccagggaacgccgttttcagaaactgacttggtgtcctggggagccccaaagcccctcttttccgcccttcctgggcgcccctccttgtctttcaagccctgtgcccttcacgtgtttagaaacctgcccgcggtgcctggtcccccttggagatgcccaggcagcccagccatccaggcccacgctggcgaggggttagagggagtagaacgctggctctgccgggctgccacccttacctacacctattcctggtttcctgcgctagcccggcgctgatggggacgggatggggctggggtcgggtatggcttccgttccttcgcctctcgcctctgcagacagcagtttgcttctgttgcgtttattctccccgtttcgccgcttccctccagcgccgcagcctgtgtatcacgttgatgggctttgatagagaaaccacagtaagagtatgcttttaaatcttgattttcgtctgtagggggataagccaccccagccctgacacagccgtggggaacgctgaagtctgggacacattggccctgaactcccttccccccagcccgcagtcaggagatggtgatgtgcatgggtggggagtgttttgtttttgccacattccagcgtcctgaaacctctcgtcccctcccactgaaatccccgatctgtctgaatctgttccttgctgtaaaataaatcctccctcccgcagacctgtggggcccttcggatttcctgccgctgccatgatccttaacaatgcgattgaaaagccagtgctcggctggaaaaaaatccccaggtgccagccggccgcgccttgaccttgctgaaggagcctttaacccggctgccagaggggctctggtccagccgtgggaatccaggaagaaggagggcgccccggaggcggctgggttagctccccgggcagggcgggaatcaggtcgcggcggggaccgcagagggggaggggacgggactccgcggcaacctgtttcccggcgagccgggcccgcgcatcccagctccctcgccccagcccctcgtggcccgcctcccccgccggcctccagttgtcttcgtggtacaggagtcggccgcgactccctcgcgctctccgccggagtccgcgggacgccgccaactttgggctcctcggtggccggagcagcggtgcgaaccagcggggcggccgggtgggcggggcctgggcgggaaactggagccgagaagaccgcgttccaggccaagttccagccgcaagcgccgcgcggcacagtgcagggtcccggccgcgcctttctcccgtccccggcccggccgcgttcctgcggactcacagcgcgctccgggcgctctgcagttgggctttcagcgggggagcccttctcgtcaaagttacgaggggtgttttcactggtggtgacagtgggaactagttttctgcgcgcctgtgtgtgtgtgtgtgcatgtgttggggagcagagagatttgcagcgaagtcacacatagcacaaaaaacaggtttcccctttccaggtgttataagggaatgctgaggaggaatccgttttctccggtgagggtgttgacgggaagcccttccacttagtggaactggacctgttggagctgattgcctggagtgaacgggtgtctcctttagcggcacctgtgtgccgtaggtccttggaaatgtttggggaactgaaagtcctcaagatattcagccaggacttagggcatagatgtttgtgtgcttttagggggctaattcggggaagcttttatttccagcatgtgtcttgaactgaggggagggcagggtgcggaaggcttgtggaattgccatcttctgtggtgggggaagggatcagggacggagagctttggttttctagaaagagttcttgggttcttcctctgctctcatcttgttttcatcaaggcctctgtttgggggtggaggtagagtggtgcggtaagcggatcagccaccctaatagaccggccttgaccagtgcggatgccaacgggcagaactagtgcttggtctgaacaagaaccatcaaaggatagttctatagtgagtggagtgacctggaatatgaggtagaaggctaggtgttagagtaatgggttcccacggactctcttccaatagaatctgattctatttggtatagtctcctcaatcttttgtggttttgtgggagtaaggtgataggatgtgactttaatctcttaactattgggttggaatcatggctctgtggccttaggcaaattgtctttggagcttcagtcctctcccctgtaaaatggcacaatattacttagtttgcaacactgtcagggtttttttttatgatccagtctataaactttattcagatttttccaattgtcccaataacgtccgttatagcaatagaaaatcctggcttatgagttcattcagcttttcatgtctctttaaactcttttaacctagaacatttcctcatctttttaaatctttcatattattgaacactgtcagttttaacatcgataaggcctctggcatactgtggtcccttcacagatgcttgttcctttctacctccttatccccttccaggaagcatcctgcatttgttgggtggagattgggcagagaaatcaacagccccgaaagaaccaccaaccttgcatccagcctatttaaaaccagcttcaaatgcgtgaaatgaaaatttcttttcttttcttaggaaagtcatttccagttttgttagaatttgtgcttcattgagtccctttttctgacagagttgcatcctcatgcagattgacatgttacataacccgatatttccaaatcaaaagttacaaataagggaaaagaaggtgattaggaattaaagattgttgggcaacacaagcaaaagactcaatttaagatgccagctcacactctaattgtgctagaggttgaaggaaaatgagacttgataagcaccagtggtgcaagtctccgcccggggttctcagcccctgtcctggtctaacaaacagctacacagccccagcccaaaccttttgtagttcctgtcccagtaacttctcccacatccattaatctaaaaagttaaacaaaagaagaataggatttaaatcacctccttgcagatttgattccaagagcctagcagggtaaatcaatgtcaattctagatctaaggggccgatttctacctgccttcttacatggtctatcagcttggcttttattgtaactgaaagctgaatcactccatctttgctttgcactggcagatgggc

SEQ ID NO: 66672 - DNA, 1036 bp, Homo sapiens
tggatgttactccacaccccccaccccaacacttttctagggacggtctctttcaagttgctactgcagcacaatcagagtaattaagagctgagatcttgagttccttcttcaggcatgcaagatgcccaaagaaaggccctccttcctcggacaacttccccaaaaccatggtaacagctactgagtcgtgataacaatcacttaaaaaatagcagtgattgcggtccaagagatttctgtccctcgaatgtttggatcgtgatggcaagcacatttccaagagaagggcatttttatgtgatgagagcggtagtttgactgagtggcaacttggaagggctttggggaagagactggaggaattcccactccagccctgctgcctgctggctaaaggacttagtgcgagccatttccccttacccggcttcagttttctcatctataaaatggatgataccgacttcaccagttttggtgaggattaaaagagagaacaatggaaagaaagcactgggtgtatatgagatgcttaatttatgttagtttccttctttaagacaacttccttcatgatcttctgctacagtgtgtctctctgatctaaagtagtcaatgaaggaggaaatgtgacaatgctaatttcacataaatgtgaaaggaggggtaggctattttgaaaactcttctgtgtggtgaggagactgtctagccagttgccatatgctgattataaaggcatcacagattataaacgtggggtgctggaatgccccttcaacatctcataactagggcatctcagaaaggcagggatgggttggggtgggtgggaagtttccacacaatctgtccaatctatttttaaaatctttatgataagtgtacagtgaccagtgacaaagcctctgagattaactaaaatgtcaagtctctgcctttgaatagcatttatcaactttgtgtcctcactgcagacatcaaatgctgggcatcagctgtgattggcagttagatttagtccttcaacaaa

SEQ ID NO: 66673 - DNA, 1022 bp, Homo sapiens
atgctaacttctgatacaaaagcgttccagttaaccacaggcaaggctgcctggaaaacagtaagtaccaaaggtgctgaatgagaaggaaaaaaaaggaaacagtatggactcctagtttgagcaacagctgacactaacatagcacttacttctgttgtgtgctttgtttctgttgactcatttagtccccatagttctaggaggcaggcactatcattatcctcattttgtggatggggaaactgaagcacagagaagttaagcgggttacctaggttcaccaagctagttagcagtggagctaagattccaacccagacattctggctctgaaatctgcactcatagccactacactagagccacactttgaggactccatatgtacctggcattgtgataagcaccctatatgcattatttccttgatcctcacaacaaccccacacttattatcttcatcctttttgttagggaaacagaaatacagtgcacattgagctaagaggtgcctaagctgaggtttgaacccaggtctttctgtgatttgtgaatctccagcctgtcttgttctgaacagaataagggagtcctttaccaaggggcatcttgcagtgtgtaaaatatacactagaaaagcttccttagctatctggaaatagtcactgccaaattatatcatcctgtttcccgacgccaggactttgcttgtactgttcccttggcctggagtgccatcttcctgctcagtcctccgaacaccaaggaagaactaaaataaggtcccatctctttagttttcccagactttcccctttcaagcagctgttccctatctgtgcttgcatggcactctatgaaaaaattatgcaccaatggtctgctacagtatagattctttcatttattcattctctccctcattcattcgttcatgcatttacttaacaagtatttattgagcatctcctaagtaccagcattgttttaggtcctagggatacagcagtgaagaaaac

SEQ ID NO: 66674 - DNA, 1051 bp, Homo sapiens
acctcagaaatacccagcctcaaaagcatattcaagcagttcttcatgactcccgtaaatcaagctctcatcattgagccatgggagcaaatgaatattctcttttaaagagtgaacaagcaaatgcttggaataaaaagaaagaattacattgaatcttttaaaagactcagttttccaacctgggctggctaagcaggtaagcctgacccagagtcctgggccaatgtttccatcttctgtgaaatttgttggccactgagatgggatattttggtagctgtgccttttgttttaccatagaggacttctgggaagagtaaatagcataacatcccccaaacatctagcacaatgcctgcccatacattatatgccagttcccttgccctttctgttcttcttctagcttgttctgaccttaatttattgatttattaattagctcttcctgtgggtacctccactctagacagtggacactttaaatgtggtgataatgtcttattcatccctgcatccctagtctttctacaatgtctggtacacatgggacactaaacaaatgttagttaatgaaagaatgaatgatctcatccacagtctgcaaagtgagtgtgggaccttttatgatctcctgttacacagtggaagaaatggaagctcagacagttcaggtgacttacttgtctggggatccaactgatgacccacaatctgtgcaaaccctcagttaaggctggcattcaaagccttcgcaatggtctgaatgttagtgtcccccccaacattcatatgttgaaatcctaccttctagggtgatagtattaagaggtctggcctttggtaggtaattagatcatgaggatggagcccacacaaataagattagtgcccttataaaagaggcctctgaaagctgccttgccttgtctatcatatgaggacacagtaagaaggtaccatttatgacccagtaaaccagctctcaatagacaacaatgtttctggtgcctccatcttggacttttcagcctccagagctgtgaga

SEQ ID NO: 66675 - DNA, 1088 bp, Homo sapiens
gaaggaaggaaggaaggaagggtgggaaggagggagggagggaagaaaggaaggaagggagggaagagggagggaggaaaggagggaggcaggaagggagaaagagaggaaagaaacaaaggaaaggagggagggagggaaggaaggaaggaagaaagagaaaggaatttttccttcccttttgaggggcatgtgcatacatttttatatctctaccaaactttacagatttataattaatgacaaagtacgcagaagttaaaaaaaaccactgtgtgatggaaaaaaatgacaaaaccaccactttcatcatgcctctgattcttcaagggctgccatgatggctcttttgccctttgtgtggcttcatgggagggaacagggcatgctgctcttttgttttattgctattccagtggtgtgcaggtacgcagaggtgcagggacagtggagtgcttttagttttacatttacactgaataaagcacattcatggcatccccatctcctttgaggaggagctcgagtctggggagggggggagctctgacctattagtattgagggagtatctactatgtgatgagtgccaaggccaaccctttatatcaactgcagtggggtcggtgtctgctcatgagcatccctggagtaattggcttcatggaatcttgctttggctggcacagtttcctctcacagtctggggaacctctgaactgtggagttgattgtcatgacttgcccagctccccggccagacacctcactcaatatcgcaatagcacagatgcattggaaaacacggcatcttgatcttgttgtttgggtcataacactttgccctcactgttttgatcacacttggatcttttctccatcagcagtgggggcaattaatctgtggtatgcagagcggttggaattatggattagaaatacaatgtggccaacctggacataagtatgatcctgaaatgtctgccaggtaggtagacagtaatgagtaatattgttaattcattagttatgaattaacaacaaaaaagcttagtttcgttatctagttcacaatgaatattactggt

SEQ ID NO: 66676 - DNA, 1081 bp, Homo sapiens
aggttcaaatcccagctctgcttattaaaagctgaatggcctttggtgagttactataactctgtgagccttggatttctcacctaaaaaatgaggataacagggcctaccatgtagggtttttaggatgattaagtaagataatgtatataagcgcctggtctagtaccaactgagttgtacgtatgtgtcaactgtctaacaaatggccaatgagcaatttgcaacccacctgaccccagggttggatccccttgtgatttgttgttaagcatgttctagtgcttttcaatcttcaacgtgcctacaaagcagctggagtccttgttaaaatgcaggtccagatccagtaggtctggggtggggcttgagagtcggcatttctttttttttttttttttttttttttttttttttttgaaacacaaacgctttatttaaaggagcatctcagttacgtgtggcggacaaaaaaaaggagcagattgtgacagaccattcccatcggccaagtggtcgaacccgacatccaagacccagcgagcagccaagctcagcgcaacctccgggcttctcgctctgactccaaaagggtgagcacgtcgccctcgcgcacggggccttttacattgcggatgatggatcggctcgtgtcgtccatgaattccacgcgcacctgcgtgcactgtccctgagaaccggtcctgcccaggaccttggtgaccctggccagcttgataggctgcacacggctggtgtccatgatggcggcgcggcggcggtctggcggagcgagattcagcatttctaacaagctcccaggtgctgctgccgccaccactcaggggacatactctgagtagtgacactctttaagtgtatctagaatgtctaacccagctggccaagaggccccaaccacctgttttctactgtttttgcttaattcagaagtttgcaatcactagttgtttaactctgtctgaatcaattctaaaaatacagattcctgaatccacctgaggagattctatttctgtaggtgaggggtgtgacttagaatctacattttaaaaaggca

SEQ ID NO: 66677 - DNA, 1112 bp, Homo sapiens
atgtagattctaagtcacacccctcacctacagaaatagaatctcctcaggtggattcaggaatctgtatttttagaattgattcagacagagttaaacaactagtgattgcaaacttctgaattaagcaaaaacagtagaaaacaggtggttggggcctcttggccagctgggttagacattctagatacacttaaagagtgtcactactcagagtatgtcccctgagtggtggcggcagcagcacctgggagcttgttagaaatgctgaatctcgctccgccagaccgccgccgcgccgccatcatggacaccagccgtgtgcagcctatcaagctggccagggtcaccaaggtcctgggcaggaccggttctcagggacagtgcacgcaggtgcgcgtggaattcatggacgacacgagccgatccatcatccgcaatgtaaaaggccccgtgcgcgagggcgacgtgctcacccttttggagtcagagcgagaagcccggaggttgcgctgagcttggctgctcgctgggtcttggatgtcgggttcgaccacttggccgatgggaatggtctgtcacaatctgctccttttttttgtccgccacacgtaactgagatgctcctttaaataaagcgtttgtgtttcaaaaaaaaaaaaaaaaaaaaaaaaaaaaaaaaaaagaaatgccgactctcaagccccaccccagacctactggatctggacctgcattttaacaaggactccagctgctttgtaggcacgttgaagattgaaaagcactagaacatgcttaacaacaaatcacaaggggatccaaccctggggtcaggtgggttgcaaattgctcattggccatttgttagacagttgacacatacgtacaactcagttggtactagaccaggcgcttatatacattatcttacttaatcatcctaaaaaccctacatggtaggccctgttatcctcattttttaggtgagaaatccaaggctcacagagttatagtaactcaccaaaggccattcagcttttaataagcagagctgggatttgaacctgaaattgtctctccaaagcacacgctcattccactgcagcata

SEQ ID NO: 66678 - DNA, 1033 bp, Homo sapiens
gagagagagagactaacagtttctactctgttgaaagatttcttcctccttgtttcttttcattttctctcaataatttttttttcttcaccctgccttgggaacattttctgcttttaaaaaactgtaccttgagcttgatcatttttatggcattttttttttttaagggcatatatagagttcattcttgggatggaaagctgaaatatttcctttactttccctggcatctgggagatacaggaaaatctttgtcttattttgggagccttcagttctcattgtaatgagttgtctatcaaagcatttggtaactattttgtttcagcatcacagaacaatcgatttgggtgggaatttaagggccaaaacaatactagtttttattctttgtcaactaagaaattaaataatgcagggtttatgggctcaatagaggatattcttacaatttattttacgattttagggtttttcccttgtgtagaatctttaaaatactttgccattttatttgatgttgattatttggatgagttacattattctgaagaaacaaactgcaaaaaatagaattttttggcaagcataattgtatcctattactgtatgcattttaggaatatagatagcagccttaattgaagtgagtataattataatatgctaaggtttaattttaacatgaaaaagaattggagtgtcagataagccttattatttaaagcatccctctaataaaactgcactttttactgacagggaaagagagacatggagacttgagtgctttctatttttatttttttcagctcccaagagcttagaaagaattgggtgctttttattttctgtttttgttactttaactgcctggagtcaatgggtagaactaaagtaacttaggagaaccttcataaggaatctgtagcgccaagaggttatccagaggagccagtgtctaagccagcatagtagagggtgaaggcccctgagatatccagttcaactgcatcattttgtaagggat

SEQ ID NO: 66679 - DNA, 1018 bp, Homo sapiens
cttgaagaggaggtaatatttgagttgagtgttgtaaaagatgagttggtgttcaaaggcattagtggagtgggagaggagttggaaaacagtgtttcagggtgagaaagggcaaaggggaaggagcctggtgtggtggggaatggttttcctaggctggagcaaaggcagcaaagaggaagctaagatggtagatggagaggactttgcataccatgcaaatgacttcggtttatttctatagcctaaggagtaattgaagaggtttattcatttatggaggggattaaacccaagagagaaattaaacactgcagttagtagcttaagaatattttatgatcagatcaaaatcatatttcttctttgtgttattaaactgtcattttatattcatattctgactctttccccatttatctttctaaaatgacaggtagtgtgccagtatttgaaaaatcccaatgtatctgattcactgctgctgcagaatattttccaagctctgaatgtatattacaattattcgggccaggtgaaatgcctgaatatttcagagacagcaactagcagtctgggaacactgggttggagctatcaggtaaatatgtataatttccccaagtggaacttacttttcactgacacagttgtgctgtaaaaaaaaatcagggtacacaagattttgtcacctaacctggatccagttttgggctctgttaccttatgctgtgatactatggacaagttttcttgttcattcatttgttcatttaataatcaccaaatagatattgagttcttacatgtgtcaggcactcctctaggtttcaaagatacaaagataaatggtacatgatcaaatctagtgtagtaaaaaagtaagtaagtagtatttcaatagatcttgataagtcctacaaaggaagcattttatagacatataaaagaaagggagtctaatttgtccttcatctgcacaatgagactaataataataaactttccttgcagagtt

SEQ ID NO: 66680 - DNA, 1035 bp, Homo sapiens
gaagcctttggagctttaggggtagaagaatgactctgattaataaatcttaagaaacactttggctattgtgttgagaatagactatgtaggggaaagggggtaaacagaaagaccaggttgttgcaaaatttcagattagagacgatggtggcttggattagtgtggtagtggtggaggctgagaagtgctcagattctggatatttttgaaggtgtagctgagaggtatagttgatgaattagatgtaggttgtgagataaagaattgaagatgactccaaggtttttggcctgagcagttagaaggtaggagttgtcatttaccaagaaggggaaagctgcagaaggagtaggtttggggaaggaaggagaagaggaacttggtttcagaaatggtattgtgtcaagaatttagaagaaaggtggggcaagtaatacaaatttgaagctgttagtatacagatggtatgtaaaaccatgagattggaagagagcaacaaaggagttagtgaagatgatcttttcttttaaagatgatcttctcaacactgcatatttagaagtcagggaaatggggaaccagttaaggagactgagaaggaacagttggaggaggaaaaccaggagggtgtgataccctgattacttaatgaaaaaagcatttccgtaagaaggtaaccagtagtgcctaaataaatgactgggaattggccacttgatttagcaatgtggaggttatggtgaccttgacagcaatttcctcagagggtgagtggaggcgaaagcctcattggagtggatgcaagagagaatgggagaagctgaattgagaccacgagtgtggtaatcttttggggaattttgctgtgaaggggagcagaaatatggtgtggtagatggagggggagagggttcccatttttaagatgggagaaataatcgaatgtatgctaagggaaatgagccgagagagtgagaaagtgacggaacaagaaagaaatagaattggtagtgggatatcttaggcaagag

SEQ ID NO: 66681 - DNA, 1042 bp, Homo sapiens
gtgattattttaatgtctgtctcttacactagactgtaagtctagtgactaggtagggaccttgtctgtttgtccatcaatcacactatccccacctagcatttagcagctgcacaactaataactgatgaataaataaatatgttcgcatattaaattgggatatggtttgctgtgatggagctgaaagaaatgtaatactatatcatcatccttcccaataaatgtgaaaagaaagataaactgcaaaagataccacatatgaaattgttcccaagtgtatcatcatatcttcctaattttagtatttacttattcctgatgtttcattcaattattcatcagacatgcatccactatactgcaagtcaagcagtagagagagacagagaaataaaacaaagtataaaaacacccccagagcctaggtaaataaataaataaatacaaaaataaactaggtggcaagtatgaaggaaatattatgaaaacaccaaaggaaattaattaacagtaactgtctgaaacgatcttattctattattgtccaacagacaataaatgggaagcctttttgccattttctggggttcaccaggtgaaatacaaatagtaaaaatactaatgatccctttcattacagttctcaaatttgctgtttttatagatttttagacttacttatttgatccactagagggcagtaaacccttaaataaagacaatgtaaccaaccttcctttaaaagtatagtaataagtgctggcacaattaatttagaaatgaacccaaaatttcctgcttatttaagtttttcatttattagtgagttgtctgcccaattagcaattttttttaggacagacagtatcttattttcacttagcccagtgtacgagtcatgttacaagtttattacatttcctaaagtttgaataacaattgtgtaaagaacatgatttgatgaatgcccatattgttgtggtacagtataaaattctgttttagagccctaaagaaaatagtctctgctcacaatatg

SEQ ID NO: 66682 - DNA, 1035 bp, Homo sapiens
ggtaacttcctgacgttgccatggcatttgtaaactgtcatggcgctggtggcagtgtagcagtgaggacaaccagaggtcactctcatcaccatcttagttttggtgggttttagcaggcttctttactgcaacctgttttatcagcgaggcctttataacctgtattttgtgccgacctcatatcttatcctatgacttagaatgccttaaccgtctgggaattcagcccagtatgtctcagcttcattttacccagcctctagacaagatggagttgcttttttattcaaacacatctgacagaatcataaataaagccaattaagatctttcacaaaattgttgtaattttgtcttttgacagttgcaatggcaaggaatttgaggttttagcacttacaatggcaattttctttgacccttctttctgcctttcctttgtatcctgtattacctaccctaccatgtcctttgagattgccatgtagcctaaggtgacaaccaaatctaggaatacataatcggctttggcagaaccttactaatgtatatataagagtcccaacaaggatagcaaaaaattaggattagcgttctcttttctgtgctcccttcagtaatacagattagtgatttatttaaattatttatctttcatctgtaaatttccatcttattaccttgagtggcaagattttatttttatagaaatgttattttgattgactatcagaattagtatcactttaacatctcccttccatagtcaccacatttctatgtttgtcatcatctttagagtactataccgaaaagattttattattttaaaaccagtgacctccactttgtcagtttgctgatgccagtgtcaaaaacagcatcacccatttcagaattgaaagtttttgccatgtgtttaaaaatgaaagtttcttaatacagctttatctcaaacagttacaaagacctttgttgtaaggcatgtattttatgttatatgttttatgttatgctaatccatttaaaaaa

SEQ ID NO: 66683 - DNA, 1123 bp, Homo sapiens
ggccacaatacttttaataatttagtgcatgaaacaaagtttgtgttaagtacttatgtgtggaattttgatttgtgccatcatggtggcactcaaaacatttcagattttgggttttggactttcagattcaagatgctcaaccggtagtttcctttgtattgatggcagacacaagttgtgtatcttcttgtaaaggtgtgaagaagctaaatgacatctttcctgaattactgggatagagcatttattaagaaacaggatacaagaattttcttaaactactctgttttaaatgtgattttcttcctattaatattttaaggagaaaaagaattaattttccaatacattgataccaccttcactttgaaagtgaaacaaatgacatctattagctttgcagtagaggttaagtggttttcctaagaaaagaatatgcactgcaatgaaagatttgccagtcatcccaatggctattttgttttgcagaccacggtgtgaacacatgaacagaagacgaaaatttcttctagcctcagtacttgctctccagaattcaagttttatatatccatcatgtcagaagtgcttctctaggataatcctggtctccaaaaggtaaaagtaaagtctgtaagtgtgagagaggaaatacaaatgcacactgtagatttcctatggctcaagggcaaggaccagatttaccaaacaaggacattagattctctcaggggttggttcttctgtaaatcccagaacagatttcactgctaatcctctattactagagaaaagttttaagttactgtcaagtcctttgctaaatacttgcctcattgaagaaaaataacttctcagagagtaagttccaatactgggtacaaaacttagcccatttctgggatatccctgggaataatataggagacttgtgtttattctttgtttatttttgcatgatcagtagaatagttgttaatataaataaataaattccttgagaccagggactatgttatagtaatttctatcctttagcaactagaaaggtgtttggcgtataattctttatcatggtgctcagatgcaagccaactatacctgagagcctaaggtcttc

SEQ ID NO: 66684 - DNA, 1025 bp, Homo sapiens
ctaggatggtctcaatctcctgacctggtgacccacccgcctcggcctcccaaagtgctgggattacaggtgtgaaccaccgcgcccggccttttcgtcctctctttcatgcacagttctcctttagttttccatcaatttggtatgtatttctatcaacttggggctgtttaatttaaatcagtaacgctaactattctgactagagaaatttaaaataagttgatctgaaagagtttaagaagaatttgagttgtgtaggagcatttatacacaaaatgttattttaaatttttactgttctggatttttcatcatatgaaaaacatttaatgaacatctccacacttttttccaccacttttctaggtctaattgtccaaaatgtggctctactggtgaatctggaaatgccaattacagatacaaactttccttaaaagttgcagaatcaaacaaattgtttgttattactgtatttggaagttgcttagatacattttttggtcttactgccactggtttgcacaggtaagaatacttaaaacatcctttttcctgactgcccttagaatttgaagatacaagtttataaggcaatatgcatttttgtagaaagataatcattcaaccccagattgtcaattcctttaaaagacaagcaagtaagaaagatgtttatttcctgaatacatattatgatgatattaaaacagtctccttttatttagggtaattaatctgtaattagaatattaagttataaatctctaatccaagttacagaaatagaggctaagaaagtaacatcatttcaaattgaagaattatccaaattgaggttagcattgaaacagttaggttcccctgaggcagaagaatctatttgagggaatatttgcatttcagaaattgaaattttattttttatctgtattgcaatttaatttgcatagtttgaccttttacgacattgtcctgagaatataagaataagcaattaaagcttttcttggccgggcgcg

SEQ ID NO: 66685 - DNA, 1107 bp, Homo sapiens
ttgcaccactgcactccagcctgggagacagagcgagactctgtctcaaaaaaaaaaaaaaaagcttttcttccccctcagtcttctgccctcctcccctaatcacatgcaagaaatctatgtccacatttttgtgcttgagacaataaagggaccacaaccaggcttatcagagaaaagggatgactttttcctgctttcaagtgaagagctagagatgccaccactattcccactgccacttttatttttccttataatcattgccgggcctgatggttaggcaggtaactactttactcccacttgatcaattggttttgttgatttttctgtgctatgagaaactagagagaacaaactgcctggctcttaaagtcactttttttcctctataaaaggttcatgctgcattttcaaattaattgtgtctctgactttatggcaagtaaaatttcaaagttcattgcttcacattttttactttttttccaatcaaggtacattcaggatcctaataaaattccagaaacactggacaatgatacaactcagaatctattaactaaagcagttgaaacttgctttgttggacaaagctttatttttggagtgacggtaattgagactagctttctttttaataatctgttaacatttccattgtaatgaattatgtgaattttctaaatagttgttaggagttctgtacatgtgaaggcctgtagaaacactttaaactatgtaaaaatagcctataggtggtctgttaaaacaccatgtgtgacaacttcctctttcgaaagtcaggggagcctacttcaaatgctttcagagcttaaaaatataaatttattatatatttagaaatgttagatatttgtttttggtatttagtatttattttgccctccggattttgttcaaattctatagtaaaacttccaccaattctctagctttttaattctgtcttctataaaagagaataatggaacactgaaggcaaagtatcttgagtattgataagaatactaaaactagattaagaaagatggtcttaaatataaaagtgactgtagaagaagttaaaaaaaaaagaagtta

SEQ ID NO: 66686 - DNA, 3070 bp, Homo sapiens
gcagcaaggatactttttcaaaattctggcagccatcacttgaattcacttgcattgtttcacaactaacagataatgatgatttttcagcttcagaacaaagtaaggcctttggtactcttcagcagaacagaaagtccatctccattgcagaggccactggttccagtagctgccatgatcccattcaggattcatggagccttgtttcatatatggataaaaagagtacagcagaaaagttgggtaaagaacttggcttacaagctaaggagctgagtgcagttcacagcagtcatcatgaaattggagttaatgactctaatttattctctttggaaatgcgagagccccttgagtcaagtaatacaaaatccttccacagtgcagtggaaattaaaaataggtcccagcatgagctaccatgttttcagcatcatggtatagataccccaactagccttcagaagagatctgcatgttgtccaccttcgttactcagacttgaagagacagccagcagttcccaggatggtgaccctcaaatttgggatgatctgccattctctgaaagcctgaacaagtttctggcagttcttgaaagtgagattgctgtaacccaggcagatgtcagtagtaggaaacatcatgtagataatgacattgataaatttcatgcagaccacagcaggttatctgtgactccccagagaactactggagccctgcatacaccacctatagctttaagatcatcacaagtaatagtcaaagcaaactgtagcaaagatgacttccttttcaactgtaaaggaaatctaagtcctagtgttgaaaaggagtcacaaccagataacaaagtagaggctgtctctgtaaatcataatggaagagatatgtcagaatattttttaccgaatccttacctgtcagctctgtcttcatcttcaaaagatttagaaacaatagttactcttaagaagactatcagaatctcaccacacagggagagtgaccattctagtctaaataacaaatatttgaatggatgtggagaaatatcagtttcagaaatgaatgaaaagttgacaactctgtgttataggaagtataatgatgtctctgatctttgcaaattagaaaataaacaatattgtaggtggtccaagaaccaagatgacagttttacaatttgcaggaaacttacatatcctttagaaactctttgcaatagtccaaatagaagtacaaatacattgaaagaaatgccttggggacatatcaataacaacgtaacacagagctattctattggttatgaaggtagctatgatgcctctgctgatctctttgatgatattgctaaagaaatggacattgcaactgagattaccaaaaaatcacaggatattttgttaaaatggggaacatctttggcagaaagtcacccttcagagtctgatttttcactgagatcactttctgaagacttcatccagccttcacaaaaattatccttgcaaagcctatctgactctaggcattcaagaacatgctctccaacacctcattttcaatcagattcagaatataattttgaaaatagtcaagactttgttccatgttcacagtcaactccaatttcagggttccaccaaacaagaattcatgggataaacagagctttcaaaaaacctgtattttattcagatcttgatggtaactatgaaaaaataaggattttccctgaaaatgacaaacagcaagccagcccaagctgtccaaaaaatataaaaacacctagccagaaaatcagaagccctattgtatctggtgtttcacaaccagacgttttcaatcactacccttttgctgagtgccatgaaactgatagtgatgaatgggtccctcctaccacacaaaaaatatttccttcagatatgcttggattccaaggcataggtctagggaaatgccttgctgcctatcatttccctgatcaacaagagttaccaagaaagaaactgaaacatattagacaaggaaccaataaaggtttaattaagaagaaattaaagaatatgcttgcagcagttgttacgaaaaagaaaactcataaatataactgtaaaagttcaggctggatttccaaatgtccagacattcaagtcttagcagcacctcagctgcaccctattcttggacctgattcttgttcagaagtcaaatgttgccttccattttcagaaaaaggcccaccttcagtgtgtgaaactcgaagtgcttggtcacctgaattgttttcataaaaagtcacctgaacccaattcctgaacttttaaatctgtttggaaatgtttgccttcaggggtacggaaagcattctttacattttgaacacttggagagaagcaaattgaaaacaggactctgctgggagctactgtgccttttaaaatataaagccattgttttccccagggttttatctagaatactatgattaggtagttgagcactttatcttatactgtttattgtactttaataatattgttaagattgtttttgaaagtattaatgtttgttaaaatcacatatacatccagaaataaagactttgcaaaccaaaacttagtcttttttaattgttcagctcagaccagaaaatgccagctatattataggccaatgagtgtgctgagtttgggatagaaagctacaagatcactgatcttaaaatatgttagtctgctggataagacagataaacaggtaacttcaatacagtgcagaagatgcaatgatatgggtttgtaatgggcatgacaaacatttacgttgctatgagagcatggaagaaaagcagctaactcatcagtgagctgagggtaagaagaaacgttttaagaaaaaaagctatttagaagttgtatgtgaaactgttgctattttatttaatacgtatacactgaatgcctactctacatgccaagggccgtgcttagtgctggaaactgaagataaaaatcaagctccttccctcaaactcatgagctattggaataat

SEQ ID NO: 66687 - DNA, 1052 bp, Homo sapiens
aaatattagttctttttcactttaattaagagcagactttgaatggtctgatgccaagtgtagatccttaagagacaaaacaaagaaactttcctggcttcaaagaaaagaactccatttctgaaagggtgccttaaaaggaattcatttgtctgatccatccttttgcctttgggcattactactgtcaccctccatttctttacaaacttcaggcaaggtggtctctctctctctcccaataggcaattccagggttgtaaactcattatcaggaagcttaatcttagaactgaaatacctcacagagcaatttaaacctctttcttcttgttcctattcttcatgggaagaaaactgggttgatccctatcttctttttaaggagccacatttgccatttattattgctcttttgcctatttaaaaaaaataacagtcagaaaaaataatgattattaaaatgatagtcattatttacttagtgaatgtcaggataggtatttattactcttagcttcttattggtatcagatgtagatcacggtcttactgttgattaactcttcagttatatatacatactttgattctttagttacataattgataacaaagtgtgcttctgaagaattattctggctgtatggctcttgtttcctccccttggtaaaaatggaggcatgaatctcggttttgtgatctgcttttaatttcatatatgacattatttgatgtacataattaccaacatccaaaagcgtttcttcccctttctacgtgtgcactaaattctaaaacaaaaattggaatacaaaatgcctaataaagaaaaaattcatgtacagaaaagcaaaagataatctactttgttaagataatttgtcactagctggttgaataatgcacagtttttgtttaaggttacacatttatgcctggattaaataacaatagtaaaacttgacaagtcttttgaaaaacagctgctaaacatattgctttctggaatgtaatcattagcaacaaatattctcttattctatacaatt

SEQ ID NO: 66688 - DNA, 1549 bp, Homo sapiens
agcctctgggagagatcttctagagtttgccattcctttttttccaaaattttttgttgttgttgttgttgttttaactgcaactggttacttttctcaaccatggtcctgacatgtttatactatgatacttttgagacttcgctaaagaattaaaagctgtgaaacaacatttgcttctcatccttcagacaaaatgtgttccatttaagcagcatggttaaacactaattttgggataagggagggatatgttttctttactttctttttggatttcatttctgtggcatgagcctatttgcgtttggaaggaaagatgccttcctttacattcttcacactggtaattttttcatactgaattaagaaattatcatcccttcaaaacacatattaatatagcaacattagagtaagggagatggcatttcatctcctctcctcagtcccttgatgttggaatgttattatcatttccaggagccatactttgaaattaaaaacaaattgaggcattaccagtctgatgaaggaattttaaatgcaagccatttaaagaatacttgaaggatttggggagacttaggttaggaaaaagaggggaatacaattagtgcattagaacaagatgctctgtggttcagaggggtggaatgaggcctactgaatgaggccgtagggacacagatttgggttccatgtcagggcgaccattctcaaaaagttggttcactatgggacagtctgcctcaggtaatagcctctgtcaagaggcaaagatgtggagaggatccaattggttggagattggagcaggtgacctattaacctaaattccatgttgtatgtagtactttgcctctcataacatgttcaattaaatatctgttaattcatagctaatgatttttttaatggggcctcgttcttctgccacaagtgcatcccacctttatctttcagggaagaggttggttgcacgttgttaggccaagagactggccctccattatgccctatgctggacttgctttgtcggtccattcattgatgtcctgttgaatcaaaaggtattgttttagtagaagttacatgaagtatattcatttatcacttgctaaacataggccttgctctgtttaataaataatgggtgtctctttcaagattttaggataggcctttttaacagagcagaatcttctgttaaagttctcacaaacagaccaactcccaagagagatgggctggtgggtcactgacataaagcagtccacaagatctattttagaaaagtatcaatgacatttccttagttggtttgattctcttgagaatacatgagtttaaaagaactgaggtcaaattgctttatgtggaaagcaataaaaacaagtatttttgacttgcaaattagaggtaactgtaagcaatttttgctattgaagcctatggcccaaattattccacctgcaaaataactttcacccttgcaaggctgatagacggctcttcattggtctttttttatggttttgttttgttt

SEQ ID NO: 66689 - DNA, 1226 bp, Homo sapiens
gtatgaattccagattaggccttatggatacttgtctactaatatatctgaagtttgaaaacaatccctgacaatattgtaggtgcaataaatattagtcaaataaacatttaagtgccaaggtggggtggtagtggttgggggagctttttttgattaaacagaaattccttcaagtagaacttgagaaaggacactaaatacagtcatcttaacccaggccagaacctaaatttattggtttgcctaacagtcttattgtcatggcaatatttgctaagatgagccttctttagataaaaatgaactctcatttagtggtggatgaaaaaagagaaattgctttatcatatagtttaatttggctcggtctactaagaccaccagggttgatgtattcctccatttttggtgtgatctttttcttcattcaataaagttattaaatatatggcaaaacttttttcagtttccagtgaaaatgcatgatactcatgtcatggagtcaggcttgggaaaatctatgaaataatagtttgctgataatgatattttcttatggctttgtatagactacatcctcaaaggattttgtgcttctttgcccatagaaggctttttctccctttgtgtgcttttattaaatctgttgaattatattaatattttttgaatttacagggccaattatcttttttgatggattacttagattaggccatgggttcttcctggcctttctttttctcggtcttttaatcatttcacgtttttatctctccctgagtaaagtggcaagaaaactaaaaatgaaagttaaatgggttgatttgacaatgtgtcaagttctgatttagagtttataaggaaggtagaaacgattggccaaaataagatatttggatgaggattatttaagccgtttagatttggccagagacgccagatttagcaaaggactgggttcttatcttctttcattcatgaatatatgccttgggaggacactggtgattcccacagaattaggccaatgatttgccacattaccctttaagctagcccataattccaccagatcccacaccaagtttcagttcatgactcatactgaataaacgtcagttgtaaatgatgtttgaattggtcttcctactaaagtgaaacatcttcttttaagccaagccacatgaatgaaatagcacaatcagaaaaaaatctttttt

SEQ ID NO: 66690 - DNA, 1030 bp, Homo sapiens
acctggctgaaaggagagaggtttcccagcagcgagctgaagaattctcagaagctcaggacatgtattatctggagacctcagccaaggaatctgataatgtggagaaactcttccttgacttagcatgccgactcatcagtgaagccagacagaacacacttgtgaacaatgtatcctcacccttacctggagaagggaaaagcatcagctatttgacttgttgtaatttcaactaaaggctgaggcacggagaagaaaaggaatcagcaactgccctgatgggccatgagatgctggggagatctggcgatgactgtggctcccgctctctgaccttctgactcctgtgggctcctgagcttacaaagcatggcaggccaagggcctcgaccacaggccagcattagcagaacatataatggtttcacccttttccagtctggagttggagcaaggagaaaattgcactaggcactccatgatctgcagagcatgttgcttttgtttttttaaaaagcaagtaaaagcgcattcctaaacagagtccggggggaaatgtactgtagggatccctcctgcacatcagtgggtgcatgtgggaactcttctttagggcttcggtggtaatcatctgggggccctggttttcttgtctaccagataaaccaaaactgggaaggccaagtacagtctctgtggtgcgtattgacgaccccatggagattttgaaaagtgttatttctcttgtccacaggcactttcaagaactttgggatgtaaaaatgaaatgaaacctttacccatgaccaacagtaacaatcattgttttaataatatatacaagctccataactccttttggtgctaatgattccgctatttcacagaccaaacgttttagtacattaatgtccttaaatgtgttatatagaaataaaaaaatgggggaagtccatgaatcagcactctttctcaaagtctcattactacctttttaaaggtggatttttgggaaaagagaatactt

SEQ ID NO: 66691 - DNA, 1050 bp, Homo sapiens
ataaatacttgttgaattcaactttaaggagctcagggttcattgttatgtgatggagtctaacgtatatgggaattgaagagaggtgaatttgggccagattatgaagagccttgttacaccatcctacctaaggagttgaactgcatcctcaaggctgataattagttggcacttttgggaaaacacttcgtagactggctgcagggagcctggttagaagtccacagtaggctgggtgggggagagctgactagtccctgagccatgttggtgcagtggggacaggggttaagcaggggtgtattcaagcaggccttggtgacagataggttatggtatgctgtgtgagtgtgtgtgcatgtgtgtgcgtccatccctgctgagggaaaatttgtaccctatcttctgcataagaatttgccatgatacaggaatttgccaggataatgcactggaaaacacttaggaaactaaaagtgctctatagatgtaaaaacattgatagtaacagtatgtaagaaattctgcccaatggggttgattcaaggatgcaataatggcctggtgtgtgtaaagctctagacaagtagtcattcttttgcttgacacaggacctgtcacaaacttgggagagttctttttttgtcttcatctattcaggttgctgagcatgtggacacttgcttccctctcactttttctcctgcttccagtgaggagggaatctgaacagctgaaggaggggtccagcctagtgtgacagtcttccaacagggagaagacatctctgttcctggtaggcctctgatctccggggcagaggaccatcaggggaaagacttgagcccagttctgagccgtggccctgacctctggctccctggccaggctgctttgtgtgttcagcccggtgggaggagactgaataagctgataagaaggttcttccggtccagccaagcaggcgcagggaagcttctgcagaggaaagattagacacggtccctgatttagagaatacaagggggaaggcaatggggcaaagcc

SEQ ID NO: 66692 - DNA, 1053 bp, Homo sapiens
gatctagcagttttatttttaagaagctctttggaccaagtgcggtggctcacacctgtaataccaacactttgggaagctgaggcaggaggatcacttgaggccaggagttcaagaccagcctgggcaatatagtgagaccatgtctccagaaaaatttaaaaattagctgagtgtggtggcatgtgcttgtagtcccagctacaagggaggctgaggtgggacaatcacctgagcctggcaggtccaggcttcactggccatgtgatcgtgctactggattccagcctgagcaacagagcaaggccctgttccctatctctcccaccccttcacccccacccctaataagaagaagctctttggatgagtttaatgcagttcaactggtaccagcatttaggaaacactggtctattgtcaggcatacgtacagccgtgattttcacttgtgatcaaaccaagaagtacttaattaagtgcctatgatgcattgagctatgttctaggaatgtggatgatctaatgaaatacataaaatatatgatctgtcttcaagaacatcttgttggagagataaaactgacattcacaaagtcattaggaggaagggaattaatatttatagagcacttcctataggccaggtactgtgacagatgctttacaaaaatatctcatttaaatctcacaacagcccttgaggtagtgacatgggatctttggggcgttgcttttctggctggaaacctgtggccggtggcgcctttgccctagttttgctcaggccttctgggcttgttccgcccactcggcctggcaggctgtgctcagctcatgctaccgggctggatcccatgcctccaagggagactggagtcaggcgtggagcagagagaggtgtgtgagtgagcatggagtctggcctctgcacagccagacatcccagctgctgctgccgggcgggcagctcaaggtgcttgcatgggcgctagctctctgtgaggctgcagctggaccaggtgcgccgcaagcagctttcccagctggcac

SEQ ID NO: 66693 - DNA, 1033 bp, Homo sapiens
acatggcgaaaccctgtctctactaaaaatacaaaaattagccaggcatggtggtgggcgcctgtaatcccagctactagggaggctgaggcaggagaattgcttgaaccctggaggcagaggttgcagtgagccgagatcacaccactgtagtccagcctgggtgacagaataagactttgtctcaaaaaaaaaattcgtttgtctttttattttttaaaattgtaattaaatttcaaagtttttatttatttattttttaaaaaaacacttagtatcacctcaagtattttctttgttattcccaaatataaaatcctctcccctaccattatcttggtccaggccaccattatctctcccctattcttaagtcttgcccactccctacactcacttctccacacagcaaccagaattatctctttaaagcgcaagtcagattacactatttccctgattaaaactcttctttgatctcccattgccctttggacaaaattcaaagtgttttccatggtcaacgaggccctgtgtcatctcaaccgttcttttttccctgttgctcacccagccttggtccctgttctcctttatgttccttggacacgccaagccttttctggtagctaacccttgcacttcttgtatctattgcctgcgctcttttcctagctttgcaaatgcctggcttattctcatctttcaggtctcagctcacatctcactttctcagagaggcctgatcccatcagtcctctgaggcctcatctcatcattctgtaattatctatctgcattgtcatctatcctcatgagaacagtagttctttggtaactggacctaccttatgttaacagttgtatcctctgtaggtgtcacagtagctggctcatagaaagtgctcaataactatctgaggaataaatgaatggactcataattgactgaaagggtgttgaagttgtattaaaaatgaatttgaggccaggcctggtggctcatgcctgtaatcccagcactttgggaggc

SEQ ID NO: 66694 - DNA, 1032 bp, Homo sapiens
ctctaggaaaaaaaatatatatatgggcacagttgtggatgcctgtagtttcagttgcttgggaggctgggtgacaaagggagacctcgtctctataaaaaaaaatgtttacagaataaatgaataaatgagtaatccacccttctttaaacagttgacacttccggtgatgagtcaatgggagttcagtgtctgtgttagaccatgtctaggtctgctgacggctagtcctttcatgagataggctaatgtgcagatttcggctaggaaagcctattgccctgcagttgtttttacagtgcccctgaacatttttgagaattaatgtatacagtaaaattctctttgaacatcaaagattccttgaagacctgatagcctgcttggtttctctgaatctgatgaagtttgtagagataactggaagattctctctgtatgtggtacctgccttttgcacagccattttaatttaaagctatagtttcaaactatattctgaagcatcctggggtttgtgggctaaaaaatcaaggaattctgtaagaaaaatgaggggtggatttggctttgagcccaatgatgcctaaaacaaattctttgctgcatttatttttcagttctgatgaacgagaacaaccaactcattaaatgtagagtacctggcaatattttcttctctttcttatataagttgaatgtttttctcatctgacaatggtaatacatgggattgctctggactttttcgaagttcaaagatctttgaacagacttgtagtgatatttctaaaaaaaaaatcttcctacctggattactgttttttatatagagaatgggctttgtttgccattcactctaagtggaatttttctatatggcataataaagctgaagtccttagattttagttcagaaagccatatcctttgaacctaggcctctgggtttgttcacataagtcaatatacagcgttaataattgctgcatatcccttgagggaaaatccaaattaaataaagaaggcttt

SEQ ID NO: 66695 - DNA, 1077 bp, Homo sapiens
tatacgtaacagtatgacaatgaagtgtgtggttggagtgtattgtacttgtaaatggagatgctctactgagggatggtggaaaagcactctcagcccttttcagaactcattgttagcaatcaaaaagaggaagactgaaagaaaaaaaaaatcctttgaatcagcaagaggtttatacatagcagtgatttatgggtgaacagaggaggaacattaaaagaataattgctggctgtttattttgggaaagtatgtgtggtcaagagtcgaggcagggagctttattttttcttttaccttgctctatcttctattattgttaataggatcatatactcaagactttccttggcttgttgccctgacataaatatttgaattccttgttttggtatcgtgtatttttaacaacaatagagggaaaaagaaataatgttgtgagctaaattattctatatgccttattgtggatggaatttattctcttgggtccatggctattaagatgatcagtttagatgatctgtgtttctgatagctctttctagatagctttataatttgcccaaggggtttgttcaggggatggctacatgtatttttttatttggtggaacaaggtgagttttaatcctggttatctgagctccaggcctttccaggtgccaccgtcatccaaaaggccaataagagtagattgttcctctcattgtggcgtccaccctgggggcatttattaggcagtcactggatacacattgacccaacttgcccccttggtagaggatttagttcttagggttgctgctgcagaattcatttatgcagttagcaaattgtagttgagttcctgttgtgcctttggtattgtttcagacttggtactgctctgcgtgaagagccggaatcacacaattcaaggaaacccagcagaattagaatgttaaaatgtcagggtttaaagggactttagagataatctaatccagaggcagcaagctgtttctattaaaaggtccagaaagtaaatatattaggctttgggggccacatatgatctctgatgcatattgt

SEQ ID NO: 66696 - DNA, 1033 bp, Homo sapiens
caaacagatacaccttatgtcttagtccatttgtgctactatagcaaaatatctgagactgagtaatttgtgaacaacagaaatttatttcttacagttctggaggctggaaaagtccaagatccaggcgccagcaggcttggtgtctgctgaaggatactctctgcttttctactcttgtgccctttggatggtgccttgttcctgcatcctccaaaggatgtgtggtcacatggtagaaggcacagaaggacaactcaccccttcaagccctttttgtaaggtgctaatcccttcataagcatggagcgctcatggcctaattacctcctaaagttcccacctctaaatacagatgcattggggattaaatttcaacatgaattttgaaaaggacacaaaccattcaaatcatagcactcctttactacttggtagaaagtgatcagtgagacaggaaggactgagaagtaataagtgttagaaatggcttccaagacagggtagatctggctgcgcagcagaagatggataaaatttgtgtgtcaatgaggaaggtgagaagggcaactcaggggaagggaacagtgagcaaagttatagacatgctttaaagtccagtccttgcaaggaacagatctccaagttcatggttctataattgtgggtgtcccagccatctttgctgtggtcagagacctgaaagcaaagtctaaaccaggttcatgaagttgtggtgtgctggacaggtactcattcatgattcattcagtaaacatttacatagtgccaggtgctatgctaggcactttatgtatggtggcagatttaataaccctaacaactttggagctattaatagctccaattaacagatgcagatgcagatgcagaaattgtgactcagagagaggaagtaacctgtccaaaatcacatgacgggtaggtggcaggagcaagacttttcctatagagcccatgctgtgtccactaagccacacgcttcttcttgcaggtgagtgccaggtgatgt

SEQ ID NO: 66697 - DNA, 1393 bp, Homo sapiens
tgcagacacacccccaaataatgctttactaggtttctaggtatttcttaatctaatcaagttgacacctaaaattaaccaccacagtacccttgccttttttgccttttatgatattgaaatttttgaagattccaagtttgttgtctgtgaattggatttgtctgattgttttctcattattagattcaagttaaacacttgtggtgagaattttttgcaatgttctatccctccccgtgcatcataggtgacacctaatgtcagtttgtaacatcactggtgacatgaggtttgatcatttggttgaggtggtattgccagatctctccattgaaagggcacccttttccctttgtaattaataaaattatctgtgaggtgatatcttgagattgtttgagtatcctgttcctcaataactttaattcaaaagttttaacatctatcgataatcctggcctcggtcaattggtattcatgaagggatgattttctaattctctttccttctgtatttatcatatgatagattagctttcagcccccaacccctctgccgccctgctttttttttttatgagacagagttttgcttttgttgcccaggttggatggagtgcagtggcgcaatctcggctcacggcaacctccgcctcccgggttcaagcaattctcctgcctcagcctccggagtagctgggattacaggtgtgtaccaccatgtccggctaatgtttgtaaagatggggtttcacaatgttggtcaggctggtctcgaattcctgacttcaagcgatctgcccgtctcggcctcccaaagtgctgggattacaggcatgagccactgtgtctggccccaaccaccccgcccccgcttttttgttaatatcacttggacccatgatttctttttctcacaatgtgttataatctattactaatcttcttgccttttttccccctcaaccttatgctttctgatattcaaattgtcccaaatgtagctattgtgagcctatcttatttatttggccccaaaagcaatctgataaagtaggcgagattttgcacttacaagtgagtaaatgaaggctcagaaactacaggtaactttcccagggtcgtatacctagttagcagaggtggccagatgaaaacccagttttgattaactcaagctggtcctgctacttggttcctgctactccacactgcatcctgttggaccatgaacagaatgtcacttgctgaaaccaatttaaaaagaaagcacaatccttgcatcattgttgctaatagcaaataattggaaaccaccttaaatgtgtatcagtagggaactggttaaataaatgggtatgtatacacaagggaaaactatgaaactgca

SEQ ID NO: 66698 - DNA, 1027 bp, Homo sapiens
aatgcttctaccaagttattcctcccgcttagttctcaaggctttcttttgggaagctgtgagcggtggggaggtgggggggattggggagaggcttgcaggcacagctaaggggaaaagctctgtgccatttgggtcactgcaaagaacaactccagcaaccttcccccgccagaggacgggtgcctgccaattccctagtcgcaactcctctcaacctttttgaggcggagagagggggctgggctgggaaggatgttggggagtgctcttggaaaatctgaggaaggcagaggtgggggactgcagtcctgtcacacacggcccgagagctgaggtttgagtgggaaggggtgatgcgtggggagaaatggagacagtgaattaatgtggtcgcactactttagaacatttgaatgtcgcttggacgagcactagttattaatttttaagatgaacgtgcttaagttttgtagggctttattttatgtgtgtatgtctatgtggtttgtctcgccttttctgctgatttgaggtgacagtgtcctttaatggtgcactccgtgccagtcagaaacatttcacgtgtctggcgaaggttctttcaggctgctggaagcagcgtttttgttaaatgttttccgttctccgactgctggattcaagattgtttggaagtggagccgacagatttgtgcttgtgtgttttaaattacattgcataggctctttgccactgacaatggtaccataatgagctgctgtttcctgaggcatagtcactactcacaaataacggtttgaagagatcgattagggaagaggggttcattttaacacattagagaaagggaaagttagaagcgctgttaaccttcatttgccattactgaaaggtgcccatggaagagtgattttggttgttttgttattgttgtttttttaaacgaactgacatttaacaggagagaaagcattctgacttacatgatgctcttgtaagagttatagggataattagggcaat

SEQ ID NO: 66699 - DNA, 2835 bp, Homo sapiens
tcgggagcggtgctttctgggaactgtagtcttcttacgtcctgaagggatacccaggcaatccccgaaactacaatgcccaaaatgctccaagtgggacgcgcccagagtgaaggagcaaaggggactcggccgccatgttaggagtactgggacgattccgcggagccgggcagaggttttaggggtgcgcaggagtcaagtggtggttcagtggggacggtgaggtggaggacgatctggtcggatagccgcgggcacgaacctgggaaccagagggtggaggccatgctggggactgatgtagggcgggaccgactggaagcggcatccagaggcccagtgagcctcggtctcagctcctgaaggggttgcatggggccctacgcttccttctccattttttagctaagagattgagagagtcggtttacttttgggcttggagtatcatttagatctgttaacagtacagttgagagagttggtgtcttttgttgaggtgcgaggacccgaggcggcgaccctcgcctttattcggagaagcccacttccacccacagagttggggtagtcctccgaaatgcatttttgttttgccgtttgttttccaaccccctttcactctccccaaagcttcagattcactgatttttcatacaggaatgattaacaaaggcgtccgaagaaatcgttgttggaaggtgaccaaggtggaaagagacgttgctttggccctgcaagtaagaagagagagggaatagcctgaaggagtaacactaaatttaaaatgacacttttttaccaaccagcgaaagcagatgttcaaaggggatattggccaggtgcggtcgctcacgcctttaatcccagcactttgggggcagacgcggggagatagcgtgattctaggagttcaaccccagcctgggcaacatgcggagaccccgtaccgtctctacaaaaacattaaacaaaaaaattagctgggcatggtggtgtacccctgtagttgcagctacactagaggctgaggtgggaggatcgcttgagcccgggatgttgaggctgcagtgagcctcgatcctaccactgtgctccagcctgggcgacagcaagcccgtgtctcagaaaaggcgggaggggtgggatattattgatgataggccttctgacgtctggcaatagattccagagtaacatcggtcatggataaattttttttttaactaagtgactgaaaccaaagttaattgtcttttgagtgattttgcacagtatctcaaaatgaactgtactttttttcttgtgtcactgaaacagtgctgtgtgttctttttcagagtctgtcacactaagatgagaaatgtcctttcttcctgaaggtgtctgatgtgtaaaaatatgatatactttgtgctgtttcctcccttcccttttgcatattattctgaaacaacattaactagttactttgcgtcattgaaggtatgcacttcccctctatgttaggagtgaataaaattaaaaatagatccttataacaaagaaaggcagatagaatgattaaaaatgaccaaaacatgttagaaacagtctctcaggtgtatgcagatggtaattacaaaaatactttttcaaaaaatgatcttctgtgtcatgtttctgggaacaagtcaagatgaatgagtttgatttttaagcagaagtagtatgtgttggtgtcatccatgaatacaacaatgaaaaaggctcaaagttgttgttattcagaaacttctctaagtaatggtggtaagtacaggaaaaggagcaatgtctaccattttctttctaaccttcgatttaactattgtaatgttgtaagcttaacagagacttacacttaggcttaatttcaagctcttcaatcatttttcccggttggtgattcaggtgtattctcatgtcttatgtaaacttatcatgagtgttgttgatttataatatatttctttatgtaagccatagccttgtcagtttgagttatatggaagacaaattgtagggaaaaagagcaacagattactcagaaaccttctgtgtgagctgggcatagtagtgcatgccagtaggcttagctacttgggaggctgaggcaggaggatcacttgatcccattagtttgaggctgcagtgagctatgattgtgtcactgtactccaatctggacaacagtgagactatgtctgtttttaaaaaagaaagaaagcttgtgtttgagaagtgatacctctagaatacagtgatttctataatttgtcatgtgtttgggtagtttgaagtttttctatccttgtatctaatggacatctgaccataaagatgaaaaaatcctgcactcattataaattttatttataaaattgatatttgaggagttggggaggccagcttctgaaaaaataacagtgtcccatagaaacaccacaacttaggaaaatattgttaaagtggaattaggaatatctagaggaggtaaagcttttcatctctcaaaaaagaattagggccaggcacagtggctgacacctgtaatcctagcactttgggaggccgagatgggcacatcacttggggccaggagttcaagaccagcctggccaacatggcgaaaccccatctccaagaaatagaaaagttagccaggtgtggtggcgtgcgcctgtaataccagctactagggtggctgaggcaggagaatcgcttgaactggggaggtggaggtggcagtgagcagagattgagccactgtactccagcctgggcaacagcaagaccctatctcaaaaaaat

SEQ ID NO: 66700 - DNA, 1639 bp, Homo sapiens
ttatttatttgagatggggtctagccatgtggagtgcagtggctattcacaagcatgatcatagcaaatgacagccacagactcctgggttcgagcaatcctgcctcagccactcaagtaactaggactacaggcgtatactggggcttctagccatttatatggtattaagtgacagcttctatagttacttggtacttgtccctgtaaaactgcacagtgtgtattctcttggctcaattattagcatattctgccatttccttgtgaatgttttgtattttatataggaaaacttaagtttttaaatatcctgaaataactgaagaattttgtttttgcctttaagtggtaatgtataaagtatactattgcagagatacttacagagtgctttcattgcaattaaaatactgcagctaactagcatgttccatatgtgtaatctaaatgacatactggtcatgtgctatttctatggaatactaacagtagtatggtacatttatgcagtctcaacagtttaaagtgttattttggtgataaactgtttacatttatttgtttttatatttggcagtctaaatgcaagagtctccatttcagctctttactctgcatatctttaatgttgggcattatgcctctttcttgagtttcagtcctatgactgttccattttcagtattcatgtttatgtgtctttctaaaattgttttgcttctgtttcttgctgctcttgagacaatttatgggcaaattttgttacttttcaactggccgtgtatttccctgtgaagagttgctggattgtctcattttccagataaactgaattaatgtagtagtgaggagaagccagatttcagaggtttgacaagtgaacaaatgggaatgagaaaagaagtaggtacttaaacttttaagaagtttggctctgaaaaaggcaagaaataatgggttagagagggcaggattgtaaggatttaagataggagaagaggcataagcatatttaaatttccctacttaagggccaaaatcatactgtacctcagtctgaactttttaaaggaattcaaggacacaaaattctgccctgccctgaaatccagtcaggaggaagggagaagagctctgaagtacttttgtaattttcttctacataataattgatttttgtttgattatttttctttcctatagctcctgtttgccaggtttttcatagctgcctatttaaccaaacttgtactcccaagaatagtgcatatttatgattcttaattccaaaaacacatggcaatgataatgtctctgcttcttttgagaaattaacttggttctgaaagatggtgtttgcttttcacacctgtatcattaatacttccttgccaaacctaactaggatcctcaccaccactgttagagaaaactgatgctcagttgaaccagaatgttaaatgtgaacaggatttgtctgtgttgttgcccagctatgtttatccatacacattacctggaggaagagaaatctgagataattgagttgattagattacttacatgaagatggtttaattgtatcaatacagaaaaatgcacaaggaaagaaactgacaccttaaggcaacaaagc

SEQ ID NO: 66701 - DNA, 1393 bp, Homo sapiens
ttaagcatgttcatcattctgagattaaataaaaattaaggaaatatatgaaaaatgcttaataagtacccaaaaggtaatatggtgtagcaacttagaatgtagacttcagagccagtcagctaggattaaaatgacacttcggccaatcactgttgactataagcaagttatttaactctgcctcagttttgtctgtgaagtagggataaaatcttcctcgctaggttgctataagaattaaatggatatattaagtactatcatgtgagatcactttatttgaggctaaaaaaattttttttaactaggattcactgaaaatacatctataaaaaagccactctttatcatgagaagtatgattttctgtaccttaggtgttataaagcaatatcccctcagttttaactttaccaaaatacctgtcttagtaaatgatactatatataccaaatattgcatatgtgtatataaacttcaactgtctacttctatcactgacagtttaaaaattgagataaagtaagtattatctgagtaatataaccattttctatttatttatttatttagaaacagtctcactctgtcacccaggctggagtgcaatggctcggtctcagctcactgcaacctccgcctcctggattcaggcagttcccccaccccaccctcccgagtagcagagacggggtttcactgtgttggccaggctggtctcgaactcctgaccttgtggtctgcccgcctcggccccccaaagtgctgggattacaggcgtgagccaccgcacccagccaatctaaccattttcaagatttgatctgcaaatacctgaagtaagtacaagcactgtggcccagttaaagagtgttagaactgtaagaagtccaaaggcatagctaagaattgctttagagtcagttgtgggttctgaattcttgctctgatagttagcaactatgtctactttggcaaatttaggttttgaagccttccatatctttaaaaggaggtaacatttaacagagcaccaaatacaaggttttctgtaatattagttccatagcatggtctgcaaacttccaacatcagaatctcctgggatatatgctaaatgcagattctggtttcccaaccagaatatactgcttaaaaatctgagggttagttctaggaatctgcatttttttctatacaatgtatgtattagggttccctggagggacagaactaataggagatacatatatatacacacatatatttattaagtttattgagaacttacacgatcacaaggtcccacagtaggctggctgcaagcttgaggaaaagagagagccagagtctgagtctgaaaactgaagaacttgggggtccagtgtct

SEQ ID NO: 66702 - DNA, 1048 bp, Homo sapiens
ctgggccgcaaggtggaaaaaacttgatctaaagtatttgatttttttagaaaagtttttgaatggccaggtgtggtggctcacacctgtaatcccagcactttgggaggccgaggcaggcggatcacgagatcaggagatcgagaccatcctggccaacatgctgaaactccatctctactaaaatacaaaaacttagccaggcatgctggcatgcgcttgtagtcccagctactcgggaggctgaggcaggggaatcacttgaacccaggaggcggaggttgcagtacagtgagccaagatcgcgccactgtactccagcctggtgacagagcaagactgtctcaaaaaaaaaaaaaaggaagcttttgaataagaagcaactctacagtactctattgtagacaaccaaagtattaatatttggggggcacaatttcaaccaactttaaattatttcattctggaagtatgtgttgagtaaatatgaagtataaggcccctagaggtacagatggctatggccgtctaaaccattttactcttaacttttagtgtcatggacctctttgtcaatctagtgaagtctatggaccgcttttttttaaaaaagcctttaaacatataaagtacagtacattgaattacaaaaggatccaagaatattgaaatagttaccaaaaaaatttgatatagaaatatatgtggtttattaatgaataagatctagcagtggccttactataatttcaacacagtagcgtggtgagcataaatatttcaacttatctgcaacaattgtaatgtgatatggaaataatcagtttaattgtgacagtcacatttactgctaactactgtgattgactggctatgtttacattttattagaagttattgaaagtagatgccaggcatggtggctcatgcctgtaatcctagcactttgggaggccaaagtgggcagatcatttgagcccacgagttcgagaccagcctggccaacatgatgaagccctgtctctactaaaaataaaaaaaaaaatta

SEQ ID NO: 66703 - DNA, 6295 bp, Homo sapiens
gtcggaagggaggcggggtatccagagcggcttcagcttcagctgcagcggacctcggaggggggccgcggcgcaatgtcagagcagacgccggccgaggccggtgctgcgggggcccgggaggacgcctgtcgggattatcagtcatcgctcgaagacctgaccttcaatagcaagccgcacatcaatatgctgaccattctagccgaggagaacctgcccttcgccaaggagatcgtctctctcatcgaggcccaaaccgccaaggtttttatacaccccgcagcctcctattacttctaatactccctgattttagtgtcagcctcatcccaggtctcgcttccatcccaagggggacagtgttccttctctccaacccccccacccccctccaactcaggctcggtctttggcccaggcttcgagcatgggcctctgggggggagggagtggggaggataaagggtggagtcccacttccgctttccaactccctttttaggccaccgcattgtatatcccgacacacacacgctttgaatagagccctttggggtgggggagacttaaaggcagtttgtggtttggggaagtaagagttaacataagccattttaattccctgggaagtgggagagtgggtctcccattttccccaagcaccctttttggtaattgtgttctgtgggttggaaggaggtgaagggggacctgggagcgagctgttggtgggtgggaatagggatttggccccgagtggagcagccgcctgttaggagcccaacatggcgcctgaaaagcacatgatgcgaaagggaagagaggagaatccattccctgccagccaggcagctgctcactcccgtcagccccattttggggtgggggcggctagataaaacttttattctcctattggagggtctaatttgtcccaaaataggggcaagtggggttgagggtggggtttgggtggggggaggagatcttatccaacctgtaggtggagaactggcccagagggtaacaagtacttgcagtttctctgaaaagttcagtccctcctcctcttccttttctctttttctcccttccctgatagcgaaggagtgtttttctttaccccttgacagaagtggtcctctgccaccttatatttccctgtagtcctcctcttctgtggattcatatgggagcgatatgtcatttaagtaaagttactgttcaacttagttacaatgagttttaatagcgtcccagtgctacattttatttttcaagcttgtactcacggtttagttttttctagttgttagtgattgcaattatcaggatgagcctccttttagcagagtgaacccctttttaaaggccactttaacaacaaccaccaatatattgtttagagacggtttctgtctagtgtaaaacttgagtggtctgactctaataaatggttttgaaatgtgtgactggtattataaaatttgtgaataaaacatataaaatatgtatttgtcttttttatttacctttgtaaggtgtagaatctgtttccaagacttatttttatctacgtggttgtgtgttttaaacaaaagtctttaagtgacttgggttcattcttctttaggttccatccactcttttgggtaaacctcttcacaagatacacggtttcaggtggtcctttcataatttaaagaggacgaaaaggaagggttttttttctttttccttttaaggacctcaacaagtttatcatgctcagtctgacagctaagatacaagttttcgttcactttttcctgtgaaagtgtatgtaaaacagcttttttttttaagtgtgagatttaaaaaggaagcattcgtcatactcaacatgctttttattgataccacaaacatcttggacatgaaaacttagtttttgccttgttgaaggcttaacttgacattaaatgccttaaagcacttgtgtttttaaggcaaaaacattgatttttaaaatctaattacctcgtatcttgggatttaatattccacagcgcctaatatttagcagctcaggttgtcactcaaagaaccttgctggtttttaatggatccggaagaccttcgagaaccgaaaactaaatgctgaatatagtgaccacataaaacttgtgtttgtatatcgctacacagtgatgaaaatagatgagctctttgctggtaaaagacagctgaaattttgggggcacacgtttcctggttatttttgtaaagccaggttgaggaaaagatgtaaaagtcactttgggggatctatcttaatctgggttgggatcgagggtgaggggagggatttccgttatttggtagcaaactggcctggttttgtgttttggaggtgaatgtttgtgtccttattctttagcttctctgcgttactaaacttaaaggattcacacttaatttgactcctcccaagagagagcagtagcgaaaaataatacataaaaggacttcacttgtacaataaaaaattagcctacttaacagactttggtgtttaagagagcctgtttatcttcataagtacaataatgactaaaatggtgtaaaacatgacatggtaaggtaaagacacagcagtaaaccatttgacatgttcgtacttaatatagttgacccacatgcagtgggtgaacccttttattagacagtaccttaaaagaaatttttcatacaaagttattcaaagcttcccttagccaacttttggttgtaaaggtgttatcagaagcaagagcatttccacacacttgtatgggcaattggttttattatatatgatggcattgtgtactccagaactgtgagcctaccctagcttcaggcagctatgggtaagtgttacttagggttaagattcctatacacgtggggtgggtaaatggggataacctaagttttttttttttttttttttttgtcttttttttttattttaaatcatgggtgctcctttggagtcagagttaaaactattatggtgtgtcttaatgctcctcaacaagtctgtgaacctgctgatgctttctggaagcttgctgtgccttctaaaagccagtggtgggtaggcattgcagttgaactggggcaacatttctttactttggaaagggccacctgtatcagcatcaccacactggctctgcacaaatttataacccctggtttgtgcatgtcagaggaaaatatctcggcggagagtccaggctgtgaagaaaatcttcaggacaaatcctggtttccagagtcaagttcaacctgatttacatgattcagcggctgctccatccagtttttcttgtctgagtaacaaacttgcaacttcctgcatgttcgtgtgcaagtttcagtgttttgccattgacttcctaggtgaagtgtttttaatttttgttcatttggattatagagaagtaatcctaatgattttacaggtaacaaaagcttcatagacttgaacatataaaatatgcccatggaaattagtttctacaagaggtctaaaaactgctttgagtgtaggcacaccgttgtaagttaatatgggtcacaaaactgacacttggattatataaagtaattttccctcgcctcctccttatttttgtcacttaaaacacaggtctttttaccacatgaacttgaaatttcattgagtgttaaatgagtatattagggattacagctgttgttcatcctggtaattctgagcttttttgtgctcaactaaggattgtgagagttgagagcttgattgaacacttaagtttcataaagattacttcaaaaatatttagtatcaacaaaaatagaggtctgtattgtaggtttaaaaactcatttttaaataattatttggtggtaattcattatactaaacttctcagtttctttttattcaggctccttcctcagagaagcttcctgttatgtaccttatggattctattgtgaaaaacgttggaagagagtatctcactgcctttactaaaaatctagttgcaacatttatttgtgtgtttgaaaaggtacatatgcatttagaaacatttgcgtttttttttaaaaaatgtgttcctgattaaataaatatttgctttgtgttgggttttcttgggtggtgaaatgttttatacttttggacatttatcgttagtaccatttcaaagaaagaggctgaagttaatgttttatgttagatttttagaacagattctaggggtttacattatccatttaagaatagatggatttgcttttagaattgtgctttttaaaaaaattgagtgtgttcatttgaacatctgtttcatcacttacaaaccaggcaaaaagatctgaaatcgtcaagagtaattaaaatttcattgtttacatttctggtgttaggatgttgactgttctcttgggggggtaaaaagcataatccctcagtgtctcaacctgtgattggttcctgaaacttgtgtgtttttttgttttgttttctggaaatgtttacttttgttacattgttcaaggtatgttttaggtgaatgttgttggtatgtgtgaatggtggaccagttaattgctgttggttattctggaaatacttttgcccctaccttagtgttcagaaattaggcttatttttcatatctagagattgtaaatttcttccataacactgtaacatggtggtttggttaaagcagtattatgttgaggaggacaagggatttgctgaggtaattctctgcctgtcaggctatatctttcacattgaacaaaaaggcacttatgagatacttaggtttaaagattgtttcctaacgtcaatatttggtggtagttattatattttagtagatgaacacctgtgtgtcagttgtcagatttgtagaattggaattttttttggaagaactattcagtattagattttacatgtttattagaaaataagtagttgctatttgagaaatgtttttaagttcttagagaaaaacagtatatgcagaagaaatctggaaagctctatatcatatagcattaaaatgcttgttaatagaatattgtagacatttgctgaatactgctaaccagaggctgtagtcttaaggagaagcttaaccaacctcttggtttcggtttcagtatgttcaaattcacttgggtgtttggtagcatacctttactgaatctaactgggcattaacatgacagttgattaaaatgaccttgtaataaatacattattatctgaagacttatgaatatagttaaggctttactgtctatcctaatgttgaaaatctaactcagttttcccaagtcctaggtttcttgatggcgaattttctttctttttcttttttttgttttgagatggagttttgctcttgttgcccaagctggagtgcaatggcacaatctcggctcactgcaacctccgcctcccggattcaagtgattctcctgcctcagcctcccgagtagctgggattacaggcatgagccatcatgcctggctaattttgtatttttagtaaagacggggtttcaccattgttggtcaggctggtcttgaactccctcaggtgatccacctgcctcggcctctcaaagtgttggaattacaggcgtgagccaccgtgcctggcaatggcaaattttctaaacatttttacgccatcacaaacctgaacagaaaagttatttaaaactaaggcttatcagtggttaagattttgtgaatttcagttgttaaagtgctttccacaccacaatatcttgttcctatgtacccaaccatatagtattgctgagcattagttagtgagatagttttgctttaattttaactttgtactactatgtaaataatttaaaacatttaagccatcaggtaatcaatttttctagttgttttatattttttagttttatattttctagttgtcttacatttttttttcccagagaaagagtaactttaggaatattatactaagctctaagatgtggaaacgttttgtatatagaaaggctcacctggttggttgcttgcatgaaggctaggtgaaaatggttttaattactctgtttttgaaggagaaatgcacctttaataaattattactgttgtatatacttaccaatgggtagtacagttctgtatgtgaagtagagcagatttatataacttatatttaatatataaaatattctatagtaacttaacaagccatag

SEQ ID NO: 66704 - DNA, 2543 bp, Homo sapiens
aaattcacttgattaaaaactgcataggccaggcgcagtggatcatgcctgtaatcccaacacttgggaagtctgaggtgggaggatcgcttgagtttaggagtttgaggccagcctgggcaacatagtgaggccctaccaaaaaaaaaaaaattagccaggtggggtagtgcatccttgtgatcccagctactcgagaggctgagttggaaggatcacttgcggctgcagtgtgctatgattgcttcactgcactctagcttgagtgacagatcaagaccctgtctcaagaaaaccctccaaaaactacaaaactacactatttcctccaaacagttttctgttagattgctatcttataaaatagcatcttaattttgtttaatcattacattatgtggacttaatatttcagtcccaagatggtaggcatgttgtggcaaatatttttgcatagtctttaatgttttatgagcttatgctccatgaacagaaatgacaaaattaaggaggccaggaagattatatctttctacacataaatgactttatactaagttattttgcttagcatctgagcttattcgacagtgaggtgcaggaaggcagaattttataagttcattaatagcaccactttgggagaaactaaattttaggacttagaatttagctgaaatgactctgattcttgtgcagccggagtgtagtgatttagcaatttcttaggagcagtatggctcagaatcctgaacaataaggaagagaaacaattttttttcattctatttagagattatattataaagtctcaaaaaatactagtaagaaataatgggcaacttaaatcatggactttttcttttcattgtaatctcaatttatacattataagtgtacaatttaaatgtagtgttgagtaaatatatttattgaataaagcattatcttcttcagttgtttgcaatttcttgacaatctgcatgttctgcagtgttaacatgaacatttattttgtgttttaggcagtttctcttagtgttcagcaggaaacatccaatttaggtcctggatctgcaccatccaaattacatgtttcacagattccccctatggcagttaaagctcctcatcaggttcctgtgcaatctgagaaaagccgtccaggaccatccttacaaattcaggatttaaaaggaactaaccgggatcctcgtctgaacaggataagccaacattctcatggaaaagatcagagtcacaggaaagaatttctaatgaacacattaaaccagtctgatactaagacaagtaaaactataccctctgaaaaactaaattcatccaagcaagaaaaaagtaaatcaggtgaaaaaataaccaagaaagaacttgaccaattagattctaaatcgaaatcgaaatcgaaatcaccctcacctttgaaaaacaaattatctcacacaaaagacttgaaaaatcaagaatcggaaagtatgaggttgtctgatatgaacaagagagatccaagattaaaaaaacatcttcaggataagaccgatggcaaagatgatgatgtgaaagagaagagaaaaactgcagaaaaaaaggataaagatgagcacatgaagtcatccgaacacagactggctggaagtagaaataaaatcataaatggcattgtacaaaaacaggatacaataacagaagagtcagaaaaacaggggacaaaaccagggagatcgagtactagaaagcgatcaagatctcgatcacccaagtctaggtcaccaattatacattccccaaagagaagagataggcggtcacccaaacgaaggcaaagaagtatgtctccaacatcgacacctaaagctggaaagattcgccaatctggagctaagcagtcacatatggaagagtttacaccaccttctagggaagacagaaatgctaagagaagtactaaacaggatattcgggatccaaggcgaatgaaaaagactgaagaggagcgaccacaagaaactacaaatcagcattctacaaagtcaggcactgaaccaaaggagaatgtagaaaactggcaaagttccaagtctgccaaaagatggaaatctggttgggaagaaaataaaaggtatgatgttaacattttaagtcaagtgtagtagtgtatatgtttcaaaagatagtgttaatttaaaaattggaaaatgtttattaggtgctattagtactttttttccatctaattcttacatctctgtgggttaaatactattattatttctattttacagataaggaaactgaagtttagaaaggttaactaatctacctaaggctgcagtccaggacatgcaagaatcagaattcatatctgtttttgctgatttcatattttgtgctcttaatcatttatttaattactttttgtggttacatatgcccattttaaccatatcctttgaaaagaatctttaaatatggtcctgagtattttttaaaaaaacatttcaatgtaacatactgcttttatg

SEQ ID NO: 66705 - DNA, 2451 bp, Homo sapiens
agcaaaagagaattacttcaaaaggtagttactatgattaatcccatgtagtcatcattatctatcgtctatttttttggtatttttttatatttaaaatattttatttccttttatcacccctatacagacgagtgaacgtttagcatctggtgaaattacacaggatgacttccttgttgttgtgcatcaaattcgacagctatttcagtatcaagaaggtaaacatagatgcaatgtacgggatagtcctacagaagaaaataaaggtggattaaaaaagaaacctctcttatctgatgctgaattaacctactatgaacataaagcaaaactgaaaaggacacaggttcagcattcatttccaagacttgatctcttagatcctgatatttttgactaccctttgactgatgccttgttgtctggaatagaatgtgagccatccaaaagtaaacatgcaagtaggaatagtggagcacagtttgacagaaaagaacaatttagtgaaagagcaagacgtctttctcctatatctgggagtcgtacttatgctgagaatctttcaccccatgagggccggagaagacatgacgagcaagtctctgctaaaggtagaaaaagttaaatcagattatgcctattgaatcacacagcagtgaagggaaaatgaacaagctaagtggggatggatttttgtgactgttcagattaccattttttttcccatttattttgttatgttttttccctttaaggaaagggaagggaagggagctaatatttctaaggccagttgtgtgtcaggtacttcattaggtattttttatatgtaatttgatttaatcctcacaacaatacaatgaagtgtatattctccctattttacagataggaaataaaagagaggttaaataacttgctctcaaaatgaaataattagtatgttgataggatggtaatttttttgttactcaggtgtgtctgactctagagggcatcctcttatctgctgctttacgctgtcggtctctcctgcccctctaatgtagtgagatagttatatatttggataaacattcatacgaaaatagaagattttaagataactttagtgaaaataatttttttcctttttaaaaggtgtgcgagaagagcagagatctccattcaatgatcgttttccacttaagcgacctcgatatgaagattcagataaaccatttgtagatagtccagcatcaagattcgccggcctggatacaaatcagcgacttacagctttagctgaagacagaccgttatttgatggacctagtaggccatcagtagcaagagatggcccaacgaagatgatttttgaaggacccaataaattaagccctcgaattgatggacctcccacaccagcttctcttcggtttgatgggtcaccaggacaaatggggggaggaggccctttgagatttgaggggccacaaggtcagctaggaggtgggtgtcctttgagatttgaaggtcctccaggaccagtggggacacctctgcggtttgagggcccaattggtcaagcaggaggaggtggttttcggtttgaaggttcccctggtctgaggtttgagggatctccaggtggtttgagatttgagggaccaggaggccagcctgtgggtggtctgaggtttgagggacatcgtggtcaacctgtgggtggtctaaggtttgagggacctcatggtcagcctgtgggtggacttagatttgataatccccgaggtcagcctgtaggtggacttagatttgaggggggtcatggtccatcaggggctgcgattaggtttgatggacctcatggtcagccaggaggtggaatcagatttgagggccctttgctacagcaaggggttggaatgaggtttgagggcccccatggtcagtcagtagctggtctgagatttgagggacaacataatcaacttggtgggaaccttaggtttgagggtccacatggtcagccaggggttggtatcaggtttgaaggccctttagtccaacaaggaggtggaatgaggtttgagggtccttctgtaccaggaggtggcctgagaattgaagggcctctgggtcaaggtggtccaagatttgaaggttgtcatgctttaaggtttgatgggcagccaggtcagccgtcactcttgccaagatttgatggattacatggtcagccaggtcctagatttgaaaggactcctggtcagccaggccctcagaggtttgatggaccacctggacagcaggttcaacccagatttgacggtgtacctcaaagatttgatggtccacaacatcagcaagcatcaaggtttgatattcctcttggtcttcaaggcacaagatttgacaatcatccttcacaaaggcttgaatcagtatctttcaatcagactggtc

SEQ ID NO: 66706 - DNA, 1092 bp, Homo sapiens
gtgctgaaattctcctaggctgagttttacttcttttccaggtgcagacattttcttactatgacagatttattttatagtagtaagattgcatggaagaaaatacaaaataagaaagattttaaaagtacattaggaacattattgatagaaagtagtccttctgttcatctctaatggtacgaaaaaacagttggcttgcctagatttactctactgtatatccttgaaagaaatgatactcttattgacagatactctagaatggtacttacttagtcttgtttctacattacacagaatcggtggggtttttattatgtgtactcactaccaaaagtccacatgtatactgaacaaggattataaatggatatttattcacataccagcaatatgtagaagtcctgcctccctctggactgcaaatgctgtatttgtatgccagtatagttcttgctccatgactattctgttttttaacattccctttgacatcttttacaagaccttttacaagattactttgtaatgtggctataaccatgtgcaaagatgatggccaagcaagatgcttacctgcttggtaattcagaatgctaattagaacaggcttttgatatctgtggaaaagtggcaagggttaggagttctggcctcagttttgctcctaactagcccttgtgattgtgtatagatcatattgcattatgtcagttcttctatttgtaaaataagggaaagcaccagcaaggtaaagtgacttgtgtaaagtaacacagctagttaccttatatttgcatggtatcttacagtttcctttttggggggctactttgcctctctagtaggtaccttaaacttttcaaagaagttttaacccattctcagtaacttatacctctatgaaacagataagggaaggttttattgttcctgtttgtagaagacctagaagtgaagtgatgcagccaagttatctttctaaatctttatttataagccaggccttgtgacatctatgaatatttttatgtaattaggatgttaaaagttttacttgaaatatagaaagcatgttcttaaaattaa

SEQ ID NO: 66707 - DNA, 1005 bp, Homo sapiens
tgggaggccaaggcaggtggatcactggaggttaggagttcgagactagcctggccaacgtggtgaaaccccatctctactaaaaatacaaaaattagctgggtatggtggtgcacacctgtaatcccaggagaatcacttgaacctgggaggcagaggttgcagtgagtcaggatcacgccactgaactccagcctgggcagcagagtaagacttttgggggtggcctttggcccaagtacttgtacagcagacatattttaaaagacgatttaaaaataggcttcccaaagactatgttatgtatattttaccacattaaaaaaaaaaaaagacttcctaaatgttaaaacagtaaaagggataaagggaaagggaaagcactaatagtaacaatgtccactataacagtgttattaaagtcactgcctctttatcttaaagaaaattagattacatactgtttcaattcttcaactgtaaaattagtaagatctggaacatcttgatcttcattttgatcttcctcctcttcagggggaggctgagcagttacttcacttacttcttcaattaagaagagacatacaaatttcttaataccattctccatgtattctctacagaggaacactatagtattataagcaaatagagaaatccacctagtccattcagtgcttctgatctcaagtttactggccaaggaacctaatacaattttttattttgatatgtgatgttaactctgatttcttaaaagtcatctataataaaagtcatttatttcattaatattcaaaaccttttcaaaagttaatctaacatacaattactggtaaaaagcctgcacattaggtatgttagttaactgaaacacatgtccactataaggtagttcaatcttaggaaatctaaaagaatttcattataaaccgaaaatcaaaaataaaagctatacctaggaattcaattattgtaaggacctttatcataacttatatc

SEQ ID NO: 66708 - DNA, 1083 bp, Homo sapiens
taatgacaacatgaaactaataattaagatcttttccattaactctatagttacaactactaattcaaaaaagacaagcttcaagtatatttttttttttacaaaaaacagtcctagagcctgggaattttagagctagaacaagcctgtaggctacactctaatcttaattaaaaaaaaaaaaattcccttcaaaattcattttttaaaaaatgtgtttatattccaggggtcaaagccttggacttttagagctagaacaagcctgtatgctatactctaatcttaatttaaaaaaaaaaatactcttcaaaattcattttttaaaaaatctgtttatattctaggggtcaaattttattcaggaaatttcaatgttagattccagcagttattaaaattattaaattacttaattaaaattaaattttaataattattaaaattaatatacttttagaatgatataatttaagcctaaaagatactatggaggcacatgggttacttactgttaaactgtagtaccaacgtctatgagtgacttttcggctaacatccttttcagttctattttgccgataatgccagtccaaatgatctgcataaacatctgtctgtgatgttgtaaacctcattccacaagagtaacactgaataccagtgtacagtcgatttataacactgtcataacgtctattttgaaaaagaaataatctttagtgttgataatatggcttaatggcctttaaaagccaattacaaatatttcaattttccatactgtaacaatggtgaaaccaagagctggctgaaacagttaatacccaaagatcagtattattctctaacaatgtgattgaccctctttaccttaactttggtgacttttggaagatggagcctgtcttcttattgatagccctgacccagttatttatttccttttagctaaaaatgaaatgatcctgtgctagctaacaaggcaatagttagcttattttagtttggagtcaagtcaagatggacatggcagaacagttaaatttcacctctctagatctttggcattctgaataattc

SEQ ID NO: 66709 - DNA, 1078 bp, Homo sapiens
ataaggatgaaaatttggttttatccattttgggaccaaataatttttgtcttctttccaaagactatcttctggcttaaagttaaaaagaaatatcagaatagcccattagaaatgaatacgcacatatttactttttttctttttgcttcagatttatcatccatcatgttatgaagattatcaaaatgtaagttctttttggttactgtatttgttctcatttgcattaataaattttacttttcagttttttttttgcatcagagcaatattgttattttaaacttaatatattgaactgtttttgttttttgatatagcatttaggttgttcagtaaaaactggtgccagattgacagaattgacatatatgaatatcattttctgtgataacgcaaacaattaaaattttgaaatttatcattccttgcattttattcacttgaatcatggtatcttttactagtccactaggcccaaagaaatgtgaggaaaagtgaagataaggatcctgatggggatacgtttctagagctatgggtagcatttactgctatttttttttcttacatctctattcagccatctaaataggtatattctttttgttgttttgttctgagacaaagtttcgctcttgttgcccaggctggagtgcaatggcgcaatctcggctcactgcaacctccacctcctgggttcaagggattctcctgcccctgcttcccaagtagctgggattacaggcgtgcaccaccacacctggctaattttgtatttttagtagagacagggtttcaccacattggtcaggctggtcttgaactcctgacctcaagtgatccacccaccttggcctcccaaagtgctaggattataggcgtgagccaccgtgctcggccaaaataggtatactttttaatgatcacatacggaatctaaaaatgataccagtcgttgaccttaaaagttcaaatggtcggctgggcgtggtggctcatgcctgtaatcccagcacttttgggaggccgaggcgagtggatcacctgaggtcaggagttcgagaacagcctg

SEQ ID NO: 66710 - DNA, 1062 bp, Homo sapiens
ctctgcaggcagtaggaaatgcaaatactaaaatgtatttattaaccaaatgatagctgaaggccctgcctcagccagacaatttatatagatatgtctatatatacataaaaaaattcttcaccttctagatccaacagcagcttttttaaaaaagaaaaacatacctttctcattttatttaaactgactcgactgtgtcattttctgttttaatttcagagggtgttgctatgctttcctctgtacaagctggtggtgtatcaattcgttcttccttaactttgggactgtcacagggttcctgcaattcgtttttgacaatgttcaacataatattcaaggggttttcaactggtgtcttgctgggagatggtgtacaatcaaatgaagatgtctacaaaatgaaaggccctatgagtactgatgaaagttcaaaattctcacattaaataacatttagtcttgtaagacccttgtatgaacaagagaacacacatacaaccaaatgcaaatgaaacacctgcctcccaacaaaatgtgccataaagacaaccagaaataaaatatatattgcacgttcaatatgtactcagcagtgagttaagcagttaacagctaagttataggacattatacagccaaaaaaagttgattagacatgcttctacattttaatctctacatagatgttaaactcatacatatatcctgggacttgttactaccctaatttcaaatagtctgaggattttttaaatccccacaaaccatcaccctcaacactagtcttctgacaacctaaataaaccttccaaattgcctccaacccattatctctaaaaacctatttattccattacttgattttaaaaacagactacaaatatgaccatttgaacttttttttttttttttttttttgagacagagctcactcttgtcgcacaggttgcagtgcagtggcatgaactcagctcactgcaacctccacctcctggattcaaacaattctcctgcctcagcctcacaatcaggtggaactataggcacccgccacca

SEQ ID NO: 66711 - DNA, 1394 bp, Homo sapiens
ttggaggcaatttggaaggtttatttaggttgtcagaagactagtgttgagggtgatggtttgtggggatttaaaaaatcctcagactatttgaaattagggtagtaacaagtcccaggatatatgtatgagtttaacatctatgtagagattaaaatgtagaagcatgtctaatcaactttttttggctgtataatgtcctataacttagctgttaactgcttaactcactgctgagtacatattgaacgtgcaatatatattttatttctggttgtctttatggcacattttgttgggaggcaggtgtttcatttgcatttggttgtatgtgtgttctcttgttcatacaagggtcttacaagactaaatgttatttaatgtgagaattttgaactttcatcagtactcatagggcctttcattttgtagacatcttcatttgattgtacaccatctcccagcaagacaccagttgaaaaccccttgaatattatgttgaacattgtcaaaaacgaattgcaggaaccctgtgacagtcccaaagttaaggaagaacgaattgatacaccaccagcttgtacagaggaaagcatagcaacaccctctgaaattaaaacagaaaatgacacagtcgagtcagtttaaataaaatgagaaaggtatgtttttcttttttaaaaaagctgctgttggatctagaaggtgaagaatttttttatgtatatatagacatatctatataaattgtctggctgaggcagggccttcagctatcatttggttaataaatacattttagtatttgcatttcctactgcctgcagagtttcaggtgcttgttgtgtgaaagttctgtagatgtgtgcaaatttaacgaaatgaaattgtatgtgtaaaaatgtacgatttttcactgtgcaactgtaaattataaataaaaaatatttttgctattcatggagtgtaatatttatgcacaccatcaaatagtttctgtactttttattgggtaaaaatggaattgaacagcaacctcaacataagattttttttctagtagcctcccactgattaaagaagcaagtttgaggtttcatccttcaaaagggggttccgagagagcaccgtagggcttttctcaaatagaaaagccagattttgaaaaaattttaaagataaaataggacatattttgcagatatatatatatatatacacaaacacatctccaggtatagagaaccatccagatgttcacttttgaaaatatctaatgatgcaaagttttattcttgaacttggacactgatgccatcaaacaattaacaaatatatttaagtactaaaggtgattttttttttaaagactttttcaaattgtcaaatgattt

SEQ ID NO: 66712 - DNA, 1141 bp, Homo sapiens
ccacactacccattgcaccaggtgttggcacccatactcagctgttcttaggtcaacagttagagtatttctgagtcttacatattttcttgacttcattttgttgactacctcgtccattgaaattttcttcctgcgcacacctgtaatcccagcactctgggaggccaagacgggcagatcacttaaggtcaggagttcgagaccagcctggccaacgtggtgaaaccccgcctctactcaaaatataaaaattagccaggcgtggtggcgggcacctgtaatcccagctacttgggaggctgagacaggagaatcacttgaacccaggaggcagaggttgcagtgagccgagattgtgccactgcactgagccgagattgtgctactgcactgatccagcctgagcaacatagcaagactgtctcaaaaaaagaaaaaaaaaaattttcccattgctggttttcccattttctttttgaccttcccacctaccagtctttgttcccccatccttgaccctcttctccatgtggataccgttgatacacttttaggtttgaatatcaccttccttttagaatgttccatacctttaagcatttgataaaagctatggtggtttccccagaaaaatgttcaacaggaagttttgcctacatttttggattcacagacctcagttcctatggcagtgttcatatacgtaagttcagctgttacgtgtttacaactcaaatccaatggctaccagttttcccactggacctctctggatttagcaatctctaaaattgtattcacttgattcttaaaaaaataaaaaagcttaaatgcagataggatgtcaccctgtttaaaatttctagtggctgctctggtcatcagtttaataaaaattccttagcatgaccaagaaggctcttcactacttaaaaataaaggctgggcacgtggctcatgcctgtaatcccagcactctgggaggccaaggcagtaggatcacttgagcccaggaattcgaaaccagcctggactacgtagtgagactccatttctactaaaaaaattaatggctcatcataatctattcaaaactactgagttttaaccataagaagtcaatttttgaaaacacaaa

SEQ ID NO: 66713 - DNA, 1046 bp, Homo sapiens
aatcgccgtagcggcggccgccttccgctggtactttctcggagtctctttccagcctcccgactccagccacttggctggagaggcagcagggccgtcgccttggaaacgagtacacttccgacgtgctgaggtcatttcccgttcctcacggcccacgctacttccggtttcctttccctcagctattccatggcttttcgtgtggacaaatcgggaggtggtgtaaactggtttttggtgaaattcggctcggcctcatgcgaacctatctaggtccgtctctggagtggcctgtcatcgatcgcgccctccatcgctgagcgacacaagtggaaccccccaggactgcattctgcgtaggtgacctgtgtggcgcgggccgggcggggcctttttgtccttgggcaaacgtggtatactttctcagtggtggttggaaggaaatttgttgccctgtcatttcgcaagtatggaaaaagacctaaaggagaatttagcagctgcagccgctgtttttattgcgtactttactagcgccaactctttaataatcgcttgttagttgttacccctgttttatgggtcaagagactcaatatatcagtactttggtaaggccaggcagcaggtaagttgtaaaaccagtaaaaaaacacaggtcattagtcaaaagagtgcttcaggtctcctgactccaaatccgagaatcctttcactgtagcatgtttactgctcaaatatttctacaaccctattgcttaacaacaggaatgaattatttcaccatttgttgcaaacgtatgggtcacgttttgtgccagcagcagaaaatacagaaattagtaagaattacctgccctccaggggcatcaccaacctggattcccctctcggcccagtttttccacccttattgccttctcccttcaggaataatgaactcgtcctggaagcgtaccttactttttaatatctctgccttgtcatgtgctgttcgtcttaccaggaaactaccctgcttttcccccagttttggtctgtga

SEQ ID NO: 66714 - DNA, 1006 bp, Homo sapiens
ccagagataactattaccctgattttggtgtttattattcctatctatgttttatgctgttattacatatgattatatcattattttgaatgacatacattatataaatgatatcacattatgtatattattctttagcttttttttgttcaacaatatgtttttgagttttatccatatggttacatatatgtactctagttcatttctttcagccatgtcgtttattctattcttagactggtatcagaatttatctgtttttgtattgttggatatttatttggtttcaatttttagctagtactaactgcttagtgagtattttaatgcaaatctgatccttgggctctgtccaaggctaactagcacttttctcatgattcaaggttatgtgtatggggggcttattttagctacatttccccagcctataagctacaataggtctgttgacaatgcattgtctttttacccctaccacacacacatgacttccttctgtgagtatggcagtcctgtgtgatatcttctttatttgtacttctttgcttcttgtaaccaaatctggttcagagactctccctctaccagtttgtgtgcctcacttaaatgttattataaacaaaggatttttacttgtgcctttctttggagcctgatggttctttgtgagctggtatccgtgggtaggtggttctctctgctgtttcctcccacattcctatttgttctgcactttggcaggttttttaatctgtttgtagtttgagttacagatgtctcctagtttcatctagttggagttttctgggtttttttgctctttgcttttgggtgattttggagagaagggggaagtactgattttactctgccatattctaatagacatcaggatataccatttatttcatctcttttctggtgccctttcagcttctcttactactctcactcagtctactttggttaactcactcctcctattgtgtaattgtagtat

SEQ ID NO: 66715 - DNA, 1017 bp, Homo sapiens
attttatcatactgctttttcctttagttttaatttcatttagtagataagctgtggtatttattattgaggcattctttttagttatttaataattgtttagaactatgacttctcctttttaaacttggtcttaaatcttaattatttcaagtcatttcttaaaaatttctaacaactatataatttttcttgttccttttaaaacattggtcaaattagtcacatatcctaatcaatattcaataaaaatcttgggtaaaattctcttattgcatttcattgtagatacattacttaacctccctccctcctgtttttaaacatttcccatatgataaaatgaaatgttgggctaaattcattctgtctcgtaaaattcagcattatccatgctcataaatatgattttttgactcttaatgacagaaaagatcaatatgttgccatttttgtctaaagtggggtttttaatagaggtctgagaaatcctgaagtttctgtgttagtgggttctggataggctgtaggagagagagaagccccagactctgcagaagccagcttgtaatttggcagatggctctgaggcagaggacaacagaaccagagttcttagagacttgccacctgggctgtaggactgtagtgatagggttgtttagtcccttgatattcctctgtgtcctctcttttgccagtaatggaggtgggttcgctttttaaagcaccaaattaacacccaaagttcctgctctttgatttattttgcaaggtcatgtatacatattcagcaccaaccatgtgcctgtactgtgagccagaatgagatctggaccttactgttaaagagttacacaattataccataaaagaactagagatttctttttaagataggatgcaattaatggccaaaaataattaggttcttaaaatacatgtcataggagtttgggaataggaattgagggatggaagaagttgctaaggatcaaattattgaggagctattca

SEQ ID NO: 66716 - DNA, 1094 bp, Homo sapiens
tccaactatatggtaagtcactttgaaaacccacacaactttgttgtaataatctttcattttatagaaaaatgtaattatgcaatggttatcaggaaagttaattcagtaataaatatgtaggctagggaatggtttacaaatattcaaccaatacccacaaaatcctgtatgatttacacaactgttcaagcaaacataagaaaactctggttcaatttctattaactatcaaaaggacaaaatgctcttctatctcaaaccaggtctgagtgacagcttttcaatataataaagacacacacctgcactcacacacacacaataaagacacagtatctcttctcattctaaaacacttcctcttttagtccgtatacacttcgaataatcttgtgtagtaaatttttgctgcaactgacaatgttcaaagtaaatctctcccggtttggtgttctaagaagccaacagccacagcaggatgagcattaatactacttccagaatctataaaatcccaatgctattgccaggcaagtaaacaccgaagctgtgaaaagaagaaactgtgttataggtcttgtatctgtaattattttgcagagataaagagaataatgttatctttaagtgaagagcaaaaaacaggaaatccaaccaattttctatcctatgttttttattccctagacaattaagtatgaaagacattcttaagggcagccttaatgcctaattcttcttaaaagcacctgtatattaaaatgtaaattatgtcatttagaaacctataacctgtatttaaaatcattaacgctagcattattgactactttaaataattataagctctaatttcagatctcatgataaatgaaatctttcttatattaaaaaattacgtagttaggctagtaaaatatacatatatctgtgagaagagaattttaattgccttttcagtacatttttaaataatttctcataattcttaataaaattttaataaaaactctttaaactcaatgaggtagaagaaaaggcagaaaaagcattaggtttttaaaatagttaatatactacctgtactttag

SEQ ID NO: 66717 - DNA, 1043 bp, Homo sapiens
ctacaaatttatctctcttcactaggaaatcctttttttcttccttgaatctctttcttttcattttgatatttcagatatgtaggtttcatatttacttaaccagtcaacattataccttgtagcatgttaacaaattcatttaaatttcatgaaaacaattctgtaaataaaaagatggctttctatagatcactaggttatttttattttgttttctaggaaataacagtacaacagctaatggctcatttggatgctatcaggaaagacatggtcatcctagagaaaagtgaatttgcaaatctgagagcagagaatgaggtgatacaaattttaatttattacttataaaataactgatctcataataagcatcctacttaaggaataagttaataagaccaagtaataattccatgtggttagtaaacaataagtttttagatttaaaaacatactatttgtttaaccatacctaatctttttctatataaatcatagtgctttgcatactgaagagaataagagttacattttatacatataaaaccacataaaacaaaatctttgagctatatatataaaatttgtatataatggtttcagagctgagagtaatacggcattttctattttatttaatcctgtactaaatgtctttgtgacttaaaagtatatttctgtaattaagtcagaattttaagttatgttatccactatagcttatttttaaatttagaaaatcagtttttaaaagtataatataaaaacaaatgcattttgctcataagaattattttctgaatacagtggcttactagtttcttttgaagatttttttccttatcaattctgtattagaaatccatagattgtccaaattttggtaatctagggtttcagatttttttaatcataatatagacttggtttaatgctaattgcatgtgatctttcctgtacctagaaaatgaaaattgaattagaccaagttaagcaacaactaatggtaagtgaattttttttctagctgttaattt

SEQ ID NO: 66718 - DNA, 1048 bp, Homo sapiens
gttcttttagagagtaatttagtattatctgtcaattttttaattgtaaccattatttaaaagagtataacaatttaaatgttgaggagttactcttgctgtctattttgataaggatatacactttaaaaaaaataaaatacctatttgctgcctacaggatttgacaaaacacaagcagaaacaattgtatcagcgttaactgctttatcaaatgtcagcctggatactatctataaagagatggtcactcaagctcaacaggtaatacactgattactatcacttctgatactttcattagacaatcatttcataactatgtctctgtctacctactgaccttccaaacatgcttatatcttccttgttctctctaaagggaccacaaaaaaaaacattgaataaagtcagtatttagagagactgaatagttagaatagttgtaataatattgtggtaacagagaatggtattttgccaaatctttgatgggatgagatcattatattgtgttattcatgagtggtggtagattgtttgtgaaacaactttttccctctagaaagctcaccacagaagagctaatctttctatatattcagtatattttattgctgctatacatacacattggttaattttcacagacatagctggaaaggacttagttggctgggagggactttataaattccctggctaagacgccttaatttaactgaatataaaaatccttaaagtcaaacataagaatttaacatgtaagtggcacaatgctatgtacttttcgtatattatttaatctctaataaccttgaaaagtaagcagaattctatttggccactgaagacaggctcagagaaattgagtagtttgcaagagttttcactgtggtggtatggacaaaaagcaataattttatataaaggactgaataaactaaatgaacttaactggaataataattcatttctgtcagtcatgaaataatgtattatgtttaggaatctgttttcttcctatggttatatttttttcatttta

SEQ ID NO: 66719 - DNA, 1019 bp, Homo sapiens
tatctagatattttaagtgacttaagatacataagagagacagcatggagtgtaagatttggagtcagaagtacctgagtctgaatcctaattctgccattggctctgtaaaggtaactccttcaccttcccaaaagttgtttatgggcagggcaccttgtaataaattcatcagcaatatatagaaaaggtctttactgtgtctaggttaaaacttggggaatttattgaaataggacaagaagggttatttcagaaatgagaaatttttcttagggttcttatgttgataccagtaaatacgtccatgatttcaaatcaaattcattgattgaatcaacagtaaaacttggtggcccaactatgtgccaaagcactgttctacgtgctaaagatacagtagtgaaaaccacagtcaaagcatcatggaacttccattctgatccagagatacaaacagcaaataagataatttcatgttggagctgagaactacgtaggaaataaactgtggatatataagtgagtgggagtatggaaagctactttaaacagggattaagtgtaaaaaattttcatagctctttgaaagactattactgagcacagagaagaattgaattgtgcagtttctgcttttcagtaattagagctgaggtggtgataaccaaagcatttgatgtgtgttttattacaagtttatactgactcttaacatttctgaataccaaaggagggaaaagaaacatttattgaatgtttggtgtgtacagaagaacgtcagagacttttcagataaaagagaggctcagaggagtcaattaacttgggtgagatgacaaaactagaagagctggaactatattataaatggatggggaaaatgctttgtaagctaaagtagctttgtaagctatcagttactacaaaagaaaaaaattgtcttctctttcagagttcttcactaccacaaccaaggagggatatgataggcggccagtggatataactcctttaga

SEQ ID NO: 66720 - DNA, 1035 bp, Homo sapiens
ttccactctcctactgcatgaccaaactccctagcgagagtcctaatccccgtgatgcatcctgctaaaacgggactacaggctaggagtctcagctgtaatggatttgcctctatttgcaagttccccctcttttcattgaagtaggaagaagtgagaattattcaatcagtcacaacattataatgaatgctgtttattattgcacttgatttgttggtttgccctcaatcactcctaggacatgaatgctgcaagtgacctcttactctctgagtctggagtgacatcagatggtggggggtaaagagcgcactgtcagctcctgaaactgagtcaacatccaagggggtaaagctgaataccctctcctatctgaaggagggagggagggagggagggaatgaggggaggtagaaagaaagaacatcttcctagtatagagtctgaatgctgtaaagaaccatcagggtcatctcacttaactccctgatggtcagaaaaggaagctgatgttcagggagcaaaagtgactttcctaagctcacatagataaggaggacccaggccagggccaggaatcttgcctctgatttgcaccacatttatagcttaaatatttgcctattggccttcactagacattaagccccacaagcaaagtatcttgtgtgtgttagttcacagctatattccgtcccctagtgtgagcctccatactacgcgctcaagaaataactgatgaatgaagagatgaaccaaaacttacgcccaggtctcacatctctcagccctttcagcttgcactttctcccaagacatctctgatatgccttgtgagtttttaacagtatattaagggggagttgtatcaaaagtagaaactgttccaaataaatctattcaacctggatgttctttgtctataacccattacttacaacatacactaactcacaaggtatatttcttgattcagtcttgaaatgcgagcaaggttaatttgacttagacaaaagaaatggcttgagagat

SEQ ID NO: 66721 - DNA, 1032 bp, Homo sapiens
ttaattctattcagcatatttttcattttcaacattgtagtttttatgcctacaagtttaatttggattttttttatatgtttcatgtccctatttaacttgttgaccatctgcaatacaattataaaattgttttaatgttcttttctgccacttctaacatttgtgtcagttatgggttcgttttgattggttatttttttctcccattgtcagtcatattgttctacttctttttatgcctggtaatatttgactaaatgccagacatggtgaattttactttattggggccagatatttttgcatttctgtaaatattgaaatgtatcatggaactgatcttttcaagttttgctgatctcttcaagttttgcttttaaatttttttagatgggagggcagcatttaggggtaattatgttttactactgaagcaagatttttctgagcatactacttaatgccccatgaattgtgaagttttctagtttagctggtgagaaccagcactgatctcagccctttacaaatgccaagtattgatcctactcatccttcaaaatggttctttctctggcctcttgtagtttcttcatgcacacagatgccaatcagtactctgctaaatactcaagagtggttctcagcatatttccagaattttctttctgtgcagctctcttctgatactcttttctgcaaactctagccatgttgatctcttcagattctcagttccatgtcttcaactaagagagtctgccaggcttctcctgggttctttgtccctgcttgatggcctcgagactctgtcaaggcagaaagctggggcagttacctcatttgtttcccatctactaaagattcttgtccttcattgtctgatgtctggtgtctgggaaatcattattccctatagtttgtctgattttatttacttttggttgtttgaagcaggaggttaaagctgatttctctcattccatcttgcatagaaattgaagttccttcttacatctttaaagatga

SEQ ID NO: 66722 - DNA, 1045 bp, Homo sapiens
aagattcattgcatcaagctagtagaagggaaataacatgaaggcttgtgaggggattatttttatgggccaagcttgttcccttacattggccagaactcacattcccttggcccagactcagacacatggccacacctaatttttagggtagagtctagttttgtgctctaggagaagaggaaatgagtttggtgaaccagatagtctctgcctcaaagtagtaatgacaaaaattaacatttataaagcatttgttttgtgccaggcattggctaagccctttacctacattatttttaaattcatataccatattattcacttgtttaaaatatacaattcagtggattttattatattcacagagttgtgcaaccatcaccacaattttagagcattttcatcatctccaaaagaaaccccataactattagcaactcctcatttcctcccaccccctacctccagccctaggcaccatcaatctattttccatctatatggatttgcctattctaggcatttcatataaacagaatacctacattcttttatataaccctcaccatgatcctaaaagttaggcatgttattacttccattttacagataaatttacagagaatcaggctgtttaaatgatttgccaataattttaagccctgctcatcattgaactccattatgctgtactgcatcccagtcatatcatgccatgatttgttgcagggaaggggtgtttgtttgcttgttttctaatgactattatggcaacaaactgacttctttataacaggctcctttactgaaatgacaggcacttaggtgtcagaaagcttcaggtttgaaactcagatctaccacttaccggatacatgaaaaatatacactgcttagttcctcttgagtcccagcatctttatctataaaatgggaataacaaattcctgtttgcggggaggagtcaatgagattaacatatgtgaaagctcttctcacaactttacgtagtccatgtcctgccagtgtagttgtccttgct

SEQ ID NO: 66723 - DNA, 1038 bp, Homo sapiens
ttcacatgtgttaaatgaaatagttcaggacagtgtacccacctcatattcctctctcctttgttttcatatgatcccaggcaccctattttcatgttacactttcccctttgctttttctaaaatctttcacaaaatgctcacccacaacagtgagacacacctatccagtggagtgtggacagcaagagggtaaagctagaaagggttgggaaaggaaggcctaacctgatttttagaggctgtatctgccctttcaatgatcacctacttacgcttagaaccttctttctcctgccttcttttgctaagtaaccaggaaggtcaagtgccattgttactttccaaatgacttgggggggatcacttccagatacatcaagttctgcttctgaagacctgtatcaacagttaatttggagagtcaagtttcaccttctgaaacaagccaaggctgttatgtaacctgaagttctttgttgaaaacaaaacctgcagatgctgagaaagctaaattaaacttcttacttgccactcagccactaagcatcacaggcagcctagagaatattaccagcactggggtggtaaatgtaatgattgtaatgaaacaccatattcacctaccagccagtgtgattttaaaagtctgcccagattagttggccagaaagcaaactaaggtggagctgaactttacaatgtggttcttgcttaatgagcaatcttgttgaaaaaactaaagttatatatatatgtgtgtgtgtgtgtatatatattatatatatgtatatataatatatataactttatacatatatacgtatatgtatatatgtacatatatgtatatatacatacatatatacacacatatacacacacacacacacacagtgtaaaattttgtcctaggcatgctgatttcagacttttatttttttcctctcaaaaagattctttcttgatgaattgcataattaagaaggggacctgaatgaatattattggcagctaccccaggactcagacttgtct

SEQ ID NO: 66724 - DNA, 1050 bp, Homo sapiens
gaaagccaccacaagtggggagaaattgagaagcattcattctgtggttcagtggaatcaacatgttcctctgacattgtgcccgtttaccgcccttcatttattcttcaaacatacgtggatcacctattgtgtaccacatttgcttcagtgagcaaagctgaatccatgacttcacagagcttggagaatagtagggaggccacataattagaggtcatttctgcccagtgttcatatggttagtgttaatgcagggataagcataagttattatggaagcacagagaagagaatgatatacagtttgagggcaaccagagttttcccaaaatagatgataactgaggtgacatcatttattcttttgtttattcaacaaatatttattgaaggcatagcagtggctgttcaggtaactaatgacctggtgataaaatgaataagacccagtcctttttcttatgaagaggagacatacatgtaaaatgttataaatttgaaggtagttttgaatgtcttgaaggaaaataaggcaaaaaaaggggaaatgatggtttatacttgtgctctgaatagtatgacacatttatgtcagagcagtcagatcgtgcttccctaactcttaggtgatatgttgagctgagacttgaggaaaatgagagagcaggttaatcaaatatctaggcacaggaaccccaaagcacaaggactttgaggcagtagtagttcctgtgtcagagaaatagcaagaatgaccaagatgagagcaagtagtaggaaatgaggtcacagatggttttagggacagattatataagtacgatggtaattcaaatgaaaaatgttagaaattttgagcaaatgagcgacacaactggtttatgtttaaatgggtgtgtgtatgtgggtgagcttgtgtgtaggtgtgagcatgtgtgtatgcttctgtctctatgtcatttcccatggtgtttgaagcacaggaaagtgataagagaaaaatgtgaaaagctaaataatttgagaatgattcttgggacaatgcaa

SEQ ID NO: 66725 - DNA, 1052 bp, Homo sapiens
tggaattgtacaagaatagcggattcatgaaatggcaattcatgaagcttgagtggtaaagaagagtgagcagaagaggaagtgggagaagttggaagggacaatttaaagaaaattatttaagtgaaaggcaagataagatttctgctttttaaatactgtcctcctaggaacatacactgattaacatgaaatgattaaagactaaataaaaactaaagtcttgttgatgaccttgactgtacaaggattccagagaagggcaaccaagaagctttacctaggaggccaagcttgagaacctttgaaagatgagaaagtttaatcagtcaaagaaaggatggcattgtatacatagatttatagaacctcagtgaccataattcatttgagactgttttccatagtcattacagagaactggcttcataaaattctgaacacttctgagattattcttaaatttcttatgtatataatttataatatccagcgaggtcataaataccctaaagcctatgctgtttcttctctttcttttgtactgcccaaatgtgcctgtacagtgctgtaagctaacaatttcctgtaaatacttattaattgactatacaatcaccttgtaagatattaataataatagcatctacttacacagttactatgtctcagggagattcattcataacatttatgtggcttgaaacaaaagttcaaatggaagtcatataccaaatattttaaagttctaaaacaagctaacaaaccgtcactgaatatatttaatcctcctactttaacaaatattttttcaaaatgaacctgcaaatccacgttcaaagtgagactcaactgagtaaactttcagactcttcagaattcctagccataaggaggtagcataggaagaagggacctgagctcctgggctaagaaccacctcgttttcttccctccccatgaagatttcttctgcactgtctcatgactcacatttagagctattgacactttagcacatgcttttaagccacaccatttgaaacccattg

SEQ ID NO: 66726 - DNA, 1025 bp, Homo sapiens
tttactaaaaatggacgcctggcaaccaagtaagttcttccttttccttcttttttcttttcttttcttttcttttttttttttttttttaggttaataaactctctttcttctttagctgtctatgatatatttgaatcaaaatgtggtagtttggtatttcagatagctaacttttaacttttttgctctctacattatagatctagaaaggcaattatcaatttaggagaagtcaacaaacttctaatagcattcatatccaggagaggtgattaactcttttttctttttaggtatcataccgttccactgccaccaaaaggaagggttttaatccattggatgacgctttgtcaaacacaaatgaaattaatggcgattcctctagtctttcagattatgtttggaatattaaatggtctataccattatgcagtatttgaagagacacttgagaaaactatacatgaagagtaaccaaaaaaatgaatggttgctaacttagcaaaatgaagtttctataaagaggactcaggcattgctgaaagagttaaaagtaactgtgaacaaataatttgttctgtgccttttgcctggtatatagcaaatactcaaaaagtattcaataattcaatcaataaatataagtttcatcttacacgtaagatacaggtcttatctcctgatggtgtgtccattttgcctggtatataacagataataaatatccagtgtcaataaatgtaacaataaaagtttcatctttcctctttgtatgtggaaatgggtttgggctttaaggtctcatctgtgcagttatatattcattcattcatcaaacatttattgagctatttctcaggcactgtgttaaatataataagaaacattctggctgggcatggtggctctcgcctgtaatcccagcactttgggaggccagggaaggcggatcacctgaggttaggagtttgagaccagcctggccaacatggcaaaacctcgtctctactaaaagtaca

SEQ ID NO: 66727 - DNA, 1103 bp, Homo sapiens
gtgaaaccctgtctctactaaaaatacaaaaaattagccgggcatggtggtgggcacctgtaatcccagctactcaggaggctgaggcaggagaattgcttgaacccagaaggtggaggttgcagtgagccaagattgcgccagggcactccaacctgggcaacaagagcaaaactccatctcaattaaagaaaaagtatttagaactgctgtgtatgtgcatcttggttggtagaccatactaatatgaattatttgccacattatataggctagcaagatttaatcttaactgcattacagcatacagctacttgatattaataagtatggactaaagctgcaaataacatatactaaggcaaactctttggtgatagtgaagtagaatttacctgtattcaaaggaaaacttacaaaacatctgtaagttaagtctgttgtaagaaaaggtatccctgccattggtaagccagcagctatgcgagcctttgtcacattcaagatgcgtcgaaaaagactgtttgctatgaggccacaaagagcagcatttaatccaacataaaccgatccattttcaagtagattcctgaaagggtgagaagaaagaacttttctttggcattattgtgtgtgtgagctttcccgatcttgacatgtgttataggactttgggaatacactaactggatacgacatctatcccttatagaaccaaaatcttaaaaattgctttatatataggtttttgctcttctcccagcagccagtgggtgcctctcctgagctcccataataattaatacttaacctctctagcacaacacattacaagacagtactatcttatataatcaccgatttacatgtcaggcttctacactagtctttaaacaaccagaagacaatggatacaaagatgtattcagcctgacacagaagatgttcaataatgtggagttaatgtgatttctttcactcttccctgaaacattagtgtcaggattgggagtattaacatttaagcaataccctatgctaggtactttataacaacccattgatgagaaataaactgatgttttcaggtagtggtagaactg

SEQ ID NO: 66728 - DNA, 1014 bp, Homo sapiens
tagatattttttcattttttattcctgtttgtcattatgaagtcttcagtgtaaaatactatatagttactttttcctcttgtgttacagaccaaactcaacgcctaaggtagaacaagcaaggtagaagagacaatactgggcaaactcgtgaagttaaacttgtttaagtgggtagcttttacttagattcagccttttgttgccctgtgtagccttttgttgtaggtcccagaattatacctcgtgataaattacaagtctatgtttatgcataacattagacataacattagacataaactgtttttaccattttatttttgtttacatatttgtttaaaatcagtgaatttctttgccaggttcagataactgaagggcctttataagtagtttatattgttcagacccaaggtatgctgaaaacatagtctggagcaaaataggaaataacatctttctaaagacaggcttagaagttctaatccagtaacttaagatgttccctttgtgtggtaacagagctgattgatacctgtaagaaaacattgagatagttcaatagaaaagattgttgcatcaaatggcaaacccatctgtgatacatattagtcctagaagtcttaagataaaactgaatattaaagtaaaggtcttcagtgtctattaatcctaaaaacttttgtttctttatccagtttgcttcaaggctatagcatagattgctgatgcaagagttcaacagagaatagccagaattattttagaatagaaggctaatataacagctagacattttctgatggaattttcctttagtgcaagtgttcaaactcatccaagataattgtttatatgatagaagtttcatgcataatactgtttgcagctttgtagttagtttagtattcagtacacaaattaaggttaatagcctaactacacaccaagtataactgtttgaaattcttgataagtagaatttcattataagaaaaaacaggtcttgct

SEQ ID NO: 66729 - DNA, 6271 bp, Homo sapiens
caaaggctgttaaacggtatcggaggctgcagcagcagcagtgacagtggcagcgccgaaaagaggcggagaaagtccccaggaggaggcggcggtggcggcagcggtaacgacaacaaccaggcggcgacaaagagtccccggaaggcggcggcggccgctgcccgccttaatcgactgaagaagaaggagtacgtgatggggctggagagtcgagtccggggtctggcagccgagaaccaggagctgcgggccgagaatcgggagctgggcaaacgcgtacaggcactgcaggaggagagtcgctacctacgggcagtcttagccaacgagactggactggctcgcttgctgagccggctgagcggcgtgggactgcggctgaccacctcgctcttcagagactcgcccgccggtgaccacgactacgctctgccggtgggaaagcagaagcaggacctgctggaagaggacgactcggcgggaggagtctgtctccatgtggacaaggataaggtgtcggtggagttctgctcggcgtgcgcccggaaggcgtcgtcttctcttaaaatgtagggtcaagtaatctgctctttatccgcgtttacccctttcaactcccttacaccatgtcaaacttaccttagtgggacatcttcaccggacacatttcagaggagagaaaaaaagtaatattgaatcttaaagtgtttagctaaaagcatgaatgtgacacagtaaccaactcctaatgataacatgtgactattaaatctctctgacagtttcttttttaggtgatttccttcctgccaggctccgttgtaggggttacagaacagtcgttcccgcctcacaacctggtaaggatccatctcttcccgtaacgctcatgctctgctgctttgtctactttaatgggcaacatctcagtttgtgtgtgtgtgatttttttttttttttctgttttggaaggtgggagggaaatctaatttgggccctgtccaccctggaaacagacttgtgctggtcaagaatgtatttaagatgcctcttctggttgaaatagctattaatgtgtccccttattcagacttgcgtgtacctagctcttctgtccccagtgtggacatggccttggatgacatcggttccaactgtacactgaaacctgcttatagagagacagtttggagacagtgaaacaggtgaagttgaatggaagttccgagttgtacaaggtgcaaattggaattccgattttagggcaacttttcagaggttgacagttaagtatttggggcatgcacaaatgtgatagttattttgctggaggtgacaggtatctcttaaatatcaacaatgccttttagttttcagtatgagatatagaaacagtctataatggagtaacattttaatgtctcaccattagagaagttggaaattaacatacatatgagactcctgcgttttagttaattggagaataagaatggctaatgtttctttgaggaccagcagtgattaccctatcactgagattgaataaattgttgaacatctttatttttgttgtattaaaattttaggttaaatttatatatgtatgattagatattgaaggttgtgaaatgtgaatgaaaacgtgtaaagtgaggcttcacaaagaatcttattctctgtgtttcaaaagtatttgtcctattttaaaataattttttaaattgagtggttctggccacttaaatgacacgattggtactattttcctaaggtgggatttattcccttgaatctattaaccagttgtataaattgaattatggtgtccttcagtgtaagaggcattaagaaattctttgtgaaacatcactgcttgataaagtatatacgtatttagcatccttgtttttctttgtgctaaagtggatacagctgttggggcagaagagacgggaccagctgctggccacatttcctgctttattttaaaaggtagtataagaaatgaggaaaaagaggtaatatcagggcttctgctgttttttatttttaacatgttcataattaaaaagtattttccagcagtccaaagatgtaagttatcttacacataaaatgttttattttgttatttggttatgaaaatggaatccttgttcttgcacaactgtaaatgttttgttgctagataatacgatttgagacctgaattggtctttggtttccagtgcatcacagcatattttgtaaaatcatctactactgcacttgagcatgaatgggtagtagccaaactcacaaattggagtgatgaacctgcttatacctaagggcaggagcaagcccctcacaatgcagctgcatgggtttttagtgcctactgaattatatatatatatacatatatatatatatatataaaccaaaagtagttggaaagattatttgaaatgactaatttgtgctatctttatgaaatatgttaaatgtagcttttttgaaacagaagccttgaattgaaatttaactaatacttgaacattttgtatatatttctttgtatataattttgtgcagtaccaatgacaaaaatatggtgtcataataaaaccaggtttgttgatcttttagttatgggctcaaagaatttattcatctctaacatgatattggaaaataatggatgaaaataggaaaaatgattgttaatgctgactgtgggtcttaaaaggttctggaaagcagtaagttcatttttctaaaaactataacattctgttggagtattttcttccttacgtcaatacttttcctgcattatttgaaattgtgggctggggagaaacagtagtcaaagctttctgaattgagatactttgaaattccaagtgtagatttttagaatgtcattttataaatggcagtttttggaattacttgataagaacttttgaaaatggaaggattagtatggcctatttttaaagctgctttgttaggttccttatgttttattaactgtcttttctcagtttccatttcatttttttttttctagttttggtgacttagtgattttgtcattttttacatcaacttcatggtcttgtttttacatggtaattgcatgtacttaggatctatctaataggggctttaaataaatttggtcatatttatgtgtaagcacattttactgtaaatgtttgggtttctgaatttaaacagatctgtttatttcagtatgtagtaaacaatatcttaaagtgtccgattcactacttgttaattaaaaaagttatgattaatgtgaaactgttgtcttactatttttagaaaattgtgttctggatgattagcacatggataaaggagatttctggaatataaaatggattgtttttgaaatttctaggtttggctctatttactgtaatggttgaaaacaatttagtatttgggtgacccttttgtttttcttctaaatgtgcctctggtaaaatacagaactagactaaagatgtagctttttaatatttgtcttttgatggtggcaggagttcatacattaattgaactaacacatcatattttgacctactatttctatcatattgacttactgtttctgcacttctttgaccagacttatcttaaaaagtccacttttgttaaaatgtagtcacacctctgatataatccaacaagaagtgttcaaaatattttaaatatttgtgcattttataatcactaaattaatctctctctcttctctttgaacagcttagcagtgtctgcaaaaacgaatcttttcctacaacctgttaactgactggactgttggtaacaaagtaattgtgagaaccatgtcggtcaaaaatttggcatctgctgaaaaaaatgaatgccattttcaagttcccaaattacttctatactgatttcactttccagaaatggagatatgaaaagattctctggaatccttgaaagacttaatagagatacatgagactaagttaatcttggaacaaaattatactttttttgtctttcatgggagtgatactcagttattgcatatctttacaaaattgtaacctttggagaattacagtatttcatcaagaaattagagtttttacataatcaagagcatattctatggaattaacatttagtggactagaattacataagcaggccatcagtgatcacaaggcatatgagtttgtatttatttcctggaacatgagagctaatttggagtacagacagacaccctgctgagtagaatataaaagttaatgtaaagttctgaactataaagagtagtccttttaaatagatgcattgatttgtatatctttgaaaaagttgattatgattaaatgtgtgggtagttaattacaatttagggtaacaaccaggatgtatggattcttgaggttttggcttcttgagctttctcttgagtacttgatactgttttctgaatattttgaggtttctaattaatggtatgctagtttctactgttttatataaaaatttatctagtgttgtataaggactttagtattgtggatgatgggagtggctttttgtggcatatggttgttttaattgaaatattttttcagtttattacaagtgtgaaaaaacactcaaaactctggattgttttatttcatttttgttggattatgttaatacattccttcacgtggtttagattgagtcattttatctcacttacttggaaatgtgcagctgatagaagagggattgggtaggagattggcttttacttcataataaatatacagttggttattgtattattcaaaacttattaaatccattcagtttcttaccattttaagtgtattcagtgcctgtgaagccaggcagcagagtattcccactggcttaaaacttaggcgctgatgctcctacagtacagctagttataattccagaaccaaaggcaccaacattatttggtgaccttaactactactttgatagaacagactgggtaattcactgataatgagtcattacctttttaatatgtgattatctagttcagcattttgaatgtgtagtttaaggtctgatttagtaaaattttaaagctaaataatctgatgactcttgaaagtttaattggtagtatgacatttatgtttttttcccccagactcacagccaatacaaagttttgagactcctaaatgttaatatttttgctgtttttctgagctgtttttttatttacttaccacctaagctgcggatcaaaaagggaattcttccattagaaatttgtagtgttgtgtggccagcacagtatttttcagatttgaatttcagtacctctgtgtagcctcagtactctcaacaccagtcactctttattgtcttaaaatattccatactttttgttgacccaaaattgttgaaaatattttgctcagttttcacaatgaactaattgaaaagtgtagttactgtgttgtaaacatttgtgtagttctgttaatacactgatttgaattttatttatctcaacttcctttagcgtctgcctccaaattttgtctttgctgtatacccactgagatcaattccctagacccctctggctcttagtgtactataatttgggctttataaaatatattgtcttaatttaaatagaatgtgagccctctttttttttttttaagccaaataactacacaaagtaaattataaaagatttaaatagtttgtctacagtgactagactgaaatataaaaattgattgagggtagtttacttcaggtgttagctacaaatgactaaatgtccttaaataatgcagatatctgccctctgaacaaaaattttggcaaagtaaatttgtagcaacagacttaacatgatttattgcttatgttgcccatttctgctaatggaaaagataatttaaaaatatgtggcagaggacagatattagaaatactttttggttacagaaaccattgtaaactcatcctcatttataaatggtattatgctagggagtaattggactaggaatgtttaaagataagtaaggaaacaatgtgtgctcaatcgtcaaagaacttagttatatcattgggctttgaattatctaagttgattacataattctatattcttaaggagtcttaactcggtacttgggttaacgccagaaattacttttaattcattgtttttttcactggg

SEQ ID NO: 66730 - DNA, 1041 bp, Homo sapiens
atttgaccttcatagcatcatccaacaatatactttgaaaatagtagggtgcaatgttataacaaaaaagtttttgcattctcattggaccatattgtgggacctaatcttacactgctaccagtataactctccctaatacacacacattgttgtttcatgggaagtgattaaagtaggtgtcattttagtgagacaccataaatgcattctgatgtgcatttacctatgggagcctaaggataggtgaaaattgttatgtgagcaaggatatctttagtacgtgtagctaaatttttagtttttccttcattagatttctttaaagatgaatttaatgtttaagcatgaatttgagtcttttgtgttatgtatataaatataatttgatttttacctattttcttaatatctcttataatgataaagtcaatgtatctgtttcattcacaatataatttaagattctttatcatatgatatttattagattagaaaatacttatatagagcttactctgtgctaggcactaagtgccttggaaaatattaacttattcattataagagctgtgattcaccataagaaaagcttagatgttgtgattcttagaaaaagaagaaaatagttttctaactaggtgtatgcaaattaggattataatttatcctcttcttgtaccttctacacatatactttctatatcagaaagaagacatatgctacattttcttattaaattcttagagtaccctaactttaaccattctaactttgccttgggatattgaaaattctgaatcagtgaggtatctaaataatttatattttcaaaaaataatgtttattttataattctgagtgtaaaacactatcagaaaagtaatcctcatgctcactaaacaaacctactctaagacactcaacaaccagaacagttttattattgagttgtgtacaaaaatcttgactgtccagatgaaatagtttttcagcctgcagtgtgttagtgatatatctcaaggagatgaaccaataaa

SEQ ID NO: 66731 - DNA, 1030 bp, Homo sapiens
atgtttgataagtgttatccatattttacccattttatatgtaggaatcagaaatcagaaaaggagctgggtgcagtggctcacacctgttattccagtaatttgggaggctgaggtacatgatcacttgagcccaggagttcaagaccagcctgggcaacatggtgaaacgctatctgtaccaaaaatacaaaaattagccaggtatatgcctatagtcccagctacttgggagactgaagtggtaggatcacccgagtccaggatgttgaggctgcagtgagctgggatcatgccactgcatactccaccctgggtgacagagtgagaccctgtttaaaaaaaaaaggaacttgcccagatgagtaagttaacagatggaaatcaaatctttgctttcatggtccattgttctctctgtgacctgctgtcacgtaattcatatatatatactgacatggagattgtttccctctgcaatctagactgatggccactctttattcccagtggtctttagtgaagtacatttcctgcctcctcctctgatgcccagacatcgttgacaaggaagaatgcaaacatgcgacaagagcaactttaaccaaaatataatgagtgaagtaaatcagctattgattacataattacatcaggctgtaaactcatacatgctcatgtcattttactatccagttagcaagtagctattggctgagataagagagaagattgtaagcagaggacaactgtacctgtcccaaatcgttttcaaaattatttgcctttgatttaacatctatcagcattcagcattttttaaaaggtatccctttcttaacaagtgactatgagaatacatatttaggaagaggacttccttatgttagcctaggaatcttctgcttttccagaagccaacaaaatgtgacttatgagaaataggccttaatgggatgtttttcttgaactaaaaataatttcaaggttcttctcatttatcgtaactcacaaacacgcttccaaactc

SEQ ID NO: 66732 - DNA, 2258 bp, Homo sapiens
gggttgcttgagcccaggagttccaatgagctttttttttttttttttttttttgagatggagtttcgctcttgtctcccaggctggagtgcagtggcacgatctcagctcactgcaacctccacctcctgggttcaagccattctcctgcctcagcctcccgagtagctaggattacaggcgcccgccaccacgcctggctaatttttgtatttttagtagagacggggtttcaccatattggccaggccagtctcgaactctcgaactcacctcaggtgatctgcccacctcagcctcccagagtgctgggattacaggtgtgagctatggtgcccagccattgagctttgatcatgccactgcaatccagcctagacagcagagcaagactctgtctcaaaaacaacaacaaaaaacattatttggaagtccctatatgtgtcaaatattgagctttctggcacataagttgataatactgactttgttttataaacagggtttgtgataagcatgttgtgaacacttctgggccagttaaatggtaaagaccacaaagcatttttatttatgagaagacatcctacaatacaatgaattaacatacccactttttttttccagatacagtttatgtaacttgatggaagaaaatggaattactccaaaaagacaagtgctcaagcagcaaaatccttacttccagcaaaatccaaactgctgtctcttaaatctcttaaactctcttcttccattagaatgctacaagtaactcagtgaaggcccatgaaggaaattgggactagtttataggagaacgtatcaatacagtttataaagccaagaattgctatgatttaagactaagatctgtctttttggtgactaacccttcaattctttcaactcctgttaatacccataatcagtaacctatcaagaaaagcccttatttggaaagtgtgaaatttgtatttggaaaagctgcctggagagaagaactgtgtcctttactgtatttcaacaggactcttttgggggatcaaaattaaaattcctaattatgcattatctttcttttctccagtcctcacaaatacagaaacaataactgaaattaacttttctttttttaaaaaaaattatattcagtttgcagtagacattccttaagtatttgtatttatttatgattatcaattttacataacattaatattgtatcagacctccttatgaaaatgagtatggatgtgcacagtatgtttgatttttatccacaagaatgaatctgattcagaatgcttttctcagctgacatacagagcactaaatattttaaggcaagtccataggtctgaatctcttaagaattctcggcctctgtgggatttagggaagcattataaatgcattaatccttatagtcaattctgtgcctaggattttgccagggaacagttcactgactaggaaaagcactacattttaaattcagcattagtgcattgggaaggatctttactgctttgtgcttggcatgtcattattttccatttgacattagggcctttccaaaatgaatgtgaggaattgctttcacttcaagactttccttcttttcactaaaactctagaaggtgttacaagggggagggaaggggggcaaagtccttgaacattttctttggctcgtgccatgttatgatcatataccttttaaataaggggaaatagtatctttaaagttaatgtctagccaagagtttagtaaacgaagaattaaactgcactgttgatcggtgctttgtgtaaatacatctttaacatttgggtggagaggggccttaagaaggacagttcattgtaggaaagcaattctgtacatgagtttaagcattcttgttgcattgtctctgcagattctatttttgtttacaatattaaaatgtatgttagcaaaatgggtggattttcaaataaaatgcagcttccacaaaagttttgttatggtattctggtctgagatgcattttcatttttcctttctctttttattatcaatattgtcatttttccctaataaaatatacccaggtgattatatttgttgatctaataacatggaaggtttgttttatatgaattttcaaaaagatgtctctttacactttttgttaccttgtagactcttattgataaatgcaactacttattaaaattgttcactttttgtcttttgatcagatgccttt

SEQ ID NO: 66733 - DNA, 1075 bp, Homo sapiens
ctcattttgtaatagtcctgtgcttatatgctttgcaatcttatacagagggagaaaaagaattaaaagcttgttccaaagtaaaaaggttcatgtcgggtttgaaacgctcatgtcagcttaatgaaggatacatgtatgaaaattaatatcttggttcttcaggaatagtctgtgtttgggagaataaagatacatactgaattcagttgtttacttgccttacagtatattcgaattaaacaataggacagattctaagaatcaagtaaatttgtccaaacaggaagcagaatcaaagatcttaagtattccccatattcagggcagtatgtggacagttacagtaggtgacctctaaggtccctttcacctcccacagtacgtgtgtcagctgcagttcgtcaagataaatgagcaggagacaacttcgtgtaaaaagtgtgtgaacctaggacaggacttttcgacccttatgaagaaagaaaggaaagaatattgcagctagatgtgttgggtccggactgaggtcagagttgcacagctttggacagatagcctggacacaggaaaccatgttctctcaattttaaacaaaaatgcaattatgtattccctcccctatccccccaccaccccccatacacacattaaaattcttaaccatgggtcagcttatatcgaccttttgggtaaaagacattattcctttgaaacttcagaagcacgagtttgttttctgaaaaacacatgccattgcataccttttaacttgacatatgactgaaacttttgtcttaacaatccattttctacaaagactgcccttatatttattaaagatgacaaaaccaaaaccacttcttctttcatacattttctgctttcatgttctgtcattctgagatctttttttctttccctctctctgtcttcttttcccccagctgtcggcagcatccagcccctccagtcacagtcctcacagagcttcaggaaaggacccctttgcagagctctctttggaggatttcttataaatcactttaggtattgctacttgttttgggagatg

SEQ ID NO: 66734 - DNA, 1043 bp, Homo sapiens
tccttatatgaaaaattcccactgatcacatatcaatctgcctattttcccagaagcaatatgaaaaatacagagtattacctttgggcatttaattttaaaattaactgttggtttcttttttgttgtttttgtttgtttgttttgtttttttgagacagggtctcactctgtcccccaggctggagtgcaatggcacaatcatggctcactgtagcctcagcctccagggtagctaagactgcaggcacacaccacaatgcctgactaatttttaattttttgtagagcaagcatacatcagactggtcttgaactcctgatctcaagcagtcctcccaccttggcttccaaaagtgctgggattataggcatgagccactgctcctggccaagttttgttggtttcttgactggtattaggcctttttttaaaggaggactgccagttttgtttatggaggatatggttaaagatgcaaaatggctgctgttttttgttgtttgcagtggctaattttaaatcagtctgacatcagttaagtgtctgaaaggaaatgatggcttgttgtgagtgctttttatccttctaaatgggaacactgttgcctttagatattcgaataatttaagtcttagaaaaagccttttaaagtactttcttgtatttaagaactagtggctgcttttaggtttcgttttggttttgttttttggttttgttgttgttgttttattctcttggtgtgttaattgtgagtattggcagtacctcctctgtcagccgatctctccagctggatttctgtgaagaaggctttttgccttgtaagcaatgtgttgtgctcattcatccttgcctactgcagaataccatgagggacgtttccttggggattgggatgtagtaccataggtgaaaactagctcctagtacacacacctgaatcattcgaaatagaaatgttagaagtctcatctgctgatcactattgctaacaagacaacttatagaataagaccttgcttattactaggttttt

SEQ ID NO: 66735 - DNA, 1072 bp, Homo sapiens
acagtattctgtttgtgcattatttttacactaggtattgtcacttactaggttaattttataccctgtagtggtaatttttaaagaaacatatttggttgagattgtattttcagttactcaagaaagagttaacctctggtttgtagtttaagctctttcttgattcttatatgaaataaaatggaagaactagagcaggcttattcagagaatcaactgtcttcacttgtgatcacttgcataatggcaaaagtacttgatttgttatacaaatttactttgaaatttcttagcagcgaagacagagtcttaagttttcttgatgtctaaacctgataaatttggaaactcttagtcttaatcattttatctgttgtaatacaataaagtttacattttgcaactcattgaatagaaaaagttaggctttgttactacattttaaaaatgagcatgttaaagactttacttaccaaaagaaaaaaaaatactctcgaaagtttgtagctgttagtcttacttatattcagaggaagttaccctttgagtcaagcaaaggtactaggacctgtcatccctgttgtcattgttatttacttagtcacaataaggaagataggagtcagtatcttttgatatttttctcttttttagcctccacaaatgggaagtgttcctgtaatgacgcaaccaaccttaatatacagccagcctgtcatgagacctccaaacccctttggccctgtatcaggagcacaggtattacacactacatgtaactgtggtaatgtgtttgatttggaaggaatatgatactataaaacccttttgtacaacttgagaaacaagttactagcactttctaccttcattatggatattgcttgcttcatatctttcttatataagagctttaggaatattgattatttggagggaaaggataagtagatagcaaatactaaagacagaaaattcttggtaacttatagttggtagatccaaaggatgatttttctgagattaaggagcctacttgctcttcgtgattctggtgtagtatcctttg

SEQ ID NO: 66736 - DNA, 1045 bp, Homo sapiens
aaatgctctctgtgtattttctgttgtgtaagtacttgttctaatccagtgttattgcattatgtaattgttctccctgggaaaaacagaatggcatgcattttccacaatacgtaagtgaccaaaaacgagcctttttgcaataaattggcatgctattaaccactgctgtagcagaatctcataacctttcagctattacttgttttcacattcagattttcaatgtgccagaaattcttcctagcatctactgatttcatgggtgtgttgcagaattgattctgatggtggcatgggaaataccgattttttttcttgcttaatattccgccatttgctgccagatggctgggtgtctgtgtgtgtatctgtgctgccactatgcacttgatgacttctgaatgaagggaaatgttgattgtggtaatgtttaaaataacaactgcatgaaatcttacaggcttctgctcttcttggcagtttgtctactgctcttgcagatcttggttttaagtagggagagaccaataagtcctacacgctcacccgaatactaaacttataactattcactttagtgttatttttttaaagttatatttcatttaatttctccatgcatatgttcaaattgccatataatttcagttattttatgttttagcagtgttattggtctttcacctttattcaatttcagttttcattatgagaaacacacacaggaaatgttgttaagacagcaactatatctaaaatgattctgttctcaaattgtatgtttacagataatcaaagtagtaggaagaggggaacttaaacatcatagtgatagatggttcttttaaacatgaaagcataaactgacctaattgattgttcctcttaaataatttttggaataaattagaaagctaacgtacatactctatataagaactatggctcatagaaatagtcatactcaatagtagtttgaaacctttggagttttttgaaaagagtgagtaagatccttagaaactaactttttggaagatca

SEQ ID NO: 66737 - DNA, 1111 bp, Homo sapiens
gttcattgccatcactaattttattattttgtattttttttttttttgtgacggagtcttgctcttttgcccaggctacattgcagtggcgcgacctcagctcactgcaacctctgcctcccaggttcaagtgattctcctgccttagcctcccgagtagctgggattacaggtgcccaccaccaggtccagctaatttttaaatttttagtagagactgggttttattatgttggccaggctggtcttgaactgctgacctcaagtgatccacccgcctcagcctcccagagtgctgggattacaggcctgagctaccacgcccagcctatcatcactgattttaaaactttgcatttaagtagtttagatttttatacacacaaatacacaatcttaaacatgtaaatgttgctgtcttgagggaattggagcatgtatcaccccacttctaaagattttttttttccctaagtgcaaagcagttgaaaagcagatttaagttgaaatccatctctttgactctgaatccagtcttcttcccactataacacacctcactgactagggtatggtaggagtttagagtagtggattttatggactcgtgtgaattatgacattgatgatgtatgaggaatgatataaataccagtgctgctattaaaatataatgaatattttcttatattaagttagtattaatctatatgaagtattaggagttcatagatagcacttaagactgactactaaaatgtagtaggtatttagtcatgtagaatttgtatttaagttgataaggtaacagtctttatcttgctgtgttatatatggtaatgtgtatcatctcctaaggattttgcttaaatatttatatgtattttatggagttttctttttaatggctaatgtttggggctgataatgtgattcactacttaagataaactgctgcttttgacatttctttacatttctaacctttttattaatccttaaacactgtcaaggtttttcagtgttttttaaatttaacacaaattcattggaattttattaaaatatatattatactacaaattcttttaattagtgcttgctttttttc

SEQ ID NO: 66738 - DNA, 1050 bp, Homo sapiens
tctccatgtgttatttggagggttgatttggctttcctctcaaaaatatgtgtagagatatcaagtctgcatcttttttttttttttttgacacggagtctcgctctgttgctcaggctggagtacagtggcgcaatctcggcccactgcaagctccgcctcccggattcacgccgttcttctgcctcagcctctcaagtagctggactacaggcacccaccaccatgcctggctaatttttttgtatttttagtagagacggggtttcgccgtgttagccaggttggtctcaatctcctgacctcaagtgatttgtccaccttggcctcccaaagtgctgggattacaggcatgagccaccacgcccagcctcaagtctctatcttactctgttctatataagtatatagctaaggaaactttataattagagacatttaatattctcacttatgtttatttaaagtgatgtaaattggagtcaaccaggtgaaaagaagttaactgggggatctaactggcaaccaaaggttgcaccaacaaccgcttggaatgctgcaacaatggtgagttgaaaaagctcctgatagactaacagttgaataatttagttaaatatgtaacatgaaaatgtttttaaagtgatagacataaatagaaggattgttactgagtttagaagtataagtaattgtatttctttcaaaggaagctggttgcctatatttaccagatacattttagtggctaacaagtatttaagggttactttgtgccagacatattccagtaaataataatgttttattttttataatcctcctattaatgtgttagtcactattattatccctattttacagatgaggaagtggaggctcagagttattaagcaatgtgctcaggattacagagatcttaaatgatgagttgaatttttataacctaggcagcctaactatagaacatatgtccttaatcactactctatattactgacctcaaattttttatttatttttctaaaatacaaaatcttgtgatttcat

SEQ ID NO: 66739 - DNA, 2463 bp, Homo sapiens
ttcagcctagacaacacagcgagttcgactctgtctcaaaaaaaaaaaaaacaaaacacacccagaactttcagcctaactggccaactgtaagcttaatgcaactcctttcttatgcaagaagaagctagagtggccatcagtatatatattagctaaaatatatatatatttttagtactaaaaaccaatgtccttgttggctcatgcctgtaatcccagcactttgggaggccaaggcaggaggattgcttgagtccaggcaggtgttcaagactagcgttggtatcatagcatctctacaaaaattaaattagccaggcatggtggcacatgcctgtagtctcagctactcggaaggctgaggtgggagcatcacttgagcccaggagtttgaggctacagtgagctctgattgtaccactgcagtctgcctgggcaacagagcaagacccactctcaaaaagaagaaaacaaaaaaacccaccgtgcccccctgcaacttcttgtaactatttaactattttctagtttctatttctgaattactgttttctgattcttttttcccagtgttccatttattgggggtggaatgatgggaaagatttcgagtttgaatagcataatcagcatattttgatagatttgtaggacttttttttttttagtgtgaattgatgttccataagaatactatatagaaaagttcttactacagaaaaagttgtatttaaaagatgtgttgtttttaaaatcataacctgagtattttcttgatttttttttttcctttttcagacagttgtatttgagcttgtagaatgcttgccttgaattttttgactttaaaggaagtgtgcctatatcatagtaaatgagctggtccttaggccactgttgccttcttaatgttcaatcatacaatcttaagagtaaaatacagtacctagtactatgaagataccacagtatatttcagtgaaggtcaagaactaaactagaacagacaagaagattccactgttgagaattacaggagtatcctcttattttaattatgttacaaagaaaaaattatactatttttgctgctttttattttttctttccccatttagttagctctttaaatcttgagaagtaaggaaaaatagatttcagtcattagaatgataattatcttgaataaggtatcagtataataattatctgactctagaataactttagataaaggatttgatataatacatatttatatcattctagtaggcaaacaacacttttgttgttcctttagcaattcatttaaagactaaagctcttagatagacattcaaaggtgttcgcagtctattaagtggacattctttcatctctgttcttaattatctaaaattctttcccccatccttagatttttttcttcatctttattttttattttgaatctatgcaggaattatctgcacatgccaaaaacagcttcttagccctaatttgtcattaccctctttttttctttgaaagtttactcacaacacacataccaattgtcaatatcaattattcaagtaaacacagctataccaccacgaccagcacactcacctaggacagggaagattggtgcaagatgggtggctctttatagaaacatcttggttattattccattttttaactacctgactgttggctttgtggtgttaacaaataaaaggattttttctaaggattcacttaaaaatatattaaatgcaattcttctatcttgatgattaggtattttttgtttttgataatttagatatttaagattaataaacaataatatagttactacttttcactttgcatcttttgactaattacaatactaatttatttacttcctttcttcattttgctataatacatttggactgcacagatcctttctctgctactgtagatgctgttgatgatgccattccaagcttaaatcctttcctcacaaaaagtagtggtgatgttcacctttccatttcttcagatgtatctacttttactactaggacacctactcatgaaatgtttgttggtaaagtaccatttaacctttttttccaatcaatgtttatactgcctaactatattttacgtgtccattaattattttaaaagcactgcaatagttactttagattttaatatcaaattctaaaactaaccagccataatgtagtgaggtttttaaattgacactggtatcccaattttatttatacagacttttaggaaaatttctcttgatgttgaactttttttttttttttttttttggtgtttggttctctgtcgtgttatagtgcaatactctagctgtctagtatcacatgcagcttcctgttttagtttggagaactggttgaaaagtaacatcacttaaacttacatgtttatatgtgattatatttt

SEQ ID NO: 66740 - DNA, 1050 bp, Homo sapiens
gatgttgttataggtgaaacatacctagacttacgttacgtgttactggtatgcatgttttggtgttcctgtggcactgccgaaacgtaggctgtaaattagcagagggttttccctgtgataaactcaacactttttcccatcagggattttgtgggattatgtgggctctttcccaattgcactggtttcctctcttggggcttggaagaggcaatgtgccccactctgttgtgaaccctttccaaagtcaaacacttactctgaaagcagtgagtgtatattaagtcaagatttttctaattgctttaatcctgtagatcactaggtagaatatttcatctgaagtactggatttgaatccagaagttaagtttataattatagtgcctatccatggcaaggttgccagaccatttcatgacctgggtgtaatgtgaagtgtttagcaaaaagccaaattatctctgttcaattatcctagggcaactacactttccaatgcagtgtcttccctggcaagcactggtctatctctgaccaaagtggatgaaagggaaaagcaggcagcattagaggaagaacaggcacgtttgaaagctttaaaggtaagtttgtgcattctccttatttcgaaaaatgagtacaggtgttcattaggtaaatggggcctctgcacagacttagagtcttaaatgtatagctacctaatgggctgaaactcagtctaacttttcgtcctgacatagaattaggtaaaacagaatatctgctatcagaacaaattagaaaatgcttttttcagaggctgtacaaagaaatctggtttctggaatccttatggtagttccctttcttaacaggaacagcgcctaaaagaacttgcaaagaaacctcatacctctttaacaactgcagcctctcctgtatccacctcagcaggagggataatgactgcaccagccattgacatattttctacccctagttcttctaacaggtaggagtagaagttaaggttacctttgaatatgtaggttcaaagacttc

SEQ ID NO: 66741 - DNA, 1042 bp, Homo sapiens
ttttctatgtatacattaaacttaaatgaactttctgagtgacatttgggcatggtaaagttgttatcttagataatatactattagtaagattggaaatagatgttagtgctgttttaaatggggtcaagtgtggtacgtgtttacacacaaatatgtacttaggtaattgtgaggaaaagtactatggcacaaactaggaatatgagtagggtcaagtaatgtttctttttttagtataatagcacctctattctaatttgctttaaatacctaagctaacttaacactgatatttttctagtagggtatgtatgctcctttagagacctatttggagctattacctactttttttttccttttttgggtgttatattttgatgtgaacaaaagaatttttacatttattttgtcagaaaaatattttgatatgaaaaagaaccaatgcaaagaaggtcttgacatctataagaagttcctaactaggatgacaagaatctcagagttcctcaaagttgcagaggtaaactgtctttaagtgactgtctcctaacttgcctttttgtctgtaagtatggattttgaagtcatcactcactatccaaataaaataaatgtcttcaatttagtattcaatcattattatgctgtattgaattctgtggcaagatatgaatatgataaagtagtgaataaaatacatgctgtaaatttaattcaatagcgagtattgaaaagttacctgtttttacattgtttacttctctataaaattaagtaggtgacatacagtagtgccagagatttttatggttggaatgaaccatatatttgagaatgtttattgttaaatgtggtagagaatatccagtatcagtgcaggtttctttccagtgagacagctggagccatagttcaaaatgttttcgttggctgggcaccgtggctcagacctgtaatcccagcattttgggaagctgaggtgggtggatcacctgaggtcaggagttcaagactggccaacatggcaaaatcccgt

SEQ ID NO: 66742 - DNA, 1027 bp, Homo sapiens
cagagctctaagactttgttaactcttggcctacagagtgtttaactgttttttgacttgaggcaaatgattattttatttgtaattttaaaaaatggtaaaactgctctttacacaccaatgattgtgaggatcagatcatttcatcttgtgaaaatacaagctatagaccttgctgtataatgtatacttttgcttttatggctcatgctttatgttcttttttagttctaaatgagtaccttgatatttgacatattgtgttgcctgtttttgttttttctgtatgatctctgcttcagttttcatgttccataatgacttaaaaatatgtgacatttcatagcaacttggttctctgttttagtagaaaaccagggggggagtttgaaatgtagatttaattgcagattcatttgtttatttctctggttttttcataacagggctgatggagttatgagaacaatgaacacagaaaaactcctaaaaactgtaccaattattcagaatcagatggatgcacttcttgattttaatgtgagttatgcttttgtaatttaagattttaaaaaattaggtcattataattcatgagaatttttaacctcaagttttcacagactctagtttttcacatcctgatatcctatatggctaaggattttttataaaatagtctcaagtcaaattactttctgatttttatgactgttttggatttatttctttagtgcttctctagctctagaattttaagatatacaagctaaagtggtgaaaggattgatctgaaaatatattttcttttgataatggcttttagatcttgaaaatgtacagggatattttttaaataaatagccaacttaatattttacttttgtctatttaatgggactcaaagcatggcaattattcagaagaagaagtttaaatagcagttataatagcttattatgtagctattgcccaagggcattgtgttcgctggaatttttgttttaatgaccatgacttgaaccaa

SEQ ID NO: 66743 - DNA, 2140 bp, Homo sapiens
ttcagcctcctgagcagctgggattacagatgtgcaccaccacgcctggctaatatttttattcttaaatattttgtagagatgggctcttgctctgttgaccaggttggtcttgaactcttggtctaaagcgatcctcctaagcctcccaaagtgctgggattacaggcatgagccaccacacctggcctctttttgaaatcttaaacagaagccagatatatattatagataaaaatggagtgtctctattttcaggggcatggaagaaactgcctactcatcctttaattttcacttcctccctcattcagttcattttaactttaaaagtctatggaaaacaagatgcagagcagtgctctaggcagagtttatgcatatatccaagtaggttttttgtgtcttattagcgactgatttatcattttcttaagatggaaattaagcaattctagtggtaaggtgttaataatttcactctttttatgtagacgagaggttgagccttgaaggatgagaggtgtttaccgtcttaggatggggtatagtagatagaaccatatgaaccgaagagctgaggaatgtgagcatgtaacacctgacgtgtacagtagtaggtatgaagtcatatgggagcagtatttttttttctattttgttcactgatttttctccactggtacttaataggcactcaataaatattttgctaaataaatgaactggtgatgttgaaatccagttagtttacattttggttggttttggtattgtcttttaaaggtagcaaagaccaagtaattaaatttgttagatgaatatgagataaaatgggttcacttttcaatgaggagcaaaaatttatagacttccttgagccaggtaataactaaaacacaaagtttttggtgtttttagaaaataatattgattagattttatgttgctaaagttttcaagtcaaggtcatgatgaaacaaaatcttagaatgatttatgtattcatttagaaagtttcattgaaaacattcatataattgtttttgttacaccctgaacttgcatgttgccatttcttatattacacagtaattttttatactttttataaggttggcacatacaagttatggttctaaatacagctaaagattttaggagtataaaaattatataaagttgcttgatttgaggaatgggattgtggttccataggatgttaaatttgagttgtgagattatcaagttgtgtaaaagaacgtttttctaattcctgatgaataaagaataggaatattgagagaatagtgaagttctaagggaagaggttttttttttaaaactacataggacttatctgatttaaatatgaagccttaagagaatttaatggtaatgttattaattagttacttaatttacatactaaattgaattgggatatcaagacattttatagccattggatgcaatgagttgtttttctaggcatattgggatttttagtcatttataaaaacttgtctctctctttgttttgtttttgtttttgtttttttacaggatatgacatgtctacatttattaggcggtatagtagatatttaaatgagaaagcagtttcatacagacaagttgcatttgatttcacaaaagtgaagagagggtgagttaagctttttttgacatctaattgatttgaatttttaaaaatgtaaaacataggagttactagattatgaattatgaaattttagccagttttaaaagatgagcctcatttttctttgatgaggtatatcaagtactttttgtggtaggatttgtttttaagttctttttatagcacctttattgagatatcattcacataacaaaatttatcattttaaagtgtgtaattcattggtttttagtgtatttacaaagttgtccaacatcaccactaatttcagaacatttttatcacctccacaaagaaactctatacctattagcattcatttcctattccctcttcccctagatcctggcaaccatgaatctactttctgtgtctctgggcttgtctattctgaacatttcatataaatgaaattatacaatatgtgacctttgtgtagcatgatatgtccaa

SEQ ID NO: 66744 - DNA, 2359 bp, Homo sapiens
ttaataaattctcgcatgctagtgaaaaatatgtattatgtttttaggtttggtaactagttaatggaaagagtgaggatgagaaatttaaactagataagcttaatagaatgtgttaaccataacttttcctcctaattttcgaattagagttggtgagatggcagtaccttaatatgatgtaattttttttttccagcgttttattcagtatttggcttcaagaaacacgttgtttaacttaagcaattttttggataaaagtggattgcaaggtaaagataacttttacattatagaaaatcaaaagaatgacacccacatgatgattactccagagtagaactctgtcttttagaacatgtgctactttaaaccttatattttagtgaaggttgtaggaaagaaaaaactgtcttttaatttgaagattaataataatcttcctaccagatactcagagctctctgagacggagtacagagtagttatttgagagcatgaattctggagctggactgtctaggtttgaatctcatctttgctgcctaccagctatatgaacttgggcaggttacttcacctctgcatcagtagaatcgagtaatagtgatagtacctacccagtaagattgtcatgagacttaacctagttaattactacaaagtgcttagaacagtgcctggcacacaagacatgctatgtaaggctgggtacggtggctcatgcctgttattgcagcactttgggaggctgaggcgggtgggtcacttgaggtcaagtgttcaagaccagcctggccaacatggtgaaaccccgtctctactaaaaatacaaaaattagccgggattggtggtgcacacctgtaatcccagctactcaggaggctgaggcaggagaatcgcttgaacccaggaggcgaaggttgcagtgagccaagatcatgccactgcactccagcctgggtgacaaagctagactctgtctcaaaaaaacaaacaaaaaaagaaatgctatgtaatatttgctttcattgttattatattatgtttcattccaagaaatgtagttgaaatattacatgttttagtagctaaagtggatataatttgttgagatgaattgttccttcatattcgtagctattttcttatttatgtttttttgagacgaagtctcgttctgtcaccaggctggagtgcagtggcatgatcttggctcactgcaacctccgcctcccgggttcaagcgattctcctgcctcagcctcccgagtagctgggactacccgcgcatgtcaccacgcccagctactttgtgtatctttagtagagatggggtttcaccatgttggccaggatggtctgcatctcttgacctcatgatctgcttgcctcggcctcccaaagtgctgggattacaggcgtgagccaccacacccggcctgctattttttatttagtaacttgaaatggacataatgtggttatagctgtccatgcacattgtcttaatgggatctgttttacttagttctgtaactaggctgttagcattatagaatgttagctttagggagaacctcataaaggatatgccaaatgaattgggaatattcaacagtgaggctcaatcagggaaatgtctttagagaaggtgagatttgtgctgggcttcaagagaaggatgagaagatgagttggcttaagcacaggtacaatacatgaatgtgaaagtaaggacagatacacagatgtatatggatgtgaaagtcattcacatggatatgagtatttaagatttacagagcaaatgaatgtgaatagaatatatatgaatggtgtatttgagaacatgtagtggcagatagccctcaagaagctgttcagagccaaaatcaagcacaaaaattttttatagagttggaattttataatgcagtagagagaggaggggagagggaattatgtgttaccaggaaagcatcatagcttagtcaagttagatcagagtaaaccaaatcttgaagatgctgagactgtttcagttgttctggttatctagtgtagagttaatcagggcctgaactgtggttcttctggaggtgtaaaaaaaaaaaaagatcaggggaatttttttttttttttaatgtgactggctgtatttgagtttggaggtgttcagtccaatacttgtttccctttggtaagtgcaggtattgcttaaaaagaatttaataccctatcttccagacattctagaagaccagtaatctatatgtaggacccatgttacaaaatgcattatattttaacaagagttacggcgctctaacttaaggaaaaaaaattaaaaca

SEQ ID NO: 66745 - DNA, 1026 bp, Homo sapiens
cgtgcccagccgtatctccagttttctagatgactgaataaatcaattttaggttgtaaatttatgagggcaggtgtaaaaaagaagttctcgttcaaaatgacctttttgaaagggattactaaattttatatgtattactgtgtttggctaagtgattgtggtatgttgatttaaaaacaaacaaacaaatactggtttaggccaggcttcttttttagaaaatcttattcgggtatcagtgtggttttgatgtagcctagtgagttgctgtttagatgggaacttgagaactctgcattctgatggcacaggccactggctgggttgcctgacttgctgtagaagtgaaccctgagtgtcctaatttaagtttctaaagttgatgaactctgcctggggaaatctatataggctgaagttggtgaactctgcctggtgggagagtttgtaaaggcctacactaggaatatgactgtaagattaatgaaaccatttggtaactgcttagttctaaattttttgtactttgttaaaaaaaaaaaaagacttcctcagaatacaaaaatactgttttgcatttcactgtttttctattgtttttgtttttaattagttttcagtcgagaacgtgtattaaattggctagttgagcatttacttgctgtatgttttagtggatccttatcctttgcaaaaatttaattctagtcattaatctgtcacttagctcctgtgaccttgcctgtgtaaatacagttaacatcagctttatctacctcagtcattgtttgttgaaagagcatatgaaataataaaagagcatttgtgtttgtatggtgggtattggttccttctgctttctctacatggaaaagtgattgtcatttctatggtaggcttatttttaggcctattgtcttcatccccttaaatattggaaatctttgtaaattctcactcatacctaaagcagagaacctacgtgccatgtggtacttgttttttttttagtgtgtgtgggat

SEQ ID NO: 66746 - DNA, 1046 bp, Homo sapiens
tttctgagtgagggagcctctggcagagagtctaactgcaatccattattccctgtgactgggcagaatttaaaaatttttaagagaagagatgaaaaatcttctggattcctacttaatttagacatgggtttggctcttaacgaaaaactttaacctacctacagggaaggctttttcgctgttacccttacttctgtctcctggatcttatgagtggagaaatgagcctttgtttcacttacaaatccacaaatatttatgctgtcatatgaacacatgtataaggcgctgtgtcacattgtggaagatacaaagagacaggattcctgagaatttaacaaagttaagaatgagtgttattaattaaaacaaaaatgggacatttaggttatagttgagaccatgttcttgttttttaaacgtgagatgtttttggacacagaggtgaaaaattctaatgtctctaactcccccagaagaccttagattgatttttctgagaagaaatttgtgaatgatttgcatagagattttctttgaggttaagaaattagatgagtttcccggggtgaaaaaaacagaagcagagattattgttaaaaatggtcatgggtagaggggttagagggcaaagtaggcagaatagaagcatgtttgtgttttaaggaggctaagaactagaatatagcactcataaaaggaaaatgcaaatgcactgtgaatagctgctactggtagtgtattaatttcttagctacatgtaaacttttattagtgtgcttataactaaggtgatgtgtaatatgtcatccaaacttgggtcacttttaagagtgaaagggtgtgctatctgaatgggaccctggacaacaggtgtgaaccaggactgttccagcaaaaccaggacggttggtcattcctaactaataacgtacttttctccagacttagtcccaattcctttaacctctccagaattatctataaataattatagatattataccataaatgttttttcctttatagtactctgatctgca

SEQ ID NO: 66747 - DNA, 1729 bp, Homo sapiens
tttttcttttctttttgagatggagtctcactctgttacgcaggctggagtgcagtgtcgcgatgtcagctcactgcaacctctgcctcccaggttcaagtgattctcctgcttcagcctcccaagtagctgggactgtgagtgcacgctaccatgcctggctaatttttgtatttttagtagagatggggtttcaccatgttggccagactggtcaggaactcctgacttcaagtgatccgcccacctccatctcccaaagtgctgggattacaggagtgagccaccactttatcttaagataaattttccatatgcttcaagaggagtaagctctaactggaatgtagggtactgaccctagctccatatgacctcacaaaaatctgttactaaaatagtttattttctaaattaccttcttactctgttattctgtgatgctataattgtgctcctttagctttttttgttgtaggcttggtcctttggaaacgaataccagaaacagtttctctctgagcctttgcttcattctccatcagagtattctgtcccatttactactatatcattatttgaaaaacagtttgaatttgcatatcttattatcattggtaggaataggtggcattgtcttatgtgattcttgttttaggaggaaatgggcaacaaaaatgtgaattttcagctgggtgtgttggtgcatccttgtagtcccagctactcaggtgactgaggtggcagtatttcttgaggccagtagtttgaggccaccttgtacaacatagcgagaccacatcacataaaaaataataacaataaataatttttttccagtgtgtatcttggatgtaaaaaaaagggagtttctttctacctttattaaaaattgtcttatatgtgttgcctgttgttcatattgggggatcagctgagggtgtgtaaggagcatcactaatccatcaccatttatgttctaccacagtgacataatcttaaaattattaagtgatgaattgatggataattgcttcaccttatttttatctcttcattttaattcttcagaaacacagaaatgtaaacattattattgttgccaggatccttaatttaatttgcatgatggaaggactgtgtttcttaaattatatgaatgctgtgtatatgtattgtagaatggggaattgcatgtatctgtttaatattagaaatctgtaataggtcaaggctgcatcagtttttgtggctgtaattgcttgcacatttttggcttataaacttttgtgtaccagtgacaaccattaagagccagaaaagtttgcttttacttgcagtacatgtacatctagttttgagttatttgtcaaaaaagggtgaactttctttttggctttttttttgggggggccttttgtgacttgaaattaagcaacttactgatatagtttttttttttttttttttttgagacagagtcttgctctgttgcccaggctggagtgcagtggcgcgatctctgctcactgcaacctccgcctcctgggttcaaggagttatcctgccttagcctcctgagtagctgggattataggctctcatcactacgcctggctaatttttgtattttatttttagtagagatggggttttgccatgttggccaggctggttgtgaactcctgacttcaggtgatccacccacgttgacctcctaaagtgctgg

SEQ ID NO: 66748 - DNA, 1085 bp, Homo sapiens
catttaaggtaaccgctttcataaaaacatcactgaataactccccctggtcctgtcagtccagcattattctcaccatttatagagtttcaaatattgttaaactgtagtggctatcttgcttttatgtattttgggtttatgcacatttcctccacagaataggaattgttttcggtattgttctctatctcttctccaagtacctagtcagcaaccccccatgggtgctcagtaaatattgaatgattatacttaacctcccttcatagctcagactattccatgaacaatttatggacataaaaatctatgccagtagacatttaaggatattttttatggtgactatggaaattgcctggttacaaatttatatatagagtcagtaacattgataaaaacataacaaattactgtttcatggaactcatgaggcattaagaggcttatttagttttgtttagatacaaggtagtgtcttccaaaacattgttacttcaaaatttttgtagctgctccagttgaacactatattaaaatgcacatttttgaggacatattcttgaaattaggaatgtaatttttaagaattaaacagaggaccagaaatagatctgaggagtttatcagagctgcttccttgcacaactctagaaggtgcctgtcacacctttttgtatgaaaggtgcctcctagagtataactgtacagtagactcatttttgatataagaagggataaagcacacttaacagatgatatcaaaatgtaaaagaaaagaagtgtctgttttagaaggaagctgtatgagataataggcaaaggttagggtggtggtagcaatggtggtaaaaataggatcacttaatctagattacttaatcagtaagttgattccaggggccagtgggaattgctgaaagtttcatctgaatacatggaatttttagcagtgattaggggaatggtgctggtatttatagccatgaacttattacttgaaagcatcctagggacccaagtcttaatcaaggggcagttcttccaagtagtggttgaggaagttgggtatgctttccaaa

SEQ ID NO: 66749 - DNA, 1090 bp, Homo sapiens
cttttgaggaactagctttagcttctcttacacgacatagtattcgtccattcgctaacgtagatacaattagtagagctaactcctcgtaacttttttctaacctggaagtcacctgtaataccctcctttttctttgcgctcttttaccccagggtacaaagctcattggatcactcaagccaatggagcttagacctgaaacttttcagggaaaaatagggcaatagtcacgataagtaagttccctttttaaatgactggacacattagtctgactgactttcatcatacatgaaagttactttgttttactgtttgaagcaagagtgagcatgccctgaaagataattcactgtctggaagcctgttttgatttctcatttggactttggccgtaaagtttgcactttaaaaaaaatgtacgaaatgtagattcttccaagttactgtgctcatgaatgctgttagaacaagtttttgctacacagaagcctattattctttgtgattgttcctccactgtggaaaaaagttttaaataaaaaagcattagtgcttgattctttcagatatgcatgcaggctgcttttaaactctcagtccttgcttgtcttagagaatggagaatatgtttaaatggtgacactcttatgaacagaaaactttttaaaatgcatcgtaaagccatatgtgattttttgattatctgatacgtgtagtagacgtttctgctatttacggctcttcaaatactacttggtttgccctaccaaatcttacagtttgtcctgacactgtgttaattcttttgttagttgcttttggtttttttttgttttttttttttgtatgggagtatgaagaaactagttgtgactgtgtgaactattttcctctttcctcattcaaaataagaatcgataaggcttttaaaagttttttttgtaaaggtttgtgtcttatttcaaatgtagcagtggttcttttaaagcattgtcaaaaagaggagaaaataggtagggttagaagagtgctatttgcatgttgtttcataaatgttattagctatttctcttgttatagccac

SEQ ID NO: 66750 - DNA, 1025 bp, Homo sapiens
aaggccacgacccacgagatcatggggcccaagaaaaagcacctggactgtgagtgaagccgaccgcggcccccgctccccggcgcccgcgcgacccgcgcgcgtccttctctctctctcttgtctttcacccttctactgcctcttccctccctgcgtcttctctggcacggccggtcctgtgcccgttgagctgtgttcttttgcttccatcacacctgccttcacggcctccgctccccgtctcaaaatctgacaagccactcccctccctattcctaggggaccctcgtctccctgcccggtgcgctaccacaccccatcatacccaaccaacttgcttccccacctggcttctcaccccctacccgtctccactgcagccttctgctcttccttcccacccgtccggtgccgcctcgtcgccctcgtctgagcgtctccaagccccattgtttcttcatcagcctccttcgggtttcagtaaacgcctggttccttgcatccagatccttgttatccctccgggctgcctccctggaagggatcccccacttcctttgctccactagctgcttcgcccatcccttcctggctttctgttccaccttccctcctgcttttgggttaccttttcatcgcctctatagtagcttcagtgtagtttcttcgactcattttaaataccatacccagttacccgacttttatttcagattaccttctttgtgggagtgaaagtaaaaggattcaatttggtgtagggaaagctttctggaaagttgggatttttatttgcctctggtggaatttaatcgttgtgttgtccatacttttgactggggtgagtttgtgactgtcagctctgccccccagcttttcacatggggatatggaaaaaggcattttgctgatactcttatcagttcctggaactgttaattctggcggcttgaattcagaagcttgagtgttaagcgtagactgttggaattccaaatggattaataaatttacttacaaat

SEQ ID NO: 66751 - DNA, 1032 bp, Homo sapiens
atctgggagtgcccatctctcaatttcactgcctcacaggctctgctctgttttcctactgttgctcccagtggtattctctggttttggggttcaacactgccccattgagttctggcttcttttcttcgaccgcatcgccctgcttgctgaggctgtgtgccctaaagaagaggggggtacttcgcaggcaaagttataactaatattctccccaatgcactaatcatactcttgggctttcatagtctaccaacagttaaatttttattaggcccatttcctcagtttcctgaagaactttgtcaaggacttggaggaccttccctacagcctgagttagagaacatgtgggttgtgctactcagtgactgactaaagaaaattcctatccactaatggtgaaccactgtcccagaactgagctagaacatctgacgcctttcctatcttgaggagactccttctatctgggtggttacctagaggttagaggcagagtcactgccctggaccttccgccgcttccagcatatcttgccatggactccccaagagggacagtcaagatttcatgcacatagaaccctggcactagataggaaatagatccaaaagaaaggattaaagggtaaggtctgaggatgaagagcccataaacattccacatagagtccagagttttgagtctgtctgtgaaccacctttctggtactatggcccagccagtgccacagcatggaagtgctcttgggagaatatctgcataccctgtagagaatagtgtatatcatacaatcctttcattcccgacaagggaacactaactagttctccatcccatcctcctcttctgcccccatatctacccatgattgtgaactacttggataaatttctcaagacttttggcctagtgatggtgtgacctaataattttgaaatctaattttgaatttcaccctagtttactttctggttgtcaattcagtattatttttatgtaggctggatgttcacgctggtcagatt

SEQ ID NO: 66752 - DNA, 1166 bp, Homo sapiens
gaagtgtcgactgcgccggcgggaacagacatgcctgcggccaagaagcagaagctgagcagtgacgagaacagcaatccagacctctctggagacgagaatgtaagtgcagcttctggcagttacgagactgcggagtgaaagttttaaattcttttaaaacggggggcgcggggacgagcgggctgctgtggggggagggagaggtgtcactcaggaaaacgcgggcgtgcgggagaaaattgaaattgcctacggggattttgatgtggggccgagagcaagcaggaactaggcaaaggagagtggttctagtgattgcgtgggtctgagaagtctgccctgaaatcagtttgcatgtgatggggagtgttttggcctttggggggatttaaggggagagtgcgggtctgagattctagtagtttaaaaggcacgttagagacttttctaagaaagttggaaggacggggcagagttagggaccctgttaaaggagcgtaagggttgtcactctaagacccttgtggaattttcaggatggaaagtgatcttcgatttgcggagtttgggagactttattaaagggggttttgtgtccgcctccgtcctgtccgcggagaccgggtgcgcctgaaggtcgccttttctgtaggaggagccgaattgagaggatcgatttttgatttgggggtggggagtgactacctttgaggaagtaagagtgggtgatttcttctttgaacgtttttacttaagataaaggtgaggggggtggcgacctggaagattttgggcaacagtggtataggcagatgtatttaagtgtgggttcctggcttcgccaagtgcgcgatgttttgcaatcagatttttttaagctctgaaatgggtattcgtaatcattcggtaccaacatttaacccaactgagttttaattgactcgccagtaagagccgaattgacataaataagttttcagtttcatgttttaggttgataaccagtaaggtcaacgaagtatcttgacaatttattcaaagatactactccaaaatgtgattctccttctcatgatatataacaacttgtgaatatcttttaaaaaatccttaaaatgtttcagaagagtggcgtaagttcttcattttctcagtttggctag

SEQ ID NO: 66753 - DNA, 3874 bp, Homo sapiens
gaaccaaggacagagtgggtgacagagggagagcctgtctcaaaaaagagttgtaagatagctcaaagacatagtggagggctatagtctggtaacttggaaggatgtgctatatagataatgcatagttttccactgagatacagaattgttttctacgtttgatgttaattatgtgaatacaactgaaaaggtggagagaaaaagagattaaaataccacattttctatttctgtaaagactaatgatattcacattaaattacaattcaaatatttgttgagtacgtactgcttgctacccgcctattatttcatttatgatattttttaaccttctatataaaaccaactttaggaagcaataatttaaaaatagcccctaaagcagtgtttcctaggctgtttaataggcatttcatggaaaaaaaaaaaaaaaaaggcttcctctggaatgtattttagaactgctgccctaagatcctagattaaataaatcttttctttccaaaggagacattggaatctgtaatcaggaggtagtggaatcctcttctgagattagagagctgagattagagggccactcgtgtgtgagataaggtatgaattaggagaattttcaaggtttcctgcagtcatttcttttttttggaaggatttactttaattgtgattgagagtctctggagttctgatttatgagtattattactttagaacaatgagacagttttaacttgtaaatagcatagaatatatgtagcactttaaaaaaattctaaatgttttgcgttataagcagaatttgaataacaggattttaaaaagtgacatctaatgtagaagccattaacactcctgcttcaaacggctccccagctccatgctccagactgagcagcagtcaaatacattatgaagacatatacatcagtcagatttaagagtcacagctttgggatggaattaccagccaagagaccagttaggctttttcagcacttccagtaccttttgtaaagagctgtaaagattcactgatacagtgtattaaagtgactggaacagaccagtgccttattaaagacagtattactcttccattattctcattagtatttatttcattttcatttttgttgaaatataaaatatctacaaaccttctaacctgtagctggattatgtttatccttatgtggaggcaagaatacatttttttcttcttgtagaaattatttctcttaggtcagtcagcatcttcccagtagagttatttactgctaaaaacagtattgctgtttcatgtaatttttcctcatttactgcttacaggatgacgctgtcagtatagaaagtggtacaaacactgaacgccctgatacacctacaaacacgccaaatgcacctggaaggaaaagttggggaaagggaaaatggaagtcaaagaaatgcaaatattctttcaaatgtgtaaatagtctcaaggtatgtgcaaaaaaagatcctttgggctgaatgctaggcttcagaaattatttctctgtggcacgcatttcgtactcaggatactctgtcaagttgtaaatattttaaagttacaatgttttctgaagggtttttttttttgtagttcagactgcgtatctattttagtccatcccatgtttagttttttggttttgttttttgttgttttaatttaaatatgtgacagtgttgcaggatgtttttgctttattgtttgcattcaaattataagatttgggtaactattactctttatattttagtaaaacttaaaaaacataagccacttctggcatcagtttttaaaaagaactgaatgtaacccattaactttgactaagtataaattgaaacagatgttttactttgtacagtttctgtcctttgttttatttataactgttttcaaagaaaaaggtgtaaaaaatttttaaactttttaatattaaatatttagggaaaagggggttttggttatttaaattaatctgtccccaatagtatttttatttactttataaaaggggttactggtgtttaagatattttcttttatatatgtccagtttgttttttaaatgtgaggctatttttttctatactgaggaaaaatgtgtattatctcatacatatgtaagttaaaaccttttctaaatatccaaatatattttttataagtaaagttttgggaaagcataagaagctatgactatgacatttttctgtctgtgtagcaaaaattcgatgctcagtgtgtcagattttgctcctgtaaaaggagagaaattaatctcagcatattttttaaaagtcaattatagtttcatgtgcatatttatttacattaacgtactacttttaggtactgtacctggaagatgtttttagctgccttttatacttaaggcagtatttcaaaatcctaaagctgtggcttttcaaatgatgagaaaacgaaagacgtactttaaaagtgaaaacagtgccttaaactgcatctgaaagtcagtgttaaatgccagaagttggccagtaaaatcctaaagctgaaaaataactttgtgaacaaaagtgcataattgttctttgtacatctcctatagcctcctggtaactgtgcagttacagtttatttcttcccctagtccccagtgttcagatattctcattctgactaacagaaaacagtgatttgaatggagtctgctatgcttcactttacaagggaaaaatttagccttataaaatttagtgaatgccagagaagctattaaggccatctgttaatttcctgtttcagaaaaataaattgtgtccttttgtatccaccaaaattatccagtttattgtgattcagaatatgattggcttattaagaaaaaggcaaatattataagtgttttcgtaggtaagcggttattacctaacttgtgatttcagcctttggttgtgataaaactttatcatacacaatattttaaaatgtgaaaactagactagtagacatcttttaattttagtgtcaaaagttagcttatgtatgatacacaaaataatgtattgcattttggaaaaaagaaggggataggttagtttactgtcattttctggtttgtaagatacattaatcttttcttatttcatgattattttataggaagatcataaccaaccattgtttggagttcagtttaactggcacagtaaagaaggagatccattagtgtttgcaactgtaggaagcaacagagtgagtgttaaggggtctatttagtatttggcttgatttccagatctggtgttaatgtaatattgaaatagaataatttcaaagtgcattttgtgaagctggtttagcaatatgattctttcatgtaagagtgaaggtttctagaaattaattaaaactagtatgcatggctgaaaatacatctatatttaatatattacccctaattatttatgaaacaggttttatacttgtatttgtcttcataaatacttggttgaaagaattggcgtcctttttttttttttttaattggcgttctttttaaagtgattttggtatttatcattcaaatagcgtaagaactggctgtgatttttttaaaattaaggtaatgaatggctctataaatgaagcataaatccagtggatttaaataagttattgagatgttttaattacttgcagtaaacatttgagtttgctgggtttttttgttttgagacaggtagtgtttggtggtgattgttgttgttgttgttgttgtttgtttttgagagagagagagtcttactccttcctccaggatggagtgcagtggttaatcaaggc

SEQ ID NO: 66754 - DNA, 1847 bp, Homo sapiens
tctcttgacctcatgatccgcatgccttggcctcccaaaatgctgggattacaggcgtgagccaccgtgcccggcctaatatttattttttaatagagatggggttttgctatgttgcctaggcaattgaatggatgaaatataagtttaaaagattggaaatcgaaacgactattactgcaatatttaatatgctctgtgtattatgtaaaacattcagctttataatggcttctttaagctcacaggaggtattttaaggcagtagtttctgtagtatatttaagataggattgcgattaaaatatgtttaaaagttggagagagtatgttttctatacttgagatgaaatttactgtatttttattttcattaggttaccttgtatgaatgtcattcacaaggagaaatccggttgttgcaatcttacgtggatgctgatgtatcctttcctgggtttttaatatctttagtcaaaggaatttattttcaataagtgcaccaaaacttttataaattaatcatttccctaaagttattgttctttcttaaccgatttcttcactatcacccaagagaatcctgtatctagttttcctgacccttagaaatccattgtggtatgtgtcaactcagctaggcaaaaagaaaaagaaaagaatccattgtgggatggatgtgctggttgggtgcagatgtctatagagataggagcattagaaatctagtaatagaaaatattagcaaagactgattaaaacctcctttttctttgaccttgcctagaatatatcatttcattgtagttataatgatgaacttggcttgtgactggtagtcattctaagtatttgatcaacgaagcctaggaagaaaaaaaaagtttaggaaaaataaaatatataaaaataaaataaaataggaaataaaaattgcaaaacaggttcataaagaaacagaaaaatttgaaaagcccgagttagagcggtaaaagctaagtaataagatatttcttccagatccatttgaaaaacctagcaaacaagacaaggcaaggacattcagtcttctctaaaagatattgaaatgtgacctgttgttgtattgagactgtctcacaaagaaaaaagtggaaaactgaattgttcttttttagatatttatagaggtatggggatagagcagaggttaaactacagcgtgcaggttggtcacctgtttttgtaaagttttgttttgaacacaaccatgcccattcatttgtatattttctgcagttattttggtactgcaactacagagttgagtagttgtacaagcagctaaagagtaaacaaaattgagtggagagactgtaattttgtttgatcatttgttatggattttagacctcaaatcaccattgtatatatttggttgtataaggaaaattgagaactttggtgtcaaaaactttagcagttctttataagtttctattataattattgacatgtttctttttcaaaaacattatgtttcttaactgtggaatttcttaggctgatgaaaacttttacacttgtgcatggacctatgatagcaatacgagccatcctctgctggctgtagctggatctagaggcataattaggataataaatcctataacaatgcagtgtataaaggtgggtttttctggttaaattgtagatctgcttcttttgaatccacaactgtaaaaacttgtaatgttaaatttaaaactaatggtatgaatgtaacatttctcatttgatttgtacttttcttactgctctctttggatgagtcttttgagacgtttgtcacatttgggtaatgtaaa

SEQ ID NO: 66755 - DNA, 1100 bp, Homo sapiens
aatttatttggctcctgtttctggagactgggaagtccaagaacatggtgccggcatctggtgagagccttcatgctgaatcgtctcagcaaaagggcaggagagggtgtgagggagcaagagattgaatttatagcctcaggcccttttataatcagtattaatccatttgtgaggatggagcccccatgacctaaatacctcccattaggccccagctcacaccactattgcattggggattgagtttctagcacatgcttttgggggggcctattcaaactatagcacttacctagctaattctacatctgatgtaaacattttaagttgctatgtaatatggattccatttttaggctttactgtgcataacttacatctagactttagtagtttttctttcacaagatgttgaaagttcacagtaaataaaaaacattcgcctaatttttgtatgtttatactagatcatgctttacgattatggaatatccagacggacactctggtggcaatatttggaggcgtagaagggcacagagatgaagttctaagtgctgtaagttggaaactgcagggcaatgactttcaggtttacatagctgtgaacagtctccatggaactgtttccttataagaaagtgtgtttcatgtagcctgtcaggcagacattcacttacatttgacatagaagattttaatctccagatgaaggaataaaacaagtaaagactatatttatttatttattttttaaattacttgcactgtataccaatccctggagtcttatgagagcagtatgatcttgctcctttccttttaatctaaaatcactaagttaatgtttgttttgccatttcgcagttattaaagaaaaaaattaaactatgtagccattaaagtgcttttccatcttttgtttgaagttgaaacataacgttttttgctatttggaagtgttttattgtgctcacactgttttaggtaacttatttctagccattctctttgggtggcgtggtataatacaagaccagtttaaagataaataccacctttatattgatgtattgtaatccattggtccattatac

SEQ ID NO: 66756 - DNA, 1174 bp, Homo sapiens
actccttcaatagaactctctactgttatttcttagaatgagagcaggagacagtatgtagctcttctgtgtaatacaggagttcactggaggtggataggtgtgtgagattttcattactcattatgtgccttttgctaaattaaatagcatctctgggccttagtgtctgcctatgaaatgaggttgttacaatagatgatctgttacatgcctgttaaaaattagtaaacagcaaatgaaaaaagttaaaatctgttttttattagacttttaaaaattcacttaaaagtgaactctaaaactaacttcaaaatattttgacttagaattataaagtaagatgtcagctctttaaggattcatgtattttcacatgcacatgtcagtttcattggttggttgaggttggataggaaaagtaatatcactattcagctctttgtgtcagaataattattttaacttagtattcaatttaccttcaaaataagcaaaataaatattttagtgtaattgaatagataaaactaagtttaagtaattttttcttggtttatacattgtaaatgctcttatattccgatgttgacaaactaattaaagctgtaaatcttgaaagtagtaaactctgatttatggcctatttagatgaaacccaaaatgtagtttgtattgtgatttgaaatacagttttcactatgttgcacattaggcaaaaattggataaatataatttggagctgtaatttatataaaactttttggttttgcatacaggattatgatcttttgggtgaaaaaataatgtcctgtggtatggatcattctcttaaactttggaggatcaattcaaagagaatgatgaatgcaattaaggaatcttatgattataatccaaataaaactaacaggtaacagttgtggtatttgaaacaatttgctatgttgtgctattgaatataagttttattttttcccaaaattgctatataagccccaacaatgagtttagaagaccttcttttaactttaagggacaatttacatactgtaaaattcacccctttaagaagtcctttatttgcagtgtttgtggcttagttttcaaaatcccctttaaattgtgttgtcatcttaacttagtagcacattttacttatttgtattttgg

SEQ ID NO: 66757 - DNA, 1015 bp, Homo sapiens
gcctcacttcatggtactataggttggggaattttgcagttttcttagtatatttttgaaatgtctcaattcttaatgcagtaactgtctttagaatcttatcaggctgtcattaacactttcactataaacgttgtatgtctgcatgttaactttgttggcacttttgttttagcaaagagctagaattcattttctggttatcaagccagattgttaatagattattaaatttgtaagcatcagtaaatatttcaatgcactaacattcatcagacctaagtgtcctctaagaattattaaaagttttacctttctcctttaaaacaccaggagctagtaggacaatgttaaatttatatttttagattattttctagatatctggaataaatacaaactatatttcagagttttcaaaaaataacagttgtactcgttttttctttgagagaggtttggccatacaattatagtatgtatttagctaaaaagcaattaatataattatagcagagttaagaatttatatcagatcacgaataacattttaatgtttcaacaaaatatcccagaatttgaattggaaggattgttttgagttgctccaatccaaagtgcttttttacatatctgagggaaaaggtaaagagaggacatatgaattgcctaagacaactaattcatggcatattatacttatacagctatttctgatttaaaactgagtatattaggaatgttaagtgtactgttaaataactccagaattaatagcagcttgttttgtttcttctcacaaatatctctaatgaaaacagtgttgccatttagtttcctaaatacagaaattatttggaaaagtcctaggaaattttattttgttctatttgtttttttgagacggagttttgctcttgtttcccaggctggagtgcagtggtgcaatcttggctcactgcaacctctgcctcgcaggttcaagcgattctcctgcctcagcctcccaagtagc

SEQ ID NO: 66758 - DNA, 1888 bp, Homo sapiens
tttgtatctctgtgactattttagtaaaattttatttataaaaacaggtggctggagttggcttatgggctgtagtttgccaacccctgcccctgttgatggatttatacagatgctcctcaacttatgatgggattacatcgtgataaacccatcataaattgaaaacgcatttaatacacataacctactgaatatcagcttagcccagcctatcttaaatgtgctcagaattagcctacagttgggcaaaattatctaacacaaagcctgttttataataaagcattgaatatctcacatactgcatactgctagcccaggaaaagatcaaaattcaaaattccaagtacttcaaaattgcagctgttttgtaccattttggtaaagttgaaaaattgtaaatcagaccattgtaagtcaaggccatctgggtgtgtgtgtgtgtgtgtttgtgtgtctgtgtatttttttgtagctgataatttagagaagctattggtgatgttacatgagcatttaggattatcaaatttggtgaaattgctgtccggtttcttttcttgatgtgaatttcaggccacttcacattttcttgggcagagcctgatttacttttttcttggctttatgtgtaaactgtttttttcttttttctttaaacttttgaccttcaaataacttgattcataggatgtttcaaagattgtgcagagaggtcccatatgatctttatccagaatccaaagtttatatattatataactgtaatacaatatcaaatccagaaaattgacactggtacaatgtgtgtgtttagttttatgtcattttatcacgtgaattttgtcatttcaagaatggtacagtttgggaccttttaagattgtttttttccactcaaacccttgagatccatccaggttgttgcctgtatcagtagttctccttttttattgctgagtagtattccatggtatggattaccatagtttatgtaactatctatggtaggaggttttggtcatttccagttctgggctattgcaaataaagctgctaatcagcagttgtgtccaggtttttgtgtggacttaagttttcatttctctgggtaaatgcctaggagggcaattgctgggttgtggttaagtttgtttagttttttaagaaactgccaaactattttccagagtggccgtgccattttacattcccaccagcaatgtatgagagatccagtgtctccgaatcttcgccagcatttggtattgtcattattttttattttagctgttctgataggtgtgtagtgatatctcatcgtggtcttaatttgcatttccctgatggctagtgatgttgaacatctttttcatgtgcttatttaccattcgtatatcctttttggtgatgtcttttcatatcttttgctcattttctaattggattggttttttgttgtgttttttttttttttttaactgttgagttttgagagtttgaatatattctaaatatgaatcctgtatcagatacatagtttgcaaatattttctttcagtctgtagcttgtcatttcatcctctttaatagggtctttcacagagcaaatgtttgtagtttttattaaatccagtatattgattttttaaaattattttatggattatgcttttgatgttttgcctgagaactccttaccaagctatagaccttaaagattttctcctgtgttctcttgtaaaagttttatactgctatgttttacattaaatgtgtaatccattttgagttgatttccttatgaaggtgcgaggtttaggtggaagttcatttttctcttatagatactcagttgttccatcagcatttgttggaagactat

SEQ ID NO: 66759 - DNA, 2230 bp, Homo sapiens
cctgggaattggtagttctaaaaagctcttagatgattttgaagtgcagccatccattagctctggcaacatctttttacctcactttgctttagtttttccatccagggactccagtacttaaaaattcttcaccggtgcagttagtaagaagcacttgaagagctattttacagttcttctgctttggcctttctcttagagactctgaatcagtaggggctgagagactctgaatcagtaggggctgagatgagtcttttgagaaaactccacagactattgatccaattttgcatttagccaagagtcatcacactgggtggtttctaaggtcctttacagttaaaaacttgaataatagatgtcatatagcactaggatttaaaaagtctaaataaaaaaggtagagaagaaaaatgtgttgtctcctccctaatcttcaagtggccatactattaaattatttaaatgcctgtgaaccccacagggctgccacctgtcactatattatgtaggctgtccagtaaaactctaggggcactgttcacttacatgaggatttctgaatcctggtgctatttagtttaggccagataattcttttttttgtagggggtttcctgtgcattataagatatttagtagcatctttggcctctacccattagagcacagacacattgtcaaatgtcccttcgtgggcaaaccactgacctagacagtaatatgaatagtgcccacagttttgcaattttttctcattgtattctttaccacttactgcttaggtatgtgcatacaaatttgattttataggataggaaaagtataagtttgaagcctatttcaatcctatccccatatgagtgtcttgatgttaaacaactgctttacttgccttcgattgccctatttataaactgaattctaaggctatttatgtgagttcatcaactttcctaagatacctgttgagtacctactgtgtggcacagatactggatgaaggaataatagttaataaggtaaaggaaaccacctgtgattagaagcgaaatgggagactgcatggggaaagatgaaactagtgaagtaagcaagagccagattaatgccggattctgaaaagccatgtattctaattctgtgtgtttgtaattgacctgtgctataaaacacttaaagtctctgggtgtcagagtatctagagctgaacttggtttaacttgaaagagaaatgttgacttccaaaatgaatatttcagacaatgtgattcttttgtattatcgaattctgttgataatcagatttcttgtccttaagtatggtcattgactgtaaatataaatgaatgtacatcactgtacttgatagatggattaaccaggttctaagagctgtgaattccaaaacaatagaaaagccttgtttttactttgtaagattcagttcctcattaacatttctttttctcatttctctctctgttttagtcttgtgaaaatgccattgtgtgctggaaacctggcaagatggaagatgatatagataaaattaaacccagtgaatctaatgtgactattcttgggcgatttgattacagccagtgtgacatttggtacatgaggttttctatggatttctggcaaaaggtatcaacatacttttacattttgaaatgatctgacttatgaaagaccattgtaattctagctttttctgttgtgtccatgttctttttcctttacaaatctaccctgatgttttgtattgattactttgccctttgatgtcattcatcaaatactttggtgttattcattctacttttgtggctctgcatatgatctgcagtgcttactttaaattaagttggcagttaggtatcaatggtggaaattaggtgtttatgttccataacataaacattatcataacattactaagacttaatgttttagtaattagattgtcagtctacctatgtaactgtttcctagagaaaaatcaggatagaagacagataaaatactagttacctaaaaatttaaataaatctattgttaggattttctggtaacaaattacttgggtatttatttctgtaagaaaagtttggaaggctttccacagcatttgctgtatttcttgaaggcagaagaaaaagtaagtaccatgctaacaatgtaaatttgtaaggcccttcataaatttgcacaatgcctt

SEQ ID NO: 66760 - DNA, 1050 bp, Homo sapiens
tttttattccaataatttttgtttttcctaagtaccttggtgacaagtcatttcttgtttttatacaaattatgtagtgcttgttgaacttaaaatatatctaaattttataaaatttgagactgagctcttagtgaagtatattctggttttaagtgcttttcgtatgacttggaacatctgcttattttctaatccgctgttttagggtagacactgacaacgttatgtgtggtctttaacctgttgtcatgttttttccctagatgtacaacactgactcatcataaatgtggtgctgctattcgacaaaccagttttagcagggatagcagcattcttatagctgtttgtgatgatgccagtatttggcgctgggatcgacttcgataaaatacttttgcctaatcaaaattagagtgtgtttgttgtctgtgtaaaatagaattaatgtatcttgctagtaagggcacgtagagcatttagagttgtctttcagcattcaatcaggctgagctgaatgtagtgatgtttacattgtttacattctttgtactgtcttcctgctcagactctactgcttttaataaaaatttatttttgtaaagctgtgtgtttagttactttcattgtggtgaaaaaaagttaaaagtaataaaattatgccttatctttttataatggttgttttttgtagttctcttaaccagagaaagttttgtaatacagagattaagtataggctctagaactaaagtgaattcaaatcttggctctcctactacgtgaccttggataaacaacttctcaatgcttggttccttgtgtataaaacagggataataatacttgccttggggttattgtgaggatcaaatgattcgttatgtgtgagacagttagaacagtatttgacatataataagccctaaatgtattctgtgtttataattattggagattatagttcctatggttttatattttttaatgatttcttatgtaatagtttcataagtaatatttaaaattctacagagttagaacctc

SEQ ID NO: 66761 - DNA, 2122 bp, Homo sapiens
gttaaagattaatacttctgagacactgtgtagcagaaagaaacccggatttggattaggacttgaattcagcctccaacatttactgctgtgtaaagatttgaggctgatcactcctataaaatttggattataatacttacctcatagggtttttgtaaagatctagtgacgtgattattgtaaaagtgcaccgttaatctctcagatgtcacagaaacgttagaagcatctcttcccaggattgtacatggaaatgaaggatccacagattttgtggctataaaacacccggactaccgatcccagtgtgcaaagcctccaggcttaccttcccggaaactggcgcggtgccctctgggacttgttctgggacttgtagtcttgtactggcgctggcccgcctttcttccttagtggggaaaaccgggtgtaagccccggaagtacttgttgcctgagcagtgggctgcttaggaagagaaggtcagagttcgcgggggcagaggcattcttgccgctggcccagtcactatgtagtggaggggcagacaccctcccgcaaattctggaaggttcttagtctcgactagggcagtagccccaggactcctagtcgccggcttcaggtcactgccggctgaacggagctgccgtcgccatgtttggctgcttggtggcggggaggctggtgaggatgggaccgggtgatatcaggaaggggtcaggataccgagggcgaagccctacggcagggagggtgcgcaggcgctagggatgcggggaagcccacttattatattttgggtgggtatgtgaggatggagcgtgggaagctgggtgctctcctttgcccagctctattcagattctttcgaatagtagtcacagtataagttggcatttattaagtgtgcattttgtaccaagtactgggctaagtgcaatgcacgcctttggtcactcagccttatgtgtggcgcttatttggcactttgaacttaatcctcataactcgtgagatggtctttatctttgacattttgcagttacagaactaagttcaatcgccagtataaataccttctttattaacttgaggtagaggtgaatttgggattgaatttggtctatagcaaactgtttttcaaagattaaggtgctcagggaatgtatatcttttgggtccctttggaagaacccgagtaaaaataagcttaatttaattggaagttggctgaaacttaacgtgtgagccgtatctgagataaccagagaaggatgcgagtagtgtgtttccttatgggtcaaaatagataacttaccttgccaaattgttagagtaaatgagaacagcacctggaattctttaggaataatctggaaggtgaatcttgtttgtttccttagaaaccacacagacatcaattttcaggcctgattcctttcccctagaagtatttttccttcttttttctcctggctttttaaaatgttgcagtccctttgctgaattgtctttttttcccatcaagttttgataatgtattgtattctgtacatatacagttctaagaagccagaaagataagttggagatgactagcctcataaagtttgtctcttgaatgactgggagacccctgtggtgatggtggtaattcataatcctggtgagataattttgccctgctcttaatagggaaaaaggacaaacctggaatgattgtgtgactcagacgagtgagtgttattaatgaatgacattaaaattgtgtttcttaaagaataaaaagcctatttggaatccatgtatctctcacgttgtcaactaatttggaaggaaatttagttatggtaatacctgcctctatatattggggatacttggtcctttaattatggagtattaggacacatcaaagtgaaggacaaatagacctagtggcatctcaaaacttaactacacgactctgttataagaaaaatctacttatctaaacttatgaacccagtttttatttcttaagattttttttcttaaagagatacaccttttcttaatgtcaaaaattagagtgtgatgatacagatttgcagactgttcagtacctatacaaagt

SEQ ID NO: 66762 - DNA, 1241 bp, Homo sapiens
tttcttttcactttgagtatcctagagatgggaggatgcctaggaagagtttgttgagaagtggtaccatggtgtagcatggagagcattggaatgcactaggtttgaattttggcataatgtagctatgtgaccctgagcaaatttctctcatctgctcatctgtggaatgaggaaataggagttgaatttgatttttttccttaggtcccttctaggtcttaaatttgcagaagataaacaattactaaaatttcttatgatttgtgctctctgataaaagctaatcaaaactgccccgatatttaaattcctatgcttgctgtctttttataagaataattacatttccagattatctttttagattttttatagctttttagaaatgacatgtaaaattgttttggataagtcatttggcagttaatgaaagatcctattttaattttcttgtgaatgtaaatatatgtgttttcttttctaggtatgaaaactttcaaagacgactagcacagaaccctctcttttggaaaacataatttgaataaaataatttttaatggattctgaaatttgtcatgttttgaagataactgactccatctaaaagtatgaggtcaaaggatcacgaaacctaagtttaaaaactgcttagagactgaagcttaattaaaaatctttattaaaaattaaaaacattgaaaaatgaaaatatgttcatcattaaagacttttttccccttaagcttaaaataccattcaaaggcaagacattttgttttggctatgattcattttttttacttaaaaataaaacctataccaaacagtagtgtgccaagtaccattgcatgtgtaatcattcatttattgaaatgaaacaatggtttgctggagtagttaacttttcaattacctatttcaaaatttgggagacttgaaaaacatatgaagtatacatttttaaatatggagaaattattttcagagattatttcttaagattgtcagtttttccaattaatacaggttggctgtcactttttatatctgcagattcatataagtttaataaaattgccatattggtgagcttttatttaatactggtaggcatttatgtgtagaatataggattcttcttgttaatggatggttagtagttcattttttgttgattataacaatacccaaaactgggtaatttattgacttaaatgttttttttttttttaaga

SEQ ID NO: 66763 - DNA, 1035 bp, Homo sapiens
tttggtttgagccttatgcccatagtttgacatttccctttcttctttcctttttgtttttgtgtggttcttgagctctctgacatcaagatgcatgtaaagtcgattgtatgttttggaaggcaaagtcttggcttttgagactgaagttaagtgggcacaggtggcccctgctgctgtgcccagtctgagtaccttggctagactctaggtcaggctccaggagcatgagaattgatccccagaagaaccattttaactccatctgatactccattgcctatgaaatgtaaaatgtgaactccctgtgctgcttgtagacagttcccataactgtccacggccctggagcacgcacccaggggcagagcctgcccttactcacgctctgctctggtgtcttgggagttgtgcagggactctggcccaggcaggggaaggaagaccaggcggtaggggactggtcttgctgttagagtatagaggtttgtaatgcagttttcttcataatgtgtcagtgattgtgtgaccaaggcagcatctagcagaaagccaggcatggagtaggtgatcgatacttgtcaatgactaaataataacaataaaagagcacttgggtgaatctgggcacctgatttctgagttttgagttctggagctagtgttttgacaatgctttgggttttgacatgccttttccacaaatctcttgccttttcagggcaaagtgtatttgatcagaagtggccatttggattagtagccttagcaatgctacagggttataggcctctcctttcacattccagacaatggagagtgtttatggtttcaggaaaagaactttgtggctgaggggtcagttaccagtgaccttcaatcaactccatcacttcttaaatcggtatttgttaaaaaaatcagttattttatttattgagtgccgactgtagtaaagccctgaaatagataatctctgttcttctaactgatctaggatggggacgcacccaggtctgctgaactttactgttc

SEQ ID NO: 66764 - DNA, 1039 bp, Homo sapiens
atggttgggtgaagcctggaaaaggcagtgagactgtggtataaggctagtcagcctccatgctttcttcattttgaaggggggaatgccagcattttggaggaaattctactaaaagttttatgcagtgaatctcagtttgaacaaactagcaacaattaagtgacccccgtcaacccactgcctcccaccccgaccccagcatcaaaaaaccaatgattttgctgcagactttggaatgatccaaaatggaaaagccagttagaggctttcaaagctgtgaaaaatcaaaacgttgatcactttagcaggttgcagcttggagcgtggaggtcctgcctagattccaggaagtccagggcgatactgttttcccctgcagggtgggatttgagctgtgagttggtaactagcagggagaaatattaacttttttaaccctttaccattttaaatactaactgggtctttcagatagcaaagcaatctataaacactggaaacgctgggttcagaaaagtgttacaagagttttatagtttggctgatgtaacataaacatcttctgtggtgcgctgtctgctgtttagaactttgtggactgcactcccaagaagtggtgttagaatctttcagtgcctttgtcataaaacagttatttgaacaaacaaaagtactgtactcacacacataaggtatccagtggatttttcttctctgtcttcctctcttaaatttcaacatctctcttcttggctgctgctgttttcttcattttatgttaatgactcaaaaaaggtatttttatagaatttttgtactgcagcatgcttaaagaggggaaaaggaagggtgattcactttctgacaatcacttaattcagaggaaaatgagatttactaagttgacttacctgacggaccccagagacctattgcattgagcagtggggacttaatatattttacttgtgtgattgcatctatgcagacgccagtctggaagagctgaaatgttaagtttcttggcaactttgca

SEQ ID NO: 66765 - DNA, 1040 bp, Homo sapiens
gttccttgaaggaaaagattgggtcttattcatcattgttttgcctgtgtatgagagttgaatcgaagtaatagatggtcagtttcagaggcttgaagagggagggagtaacagaagaattgagaagatgccattagatttgttgatcactgactttcggaaaagtattatctctagaaagatggagaataaatggagagttttatagtctttctgttctgaagttagtttttctctttcttacaccctcttactccttccctattatgttctaacctttttggttatgttgtttcattatgatggagaagtactcttttctacgactagtgaggagtctattattcttcccagttcagctcatatcccgttctccatgaaattcctgccttcccctgtattaaactgactctgctaaaattctgtggtactttctattatattactaacacttaatcagtcctcagtatctatatatcttgcacatattatgatttatattgctttatttcctggaacgttaatagtctgctcaataaatacttagatttcatgtctatccatataattgctaaattatttcagggccttttttggttttaatctagaaatcttcctttcatattcagagttcaccaaaaaaaaaaaaaaaaaaaggttttcaatctaaatttaaaagctaagtcatgaagactgataggttgatattttttataaaacagtcctatgataaacttctgcagtcttttgtattgggacttattcgtgtttctgtgttctggtcacaggtgatacatacttgtgttgttactagattctttcttttttttttttttttgagacagagtctcactctgttgccaggctagagtgcagtggcacaatctgggctcactgcaacctccgcctcccgggttcaagcaattctcctgcctcagcctcccaagtagctgggactacaggcgcccaccaccacgcccgtctcattttttgtatttttaggagagacaaggtttcaccatgttggccagaatggtctt

SEQ ID NO: 66766 - DNA, 1018 bp, Homo sapiens
agggaatgcctgaatgaatgtggccggctgttactgaaaggagtgttacccattagttgttactgtagccgccttaatgagagttagtgagagacttaactaaggcaggggcagtaggttggagaggaatttgaaagataaattgcatctgtaataatttaagggaataatttaatatgtggggtaagggaaacaaagttgaggatgacgcctgtcaaacataagtggataggtggttgttgatgctattaacctaggaaaatagaggagagagaacaagttcatggggctaggggagacagataatgagtttgattttgaatatgtttattttgaggtagtgtggtacatttaaatagagtatggatggagaagggaaacttctattcataataactgaagtgaccaactaggaatttcatacaaaaattccaaatttgaatttcaggaagatacttggaaaattctactcatggactcctggctttggtgccgctctgccagcatcttatgtggccattctcattgaaagaaaaagcaggtaaaatttcatatatttatttaacggaactgattacctgtcccctaccccaactataatttttttttttttaattatcacttacagggatgagaaatatttctagatatattttttcggttctgcagatatttaattgaaaattaattttatattaatgtttatatgtattttatatttattgtctataaaaatataaaagtggacattatagagcagtaatagcctctgtttactaaaagattagagagttctataatgtgacctaactaaaatatggctatgcaaattctaggccaggcagctcattcctgtaatcccagcaccttgggaggctgaggcgggtggctcacttgagccttggaatttgagaccagcctggccagcattggaaaaccctgtctctacgaaaaaaaatacaaagaatattagctggatgtgatgatgtactcttgtagtccctgctactcaggaagc

SEQ ID NO: 66767 - DNA, 1042 bp, Homo sapiens
ttaatgagccactaggaatcaatgttctatacctaaaagcaactggaaagtaaattaatgaatatatcatgctaaacccaaactcaatatatcttgctaaactcaactctactagcaagctggattccaaaacctagtgctgttcatcacaaggtgaagtgtgacagagaaatcagaatgtaaaatgatagtaatcttaactatctatggttaaaataccttacttttgccaatgttaccaaagtgactatgtgaacagattttgtagggctcttttcgaggtttgcaagaagcctgtggttatgggggggtctttatgtttctctggcttccttttaccaccactgtctgcttcctcattctccacttcagccacactgccctctctggtgttgagtgagcatgacaagcatgctttctcttcaggactttgatacttgctgttcgctctgttttgagctcttatcgctagatatctgcatggcttgctgtttcatttcactgagactgctgaaatgtcactgttgtgaggccttccacatctatctcacatagtaacagtcacccttcatgtaacttatacccctgcagtcccaaacctctgtatctttttttcatggagttgatcaacatctaacatgtatcttttttgcttattattttattgtctgtcttcccaccttggaatttaagcttcatgaatgtagagtttttgtgtgttttatacattgctgtattaagcctagaacagtacctaaaatgtactttgtgccataatttgttaaatgaatcatagatgaatgtgtttattaacccatctatgctggaggttgcaaattttttttttttttgtgaaaaatcagaccttggcgatgaccttgagcagtaggaaaataataactcctgtaagcttagcgttccaataatggaacactaggcataaatgggttaaagagaaggatttataggagacataccagattaaacctagatgtttattttaaagcttgttttaaatattttaggttggtgcaaaagtaat

SEQ ID NO: 66768 - DNA, 1068 bp, Homo sapiens
cccatttatagatgagcaaaactgaatataaaaggatatatgacttctctaaactcagagtaataatatataaattaatattgaaaactcaggatttgatcctgggtttagtgcttttactctgctattgtagcctatctaaatgttattgattgatgaccttctagaacttgaggctttttaaatagtgataccaggaaacaaaccttatatgtggcaatagttgcaatatagagcatgattgttttatttatggttttttaattaatgttgaatctaaagggctggatataatagcaatgcttataaaaatttagcactactatgacagccttaggcagcctcagcatggatattgactcagtacacgtctgtgttaaatcattttatgtgactttggtctagaaggtaagcattacttgtacttttaggaattaaattattcaagtgtattgtacttttaaaaccaaaggaaaaataacttatttaatttacattcattcagttaactacttaagccctaaaaaatcgctcactgttttactgtgttctgtagctctctggtcatcaaccgtatttcacagagtttttatcatttgtatgtgtttcttttattgtgatatccatggctatggtttattataatatttagtaattttcaaaaacagaagcgaagaacggtgtctttccttgcatgatatttattgaactcattcttcttgtgagatacagtttaattgcaaggttaaatatcatctttacaatcttgtatgtaaaattattataatactaaaatgtaaatgtaagtggtaaaaacacatttacaaatttaagagtttaagtactttagttttaaaacaatacattatatgttaaattttttggaagaaaatcgtgtagggctgatgcctagcatgatacaggttcttatcatttgttaaattatatggctgaatggcatatgataagggtttttttttcttccaataatgaattacatcatttagtagtacctctcagcagattttcatgaaaataacataagtttaacactgaattgtactgctt

SEQ ID NO: 66769 - DNA, 1018 bp, Homo sapiens
cccaagatgacaacaagtttgattcatttgatttatagctaaggagtctgttatgtctggacagaatggtatgaaatgaggttggaaagatagacaaaagcagattatatttaggatattgtaggctgtggtaaagagttcggactttaagtgtaatagaaaaccattggagacttttaaaaagcaaaaagtgatgtgataggatttgcatttttaaaactgttactccagctgatttgggaagaagtaattgtaaaggggatggacagcagttttagaagatgggggtcagttctcagactactgcatcaaattataagagctctagaaaatttacatacaaatgttttacaaaattcatttaaacaatctttacagataatttacttaaatgaagataaattctgtttaactcctaaaatttatactgattttactgttttaacaaagcaaatttcgtactcattacctggaacatataccttttatttccctgccattctcactcaccccttcttgtttgttttcaacagtgatatcaaggaacaatattttattgtattgggatctgctttatggccaggctggtcttgaattcctgacctcaagtggtccacccgctttggcctcccaaagtgttgggttatgggcttgagccactatgcccggcctacaatacctgtattttaattcacaaaatcaacataaatctttattgatcattttgaaaaataattataataatatttatcagtaggctcttaaaacttaatttttgtggctgtctctttagaagttcatactattatgcctgtgtgcataaatgtatatttatatgtataaaatagtgtcaaaaacatttatattaaaattacttcacttttatcaaatattttataatttcattaaacatttactaataattattcatcctttcaataaaaaagtttaaaaatgactataattgaaacaattacattaactttctagcaaaaaatttagtatactgtgttctttt

SEQ ID NO: 66770 - DNA, 1046 bp, Homo sapiens
agaaataatgtactttgatctggttttgagaaattattgcatattttattttaagtgcttgctgcctctgcctttccccttttgctcctcaaatatataaagtaagtagcctgacctacaggaggactgttaaaaatcatatcactagattaaatagaattaaaaaagaaacaggaagattgaagatgtagtttaatatatgtatcattaataatagaataaatacaagaacataatgggtgagaaatttatttcttaataaaaatttctgagactagacctttcaacatttagttatacatactttaataaaaatctatcatagtaaatttataatttttgtttgagtatgtgaataatccttctgcgcattattggcctgttataaatctttcaatgaattgtgggttggagttaaattcatattgtgctgaatttacaaaatttaacagtttgctttaaacgttttaaaaattttctaacttagcaccaaatccccccatacctttgtgtgtgtgtgtgtgtgtgtgtgtgtgtgtgtatgcctgtggagaaaagttccagagattcttatttctcatttaaaaaaagttagaaaaaatttagctcttatgtataaattacatgctgtattttactaattaagtctatagccttgcttaactttgtcttgacaacttctaaactgaatctttctatttttctaatgccataactgtgtggatttgcaacaacaaagatctgtgtttttcaactttagctgggcttaagtactacttagcaattctatgttctatttacttatgtgttcctatactctcacccctgtccttaagctagtgtcttcgtcattctcagaggtttattcttctaattcagagagggagagggaaggggaagagaaaaggggaaaatttacacagtgggagagggtcagggaaagggagaggaagagagtttagttatatttgcacctgctttcttttaacacagacaacagattgctatgtatgttcttaatattgtcttaaacaggaatctttctc

SEQ ID NO: 66771 - DNA, 1038 bp, Homo sapiens
attgagtgtacctgatgaacaaatccattttaattcatagtcatgttggaaccagatcttagattgaaaacaaattactgtctttttacctttagttatcaaatatctttactcttaaaaaatgacattttattagtaacttctacaaatgtttgtaatgaaaaaaagaattccttagcttttgctttctttctattttgtgttatacagaactgatacttatttcttaagataaaataatcggaaatgttgaacatttactacacgtggagagaagggaaggaagagggagagggagagggagaaaaaagctggagaggattttgtctgcagatgctaagttttgactttttaaaatgctcctgtcaatcctttagaagatttttctatcacctcacatacattttcatgttaaaattattaccagcttgattaccactttgtctgctctttctttattttctcctttactaagacaaatttaggttgaggtcgaatgtaacaccaaattgttatgttcctttttctattctaatggcaaatacttaaggataaaatacagaaatccctatttttgaggagatggggtcttgctatgttgcttaggctggtcttgaactcctggcctcaagcgattatcctgcctttacctcacagagtgccggcattacaggcatgagccaccatgcctagcccttagaattccctattcttgaattaagtttgatgttatttaatgtaatatttataattcagaaacctaaatatttagtagtggaagtgagtatctaaggagttaaacagaattgtattacttcatgactataaatgtgttggttgatgtatttgctcattaggcagaaatgtgccaacatttgaaaagtatgtacactctaaatatttaattatatatttgcaaatcaccttggtataatttttttttttttttgagacagagtctcactctgtcacccaggctggagtgcagtgtcatgatcttggcttactacaagctctgcctcccaggtacatgccatt

SEQ ID NO: 66772 - DNA, 1024 bp, Homo sapiens
tggttaatttatttgtcctagggcatttaaaaaaatgtgctaggccagtactgcgaaaatatttgttaagcggggattcataggtagcctcatgacaagtgtatcaggtaagagaaaaaaagttggtatatccaaattacaaaaatatcagtctttcagtgaatttatccagatacatgatgacaataaactttgcatgtgtttcctcctccctgttctggctttaatgctgtattttgtgtacttactggacatttctgcttagatatttgaagaaattttgaaatgggagaagattttccgctctctgaaagtaagatagtctttgaaggtgtttgaaacttattttataggttatagtgtattataggaggtcttaagcagaggagtgatactttatcttttaaaaatcctccttttaactctccaagggagaaattacactggtcatcttatagatgaactgaggctcagagaagttaaacattttgcctgtggtcaaatagctaggaaattggagagctaggatttgaacccttgtctccaaagttcattgattctactatgcaatataattgccctgaatgtacagtaattcacttacttagactagagtttcctaatttttattagctgtaggtaattattattagtttgacagttgaaaaataacattgcagttaaagtttccaagataatcagcaatgacttttatgcattctaattattactattatcttttcatgttcacagaataatatatggcttaaaatgaataggaaaaaaatacccttcacaaatctattacctcattaaatgtttaactatggtgatgttctttataaagtcctgtataaggagtagctggacctttgtgcattaattgactcacataagctggaaaggagatcatttttctgtgttgaattttgtttttgagatggagtctcactctctcgcccagactggggtgcagtggtgcaatctaggctcactgcaacctctgcctcccaggttcaagtga

SEQ ID NO: 66773 - DNA, 1024 bp, Homo sapiens
tttatatattttaaaaattatctcttttctcatataacttgagactaaagcagaaattggtgttttttcatttggtttttcttaatctcaatttttgaaagagaacaaagtttaacaattctttaccataggaaggcaggatttcaaaccctgcttcttaattaaatcatttagtttctttttatcagctgataccatatatctttcttacagcagtgacagagagtcactgagaacatgtaatgaacaagctaagtgacttctgtagccagtgagttgatttgtctattgtggctctattgtttgaatttttaaaatttttaaaataccagacatatctattttcatttactcaggcatttaaaattttcatatatttgtgtttagcattatatttggagttttagagagattcatgaatggaaagagaaatatacctgcctgttaattcagcaagaatttattgaacagttctatattcctgacattgttttagatgcctgtgatgcatcaatgaataaaactggccggtatctctagccttggggagcttataatctagcctattaatagctcatgttctaattatgaaagaaaataaaaaacatgcacaacaattaggtagtaattgcagttactaaacttcaaaagaataagcaagtatatggattaaaagctcaggtaatttaaataataaagaaataaatgactaattaaagtggggttcaattaattcagaagatgtcttaaaggaggtatatcttttatttttttttggagagtttattaaataatttttttttattatactttaagttctgggatacatgtgcagaacgtgcaggtttgttgcataggtatacacgtgccatggtagtttgatgcacccatcaacccgtcatctacattagttatttcttctaatgctatccctcccctagccctccaacgcccgacaggccccagtgtttgatgtttccctccctgtgtccatgtgttctcattgttcaactcccatttatga

SEQ ID NO: 66774 - DNA, 2016 bp, Homo sapiens
gtagggatgtggcaggtcagaacagagaagatttgtatttaatgataaagagatgtcattaatttcaaataggagattgtacaaatttccatatacctttgaattttagaggattgaagtccatgggaaagattgttaaggtaggttgaagagttgaaggaatttgataaaagtctggtttagtgattttcactgtagtggttttagcctaatggctgggattgaagtcaggttatagtgggttagggagtgagtgaatgagaggggaggatgaataagattttacacatgtatacctcttttttcaggaaggtggtttcaagaagagaattaaaggacagtatcaagagggaaagctcaagggttaaaaaacagtgcatcccatgcatataacaactttcttttcttattgtttaaagtgtcccattagccagtgctgagtgcaaatctggctttaatattaatataatatacatgctagcagtccttttgatataattttcagtaatggattgtaaaatcatcaagtgaaagaacatttaataggcagaatcacagttgaccgtaaaatctctgagactaatgagagcacatagggcattggctaactccagattgccccaattgaaagcactttaccattgcctcgccctttcattttaaaatattttccacaaaatgtggacctaatccatcctacctacatcctacatcctacttgtgagatttttaacctcatttatcattgctaattttgatagagttctgtatatctaatggaatgctcttaagacagttgaaacccttcatttcttgttattttttcactgactgttgcatttaataagtatttggtgttcattatgagaatacagaatgaagaaatacatgattattataactttgaatgccttctataatcttggaaacttattagattttaaaaaccagttttattgtggtataatagccataagttatactcactgaaagtgtgtaattcagtaatttttaaatatatttatggagttatatagccataatcaaatctagtttttgaatatttctatcactctaaaaaatatttgttgctatcacttcccattgctactcccaggcccaggtaaccactaatctttttgtctctttttttccatttccgccctctgtgggtatattgtaatacagttctgacactaactgcccatcaattagtatcagactccacaggtttaagagtttagccctccagaagactgctctcaattcagatgccagccacaaatgcagaacattcatgcttctgacgactgactataaaattggagattcccaaatgtataggttcagtaattctctggaatgactcacagagctcactaaaaatgttatatagttttattataaagggtacacataagacaaggtttggaagggacctggacctaaagcttccatgccctctccctgtagagtcagggtacattaccctctctgcatgtcagtgtgtccaccaagcctcagtgttcagagcttttattggggtttcagtatatgggtgtgattgattaaattattggccatgtgattgaactgtctccagctcccctcctgtccttggaggtgctgttggcctagagttccaaccctctaatcatgtgtttggtttttttggtgaccagtccctagctggaagctatcaccatgagcaacctcatcagcatagcaaagacagtactgtcaccttgaaattccaagggtttttgaagccctgtgccaggaactaggaacaaagtccagatatatttttattatgccacaatctaaactctctttttctgaaaattttatatacatgtaattatacaatatatgcccttttgagtctgccttcctttccttaacataatgcgttttgtttttttgagatggagtctcactgtcttccccaggctggagtgatttcagctccctgcagcctctgcctcccaggttcaagggattctcctgcctgag

SEQ ID NO: 66775 - DNA, 1531 bp, Homo sapiens
ttctgttgttgttgttgttgttttctctgcccttttcccctttctttttctcccagcttggactccagggcatcttattcttggtctgcacaacagatgcagacagaagaatcctctttttctctgtttatggtcagaggactggaaagaagggcccctgtgcgaaggagtctgtgtggaacatcactgttttctttgtgttttgtattctggtttttgttttacttttctggtgggaccccaagtaagccttaatcatgaggccgttcccctgcaatggtagtggtggtggcaatggcaactatgcaggcatttaaaactctgaaagataatctttttctttgaccagataaacgggaaaaacgggcccctgtagcccaaagaatgaggggagaatatctgttagtttttgcttttttcccccctttcttgccacttctccccaaggcagatgcagttgcagaaagtatatgagtgtgtgtggaggcaaaaacaccagttttgtagccagagaattaagataaggggtctaggagacagatagtgttggggaaattatggagaggcagtaggtagagaaaaagatgacctaaatctgtgcatgaagacccagacatccctaagctgagcatgtgtggaactttttcaaggagatgaaataaaaagtttgataactgaactacattgtagaccaccatctttgtcctagattggcttttaggtgacacatatgaggatagagtaaatatcactaaaaagacttgggaaactgaattgactttgaagtcacagcccaccaggtaggttgggacttgtggtttgaagctaacagggttgattgtcaacaacaacaaaaatattaaaaacgaaaacaaaaacaaatccattctccagaggaccaaaagcctttagcatgaccaagagtgtcaaaatgcaatattcaaagtctccctcccctttctgggatacactccaacattattggacataaccacgactcagggaaatcatcaactgttgtaggaaaaacagcagctaacaaatgccattcctaagatgacctggatgctggaattatgacaaagttcttagagcagctattataactctgtcctgttgaagtcagagcaaacacttttgaagtgaacagaaagaatgaagttctcagcaaggaaagtagaaaaagaaccaacagaaacttttaggataggaagtagcaataatccaaatatattaaaatactaaaatacctaaaaatgttctagatgagttcaacagcagaatggaggggacagaaaaaagattaagtgaaattgaagaaagggcaatagaaattataatatctgaacaataaagataaaagacaataaaatgagcacagtgtagagatctatgggatgatagaaaaggtataacaattacgtcataagagacccagaggagaggacaaagaggttggtacagaaaaaatactgaagaaataatagctgaaaacgttcatctttggtgaaagacacatttacagattcat

SEQ ID NO: 66776 - DNA, 1022 bp, Homo sapiens
taccttccctcaataattttgaagcaaatttcagacatcatatcactctatgtaaatatttcagtatgtatccttagaagataaggactctccttttaaaaatataaacacaatgctattcatctcactgaaaaatttttccttattatcgtatttagtcagtgttcacattttcccagtcacctctctctcatttgttaaaatcagaatccagataagatctatatgttccagttagttaagatcttaaatttatttgaattggttggttcccccctcatccctctctctatggtttcctagaaatttattgaagaaaccagaccgtaaagcttctcacagtctgatttttgctgatccttgtggtattctttcttggttctctgtatttcctgcaaatcagtaatagatctagaggcttgattaaattcatatgtggtgtttttttttctcctctcagaaataaatcataattggttttgtgtacttccatgaagagacacataatatctggttggctttgtttgtatgtcttgttagcagtcattggtgacgattacctatcattacttgtgtttattaggcttgcaaaatggatatattcttttatcagttagaatacctgtgtaaagggaaacttgtattcttcaactatttggttgcctttcatatgggaaagataagataaagtcttgatttttctccctttatttaacattattcaaaatgatgcattagtttataaaaatcctcaaaagatgagtaatgatgttttataaatcattattaggaaatcatagatttaaacatattttgtgtgtttcaatctgttgtagttatccttcttttttttttgtgagacagaggttcattctgtcaccaggctagagttcagtggcgtgatcttggctcactgcaacatttgtctcccaggttcaagtgattctcctgcctcagcctcccgagtagctgggactacaggcatgtgccactacattcagctattttttgtatttttagtg

SEQ ID NO: 66777 - DNA, 1039 bp, Homo sapiens
acacctgtaatcctagcactttgggagaccaaagagggaggatgcttgagcccaagagtttgagactagcctgggctcaacatagtgagatcccgtctccacagaaaaaaaaaaaaaaaaattgaccgggcatgtgcctgtagtcccagctacttgggaggctgaggtgggaggatcatttgagcctgggaagtttaggtttcagtgagccttgatcatgctttgcattccaacctgggtgacagagcaagatcctgtctcataatgaatgaatgaatgaatgaataaataaataaataaaatacataaaataaaaaatcatttggaaaggccaaagacagaacagtagatacaaaatcagcacttttctttttaaatcagtcatgtagaaaaaggaactgctttatgatacttttgaatctgatttctaagagaactcttacaaaaatctcatatactttatttaataatcttgtgaaataggttctacttgtcaaattctttcttgcttctttatagattttcctccagacttcaaagctcttactactccctgataaacataatcagcatctctgtgaagtactgtcactgactacttccactttatttttggttgctgtctgtgaggattattgtagataatgccatggaaaacagaaaaccatctggttaaaagagaagtagtggtaatgatggtgttcggtgagagagagggagagagaaggagagagaattttaaacaagaatcaagcaaactttttcttagtttttttctttttcaatggtgttttaataattggaaaatttgaaacttctaaaatacttagaagtcttgaaatttctaagatatttttaaaaaggtaactctctgtaggtatttgttggcaatcactgtgagacaaagttgccttaaaaaaaaaactttaaagtgctaggtaaactatttgtcattaatgttaaggaagctagcattaatatgaaggagattcctgaaggctaccagtatcacagaatcagagcagaaggtccttggaga

SEQ ID NO: 66778 - DNA, 1060 bp, Homo sapiens
ctgctctcaagaggcttatattttaaatctatgcagtgctataatagaattatgtacaaaatgccatggaaatttacagaaaggagcatcttagctttagaaaatatttgttatactctgaattggaaacctagtacagacaccttgtattatgagtagttatcgctgtggctcacatctgtaatctcagcacttcgggaggccgaggcagacagatcatgaggtcaggagttccagaccagcctggccaacatggtgaaaccctgtcgctactaaaaatacaaaaattagctgggcatggtggaactcctgacctccttgtgcaatgcttttacaagtggttaatgtttctgaagagggtaggttagagggagtgttaagaggatggaaacctccttgtattgacctctccaagacggtgcgttcatgtcaaaaactaatcaagtgcagctgcaagattaattgtgtgaggaagctgtaaacatagaaaactatggcctctacccagagctctgttttatagacaagcattcactttagaactactgtcaatgaacctgactgagcaataatttgctcacttgagcctacagtggtagtatttaaaaattactgagcttgtaggggatgaggtagatacatatagatttctagttgaggcatttgaggaaactagagtaggtctgagtaaaggagaagatggaataaaataacttgggtttgtggctaggagcggtggctcatgcctgtaatcccagcactttgggaggccgaggcaggcgtatcacctgaggtcaggagttcgagaccagcctggccaacaaggtgaaactgcatctctactaaaaatacaaaaattagccaggcgtggtggcacgcgcctgtaatcccagctactagggaggctgaggcaggagaattgcttgaccctgggagacagaggtggcagtgaatcgagatcatgccactgcactccagcctgagcgacagagcaagactccatctcataaataaataaatacataacttgggtttgtaaagccattagagaaatttgcca

SEQ ID NO: 66779 - DNA, 1079 bp, Homo sapiens
gtctttgtaattggcctctttcacttagcataatgtattaatgtatttgaggttcatccatgttttagtatgactgatattaatttttgaatttaaaactttttttaaaaaaagtgaaaacagcaatttcagaattactcatccttctgaagtatattgccccatggctgtgaagtggtaatgaattatagagaaattttttcaagttaaaaattaccatgtattgagcatctatgatggtgctagtcacactattaggctttatgtatgttacattatatataaatccttatggcatatgtaataggtagtattatattgtttctacaagtgaacaaattaaatgatatgatcattgattttttgtgtcaatttacacatgaaagtgtaaagtatatatatgtgcagatgtatactttgcagctaaagttaaaatatgtaaagtgctaaaacattgctgtaatacacagtgaaaatgtcattcactgtctagagatgtccagtagaactttttgcagtgatgagaatgatctatatctgtcctgtctgttatggtatccactaccacatatggcttttgattacttgagatatggctagggtgaatgaggaaacaaattttaatattatttaatttaattaaaattaaattaatttaaatttaaataaccacactctgattccagtcatgatttgatacccgtgatagatttgctcttccagttggagagtggaagcaacttgatcaaaaacatgaacaaagtctatgaaaaaatggtatgcaagatcctggatattaagtattgaaggacagtgttccctgagatataggaaacaaatgtgctctacagttacccaagcttactgtctagagagaatttccaggcatggatcaaagaggcgtcactcagacaaaacctagaggactttctgagttgaggaaataaagctcaaagtgtaggcggaccatgctggatagagttcacagaacaggggactagagaggaaagtactcagctgattactgagtagggcttacatgtgaggaaactgctccaggccaaagaaggaacaatctg

SEQ ID NO: 66780 - DNA, 1061 bp, Homo sapiens
gggatgagccatcgcgcctggccaaggttttgttttttcttttttaatcaccaaataaagataacatctgtgagttgtgggtaacctattcatgtagttggagttcttgaagcagaggagaaaggagaagaaaaaataatgatgaaataatgactgaaaattactcaaatttaatagaaactgtaaacccacagatccaagtagcctaataattcctactacaggaaatattttgaagactaccccaggcacatcataacaaattgtgaaaagacaatggagtgacatttgtaaaccactgaaacagaatgatccatcaacccagaattctatacccagcaaaagtatctttcaaaacaaaatgaaaaaactttttgcagacctacatttttaagtcaaagtgattaaaatatgatgaatttagatgtatctgtacatacatgcactatggatgacaataatagcacaaaggtcgagggcagaaatggaaatacattattggaagatttgtattctatgtgttaagtagtataatgtcatttgaatatagacaatttagagatgtgtactataaaccataaaaccaacactaaaataaaccaacaaagggaataaaatggaattattgaaaaatactcagttactgggggcagtagcttatacctgtaatcccagcactttcagaggccaaggtgggcagatcacctgaggtcaggagtttgagaccagcctggctgacatggtgaaaccccatctctactaaaaatacaaaaattagctgggtgtggtgacacatgtctgtaatcccagctactggggaggctgaagcaggataattgcttgaacctgggaggtggaggttgcagtgagccgagattgcaccactgcactttagcctggtgacagagtgagagtccgtctcaaaaaacaaagcaaaacagaacaaaaactcagttaatctaaaaggggcaaaaaggaggggaaaaaacagtaagagacaagtagagaaataaatagcaagatgatagatttaaacataaggataccaataatcacattaa

SEQ ID NO: 66781 - DNA, 1903 bp, Homo sapiens
atgtctcttttgaggatttttacagtatgttattttggtatgtagagctctcggaaagttctttttttaaaatgtcttagtacattaaccatactctgaaagaatttagcctgtaagcttttaggctatagccgataagcctaggtcttctcatttttgaagctggaccattctgcctcgttatagcaattatcctgtctttcttccatcttattattgtttaaaaacctcttatatttattattctcagtgattttatttattccatccaaagctttggacctctttcttcactagggctaggatactgtagtagaaatagaatgtaggatttagattaaagacttagattctaaatctggtttctttttttattagctgagcaattctggacaagacactttgctaagcctccttttcatctgtaaatctgatgttgtgaggattaaataaaataccatacagatattgttattacctacccgtgtttatcagagatcttttcttttcagacttcttgacaatatttgacttcaaggatattatacttgtctagtatcctttattatttgccatttattctttttatcattttgatcttttctttcctttatccattgatattcttggttctaccaatctttagtccatcagactatggttataaagaaaaatagaagaaacatattgtattgctcacaaaatgaaaatcatcacttggaacctgcacctagatttgtaaaaactgaactaataaattcagaaaagaatctcaaacaccaagctggagaagggagaataagacaaattgttggaaaccagacccaagggaaagagagaaaggaactgaactacactgaatatatgtcatgttcctggcattgcttttgttagataattgatatattactttatattatgcacagcaaaatctttataataaatcttttaagggaaggtctcacctattttatagaggaggaaattgagtaacaggcatattaaataacattctcctaggctatttgggtccttattgtttatttgcatttttccccccaagatcattgttttggtaaacattgtttactttggacagttgagttatatgctaattatgtaggtagagttggtctcaagtatgctagcaaaaataaatgaaacttgagtgtttttaaacaaggataccagatatgagatttatgaaatatattttgcactgtttcggaaatgtatttctcctgaccatcctttagagtgggttgagtgggtagagtgggtagtagtaataattcaggaagccattccttcctaatctaggtatgtcgacaaaactttcaggtctgaaggctgctgaacactaaataattctaaataaatgaaataactaaataactctagctattctgccatctattccctttactggtaggcaaagctaaattggtaacttaaatctgtgaattatgccatgactttcaaggcgaaatccagacgtatttgaaatgtcttcacaaatgtggcttataacagtctctgccctcttccctcaaatgttttctctctgtctatacttttctgcttataagctccttactgccctattctcatacatgtctttcttgcgttctactagtacattcctcctttctgagattctttttcagaaagactaaaatatgctaaatatcttcttgtgctttaggagtcttacggcaaaaattctgtactgactcaaggatacaatacttagtaggagtgaatgaactcttgaaaaatatattttcaactccatgtcctcatattctcatattaaagaagattaaacaagataaatatcatttgagccaggtgtggtggctgatgcctgtaattccagcagctcaggagactgaggcagaag

SEQ ID NO: 66782 - DNA, 1020 bp, Homo sapiens
actcatgtactatgcactgtactaggcactggggacacatgcagacaaacacgtttatgtattcacatatagtgtaaaatactaattgatgtgttgtagactatcctatttctgaaaccagtaccagaaagattttaaatattatcacacttaaagtgaaaaaagttattgtgaaaaagactattgatagtattttatgaagaaaaagaaattgtgctttgaattttcttaaatataaacaaatacagttgatcttcaacaattatatacttggcgtgtatggtagactgtgttattgttcaaaaacctttgctgcccctccctggagaaactttatacttcccttccctattgacatcatgcctggagttacgacatgttttggctaaagaaatatgagtggaaatgatttatgtatacttatgagcaaaatctttaagtcagaacacagtttcctatgtttgttctttttctctgctgtgacaatcagcatttgcagataaagtttctctgttaccctaaggtacaaaatgaagatttcacgtagttgagccatagctaactcttgtttgacatgtagcgtgagcagaaaataaactttttttgttaaaaggcattgacattttgttactgcaacataacttagctcagtggttttcaagctttagcatttttaagaatcctgtggagattttgttaaaacacaagttgcagagattgttgggccccacacttagaatttctgaattcaggaggtctggagtggggaccaagaattatatttctaaagtgaaaagcttttatgaaggggaggtggataagagaagccagcatgaagtcttgaccaatggtacacactcaggcaaatcatgtttagataggagaacatgtggaagtgagcaactggacattggttcatttttttttttgccttttctttttgagttggagttttgctcttgttgcccagcctggagtgcaatgatgcaatctcggctcactgcaacctccgcctcccgg

SEQ ID NO: 66783 - DNA, 1247 bp, Homo sapiens
aacggaaatgctctcccctctactcactagtgtttctgatcagattaccaaattttacctctcggagaggctcttcttaaccatactgtgtaaagtaatgaagcctgactacgtcactgtttctccccttatcttggaggtttgttttttgttttgttttattttgtttttttaccatacctgttatcactatatgacatatttacttttttatgtatctctttcccaactagaatgccagctctatgaaaccagggattctttattgttcacagttatgtccttagaacctaaggcagtgcttatacatagtggccatttagttaatatttatcgaataagttggtgagccttaatacttaaatggagaatgtgatttgatttacactataataatcaaatccatagaataatgaggaaccttcaaatggagtctgctttgtttaaatctttatattgtattttcaacattgaacacggattacaattgtgtttcatagttaggttaatgctcatacaatactcttagtgtcaaaatgtgggatcatattactattttaaagattctttttatgggaataattacgtttttgttctttggacatagacatctgaccctcaattacattaacaaaccttatacacatgaatggaaagaagaatagcctcttttgaatccatgctaagactttatcaatatgaagtgcttcccacagagttctgctgaaagaactgaacttccatcataatgaaattgcaaattcatttgtatatgcccctcttatatttgaaagctactttttgatgttttggttggcaattaaatttattgtttaaggtcacaaatatgcaattctgactagaacaagttgtcagaattctttattcagcatagcacaaagataaatggctgtcttttaacaataacatatgaaagccaaaatttgttcccagttatacataatcttttaatcagtctactgctttctgttttccagtcaatagaccccttaacctgcttcctcaccatcttacctatctagattatgggtttttaaattactgcaaaacacttcatcagatggaaaaagataagtttaaacattttgatgctataattttcccatgcacattttatccttccatctgaattcttttgcctttacccctattctgtgtaaggtggaaaattatgtagtatgttagctaaattctatggttacatttctcactgttaacatgactag

SEQ ID NO: 66784 - DNA, 1051 bp, Homo sapiens
atttttctatgaaaataatccctactcatgctaatcattaagagcagttttctgttaacattttcaagagcatttggttttattaagtagtttttggaattttagtgcttttgtatgtaaaactcatttgtggtttaggaatttaaaatcctgattattgtcaacaaaatgtcaagaaatggaattttggtgcataggcaagcttggccagtgcttgtgagactttttaagtctttgtaaatcaaagaaagtaaactcattccaagatttcactcttatttttaaggtaattgttttaaaattattgtttgaggttttaaggctttattttgctgtgctataaacttagattaaatttgttttgtcttgtttctattttgagatggtaaaattcgtattctatcaaaaacttcaaaatttgtttgtaaatcaggtttttctccaaatttcctctagggtttcatcagaatgtttagcgtggggtacttgatccagtgctgcctccgaatcccttctgcatttaggcatctgtttacacagccatctcggctactttctctcttctacaataaagaaaacttccagcttggagcttttcttggctcttttgttagtatatacaaggtaaggcttttagaagaggaaagaaaaatgggaaataaataacattgctattgttagaatgagagatggccttagttcacttattttttaatgcttctttctggaatattcatacatatcttgacataaccaaatctatacaatatattgggaagtgagggtacagaaatttcttcttttaaaatattatttaatatactcgagtgtgtagacatgtttgcatttacatatggtattacacattgtcagactcattttctttttcaatatatagacactcagaaaatatgaattttttggatatttccaatatcaaaaatgatattaatatgcctggcttatttatttttttatcatatttactgcctggttattaatttaaatgtatttcagatctttctagctgaaataaacacttgatagaatc

SEQ ID NO: 66785 - DNA, 1048 bp, Homo sapiens
ctcaaaataatggccaatgtatatttatcttgtttccaaaatagattataacttggtatatatcttacaaattctcatatatcccagtctcttttacacattatgtacatttaatcctcagtatatacttttggattgatttgtatgtaaagtatccaccttatcatttcctttgttgctttgctctttggttatggtagcttatatagatcttgaggattctttttatggcaattcagttgggatataatttaaaaagagtcagatttacttagcaaatattttaatgccatgttctaggttaggtactgaagatcatgcaaagttgaagaagagaaggctgttgccacctgtcagtgacttcttttgagttctcatcctatttatattctttattttgtggagaatagtgcccggcgtgtagacaccattaaatgtttactgaataaattaataaaggatgaacagatctatcagggaagagaacacatgagcactgtacagaaagcattgaagagtaaatatcatttaaaaagcagaaataaaatgctactgaatttacagaaaagtactactacttgaagctgggatttggagcaaaactgtgagggaaagggaagggctgacccttaacatcattatgaaaaatgtgacatcgtttgagctctgaagggagtattaggattcagaaaggttgtaggcagggagcacaatgctcaactatgtttttaatgctgaggttttttctttataactcttgtcttatgcttgttttgcagacaatgtatttcaaaggcattgaagcagggaaggttccctattttcctcatgcagatactatcatctattccatctctacagcaatttgcttccaggcagtaagtataactttttgaaatgagaaattgaatgattcctgtttctaatgtacgttaatcaaatgggagagaaacaaactctgggaacatttctatttacagtattacattttaagcttcttttttgttttgttttgtttttttttcagcaagatagcttaccagcttct

SEQ ID NO: 66786 - DNA, 1128 bp, Homo sapiens
aaaatgtacaaaggggttagatagcttgccagagtcactcagttagtaaatgaaggagctggaacataaaccaggcagtctggcttcagaactttccctcttatccatgtcactgtagatcctttacattgttattgtttaatcattttttgtcatttagttttctgcacattaataagttttactaattgattattttggaagggaacttactttggaaaagtactgaaagtcacatttataggctgtcagaataatgctggccagtgattcaaaactaatttcattcagctgttttctccagaaaggaaatgcttgtgaataagcacagagacccagaaggtctatcctgtacattagctaaatttgtgtgtttaaaaaatgttatatatcttaggttaggtaatggataacgttagggtatatttttactgtgttgtgtctattaaacatttgaaaacctatatgctgtttgccttttagtcattaaatgtttgcacatttgaatgtgttttcatttgatggtgagacattatgatgtcaattatgagagaaattacatttaatgcttttgcctcattggtaatgttagctcatttattgtttagtttcctgtgaattcattcatcataaaaataataatgaacctaattttctatttgatacagtctagtggaaagaattctagaagggtttaaaataatggttgtaatctctgcggtttcagatctggggattatctctttaatccttaatcctaactggattatctctttaaataaaatatgagacagtgtatctcgaagaagagccttcatgtgacttgaatctgccattgaatttagatcctttgccacgttagccttttctgttttcccatcccacataagataagtcaactaaaatgaattattttattttataaactatattaatatttgtttactgtattctttgttttacagatttgctgtcatgaaccgaaaagtccttgatgtttttggtactggtgcatctaaacactttcaggatttcatccccaggttggatccaagatacacaactgtaacaccagagttgcccacagagttttcctgaagatgactgtaacttattaatgtgactaaa

SEQ ID NO: 66787 - DNA, 1050 bp, Homo sapiens
gggtaacatgcaaagaataatggagcaaagaagaaaaaatagaaaatgggataatcctttttctactaaggggtaaccatgtgtgttattcatcttcaggctgtgaaggcggcttcccataccttattgcaggaaagtacgcccaagattttgggctggtggaagaagcttgcttcccctacacaggcactgattctccatgcaaaatgaaggaagactgctttcgttattactcctctgagtaccactatgtaggaggtttctatggaggctgcaatgaagccctgatgaagcttgagttggtccatcatgggcccatggcagttgcttttgaagtatatgatgacttcctccactacaaaaaggggatctaccaccacactggtctaagagaccctttcaacccctttgagctgactaatcatgctgttctgcttgtgggctatggcactgactcagcctctgggatggattactggattgttaaaaacagctggggcaccggctggggtgagaatggctacttccggatccgcagaggaactgatgagtgtgcaattgagagcatagcagtggcagccacaccaattcctaaattgtagggtatgccttccagtatttcataatgatctgcatcagttgtaaaggggaattggtatattcacagactgtagactttcagcagcaatctcagaagcttacaaatagatttccatgaagatatttgtcttcagaattaaaactgcccttaattttaatatacctttcaatcggccactggccatttttttctaagtattcaattaagtgggaattttctggaagatggtcagctatgaagtaatagagtttgcttaatcatttgtaattcaaacatgctatattttttaaaatcaatgtgaaaacatagacttatttttaaattgtaccaatcacaagaaaataatggcaataattatcaaaacttttaaaatagatgctcatatttttaaaataaagttttaaaaataactgcattatggagtttatgtttacttcagggaattttta

SEQ ID NO: 66788 - DNA, 1051 bp, Homo sapiens
catataatatacatatattactgtgcaaaagttgataaattgattatgattatgtataaactttgatatcttctcatatttaatataatatagttgtgagcactcttccatatcattaaataactttctagacattttaaatgaatatatagaaaatgaaacatcattaatcagtcccttatcttagaatatttatttcggttatttacaatctattagtagtttaaaagtacttcatggaaaatccttatacatgcatcttagttaacttgaacttttatttttagagaagacatgccaggctgttctaggctattgatacatattgccaattaccttcctgaaagattgtaccactttccacttaggcacagagtgtgaatgcctgttttaattactctatttacatcagtaaagactatatctgaaattatctcatttttggggacaggtattctaataggctctacaagtatgatcacaactttgtgaaagctatcaatgccattcagaagtcttggactgcaactacatacatggaatatgagactcttaccctgggagatatgattaggagaagtggtggccacagtcgaaaaatcccaaggtaatcaagcacacattttatcattaataaaaatatgaatgctgaataccatcctccctcctaagcagtcctaccagtgttgctcgccattttattggtcatcccagttgtaactttttatgtgatctgttaacgatctttatctcctattgatacatattctgtcactctccaagtcctatttatgagtttttctttcacatgtctgttgtttccattgccccctttccattttctacactctggcatgcagctttgtcctgtttcccccatgctatggattagcctcctgccggtaaccacctgaggggttcttcctgcctgctgcataaagaaaaaccatggcaatatagtagagaaagagcttaagagacactaggctggccatgccacgtgggggatggagttcatattcaaattatcttgtccaaagctcataggtag

SEQ ID NO: 66789 - DNA, 1114 bp, Homo sapiens
ttcttccatgccagtgacccagtgaaatctatggatattgcaaatcaagtcatcccagatccttgcttaaaggatttcttattcttcagaaaaaagtccagatcccttaccctggctctccatgatctgacctataactcaccttttagcctcatggtccatcccctcattctcccctcatgctgctgctgcacagaatgcttcatgggccctgaacatgatcccttacatggctatgtctttgcacatgccactccctttcttgccaatttcctcctcccttggtccatatcactaagcaactcctcctttggagtgctttttctgagggctactttctcctgccctgccaagagcaccagaagtccagggacttctctccaaaatagtacttaccattttcatctttacaagatggcatcaaatataaggcacatttcacataaatgtgaaaatatgaaaaaaaaatgggctaaccagaactgattaaatatggtattataattttctgtttacttccttctgccattagaccttttgccgacaagtgtttaatcactcacttctgtaacttagttcctaccacaatgtctggttcgtattaggctcctaggaatttttttccaattagcaaaagagatattatgggtgatgaaccaggtggtatctctagagtattcagatatgatccaatatagaattaggaaagcaagtctttactactcctaaaatcttgggagctggatatagaaaaagctaattttcctatataaattttaaataaatttagaaaaagtaaattatttactaaaccctgaatgtttgaggcttagtgtgggaggaacttttacatacattgtctaatgtgattgtcactaaatccctgctgtagatgtggtcttcaatgtttggagatggaaacaatctcagaaaaggaaaatactttgtaagatcaaactacatgttaagtgacagagacacaattcgaaaacaatactcatacctcaaagtctttagtctttatattatgttgctttgcttctttcctattcctctcaatatttcccaaaatgtgagatgtctacaagagatttatgaaaagaaaaagcactaa

SEQ ID NO: 66790 - DNA, 1033 bp, Homo sapiens
aaactatagatgagattgcttcattttaaaataatcttattttttgactgtaaaaggaaatcatatatattttaaaacttaaacattccagaaatatgcaaaatgatcagagaaagtttaccctaatcttattctgccagaacaaccactgatgacaatttgtggtaagtgcctgcagatacgttaacatctaatgccattagtgttgatcaatataagatcacagtgcagtttttttgtaactttttttttaacctaacaatgtgtcttgaacatctttctatatcaataatatggacttctcacatatattttttaatggtttaggtgtcccattaactagatagatcataattcatctcaccaatttttgattaataggcttccgccatattttaaaaattttgacataatgaacaatgctatactgaaaaacttttatcacatttgttgcattatttttaccatattaaatgatttttgtttaggttccaagcaggagaaccaggagattgttggataaaagcagaacattccatattacctgtggtgttactatctgtattttctcaggtgagaaagccacaagatattaaataatttgttagaattacacatttaaatgtaaacattccagacatacacagaatgatcagagaaagttttccctaatcttattcttccagaacaaccactgatgacaatttggggtaattgcctgcagatatattaacatataatgtcattaatggtgaacaatgtaagattgtcgtgtggtttgtgttttaaaccacacgtaaaattacacatggaaaatgtgtgattttattgttctgtacattatctgctgtcagcaacttaggattttcttattaaatagcttagtagttcttttccatgtttttgaaaagggttgtctacagggaattacagaaaatggatgtgtcttgtgatttttacattatgatatccaaaagttggcccccaagctgataatgactatttcctgaaagtaagtaatttcattccagta

SEQ ID NO: 66791 - DNA, 1012 bp, Homo sapiens
gttattattctcgtaataaaattaaagagtaaaaaaaatacatacgaattgatagaaaaaataagatcttaattgctagaagataaaatataacattgggattaatatgttttattgggggttctcatcatgattatccttccccagactggtctgatccagagtggaggcaacgtggtcatggctggtttatgcctgagttaatgtgctaatcagactgtgcacttcctaggagatgtttaattgtgacatgtcatgagttttggaatcttaaaattagctaagaggaaaaaaaaatctattgagagaagccaaaatgaacaccgaaacaagcaaaccaacaaaccaaacaatagcctgctccactcccccatggcaaccttttaaataagtcacttcattgattgcttaagattaaatccattttcatttatttattttcaagaatggaaaatgtagttgcctgaactttatagaaattagtaacaggttgtgttcaactctcagaaatgtagttttcttttctttttttggaaatattggagcagtttaactcaaaacaccatttataggagctcttgaattcatgtttacctgttttgagttgcgttttttacattttaataattaaagaatatcatgtaattcccataaacattttaacttgaaaagagaatgattttatgatatcagattcaatgtgtcttagttatatatatatattcaatgtgtcttagttatatatattatatttttccctccaaactattcaatttcaaactagttattcacatggtgtcaggataagattttaatttttattttgcttttattcacaaatattgttttagatctgctgcatgatcttgaagctttttttaaacttttattgaaatatctatgctcttgagcattcagattctttctagtgaaacactgggattatctttctttagtcaatcattatccattagaaacattaactaatttaccctctcaagagtcctagaag

SEQ ID NO: 66792 - DNA, 1052 bp, Homo sapiens
ataatgaagtgttgaatatctcatgtaatttattgaatactacactgaatatgaaaaccagagtggttgcatgggtacttgaagtatggtttctacttaatgtgtattgcctttgcaccatcataacgccgaaaaatgaaatctaaccatcgttgagaaccatctcaaaaacctaaaatactatatggaaatagagctaaacttattttatttgactttaacagaacaaactcaaagagaaaaatattacaggaaaatagatgttaaatctttatgaagaaaactttctaataattagacctttcataaagtgaaatgagcctcctcatgaagtagtaagcttctcatcactaaaagattctgagactggataactatttatctgagattctataaaaaggattatgtagaaggttgaactagataagctctaaaattccctttaagattctacagtttgaagattttgttagaaagagttcttttttaactagcctttaccattttccctcacagcaaagcaataaacaatatgaaatttatttttctaatatgtattatacctattattaaatgtacaatcttacccaaattccctagagtgtacatatttgcctttcacccatctaatggcattagtttaaagccaactttaggtatgctggttttggtcacagtgatgtatttggcgcctgttgtttccttacctatagaacagctttcctggtaaaccaagaggatcgatgaatgctctttccaggagcatcagttggtcattcatcattctcactgcaatgggacttcgagaagaacatatacataattataacgcaaaccgcagaatcatgcttcaaaaataatattaaataaaaacaaggcttgggaaaatatatttctaaaattgatcaatttttaacaaaatgaatattaacacagtaatgctttacatggtgagccacaaacagcagagtcatctttctaatatttacagtcagcagagagacctattggaaaatcgtttgttatatttttttacatcacacaccaatcaa

SEQ ID NO: 66793 - DNA, 2881 bp, Homo sapiens
agaaaatccaaaaatcatttgttctttattaaaatgggaagaaagtaataactggtcagatttttttcttagattctgatttgtagaaaataaataaggtttctagtgcatgaggttaaggtgttgtctgatttatcccagtaaacaaatgtctttcatttcagtcttcaaagaatgttttgatgacagtacttagtaggttacagaatgttaaattggattaaatttagtaggagttcttaaattgtctttttagctgtgtatcaatattatggccctgaaagaaaaaaacaaagggaaggagtaagtgtgttctgaaatcataaaatttatgaagaatctttgtaccatgatatattttcttgtttaagcctcttgggaaatatagaagttttttgcccttaaacattaagtgcttagttgttgtgcatggtagttttttctcagatgggtcaaattcctctttttaagaaattaattatgtggcacttttttaacttacagagtttctcttacattacaggggaaaaaagttgttccatgtagacatgactggcatcagactggaggtgaagttaccatttcagtatatgctaaaaactcacttccagaacttagccgagtagaagcaaatagcacattggtaagtacatcttataattttgggtaaaagttcttttctatacatcattctttatgttactgtattttaaagtattgtttatatctcagctgatttgggggtaagattttataatgactcccattaaaaaaaattaaattacttctatgaaactattttaaatgaaaatttctgtatagtagacttactgctgaaccattctggagatactgtagtagatttatcaagtaatatagtacttagttctcaatatgaaacttgaagccagttattcttttttgtcagtggcttttctcatatgaaacaatacagtattggcagtttcttaaaatagcttaattcatttttgtcagtcttatttttataatcagtgtttgatagcataaatcttcagtttgaattagatcaattaactgtgtatatctttttcagttaaatgtgcatattgtatttgaaggagagaaggaatttgatcaaaatgtgaaattatggggtgtaagtattacaaatttataagaattttttttctgataacttagatcatttgtagaataaaagacaattcttcagtaaacattgatgcaaagtatagatgtataacttaacagtgtatcctaccaaaaagtttaagactagatataaaagaggcctttagaagcttggatttgggattattggcataagcaagtctgatgttttcctctgagactaataaaactactgaggtttcctgtaattctctttgatatgttacaggtgattgatgtaaagcgaagttatgtaactatgactgcaacaaagattgaaatcactatgagaaaagctgaaccgatgcagtgggcaagccttgaactgcctgcagctaaaaagcaggaaaaacaaaaagatgccacaacagattgagtgggagatggaaggaaggctattacattatttccgaatttttaatactgtgtgaagtggtggcttgctgctgtaatcttttgttttgttgttgtgttactgaatgtggcatttcagggttaacattaggttcttaaaagccaaagtcagtttgtctttttgtgcctctcatctttcttttgtgttatgtaagattgattattcatttctccctactggtaggaaccatagttgtgtcctatacttgaagaggctggaaagtagcccataaccataattgcagtatttctttgtatttctctgttaagcaaagaaatattaaggaacattttttttatgtttttgtattattccataattagtaaagcaagatgaaatgtcaaattttaatcagttttttcatggatttgtgttcttacagtacttgaaaatatttaaggaagagatgaagctctgcagttttttctatgtgggatgattacttttttaaggaggattaattctgaggtagtatagtaactaaaggggaatatatgaattgtttaacaaattagaatttgtttacaactacttgaatttttaaattatgtcaaaacttacattacttgccaagcagtatgatgttataggaaacataaataagattacagaggtatcaatttggttaaaattcaccattttataagactaagcaataatcttaacaacctctttcctgaatatttaaatgtgtttgtatggtgttatgactaattgttactgatttagagactaagccctcttaaaacctttagttaaatataaaaagaaattatatatatcttgcctccctgatggaaaactatataaaattgtagacttaaaaggtttgtggaaatacattaggatatcagaaaactaaatatatggagttgctttatgactattacatgttaaataaaaatagcttaattgttttggagtttttttttaaagtcatgaagagcttcacaattctagtgatacaatgttgactatatattgtactttatattaaatataggtaatacagaattagatcgtttggataggttttgagttagtgcagaactcaagaagaaaaattaggaaatattctgaaggccagaactctggaagaacttagaaagtttgggaataaattaaacttatgtagatttaaaattaaaaggggtttatttcccaaaccccttgagtcttttcttttccttggtatttatggaattcttacaaagaaaaatttgcagaagtactattttcgtgaataaaacatatgtatcattctactaccattagcaaataacttagttgtagtta

SEQ ID NO: 66794 - DNA, 1032 bp, Homo sapiens
gtcattgtgatataaactgcctgtttttcttcatattctgtatttaaaagtgatgctatttgggctaaatgttttgtttgaaggactgtcctacacattgcagggcatttagaattttgggccctggggcactaagacaacattatcccaagacgacccatatttttccgcatcctgcagttgagagcctctcttctgtattatgctctagtttatagaaatgcagcactgtgtaaaaatcttccactctgtttccacattcttcctgatatactgtacattcatttttagtaacttagacacttgtaaaatgctagagtttgtacacttactggcttattaaaaatcagatttatccctaaaatacttgtggatttaattggttgtgagattttatttctgaagtttttctgtgataatttaaaggatgaaatactggagctgttgtagaagaaaaacttctgattttaatacattcttagcccaagagggctgtacaaaagggaaacacatgtggactaaaaaagatgctgtaagtaactcttccaaaaatagcacactgggtttatattcatctgagtcattttttaaagatttgaaattattctgtctttagattttaaaaaaaagttttcttttttgcaccatagagctttgatgtgactacgaaataaaatgaatctgagtcaagctgccagtgtactgccttttgagcaaaatagccattgtctgttttgatgcaagcatgtgaggttttgtgaaatacttaagcctgacaaaattgaagaatttttgtcttctttaattaataaaattagctccatggcctcttcctactttttgttttttaaaaattacttttctatgaatttgatgacgttaaacgtttagacctctgttattcttttggccacttaaaacttcaatcatttacagatgcacaaacactccatctagtggccagagaggaggattgcagtcttgtttcagtggaattgttttgaatgcctctgcttgctaatgggatattta

SEQ ID NO: 66795 - DNA, 1005 bp, Homo sapiens
taattaatctttgttgttctgaaaatagaatgcttattgtgaaattaaaattaactaaagatagttactatctttaacttaatagattttaaaagtaaaatacctatacttattttgaatattctttaaatatgatagttttaggaattataacatgtttttcttctaaaaaaaaagcagacacgattgttgaaaagagaaacagtttttgttttataaaggtgcttcccttgatgatagggcatagcacaaatcactttaacattggttaattggctttttaaaaatcaaagattaatattcattttacttgattaggtgaattatatgcaacactgaaattttgcactctatacgcaagttactgcaggattcaagtagataagtgcaagtagagtgttttagtgggtcgtgtttctcatgcaaatagagtttttagtttccttctcttgtttttcatagggttggtcttgctgtaagagaagaacaactgatttttctgatttcttaagcattgtagtaagtactaattattttttctagattatcttcctaaaaatacatgttatagaaagcttcagatttgaggagtctgatttctgatatagattgattggtcttcatcaacttgcagataacacctttcaaaaagcagctcatctcccttccacagcttgtaaaataaagaatctgttttggaaattaacgttttaaggtatcagttacctgcttatcattttaggtttgttctttctgttatgttgaaagaacatcaaggagaaagtggtaagcaacaatttaaagccttttcagttaggaacgataaagttttatctaagatgctgttgaaatattttacataccacttttatataaaaccactttatataccactaagaaaactaaagctactaacaaactgataatgctattgattgtatcatttcagaggtgttaaagagtatgtataattcagtagaatgtagtagaaaagtagctaacgtt

SEQ ID NO: 66796 - DNA, 2352 bp, Homo sapiens
ataatattttaggtttcccagtgcatgtaaaagtcataacctattaagtgtgcaatagcatgatatttaaaaaatcatatatatcatatttacaaatactgtattgctaaaaatgttaatgattatttgagcctttactgatggaaaggcttgcctcaatgttgatggctactgattgatcagggtggtgattgctgaaggttggagtggctgtggcaatttttaacaagacaacagtgaagtttgcctcattgactgattcttcctttcatgaaaaatttctctgttgcatgtaatgctgttcgatagcattttacctaagtaggcctttttttttttttttttcaaaattggagtcaatcctctcaaactctgctgctgctttatcaactaagtttatggaacattcccagtgtgttacttacctcaactcttagcttgttggggacggtaaccgggacccagtgtctgctcctgtcaccttcgcctcctaatccctagccactatgcgtgaatgcgtctccatccacgttggccaggctggtgtccagattggcaatgtctgctgggagctctactgcctggaacatggcatccagcccgatggccagatgccaagtgacaagaccattgggggaggagatgactccttcaacaccttcagtgagacgggtgctggcaagcatgtgccccgggctgtgtttgtagacttggaacccatggtcattgatgaagtttgcactggcacctaccgccagctcttccaccctgagcagctcatcacaggcaaggaagatgctgccaataactatgcccgagggcactacaccattggcaaggagatcattgaccttgtgttggaccgaattcgcaagctggctaaccagtgcactggttttcagggcttcttggttttccacagctttggtgggggaactggttctgggttcacctccctgctcatagaacgtctcttagttgattatggcaagaagtccaagctggagttctccaattacccagcgccccaggtttccacagctgtagttgagccctacaactccatcctcaccacccacaccaccctggagcactctgattgtgccttcatggtagacaatgaggccatctgtgacatctgttgtagaaacctcaatatcgagcgcccaacctacactaaccttaaccaccttattagccagattgtgtcctctatcactgcttccctgagatttgatggagccctgaatgttgacctgacagaattccagaccaacctggtaccctactcccacatccacttccctctggcgacatatgcccctgtcatttctgctgagaaagcctaccatgaacagctttctgtagcagagatcaccaatgcttcctttgagccagccaaccagatggtgaaatgtgaccctcgccatggtaaatacatggcttgctgcctattgtgccatggtgatgtggttcccaaagatgccaatgctgccattgccaccatcaagaccaagcgtagcatccagtttgtagattggtgccccactggcttcaaggttggcatcaactaccagtctcccactgtggtgcctggtggagacctggccatggtacagagtgcatgctgagcaacaccacagccattgctgaggcctgggctcgcctggaccacaagtttgacctgatgtatgccaagcgtgcctttgttcactggtacgtgggtgaggggatggaggaaggcgagttttcagaggcccgtgaagacatggctgcccttgagaaggattatgaggaggttggtgtggattctgttgaaggagagggtgaggaagaaagagaggaatactaatccattccttttggccctgcagcatgtcgtgctcccagaatttcagcttcagcttagctgacagacattaaagctttctggttagattttcatttggtgatcatgtcttttccatgtgtacctgtaatgtttttccatcatgtctcaaagtacagtcattaacataaaaaaaaaagtttatgttatattttagatcatttgttggcatttcaacaatgttcacagcatcttcactaagagtcgattttgtctcaagaaaccacttttttttcccatccagaggaagaagcttctcatccattcaagtttcattatgagattgcagcaattcagtcacatcttcaggctccacttctaattgtagttcacttgctatttccacatctgcagttacttcctctaataatgtcttgaatactcaaagtcatcaacttcttcaaactcctgttatggttgacattttgaccttctctcataaatcactaatgctcttaatgaca

SEQ ID NO: 66797 - DNA, 1086 bp, Homo sapiens
gtagcatgttatattttcaaaagggcttgatgaatactgtttatctctttatttatgtgagaaaaaaatttcaaactctaaagagcagtttcagcaactctacaagaggctattgtagtaaggagcagtgctaaagatgcttgttagaaaaacaaattataatcagtgcaaaaacttaatggagtgggaaataaatagagcaaaaagcatttcctcaaaaatatctttagataatttttaaaggaatcaggatttcagtagaatttttttccggtacagacactaaacaggcttttaatgacagttgcaatattcaatgatgatcctaaacatgctgtgaagataaattccttatcccataaaaagttcaattctccctgtgctggagcttttctgatgatattacactacaacccaacatctatgcacagagttcagtagctcgaatatgaatactattgcacttattaaaaaatagtgacagttattacaaaggaatatgttttaaacaatactttggatgttgcctatagggtattcagaacaatttcctgctggtttctggtttcaggacaatttcctggaggcttcaattgttttagcactttccagattccatttctttgggcaaagggagaaatgggggagaaaaatggtacttattacaagagcaatcttgaatgctcagctgcaattgaaaagcctagtatgaaacaagactctatgactgtttcaaagtaaggtaagatttatgtgttgttgaagctcttggttaagtactagatgagtattatgatatatttcagtctcttgtaaattacatgatctaccacacgagctttctgtcagcacttttatttattgaccgcaatgtaagaaccgtcacatgaagcaaaaagtcatccacaacagataatgattacatttttctgaaatgatacaaatattaactcttggttgaaccatgatgctaggtttcttctcattccagtttttcttccctttttaaatagataactaaggtcaatttcattctttcttccttctgctgcaacagctaggataattgcttatttcactcattcc

SEQ ID NO: 66798 - DNA, 1104 bp, Homo sapiens
ctaaatatgttaagtcagaggttcttaagaatatccaaaaacattaaccaattacttattcacttcctgacaacttaaaaacttctcatcctggcttctttcaagtcttctttcttctcaatgtatgctacacaacatgtgctaaaattccagcacattagacatgttccaaacttctccccctgctttacgggaaacaaattccttatgttatggaatttaagatattctctaatatgatctttaatgtaaattccagacttatcaccgcctttaccattgcacaagtccaagatggatttttgtgcattccttccttttccctgcttcttttttaagtaattctctagcttcaaacttaattctaacatataatcaagtaatatccctctcctcctgactttgccttcagtaacgcctcgaatatacttagtgcagtaatttttcataaaattaaagaagcaatttatcaagttcccaaaataaaaattgttaaaatttgtttggaattttattaaatttaaaagttggtcttttgatgattaatatctgtaaaatattaattcctgttatccacgatggtacatgtccctatttgttttctttaatatctcatcataaaatgttttatttcttcctgcagaagtcttatagtttattaaatatgtttttggatattatgttactactgtacaaaatattttttctttaatattcagcagttggtgtaaaaaatatgctgttactgtataaaaatgtatcatttttatattttaatcttatatccagccagcttgctaaatgctcttattacatttaataatatacgtatggattcttttaaattttctaattgagaggtcataacatctatagctacataagcttctgtttccttctaatacttatgtttttaatcatagtctaggactgctcacacaatgttgactagaatagtgataacatctgtcttaaccagggttaatccagaacaaaacaaggattttaattgcggaaaaaatttcagggaagataggcagaaagctaatgagagtaaaatatgtaaggagaggaaggcaatacagagggtacttccgatttttg

SEQ ID NO: 66799 - DNA, 1026 bp, Homo sapiens
ggtgagcgcgaggattccgccagtgggagtcgctgagctaaagtgcatctggccccccggcttgcatgatggcgagcccggatatttttagctgtgctgtgatctgaattccctcctctcctctctcgttgacttttgtcacatgtgctttccgagatggtttaacattgaacatgattgggctttgcggaaagcaacttttattcactttccaccgttctcctcttgtgggcggggggtggcgggggcgtgcttggggcaaggatgcaggggtggccggagtttggctgcgagctaagagagccgcttgggttgctcgggatgagaggaacaggggtgctcccggggtgtgggtgtgctggcggtgacatcctgaggctgcagctcgctggaataatgggctcaaaccaggcggtggagaggggtccccggaatggacgtcgggggcggggaggctgcggagaccctgcgaggtctccgtgaaggactaggaggggctcccgggagggagtggcgcctgcggcccggagcgtgggcggccggtggctctggcacgcggaatctggtggactcctagcgcctcggccgggagctccagctccatcccgccgccgccgcgcgcccaatgggactcagcttcgggtttgggcgaacctgcagcagccgcggcgggagggagggacgctgggaccgcggtaatgattgaagtctttttcccccctctcccctcctcccgctcctctccgcccccagactctggcgcgtttgttttccaagttggatcccacttccatttacaagtgtcagacaaacccgcgagaacctcccccaacccgccccggccccagccagactagggagggcgcccagggggagggggcgagctgtctgggcagtgcctggggaggtgcgacgcgcccacccggggcttgagcggctggggttcctgtgcgtgggtccttaatgtttaaaagatacacatgaacagcaacaaaacccaaaccactcgtggccacttgttttctg

SEQ ID NO: 66800 - DNA, 1078 bp, Homo sapiens
ttcacagttggaggaaagatcctctaggcataaatacacatgctctttattggctgatctgctcaagctctggatctttcctgtatgttctaagcaagtgttgggaacacatcaagagggcatgttggatgcatccaggtgtccagccgcctttcagtagcatcactttgtcttcaaggaatgtatgataagggtgttatgtacctaatagtacatttgcatggcgtttgatgttcacagtcgaaggtaaaatagactgggaggtaggagcatatctcagtgctgagttctttgtgtctcaagaaagcatagaacacataagtaagaatgttattattataagaatccttggagcctttctcaattctatttaaaaattaaattattcataaacacctgtgctgtaactattattacactaagttacagtcaacacacctcataagggattgagtctttccagtatattctgaggcccagatgcccactggggtatgggtcactccatagtgaccattgtgggcaagaagatctttctttaaaagttggaggtacagtttctggtacataataatgcttgtctatgtaaagcgaatgtatgaagtaatgtgacagttcataatggaatagataaaaatgcaagtcttgtaaaatttaaatccccctctcctttttttttgttcaattacactgcactatattcattatttgaggggcaggctggtgaaatcaacacgtgagcaggtgcgtgtcttgggaatgtcctactacaaaaaatattcaatgactatttcctgaatgaatagaaattggaaaaggctgtgtctgtcttttagacactttgttattctgtgagtttaacaaacaaaatctcattaacaccaaatccacaggagcatgagaaatgtgtaatgctcttaatttcttattaagtgatctgtgtttattaaaaattggctcggaggtacactgcacataattcataatattggagtctatatccctgaatctttcttgtacttaaaatttgctcacagttcagtgttgggatcttgggtaggaaaagggatatcttatt

SEQ ID NO: 66801 - DNA, 1047 bp, Homo sapiens
taagtaggcagctaggctagactgacatgattgtggaaaaggtagagattctaaggaaattgatgaaggtttggagtagacaatgtggcagcaagtatgccaaatgtaagtacaaggcttaccaggcagcaccaggggctgtgttggggttagagctcatatattagaacacatacatcacactgttatatggaacttcctgtagtccacagcaacctgggtactacagaaaacaaaacatagaggttactgagagttgcaggttgtcaagagatgtgagtcagaagaacatgaaatgatgtaatttaagatgctcatgaataggaatattaaggaaaactaggtggagaaagaaatgaaactaagactgatacatttgtcacaggtcaaaggactagaactcttggtgaaagtgaaccagtttagagggagctctaagggaattggagagacagaaggattggaaattactagagaggttgggatgtctcagtgattccagcgacgtggcagttccaaggaatgacaagggtctggggtgtggctgtggaattaggctcctaatgtggagctgaatgagtgtagtcaggaatataggtgagtgtgttgggtaggttagcagggtggaccttgagctcacacacagtggcaaaatatagaaggctcttgccttacctgaacctgtatctgccttaactttgggtacatggctgagccttgaaaccatgtcttttttttttttttacttttgtagggctcccgaatccctgctcctttttgtcctcttttgctcttgcttggtgtgacatgcctcttctgcaactgctgaagtaattcaccgcacgttttcactctttcctcattttttccacctggcagaagcgtgaagaaagattacagacacatgggatacctctgtgttggtaacttaaacttctgtgactatcccttccaaatcagaagggagtcatttttcaatttcctctataaaagagagagcaagtctgtcttcctaccaagcattaccagttgttaggcattgacgaa

SEQ ID NO: 66802 - DNA, 1986 bp, Homo sapiens
tttctctctctctttcttccctccaggatggaagtatgatgtgatggatataattatgggacactgtgtgggcacacggcctcctgcttgttgcctcatcctcctgcttttcaagcttttggccactgtctcccaggggctgccagggactggacccctgggcttccacttcacacattccatttataatgctaccgtgtatgagaactcagcagcaaggacctacgtcaacagccagagtagaatgggcatcaccttaatagatctatcctgggatatcaaatacagaatagtgtccggagacgaggaaggctttttcaaagcagaggaagtcatcattgcagatttctgttttctcagaataagaactaaaggtggcaattctgccatattaaatagggaaatccaggataattatttattgatagtaaaaggttctgtcagaggagaggatttggaagcatggaccaaagtgaatatacaggttttagatatgaatgatctgagacctttgttttcacccacaacatactctgttaccatagcagaaagcacacctctaaggactagtgttgcccaggtgactgcaacagacgcagatattggttccaatggagaattctactactactttaaaaataaagttgatctcttttcagttcaccccacgagtggtgtcatctccttaagtggtcgattaaattatgatgaaaagaataggtatgatctggaaattttggctgtggaccggggaatgaaactgtatgggaacaatggagtgagcagtactgcaaagctttatgttcacattgagcgcataaatgaacatgccccaacaatccatgtagtcactcatgttcctttctcgttggaaaaagagccaacatatgcagtggtgacagttgatgacttagatgatggagcgaatggagagatcgaatctgtttccattgtggctggggatcctttagatcagttcttcctggctaaggaaggaaagtggttgaatgagtacaagattaaggagaggaagcagattgactgggagagctttccctatggctacaatctcactcttcaagcaaaagacaagggatctcctcaaaaatgttcagcattaaaggcagtctacattggcaaccccacaagagacactgtccccattagatttgaaaaagaagtgtacgatgtgagcataagtgaattttcccctcctggtgtcgtggttgctatagtaaaattaagtcctgaaccgatagatgtggaatacaaattatctcctggtgaggatgcagtgtactttaaaattaatcctcggtcgggtctgattgttacagcacggccactgaatactgttaagaaggaggtttataaactggaggtgacaaacaaggaaggagatttaaaagcacaggtcaccatcagcatagaagatgcaaatgaccacaccccagaatttcagcaaccactgtatgatgcttatgtgaatgaaagtgtcccagtgggaaccagcgttctaacagtttcagcttctgataaggataaaggagaaaatgggtacatcacctatagtatcgctagcctgaatttgttaccatttgtcattaatcagtttacaggtgttattagcacaactgaagaactggattttgaatcctccccagaaatttacagattcattgttagagcctctgactggggttcaccataccgccatgaaagtgaggtcaatgtgactattcgaataggaaatgtcaacgacaacagccctctctttgaaaaagtggcttgccagggagttatttcatatgactttccagttggtggtcacatcacagcagtctcagcgatcgatatcgatgaacttgaacttgtaaagtacaaaatcatttctggaaatgaacttggcttcttttatttaaacccagattctggtgttttacagcttaaaaaatcactgacaaattctggcattaaaaatggcaa

SEQ ID NO: 66803 - DNA, 1076 bp, Homo sapiens
tgttttcagttgtcactcttaaagtttttttagatgatgtcaatgactgctccccagctttcattcccagtagctatagtgtgaaggttcttgaagatctccctgttggcactgtcattgcttggcttgagacccatgatccagatcttggactggggggtcaagtgcgctattctttggtcaatgactataatgggagatttgaaatagataaagcaagtggtgccatccgcttgagcaaagagcttgattatgagaaacagcagttctataaccttactgtgcgggccaaagacaaagggcggcctgtctctctgtcatctgtttcctttgttgaggtggaagtggtggatgtcaatgaaaacctccacactccctatttcccagactttgctgttgttggatctgtaaaggaaaactcacgcattggaacaagcgtgctgcaggtgactgctcgagatgaagactccggaagggatggagagatccagtactccatcagggatggcagtggtcttggaaggttcagtatagacgacgagagtggtaagtgtaatattttgtgccaagagtgttgtttcacctcttttaaatggtcaacagtggaaaagtaaagggatgttaggacactaaaatagaatgacaaatgaggttgcatttggtgcagagacgacgcacatagatgctttttcttaggatgttctggtttgttagaagatctgtttataaactaacagctgtggtttccagtgggagtcctggtttgttttgttttgttattttcttgctcagcactattgctaccaggtcatcttttgataagcctaagtaattgtcacttctgttgattgtactcctgaccctctctaaatgaaggactctgataaagtaaattacatttgaattggctttaagttagaagtgtgaaatggattttcaaatggatcttatataggaatctttccctttacagtaaggctttgcagaagtgatattgcattagttgcttggtcttttatctttcatgggttcatctggtccttgaatgatgggcatttgcactctgtagctccatt

SEQ ID NO: 66804 - DNA, 1049 bp, Homo sapiens
tcacccctctccctccttagaaatgaatagaatgggtcaagtgttggggagaggccaggagtgcatttagggaacatacatcctcatgaaaatcagtgtaggttgttcagatgaggaaactgaagcatggagaagttcagtaacttgcaaaggttacacacatccttagcagtggagctcaaagtttaatacagtctttgtacttatgtaccttatgctgaattggggcttttctcagaattgaaaaaattggaattatgacataggaaagaactgtggaaagtcattcagcctccagaattcaaaacgatattttatataaattatccaagaacaataggtgggtattttctcccttagattggcttcatctttactttcactgttaactttctgttgaaagttctggctgcttccccttccacaacatgggccacttccttttcttgaagttaccatggccaaccattgaacttgctttttctgaaagtgactctgacttggtacactgaagctcatgtgtcctttccccatgccttgtcttgtctaactctaactacctccttagccagaggccaatgctgcccctgcaccaatcggctttgacaactgtgtatacggcccctgcctgacctgcctgtactcagcgttggcagcctcgttgaggtttcattcattgccttcaggccctgcttctaaaaatttctccttcttttaaatgtggttaacatgatgtttaatatttaaaattaacaattttgcatttttaaccttgacattggatggctgaactgcatcctcttcaaggacagcttgcacagccttcttgaagggtaggaccctacttcaaattgtgttcaaggtcaggtgtctgctttcctgtggctgtggggggttgggtagggtagggatttatgggtatgattcccattaggaggcttcttggaagatctttatgaatgagctagagagagggattgaaggagacataatgtcacagcctctggttcctacaaggccttggttccaacacaagactggaaacaatt

SEQ ID NO: 66805 - DNA, 1047 bp, Homo sapiens
ctatgcctggaagaagaggtgtttggaagtatttgatgatagaatgaaaagtattgcacagataattttggtcaaaccttttcaattttggagcagatggggtctcattcacttcctgctcattggagggtagtgcaaatgcctcaattgcttaattgagggaacagccaactgtggtttgatgtcatgatacattctattgtgccagtcatcaaacccacatttccttggggcccaaaataggaatccggttgttgtaggacatgtatttttgcattgtttcaaatgctagttgatctttaactttgcatgccttatatacattcctggagctctttcaaagtataatattaagcaagagaagctatggtttgtgtatggcacaaaaaaaaaataagaaaaaagaaaatgttttcctttgttttgtctttggcccagggtttattgctgccagggacctatttattagccagctttaaaaagcagctgttctctgtcttcttttttcctccaatgatgcctgccttggatatttgggcatggcttaatgttaggcgatgctctgtaaagcgagttctgggaaatggatttcatacctctttcagagggtagagaaattgaagcataaatattgaatccacgtattaaagagaaggtagataattaagctcttgtctggtccctggcagcttgttgatgtgtttttattttctagtgaatgagtgatattcttcaaagagaggtgccatctgggaaatcaggtctctgctgaagcatagccatgatccctgcattgccatgttctgcacaggtccagctctaacccacaggcgaacggcagggctggactaattacgcagctgtcagaatcacacaaatgaatggactgggagttctgcttccttgtctgtgacagtgtgtattggtttggatttcacttttctaacagtggtattttaacaggcaagagagcatttgtatgaaattgaaaactttctaaaaacagtattaagaagtgtatctgtgcatgcttgcagcccagtgata

SEQ ID NO: 66806 - DNA, 1392 bp, Homo sapiens
caggagatggaggttgcagtgagccgaggtcgcacaccactgcactccagcctggatgaccgagtaagactgtgtctcaaaaaccaaagcatacactacaaggcatgcgtgtggtagggaggtagtctgactaggaggaggggattgatgaaggacataaagttggaggtagaggcataaatgtgtggaattttagaatggaacctattatatacagaataagctttgtagctcagaggtctacttctccgtttgtccttctgcaccagagtttagggttgaaataaacatcattcgttccaaggcttgattccctctgaaagttcacattaaaaaaaatagcagtgcagccaggtcctgatttcaaaatggctagtacttaacatttactgccgtgtgccttttgtgtatttggggctttggaagactgatgttccagccaggtgtttagaacatacttgaatctgcctctccctccgtaagaggaaggtgacatttattgattttacattgtgggcacggcatagtcctaactacttacgtgtattaccttaattaatttttttttttttgagatggagtttagctcttgtcatccaggccagagtgcaatggcgcaatctcggctcactgcaacctccgcctccagggttcaagcagttctcctgcctcagcctcctgagtagctgggattacaggtgtctgccaccacgcccggctaatttttgtatttttagtagaaggtttagggttttcagtagagggtttacttcagagtttcaccatgttggccaggctggtcttgaacttctgacctcaggtgatccgcccacctgggcctaccagagtgctgggattacaggtgtgagccacatcacctggcctaccttatttaatttttacatctatttttgtcccaattttgctgatggggagacaggaacagattggccggttagcctgttcaagatgacagatgatgagaagtggtgccagaatttgaacccaggcagtttgacttttgagtctatgctactaagtgttctatctccctgcagcttcattggctgatgccatgttcctgaaagaatctttagggatacaaatgtggctgaagcatgcagcaggtcacagaggcactgatgatccacctactcagtgcttcctgaaaggacttacccttctgcctgtttgctttgttgttaaacagctactgtaatccactccagcctgaaagtggctgcttcattgatatctagatagtagatgtgtattacgtattaggtttattccaagaagaataaagtagggcaagctttttgtgtcctgtgaacaaagaatttggtggaatcaggattggtaaatttttatttcatgtatttgttaggccta

SEQ ID NO: 66807 - DNA, 1128 bp, Homo sapiens
ttggaagacttgaaaaggagaattggtaaagccaggggttcctatacctttcaggccttaagaaagtaatagtaggtgtttttttttttctctctgttccttatttcatgaaggaaattatacatttgcccaaatggcgcttcccttaatatttgctgaaccttaatgtttgcttttgattggcattatgccatcctagcacaataatatttgtcatctcataccttaggaaactctgcctgattttgaatgatacaaaaaaggttttggggtctaaatggagtgagaggaatggtaagagattaagtatccctcataaaaacaggatggtgtcagtaagacctttcccaactctgagttcacattctaccacctcggtcacttaggtgtaaatgtcatcttcctcctcaagatgatgacaggccacccactaccctgggacaaaacagggcagacagtatacagcataggtccctctgctagaggaacattggtattcagtgctcttctgcttccaagaacccctcactccatgctactctccgagaatattgtaatggacatctgcctttgatatagccctgatacccaaccccactccgtcactgtgtttgaaaagtactcttcctgctgtacaaattggaaggctaggctgtgggcatatgggccggggcttggctagtcacacatgcatggaagctggtgatgcagaatgctggggggtggcgagttcatctggagactgtgccagcagccacatctagtttttgggggtggtcatggtggctcggcacctcctgctccagtgcccatgtccagtgctgacggtggtgatgcaggctctggcatcctcacactgggagtgtgagttgggctccagttatggcagcacagcataatgtcctgcccattttctgagcctggttctttggcttttctgggaatcagtgagatgccaaaggcctttaagtaaactcgatttaaatcagctgaagtctgcttcatctgcttaaagctaagaagccgacttttatagagatgttcctctgtagttatccaaacatttgtattcattcttctggcccctgaaagttctacttcacctgttaggcacctccgtgagctaca

SEQ ID NO: 66808 - DNA, 1002 bp, Homo sapiens
acttgctggcccctgcgtgcttctcagacatgcaagggatgccccgcctgagggtctgtgcatgggtcctgccctgcctggaagatcttccccctgcacaggtcccttcaagtctctggtccagtgtcactttctcatgaagccttccctgatcagttactctaaatttacagcctctgcgcctccagcagcacatagcatcatctgacacatgctctatccatttgttagttgtctgtctctccacattccctgtgaatgaagacagcttcattacctgaaggcaacatttttgcttgttttgttcatagctgcatcctcaacattgtcccctgacatacagggtatgcttaaaaaatatttgaatgatagatacttttatctttgtttgacaacatagtaattgaaggtcttaagaggttaagttacttgcccaggatcacagaccctagaattgccaggatgggactgaaaccctgacatgcacttaatttaccgtgtgctgctttttcttgttgactaaggacaataatacataacacagttactttgaggatgaaatgaataatgcacagaaaagcactttattaatccaagtgtgccaaaaaaatgtgacttatctgatttattgagaatgctagctttcatgtctctgtcattcggcaacccactcaaagattcttttgtgtttctggatttttatttgggagtagtcagtgctgctgccactgctgccaaataacattttcttattttttctgcccttggtatgagaagtgtgtgtgtgtatcttttatctgtctgtagctatgatccctcctcccctccatacacccactggccttcaggtcaagagctttcctgacccctgtggcctgtcggcagcagggagctagtggagctggcacctgtgtggctgtcattgtttgttcatgtatatgttcctggggcagacgcttatgttatcagcaggtgctttgcgggtgtccggagtcccatctt

SEQ ID NO: 66809 - DNA, 2041 bp, Homo sapiens
tcaccttacactcttttgtctttcttcatagcactttgttccttgacatattacacttttatttgtttattttttatctccctcaattggactgtgaattccatgagaccaggaactttgttttcattattctgtcctgtcaccaggacattacccagcacatcgagtctgccttgtatttggtgaatcaatgaatgatcagatggaccagtcaatcagtttgtatattcacaacagttaatcagcttgtggcacgtggtaggtgctcaggaagtgtttgaaagaatgaattggtgagtgagtaaatgaatctgtgcatggttagttgccaacactggtgctcagcaactgttagctggataaatgaacggttgctggagcttactcgcctgtctctggggctagtccctagcttctttattgggggaaggcccggatgcacaatctttgatgtgtgctattgtttctgtttgataaattcagttagtccctcattctttccgtttgtctgccatcagccaggctctgtaattaacttactgtaatttagctgagaggtgaattttccattttaaagatgttataaacaactggtgcttgtgcatcttggttgttgatgaagttcatgcctaaaagaacatgagggctgtgttacgtgtctaggggagaaggggctgttagcccacacctggccataaaaacatggggacaggctggcaagttctggcgaagttgtgtttctctagctccagtgcaccagcatgccagcatgggggccaaggatcagggtcagtgtggtcatcttcctcaagggtcacatttaacccaaagatttgggagaaataacattttaaaattttacaaccaatactgatatttgttaaaggagaattcaatatcacttagtagttaagagcaggctgtggaaccagactgcctaggtttgactgtgtctcaccacttacttgcctagtggtcctgagcaagttacataatctcaaaactcatttctcacttctaaggtgggagcctgtgatgcagtagagccaacagcacggggatgtcagggatcagtgagagccacggaaggctttatcacagtgtgtgcacattgtaagtaaacaacaaggcagatgtttcatgtgatcacttgatgttttaagataacagaggagccaaaggaaattttattcttaccctggccatgccctaacatggcctccagggataggcattcacttacttctgcatatttcagatgggcaagttaggagaagcactgccttaacaaaacccagtgcacaccattggatggcttgcatgctttctcaggaattcttccccagccttgccttggagttgagctgccgttaaggaagtgatgaattagccatgcttacttttagtacctgctgttttaaagtacctatttgaatagcaaatgaagtcgagggaacctacaggtttggataaagaactgccatctaaggaatgacggtatatagaggagcttgtaatttgagcattttcacacacattgcttgcatttcattcttataaccacttattcatcaaggtagcgaagactgtcagaatggaaagagacttcagtaactcttgggtccatctgtttgatatgatttctgaagtcccttcttcagcatcctattcgtctttcagaccctgcttggtttctccgggagatagagcgttccctgccccaaaggcagttcagtctggctccccataatttctacgcattggtttaggttctgtcttttagagccgcagctaaatctagcacttcttcaacctgtaatttatgcccttttaatatacagacctctggaggtagtgtttccacaacctcacctgggccatttaaccattgcgatttaaccattaaatatatgaagtctgcgagaggcagccttgactggtaggtcggcttagtctggtggacttcagctacaggtctcaactcattgactgattgtgaaatctcttttgtggatctcaaccagcatttttttaatgaaat

SEQ ID NO: 66810 - DNA, 1034 bp, Homo sapiens
gtgtggcatgccagagaacactgaggagggtcgctgctgtggtggagggcacggtggggtgggagttgagtgcaaaaggtaggcaggagccagatcatgcaggtccttccttggggaccaggttaggcaagggatttggattttattctaaaggcagtggaatgccactgtagaattaaatactagggagttactggaccgggtttgtcttttacaatagggattctgtaggcatggtctgtactaagacttctcctgaaagtcagtgatctgattcagatatgcaagtccttttattagttctaatgggtgtgagacttaaaattccagagacttgcacattttaggtatgacggtaggctggatgttgctaagtgactgacatgtgattggtgttaagttagtgccctgctggagtttctggatgattgtactcccctgggttgccatgctcagcagtggtgcattccaggtgcctgctgagcatggacacaggcggttggattcctgcgggtttggaaatggcactctgacagtgcaacgtcagtgaggtcttgaatttgtgacagcaacttaaagttgctgggaatctagaggtctaattatactgttaacttggctttcttgttatttggttaacattttttggttggtggttaaccctgcactctgaagtgatgcatatttatgctaggaatgtgttttggcttcaaagtttatgataactagactttaaaacaggtatgaaatttagatgcatcgtctatatccctttgcaaaagatgtctctgtctcccacatttgcttctctggtgattcttcagtgttactaccatattattttttcctgctaaggggaaaatatgtgagatgagcaagggtggcatcccttgccttgcctccatggacagtggtttcgaaaggactcaggagtgtttgcattacttaaggcttgacaaagcagtaaggtgaaggcagagaaacagtggaggaggctatcacaatttcctcatcaataaagatgagggctgtgg

SEQ ID NO: 66811 - DNA, 1039 bp, Homo sapiens
attttacttttagttgtggcatgatgcaagcaccattttactgttaaggttattgttttcttaaccccaaagctggatctgcattagtgaggatcctcatagaggctaccctcatgtgtcctggctgagtggggttccaggtgctcctcagtggttgtgcccaccttgaattggcacagtggcaggacctccgacaccatgagaggatagacaggggtcacctctgaggctggccccaggactcctctgtgttctatagcattcttacaccctttatggcagttagcaaacttggtatctcatgggcacctcaagcttactgtgtccagattttaactcttggtctacttctaccatagtccctttctaggcctcctcccttcccccatcttattaaggtacgtagttgttaactcactttgtcaggccagaaactggtacttcatttgttaatactcatctttttcttcccccaaatcaccaaatcctaatgatgcctctcctaaagtacatcttgaattcatccatggccttcctgtatccgccccccaagtccaagccaacatcgtcctttgccaggtgactgccaaagcctcttaactgactgccctgcctgcttccccttttcttctattcctctcatcaatttggacccagagcaatctttaaaaattcttgtcaaatcatgtaattcccttgcttgaaacctgttggtgacctcatcctgcacttgatgaaacacataagcccagtgcagcccatggagtggactgcactgtctgggccccaggcctggctacagaggcacagcattgttggcaccatgttgttgtagcttgtgagacattctccccttcactcttgacttcctaggaagattgcagtgacttcaattttccaaacgcaataaaataactcaggctctcaaaggtgtacttagaatgaatattgtgttctgggaaatggaacaaggagtgatttgttcctccaaacaccagaataacaactcctagaacacagaggtggaccactatttcat

SEQ ID NO: 66812 - DNA, 1084 bp, Homo sapiens
agggcagtatgcaaaggaggtctggggaataaagagattgatgaaaccaggtggtccctgccctgaagcagcttggttagtagaggaaacagatgggcaaatggactctaattaaatgtgattagtgctttatgttggtcagataaggaaagacatttggcgggagccccacatcccagagtcctccctcagtcacttactgctgtgcttggttcagaaaggctgtccccctcacggagcagtctgggaaaatgcattccttattaataactacgattctgatgtgaaatctctctatatagtatcttggttgggaaagtgtataagtgaagattccttttgtcacctccacccaaatcctcttccactgaggagtccagtcttccttcctctcacagacaaacctgctcttcctcctgggccctccatctcaaaattggcactgtcatcaatccagaggcttgagagcatctttgatacctccgtctccctcatcacctctatctgatcatccaccaagtcctggcacctctattgccctctcttccattgctatcacccaagtctaacccatctccagctgcaggtcatgacctatgttacctcattctgaaattaatttaggggttcccccccatcatttaacaaaataaaaaaatagtagaatgggagacattagagtaaattacatgtagtttaagtttgagttttattttgtcaaacttgtgtttgtgtataatagtttcacatacaaaaaaaggctaacattgctaaggtcttcacatatattgacttatttatctcccacaacaacctgtatagtaggtaccattatgcttatccttattttacaaaagagggaactgaaactcagagaatttgagaagctggcccagggtcacagagaatattagtgttccagcccccacactgcagccacaataggcttataaaatgcaagttggatgattcttcactattgatgggtcccatgctcttaggatagtataaagtctggtcataaggccctgtgtaatctggtttccccacacctctcgggcctgccgaccatcctcttgcccca

SEQ ID NO: 66813 - DNA, 1061 bp, Homo sapiens
agttttatattttgcacatgcatctttgttagcccctacttttgcaaaagatggagctgtggagttaatctctggtctgccattgatgttttaggtttatcttgttctcttggacaggcatgcacaatgaattaattgagttgttttcagcccacttcctgcctaattgaacacctgcccagtgaatgctgccaagtcacttgcctattacctgatttgccagccattcctgtcatgtcagtgtcttgcttgtatgcaaagactcagtcttgtcatttgtagttcactttctgtgttcttcagataacttttctttttttcatgtaatttaaaggcactcgtgcatcctcctttgttacagtccctctgcattcccatcttgccactgtcctcctggttaagatcattactgactaggcctcataaaaatgctgaaacaccagatgcaggacaagggcatatgtgcaccctgggttggttctgatgctttcgtatctttcccttggtcccaggctaaatttccagcaagccattcttaagtagtgctgacagtttagaactaattagaaatagtcttttaagggttgggacacaagatggtttttaaaagagtgctgtcattttttgacattagagacttgtatctttccaaagagaagagtggtcttactaaaaatgagaaccagggcgggaattcagccttctctgatcacagaaggccgcccctgttaatggcctatgcttgtcctcttgactgttttctttggttgaaaagtcttatagccagtcacatggctcctactggagccctggcttaggtgtgatttttttgttaaaaatatcctggagatacagcaaccccttcttagttatttggtagaattacatatcttttctcttagcctttcaaaaacatagaagtgtactgtttggatttcttctgcccagatttgaacttattcaaatgagatgagactggttatctcctttgatttcattgaggtttgcattttgttttcagtttccttctggcttttctttgcagaatttcaaattttaaa

SEQ ID NO: 66814 - DNA, 1200 bp, Homo sapiens
gttttaaagtttgtgccaaaaaggggctagagttggggcttttcaaactgttaatcacaatccacagtcagagaattgatttagtgggttgatacatttttaaatgaaatagaacagtgaaaaataacaatgtgtgacacacagtaaggctgtgtgtaggtgcatccctcccaggccataatagaaatacacttctgactgtggatcaatgatcaaaatatctgagagagattatagcttcgattggtattggctagattgcgaagtccttggcggcagggatgttctctcttttatgttcccttcatccttagtccagtactgagtacttagctgattggttggtctgtctgggagaatttgtaacagttcacccctcagactggaagaatagtcagaatgatgttaaggacaatttgcagaatactgtctctgcaaggaaatgacaggtattcttacccttgctttatgaatgaggaaagcagaaagacaccgagtgtgatagttaagagcttggggtctaaagtctgagaaacctgtgtttgaattctgtttgtgcagtgtcatggttgtgtgactttgggtaacttttttaagcctgactttgtccatctttaggcagggtatgatgagggtacctacctcaggtattatgacagttagatgagttagctcgagtttagtggctttagcacagtgcctggcatctgataagcagttagtaagcattatctgctgcccttcgttttatgattaagagagattaagtgactcatgttgggtcccagggcaccagctggagccaggcccactgcaggagccccttctagagttgcagatctgtgatggttattgatcttgatctaaacttgtagctctaatctgtggtttggctgtggcagtgaaaggaagtgaatgttgcaacagagcaggtgtgtgcatacaaagagatgtcctggttttgccagttagagaaaacagcatcttccagagatatggctgcatgtggaatctgagaatataaatgacatttcttaggaaagccaggtgctttgtattttcatcaaaaacaacagtttcctaaaactgaatatagcaatgtataggcttaaactggtggttttgtgtcgacacagtgataattttagtggaaactccaagatttggtaaatactgatttctgaaatcactcactgagcc

SEQ ID NO: 66815 - DNA, 1040 bp, Homo sapiens
agggtctcactctgtaacccaggctggagtgcagtggcgtgatcacagctcatctcctgagctcaggaaattctcctgagtagctgggacaggcaatcctcctacctcggccctcccaaagtgctgggattacaggcatgagccaccgtgcttggccagctcttacatttttggtcacctagtgacagaccttttttcccttctcctctctctcctttccacattagtttttatgtttgagcctagacaagtataggggaaattccagaggaaccagcaaagtgacctgcaatttttgatctttggggtttccaattttgtgtatttgctgtgtgatcttgagcaattctcttacttcaggtctcaaggaacttagcatctcgtaggggagatagaactggagttgatagccctcttattgctgtggctacagacaaggattcttgtcctcagtgtggtggtagtggtttttaagtctttatgtgttataaattagaagtttgcaaggtgtggtttttgacactaagggaattgcaaatgggatcaaggactagacttccctgcatgagacactctctcatcagacactctctcatcagactcccagacttatgttataccacctggtgcggtcagttacagttacctgtttacctggccacctgcctagattaacagcaagctctacaatggcggagacttggcctatgccctgttatatcttaggcatcttatttattgtacttccatgtggaatacaacggatgcctgcataaaagatttgaaggatttcgaatcacttaacatggtagcaggccgaggggtggaattggctaccacaggtcttgtgttgcgtaaactggtcgtgccacatgaccagacttgtctcccttcctcccatgcccacagcccctctgctgagaaagacagaaccagtaccaggtaggtcccttgtaaaaagccagaggggtgagtggaattatcttctgttttatagaccaagatctggagaagtcacatagctaacatgccagagagtc

SEQ ID NO: 66816 - DNA, 1011 bp, Homo sapiens
ttgtgggttgagtgcaaccttcctctgagtagaggccagctgtgggtgttggggatgtgggccgcccagcccagggaagcatctgtctttgtggaactggagttatgttttatgatgtcactctggtgtgactggatcacagaattctgagtttataccctttgttggatttttttcctgtttcactatttttctgtgggtccttgcccaagaccttggatgagtgcagtgagcaggcgagatctgtgagttaacataggtggggaacgcattggatgcaccacctcctctgtgtgcactggctgttgacccaccattcctcatcatcagtactccgtgccttccctgcattttggaggactaagcacttttgtagcggggagtgtgtgttttgcctttctcttcagtttgtccccataagctacttccaggggcctggcagtaatgctgctgctccaggtcatttgtgtttgtggagtgtcagagttttcaggactttgcccagaaagtcttgtccagtgctcccagggagtggtcgtcatcatctccattttacagatggggattcttaagggaagtcactcttaggtagcatacttctataccatagcttcccctgtaagtttcataaaacacaaccgagaagatgcctgtttaaaatcagcttgtattccgaaagtgaaagaatgccctcttcaaatgccctggggatcgtgtacacagtagggttctcttctccctcaggaatgtgtggtcccatcctaggttccctcccggccgtttcctggctttgtgagcctgagctggttactgaacctttctgagtctgtgtcctataaattggtgatgatagtacaatctaaaagaggctgtggtaagatatatatgagatagtgtatgtgagatcacccaggctcaatgtgttgtaatcgcttgtttttatttttcaaccaggatggcttgaagaaaatacagatctcagctacagaggttgaggcctgagaaactccc

SEQ ID NO: 66817 - DNA, 1049 bp, Homo sapiens
acgtggtcataaacttgcttttgggcttccgtttttccaaattgtgcaacatccctgcccttctgagagtttgtgctggctctggtcaggccggaggtcaggtggtcagattctggctttatttgggctgtgttctcgctgcgaggaggaagccaggttacctctgttggacctgcctgctcccagcatctccagcaacaagctgtctctgccggtgagtcactccgtgcaagagtctgctcacccactttctgcttgatgtttacacttttccctcaaagagggaacctcttcttgttctgagggcacttctcggcagtcccctagagtgtccagttgtttcttttgtggggtaagaacccgtgccagacaggtacatgttttaatgggagaagagcatttctgcctgtggatatgagctgtcatgcctacctcttgaacattatgtcctgagcaaagcccttttctcgttctttttgcttcgtgtttaggtgcgtgtttgggtgtgtttgctttaattattactgggaagcaaaaaagatatttatcaaaggtttaaatctatagcagtgcccctgcaagcagaaagaagaagtatatatttagccaggatatcattgatttatcacccttttttccattttgttcctgttttgttggcaggaccatctgatttgtatactggttcagtttggatttcagtagtgagtgtgaaaagattcctgggctgtttgccgaagtggagggactcaaatgcgtgggcttcagggctgccagtcttggctgtccctgcaatcccaggagcctggcacatggtgcctttgtcaggaaggtggagtttggccaggccgtttctttggctttgcctgggagcagctctgctggtgacagtggaggcctccctctgccgtgggaaagggaattctctcttgattccggttttggcttatttctcatcctatagggatgagagggaggaaggccccagaactagtgagttttggtgatgagcaggttcagggtaggactggtttgcagcttccacagag

SEQ ID NO: 66818 - DNA, 2047 bp, Homo sapiens
cctttacaaataaactttgtattcaagacaccagtatgcctggtcatttgcagcagtgatacggcaagagacccatagtgggcttcttgagcccttattctcgtcctagatgtgttagcaagaagtttgaccttggatgagtcacttgctctctctggacttctgttttcttatctgtcacatggggtataaagagagagctcgacagtgtgatgtagacaggagtaggtttctgagggacacagtgaaatcttttttcttgtaaggctggatcagccacagaaaataagccttagcctgttcttataaagaaattagcttagatttaaaataaaatatgagaagaaatattgcaaaaagcaaaacaacaaaaaactaatagtagttggtactcgatttacaacatgaatactgttcttatgcttgcagttagtgtacttggttgtccagctatctactataaagttgctcattgtgcttagaaagtgtgtatttcacctgtggacccgaattttttcttattgtttaatcttcaagcttggagtggacgctcaagcttggagttggattggtcctgctggggtttgtctgaagaacatcctcagggtctctcattgcataatattataggtttccttctgtctgactgatgctggggtccttgtacaactatgcttctgccatcttttccattctggcttgagaagtggtgagctggttcctcttgcctctggcatgcccagacttctcatttcttttcagatgagtgtagtaaaaggcaagcagtgagttagaggcagcacattaaaaattgctccaggcaatcatctgtgtcccctccaccccgctcctgtcccctagaccccctgggcaacttctcactagagcttcctggtcataagctggccttgacattttgggtgctgagggccatcacagcattgaagtgacttggccagggtcacaccacacattaatgatcaagccatggtgctggaagaagaggaattttttttgtgtgtgtattttgtcataactgaatgttcctgttcttgtccattagtagctttcaaaatccatattgggtttgaccacatcattttcagtaatccttttttgtcagctttttggaagctgcagttagtggttctctctgagtttgaggtagtggtattttattattaaacaattttttccaaatattttttaaactactttccttttcagaccagatgaggtagtgttaaaaatgatatcttctccaacaagtaaaggcttgattaattaggttgagtctttaaaatatctagtgtttgtgtgtgtataaattttactttaattgagaagtattgataaaaatcataatcgtcaccatttgagcccctgccattgagcaggcattgtgaggtaggagtgagcatcattttacaggagagaaaacaaagccaagagatggcacgactctggtacagctgtcgtgcataagttactgatgatctttcaatccatgtaccattttgttaacagtggaaaaggaattctcagctatcctacagggttgtgctagttaaatgagatactgtatgtgaagagcaacaagtaaactcttaacgggctccctaacccagcacattttaacataaacacttgtagactctggaagcagtgtggtgaagtggttaagttcaagcgtcttgggagtctggcaggcctgggtgtaaatactgaacctgctgcctgacctctctgagcctggtttccacatgtgtaaaatcaggataatactgtctgtcttatattcaagaaatgtacccactaattgcagtgggtgctgagtaaagattggcatccactcctttcccttgcacacaggtacttgggtcaatgggattgagtaagtctttcagcagttgtcctcagggggaaaaggcttaaagtactttttgtacttatcaatgattcttctagcctttttgccttcccaccctaagccccagcacgcgcaatgaatattccagggcctgtgattgtcttgtccaagggaatt

SEQ ID NO: 66819 - DNA, 3485 bp, Homo sapiens
ttttccttgcatgtatataaccctttaaatatcaaaagtattaacacgaattttaaaaattttctgagcaggcatggtggctcatgcctgtaatcccagcactttggaaagctgaggtaggtggatcacttgaggccaagagttcgagaccagcctggccaacatggtgaaaccccatctctactaaaaatacataagttagctgggcgtggtggcatgcacctgtaatcccagctaccctggaggctgaggcatgagaatcgcttgaacacgggaagcagaggttacagtaagctgagatcgcaccactgccctccagcctgggtgacagagcaagactctgtctcaaaaaaaaacaaacaaaattattctaatctttgctgccctattttaatgttacattatttttatagacattttcctttttgaattcagaactgtcatacataaagtacacagaaatgaagagaaaagtcgtgaatactcacaagctgagattgagtcctaatgaggaagccttcattttgaaggaagattatgaaagaaggcgaaaactaagattgctacaggtatgacttatttgtaataaagttttaaattcctttcttcctcaaattacttgtattcttttacattagagtgttctaaatgttgtatttaaaaacctcttctgggtatacgagagccctggttatttggtattaactagttttggaacacttgaaaaataggctgagatggttaagtacattgtagaagagttggaagataggtattatttgactcgaatattgaaaatagctctttatcttttttaaaaatggtctgtaattggtaacaggaagcttagatgactttgaagaatgctaattggaaagattattagctgctgaaacaaatttatcaggaaattgcagataacccttttctagaagtgtttttaaagtaagtttttgtgaagtatgtttcaggcaccattctgtctagaatcagaaatgatgtacaacagaaatggagttctcatctggctctgtctgtactctgggctatagattttgttgaatcatatttatcgctttagcttttataggttattagagtgataatggcagtccttttgggagtgggcgctgaataaaagctatcagtttggagacattagatatagtcttgagatttttactttttgtacattcactcagattttctgctttaaatagtctttatctaatacaagatgagtatcaaagagagttgacagacttaagagaattcatttgagttcctctttccaaatagcttttcaaaaaagtttaagtaaacctcctttcatataacctgttaaatatgcattctttaggttcgagaacaagaaagagatatcgccttacagataagagaagacataaaacagaggagaaatcaacaatttacacgtttggcagaggagctaagggcagaatgggaagaatcacaaactcagaaaatacagaacttggaaaaactgtatttggcaagtttaagaagtatgggagagggacatcgacaggccaaagaaaatgtgagtgagatcttatttgactaccctgttgtggcagtaatattagtaaaaagtaaattatagttgttgaatgcttttctgataacattttcatgcattgaatttctttggggcagcttgaacttttttataaatttaatgtaatttgtgaataataggctcatttcttactaagagttatttcaagtaaaatccatgtcaaataaaattggtcttcctatgatgttcaagttagcattattctcttccagtactcctctatctggggaaataataatcttctgaatcagaagttgttgtccatctcaggcattttttgacagatttggtggggtgaattcaaccccccaacaaacattttttgatgactttcagaaagtcacagtaagtctgccccattattttgatttattgtgatttatgatgtggaaatactacagtcccagaatcagtcacatacagtaaacaagctagttacaaagaaggtaaatctttgataacaactagtgagaaagaaaatatcttaagactgtggcaatctgtttcatggtccttggttttagtctgtgtttttagtaatagccgtaagttctgactcaggtttttgtggttttatgcatgccacattaagtttgtgcctaatgcaatgtttcccaaacctctgttatttgaataccatgttcacaatttttgccctgactgggaaactacccatatcactatatattttacgtactttaaccatgtcctaagtagttcgatatcctatttatatttttgtaataatgttaattgattgcattaactttacattaaaatgtttgtgtttgtcccccctaatatggcatatcatcagtggtactgttgtcatgctctgggaaacactgctatagtatgtagaaagaagatgacaaaattgataaatcacttctgatatcatatgagacacatttctattattcttgtttaacatgacattttaagtaatatatatttttaggaacctgatttggatgctttggcacagcgggcagcagaaaggaaaagaaaagcagatttgaggcataaagaagccttgaaagtacagaaaaatcaaaaagaaatattactgaaacaaaaaacctggtaaagtaataatttttactataatctcaactgaaactaacatggttgaaagtagaggatacataggatactgtgtaagcaaatattaaataaacatagtagcatattcattgcatttgttaaacttgatttaaaaataatgttggggacagggaatgatttgcttaggtgaacatagtaactaatgagctttcttttctagttgtagtttgagttgagtttagcagcagttactaagtttctgaaaaaatatatggctacttcagaatgcatgtcaaccaatgtctgtttccgatgtaaacatgaaataaaaattgatgtgattaagaacattaaaagaggttgtagactctggaagtcattagtattttttgcatgttgtaaaaattaaagggccattcacaggaaacgtgagtgaagcaaagtaaaaaattaagggccctgttactagttagcaacagccatttttaacaacatttctgtttttttttttttcactctaaagaacattataagtttcttgggttggtccccaccatagagctttctgtctttagataggcctctctcaatttgtaaacattttcttaacatatgtatagactctttacacatgtaaagcttactgagcctgtggaatcagactagaggatttcttgagcctatgacttacatatttttaaccctgttgtactataatattatcactgagagattaattgatgacatctcttgtttcttaaggcatataaaagctcgaaaggaagcactgcttgtggaaaaagagagatcagccaaa

SEQ ID NO: 66820 - DNA, 1055 bp, Homo sapiens
taaaatttgaagtaatttaactcaaaaaatttgatttcattatgagcagatatttagcatgttttggatgcggagaactcattaaaatacaaaattactttttttgcattggattcagctttaagtgaaaattaatgcttttaacctatttttttatgttctcttttccagaacatcgaagtaaaaagaatttctgcagtcaaaaccaatagttctacctaccatcatcttcacacttttgtgaatagagagacagacacaaaacgggtgattgacttattgtttcttcatgccctcgctttattatttctgtgtgcattgaattgaattatatcttagttatatgtatggtgttcccagatttcaaaatttggacaattgataataataatcaaaaccttttaaatgctttgaattttcatgtcaggcatatgatggtttaatatgaattaaagaaactagttggctatttaaatggttattttaaaatagcagattttaaagctttttttatcataaaatattacatgctatttgtggaaaatttggaactgtacatataagtgtaaactattgggaaaacaccaattctgtcaccaaagtggaatatagttaatgttttaataaattcattataacctttatttaaatataaacatatacacacacttttcaaaacatgatttttagtggccacttaatatttcatggtagcatttatttaaccattattttattttttgcttctgtaagtaatgtaagcattatcttgcacgtttttatccacatctctgattatatataaattcctgaaagagaaagtattggctccaaactgtgtaacatttgatacagatcattaaattgctttttaaaagcatcagcaacataggagaatgaccaccttaccatagccttttctgcactgaatattatgttttaaaaattattgccagtcttaagagtaacaaatgatatattgttattataattgctatttctctgtgtcagtgggggttttaatttttttcatgttgaatatatttctctactag

SEQ ID NO: 66821 - DNA, 2013 bp, Homo sapiens
ttttccatgctctattatatctaaaaagatttctgtccaaatatctgatgtacaagattcagaaatgtatttaataatagcatttatcattcatatatctttgatcttcacatactgaaaatagaatctaacattatttcaaccagatttatggttatgtttttaattgcattgacacaaatctataggggattgtcttcctaaagctgtattataaatcttgttttgaagtatgatcaataagaacaaaatttgtttgtggtccctaactttttctctaaccctttattcatatcctttatatgcttttttatatctggactgatatttatcattcatgttgtatgctattttgaaatttttcctttctttaaaattttggtttaccaaaattgacatactgcttttaatttatcttcaagagatgtgaagaattcataaacaacttttttcttgaaaacctcatggctgaaatggattgaaatattgttctcagaggttatattatttaatatcatacatattgatatactaaatactcctacagattataattttgatttaatctaactttttttgtcttacctgatgttatttagttttgcatgaatatttagtggctcaaagcggttatattcttgataaatttgtttggccagtgtactctttgttaatttaataactgtcaatctctctacctatttatctcaccatgtgagaatttttaataatcttacacttgaagttaacagcttttttggtcatcattaattgtttcaactggctggcagaatttcaacatacaaaagacagaaaaagacttttactgctggttacatttagaatatttacctatacttgaaagtgaatgttcagataataaaagtaaatccaggctggatgtggtagcttacgcctgtaatctcagcgctttgggaggccgagatgggaggattgcttgagaccagcctggtcaacatagcaagacccatctctttaaaaaaaaaagtaaatccagactctgtgcctctttctcttttttgtgttatttatgttaatgagatttgtgggtatttacctttcaatactgtcattttaatgaagtttccttttttttatttttgagatggagtcttgttctgtcacccaggctggagtgcagtggcacagtcttagtttactggaacttccgcctcccgggctcaagtgattttcctgtctcagcctcacgagtagctgggattataggtgcccgccaccatgcctggctaatttttatatttttagtaaagacagagtttcaccgtgttggacaggctgacctcaggtgatccacccacctcggcctcccaaagtgctggaattacaggcatgcgccaccacgcccagcaagagatttctttgcttacaaagtgatggataaatgtgtttggaggagtataacctcatctggtttaaaatgagtaactcgtaaagctttatactaacaatttgatccctttcataggtacatgccgttgataattgtggacattttaaaatataactcttcttatattttatatatgtagaaaacatgattttaaggttgttttgttttttagttactgcttgtctcacactttaaaaattttgcctacaatttttgattgactgctagccagatgctcgtttggctgctgaagaggaagctaaacgattggaagaactacaaaaacaggcagcacaagagagaatggaacggtttgaaaaggcacatgtacggggattccaagcaatgaagaagatccatttggctcaagtaagacttatattctacccatgaccattactcatggacttactaatagcattgcaggactgattagtgaatgagctcaaagaaaggtaggaagggtgggtgttcaatatagtctctgattcatatgatttcaagtttcccaactttctttgccctccaatttcaagttctgattgggttaagctattctcccagtgtattgctattctaaa

SEQ ID NO: 66822 - DNA, 1088 bp, Homo sapiens
aataatggaaattcataagagtgtgaggtaacaagaaatattctatgttaagccacagtcaccctgggtcttggtgcttacctgagataggtatatggagaactggaacaaagtacatcacaggagccatggcaacttatatagacattaacttcatgactttcctcagaaaggaaaactgtagctggcagacactttttgcagctttatggcctaaccagtaccactctttcattgtacttactaacataacactacttatttgttggtcttactactagggtagggttgagattgtgtccctagcacttaatgtggtatctggtattcagcaaataattgttgaatgaataaatgtctgtcttttggctgaacaaataatagaggagaggagagaagcttagaccctgatcctcatttcccctacctgcaacattgttaatattaccatacaaagtttgtgactcagtttttgttaattctctttattcttgaagaatcaggagaaactaatgaaagaactcaaacagctacagcaagaggacctggcacgtaggagacagactgtagcacaaatgccaccacaactagttgaacttccatacaaacgcagtgaaatgaaagaagactggcagagagaattggaatttgcctttgaagatatgtacaatgcagacaggagtaagatattttcagtagggctttcaatagtgattttatacgttttggtgggaaaatatgtttgtaatgataaagcagtttttatcttgaaatgagttctctgtttgaaggaggccccccatattttagattgagacattaccgtggcctttgcatttttgtgatccagttatttttaatcattttggaatggaaacgtgtctctatttttcttttttaagaggtgaaagggaatctgattctgcaccttgaaccagagcccttgcccactgtgactaatcagatccaagatgaagagctggacctttcaatggaacaagaaaatttgggtgcagctgaagaccttccagtgacagaagctgaaatatgttctagtgaaacagatggtaaaaacccttctgagctaa

SEQ ID NO: 66823 - DNA, 1500 bp, Homo sapiens
tattggcttggtgttgccaagttgtttgtttgtttgtttgaagctagaaatctcattgtttttaaaaatccttacttttaaatattggcaatgaatttacttcttaaaaatgagtgggttgtggactaatggtaaatgaaagaagccaggcagaaaataatacctaaatgtgtgattccatgtttatatgaaggttttaaaaaaacaggcaaaactaatctgtgatcttggggttaaagtaggggctgtttttaggggtgtattgactgggaagggacatgaaggaaccttagtcctggtaatgttccacatgatctgaaaggtggtacattgacatatgtgaaattcagtaagctatacacttaggtttttgtgcaccttgttctttgtgaattataactcaattggaattttttttaatataagttagacaaaactacaatctgcctattttcaacctcttaaagatattcttaaattttattccttgactaagccagagaaatatgtacttgcatcacacttttgtcctcttagagaactgttcgtattatactgagttttggcattaaactatcagcccacatgggaaaatgtttgaagaaatacttgtgttgtttttttgtttttgtttttaactgaagggatctctgtgtgaagatgggtgggagacatttttcccagatagtgccaagaataatttgggagcagttgatttgcttttatggctatgatgttttcctctgtagctcactaagaaatacagagccatatttgggaccattctctagtgtagactatagaacctcacagcatatattttcaatactaatcttaccagcaaattaattagaagttacacattcatttatcatttagcaagcaaaataaacatcttcctgataagttttttaggcttgatatttgtgttgcatacatgtttttggaaaatacttgaattttggcacttttactattttcagttgaaaaaattatttctagttataatgattggagtcagatagcattgttgtatatactgttaaatcgtaaatatgaggaaaataaaactgtgcttttaactagtggttatagcagtaaccgaatataagatggaacaatttgcctggtaatacaatagatgctaaataagttttttccctttttctttcttttagttcccttggtaatgaagacccaacagattccttcaaaagttctttttaaaaaattattaaataagatccgaagccaaaaatctctctggacaattaaatctatgtctgaggatgaaagtgaaatgattacgactgttagtgaaattgagagtaaagcaccaacggttgagtcaggaacaattgccagcaaagagagaacgttatcctctgggcaggaacaaggtatttctctccaagagtctcattttctataaacccttttaagttgttcaaaagtaggttcgtttctgaaaaatcaaagaatagaggttaaaaggaacaa

SEQ ID NO: 66824 - DNA, 1023 bp, Homo sapiens
tcacaaaaaaaaaaaaaaaaaaaaagtgagccaggcgtggtggcgggcacctgtagtcccagctactcgggagcatgaggcaggagaatggtgtaaaccagaggcagagcttgcagtgagctgagatcgcaccactgcattccagcctgggcgacaaaatgagactccgtctcaaaaaaaaaaaaaaaaaaaaaaaagataaagggccaatatgagcaggctttcaccattctcatcttgctttattctcccccttgcctgactaaaaccatgcacactgatctctcagtttcttgaatgggccaaggtttgtttctttatcctcacggggccttttatacccattggtctgtctggaaaggtctcctatacatcttcatgttgtttacctggctggttcttccttacctttcaagtgtctgcttaaatgtcgtttcctcagagaaatttcatcttgcccagatttattatactctattgtataacccttcacttttcttatatagtacttattacaatttctaattttataatttttttctgggataattataagatggttctgccacctactctgtaaagcctccttgaggcattttctcatttactgtggtatccccagcatctgccacataagtaggtaccaaatgaattaatgagtgaatgaacggatagctccatgcagactatctggctacccaaatatgatcagaacaaattgctttaacttccttctctgctctggtttcacaaattattttttaaaaacctagtatccaaatatatcaaagatacattgacattttgttagcttctcctttttaactttgataccttgttgtttccgctctttttatgcctttctcctatgtttgaaatcctatcagcgtatctattaaatcagttcttcacgttttcacaatttcagtctttcatctctgttgttattattaggcttgggtttaatgagaaatatatctgatcatcaggaaggttactggatcttaactagatgagacattc

SEQ ID NO: 66825 - DNA, 1032 bp, Homo sapiens
aattgagtctggaccacttgctagtgaagataaaccactttcgtgtggtacaaactctggaaaagaacaaggtatttctttttatcacatcctcaaattaaatttgactccttgcatcttttttttaaataaaattacatgtgatatattaagaaagggcattatagtggtgtcaaaattctaaattattgaaactaatttttgtttggggcattcccctagaaataaatgagactctgcctatcacaactgtagctcagagttcagttctacttcatcctcaagaagcagcagccaggattagaatgtcagcaaggcagaaacaggtaatttgaaattttatttttaaaggtttatttttcccctaggtactattatataattttgtttggccaatgaaatttgtcttaatgtctggctaattttgatatcatgtttttgacattgtcttacacaaacattcagctgataaaatgcgtgttgtctttgcccatactgctcattcaacccttattgtgtctgctttatattttatatatttgtatagatcttccctataaaatttattagcttttaaaaagcagagactatcttctttaaaaaattcaatttatcctacacagtttctgatacaatgctttgtacatagcaagtatacaataaataattgttgaattaacaagtccttgtcataatattagacactcagatgggctttgtaatcccacaagttttttgaaaaataatacttcagaggaaaaacttttaatatacagcgccctttttttgctccgtcgcccaggctggagtacagtgacacgatcatcgctcactgcagccttgacctcctcagttcaatcctctgacctcagcttcctgagtagctaggactacaggtataggccaccatgcccagctaattttttttttttcctagtagagatgacgtcttgctatgttgcccaagctaaactttaacttctttaggctgggcatagtgactcatgcctgaaatcccagcactttgggagg

SEQ ID NO: 66826 - DNA, 5103 bp, Homo sapiens
ccatgcctgacaaaaaagacacagaatgttgttcattgcttctagataactatccctcttaatgagcatggttaagaagtcaaagtattttaggaggccttgatatttaatttctttagtcattatttatactattaaatgtgtgaacatagaatttggctgtacatcatttgctacttcaaggtagttcttcagtggtgatcagggtttcactgtgctctcagaaagtagaaatagttaatgtatttattctttcttttccttctgcctttttttacttctatccctttttctctttttcccatttcccatcttttactcccatcctcagtctgtcagtgataacaacagagataaagcatcaacacttacttctttgaaaattggtacccttggtgaagaaacctaatttcttttaaatggaacgtgtgttatctttgcctttgtatgagtttgttgttaatagatcaatagtattttgttacctagataatggaaatagaagagcagaagcaaaagcaattggaattacttgaacaaattgaacagcagaaattaagattagaaactgactgcttcagggctcagctggaagaagaaaaaagaaaaaaaactcaaccgactggggtaggatgcagaaaatctcatcactacataaatcatttggtaaggggggcaagaaaatatgagcacttgtagcgtttagaaaagtaaaatggatggctgggcgcggtggctcatgcctgtaatctcagcactttgggtggccgagacaggcagatcacttcaggtcaggagttcgagaccagcctggccaatgtggtgaaaccccatctctactaaaaatacaaaaattagctgggcatggtggcacgtgcctgtaatcccagctactccagaggttgaggcaggagaatcgcttgaacctgggaggtggaggttgcagagtgagattccatctcaaaaaaataataataataaaagtaaaatgcctttgtaattcttatttggtctttttttgatataatgtatgtatatatgaataaatttgcatcagttacggctttcatctttcagtttctataggatactaatagatacgaccatggtttgtaggtaatgcgtatgttgagcttttggacctgcactgaaggagaatgacagattagttcatttcttactaatggaaatgccagtcattttataaaaaataaagctgtatggaagtttacaattatagaactgtatgtaaaaatacttcaatacttacttctaaatttgctttttaattagtaactttgtcttttattaggttggcattgctccagcatcatgccctgtaatttctgatgaagatagtcataggcagatgattcgtaactatcaacatcagcttttacaacaaaacaggtattagctagggtataatttatatgtgatcgtatgtggctacatttttaggatttattgtttcatttatatgaggatctaatttggatttccttagaattatggcatttagaactgccattcttaaaggacaatgtgagtgtaatttcttttcaccatgagtattgccaaccctagattgctgtttgttaaatttaatgtatagacatggggctttttatttttcattaaaaaacaataattgtttgcttttgtttttggtaggttacacaggcagtctgttgaaacagccaggaaacaattacttgaatatcaaactatgttaaaaggaaggtgcccatcggtgtcagctccatcattgataactgattctgttatatcagtgccatcatggaaatctgagagaccgactgctatatcagagcattgggatcaaggtcagagactcaagttgagtcctaacaaataccaacccatacaacctatacagacctccaaattagaacaagatcattttcaggtagcgagacaaaatcactttccacaaagacaggtggaaacaacagaaacattacgcgcttcagatattttaaccaatcaagctttagaatcacaagaacatctaaggcaattctctcagactgaaacacaacagagagactataaattggtccccaaagattctgagacactttcaagggctttgtcacatgacaggcagctaatatcacaggatgctagaaaaatatctgaaacatttggggcaacaacttttcaaagtttagaatcccaacaattgttctcagagaatagtgaaaatatatcttaccatttaactgaaccttcttcatttgtaccactggtacctcagcattcttttagttctctgcctgttaaagttgagtcaggaaaaattcaagaacccttttcagccatgagcaaaagtacagtttccacaagccattctataatcagccaaatgcatgataggcctttgctgccgtcagagaatatcacagcccagcaaggtaatatgaaggccctccaagaacagttagacctacagaagaaagttcttcaggcaactcaggaagctcaggaacagttgcttttgtgcaaacagaaagaagtggaacagcaaacgggcctctcggtattccttcccttggtaactccagattcatctgctttattgccttctgccaaagcagatttggggagaatccaggaatcttcaccaaccaagaataatattgcagtttcctcagaccatcatgtgatctcacaacttcaggataagcgtttgagtctttcacagcctatcctatcacagcaaaataattttaaatttctccaagagcagttgaatattcagaaggatagccttcaggctaggcgagaagcccaggaagtattgtatgtacataaacagagtgaattggatagaagagtatgttccgaacaggctgagccctctttcccatttcaggtagctcagcatacatttacttcactaccatctgctgatacaaaatctggaaaaatacaggagcaacattcatctaagagcgagaaaggacttgtttcatgccaatctgacatccccatatctcaggatgggtctttgagtttcctacagcagttcctacctctacatgatagtttgaagttgctccaagaacagttgactaaacagagggatactcttcaggctaggcatgaagctcaggtggaattacttttacatagacaaagagatttgggggacagtaagtctgggctggtgagctcttcatcctcaccagtggttgttcagcattcagttgcttcacaagcttctgctaaagctgagcctaggagaattcaggagctttatttatctgagaaggagaatgtaggtccctcctgtcatttgataatcccaacatttcaggataagtctcttagttttccacagcatagcctggcacagcaagaaaatttgacaatactccaagaacagtcacaaatacaaagggtaatacttggtgctaaagaaggaactcaggaatttgtacacacagaaagtgaattggagaaaagaatttcttctgaacagactggcacctcctcatccctttcccaggtggatgaatctgagagattccaggaatgtatatcaatcaagagtgacagtaccattcccttaagccatcctaagatcccaagatgtcaggaaagacttttgagagtttcacaacatatgctacctctacaagataatttggaggaacaccaagcatggctagacactgagaaagaagcctttcatttcagccagaaaacccaagaaaatacatcttctgaacaaactggttcatcttcattcataccccagttggtacagctttcatttacttcgttagcttcagctgagtctggcacaatcctggaacctctttttacagagagtgaaagtaaaattttttcaagccaccttcagatcccacaattgcaggataggcttttgaggatatcgcaacttatccagcctcaacaagataatttgaaggcacttcaagaacagttagctacacagagagaagccatcattctagctagacaagaagctcgggaagaattacttttacatcagagtgaatgggagggaagaatatctcccgagcaggttgacacctcttccttacccctagtaccacagcattcattcgcctcattacctcttaatgaatctgaaagaaaccaagaaccatgttcaattaacagtgataatatagtatcctcaggtcactcagagataccaacattgcctgatgggctgttgggtttatcacatcttgttttacctcaacaagataatttgattgcacttgaagaacacttgcatgcacagacagatttccttccttctattgagaaaacccagaaagaattggttttgtcaaaaccatgtaaatttgaggaaaaggtatcttctgagcattttatccagtctcaccatggtgatttgcaggcacttcaacagcagttagatacacagaagaaagccattcgatctatacaggaagtccaagaagaattgcttttgcaaagattaagtgaattggagaaaagggtatcatctgaacaagtttgctcctcttcatttgtatcccaggtgcctgttgctgactctgaaagaacccagaagtctttcccaaccaaaagtaatgatactcttccctcaagtcatcgtgagattccaagattacaggatagacttttgagtttatcaaagcctattctgcctcagcaagataatatgacagcacaattggatgcacaaagggaagtgatgtattcttatgagaaaccccaggaagaactgtctttaaacaaacaaagaaagttgaacaaaagtgaatctgctgagcatactatcccctctttgtttctacccaaggaaacagagcattcgtttattccactaccttttgcagaagctaaacctaaaagcacttgtgaattgtattcatcccagaatgaacatgcagcccccccaagtaatcctgtgatcccagggtttcaagatagacttttgagtttttcacagtctgtcttaactcagcaagataacttgggacttcagaaacagttggatctacaaagagaagttctgcattatagccagaaagcccaggaaaaattgcttgt

SEQ ID NO: 66827 - DNA, 1051 bp, Homo sapiens
ccgcgcctggccgaatggttgtattttcaatggaaatatccttttggcattagaagcatatcttattttttatatatagataaaattttgtgattgatggaactatttatttggtttacgttctaatttaagaagggagatataaatctaatgaataatgcttcacatgatcccccaacttgtgcttccccaccctcatctccactttttcagataagtaagcccacagttgaaaatgatttaaaaacccagaagatggggcagctcagagactggtttcctaatacacaagacctagcaggaaatgatcaagaaaatattaggcatgcagataggaacaactctgatgataatcatttggcttcagaagatactagtgccaagcaaagtggtaagataattgtgtttgattgtaattatttcactgattattccttgttttcgtcccctgtagcttgctagttgaagaaaagttagaagtatgttaatagattttgtattgtatccaactttgtcattgacttaataggtgagcatctggagaaagatctggggagaagatcctcaaagccacctgtagcaaaagtcaaatgtggtttggacttaaaccagcatgaacttagtgctatacaagaagtagagtcaccagcaattggcagaacttctatactaggtaaatagatgctttgataaaacaagatttttaaataatttgccagttttctactttttttttagatggagccttgctctgttgcccaggctggaatgcaatggtgtgatctcagctcactgaaacctctgccttctgggttcaagcaaatctcctgcctcagcctcccgagtagctgggattacaggcgcccgccaccacacccagctaatttttgtatttttagtagagacagggtttcaccatattggccaggccggtcttgaactgctgacctcaggtgatctgcctgcttcagcctcccgacgtgctaggattacaggcgtgagctaccgcacctggtctacattttttcagagtgctaaatgttttttgtta

SEQ ID NO: 66828 - DNA, 1048 bp, Homo sapiens
agaggcagttacttttcaagtattttaagtatttcttcttgtatttacttccatagttgcagtgggtttaagcaaaaattaagctaaattgtcattatggtgatacatagaccttttttgctgcggagtccattagtatattatgttattatattttatttttctaaactttttttcatgtagtaaattgtcttatttatttaatttgcttaaagtttttagagtgtctgtctttccactctctactacttcagttaaatacctctcaatataatgtagtttgtactattttctctttttgtggaacaccttttagttggaagttgtatgggccgtgctatgcattcttaacaagggtgttttttcccccagagggataaaaattggttcttggggaggtgaaaaaaaacttttactatttatatgtacaaagcacaaatatgcataaatagatatacagtatatttgtggttattaaaactgaacgggggtagaggcagtttaaaaaggaaaagtctaaaaagactccttaagggatgataaaaataaggttgagaaatactgatctatattgatctttccattttttcttctctttctttttctttgggttttgttttgtgggctaattttcttaattttgtgttctgacttttcttttgaacttttgatgatcaaattgtagtttctaaaaggttactctttttctctgattattttctttttttatagcatcctgctattgtttcatggatgcagaatgttgtctactttaaatatttacagtggattttttggtttgggtttttacattttttagttctttcatttttttgttgtctctgtcttatactttagaacctttcctctaatgtcttcatatttgaacgggatgctaaaaggccaattggaggttctcttggggtgaggggctatatgtgctgttggactttattggaaaaagtatggctttgtagtgaggacgctcaccttagtatctgtagttccattccttgagagaagtttagtttcttcaaagaaatacctt

SEQ ID NO: 66829 - DNA, 1365 bp, Homo sapiens
atcacactggttcttttctaggttttagacctaatattcaaatttcttaaagcattttattcataaaataacaatagctacagttttccaggaaaaagtatattgtgctgactagtgaatgtttttaacaaatacggtgaattttttctttgatctaagacaagacaactttaagaagcaaaatgagaaagtagattgtaggaaagcagggaatggtgtcctgtggtgctaagaatttgatttgtcttatcccaactatatttttctcccatcttgaactccaaaatccatttttcagttaagctgaaggaatctgttgttgaaaatcatgcagtgttaagttatgctgtggaggaagaacatgcatatttgggtccaactgtgaagccagatgataaggttagtaatgtcttaatgttcactcgatttttagagctgtttggcttcgtattctcttttgtttagtttacagaagctatgttataacattaaagtcagtgctttctgagatctgcttttagtgaagtggatcaatgatgaaactagccaaatctgagcatcagaagtctttccagtctacctgatgcatgatctctacagttctgagaagcaaaactataaaacaatgtaaaacaataagggcatatgtctggtgtgtgtgtgtgtgtgtgtgtgtgtgtgtgtgtgtacgcacatgtgtttataaagataacagctgtaggaatgaatgagattgagggtgggggggtgcgtatgtatgtctatgaaagcctaatcatttctgggcaatgatgaaaaggttttactactgatctttgtaactatgatggtttctacacttgacctgagctcagaagtgacaactgctggggttggtgatttggggttttcttacatactacttgctacattgtggtatgatattccccttaatttctaggctaaaacactgtcttatgaaccattatcttcagcaactgtttccactgggagccttttaagttatgaaaacacagatttgagccttacagatccaggtaataaggtcaaaatgtttataaataagttgaaagaccggcaccagttgagttgcaatacagtgatggaaggaagcattgggttttcatgatacaccatggggaactatttctctaaatctcacaagtaaagtatggccaggcgtggtgcctcacgcctgtaatcccagcaccttgaggtgggaggatcgcttgagcccaaaagtttgagaccatcctgggcaacgtggtagaaccctatctctacaaaaaaatacaaaagttagccaggtgtggtggtaagtgcctgtagtcccagctactcaggaggctgaggtgaggggatcgc

SEQ ID NO: 66830 - DNA, 1051 bp, Homo sapiens
ccaacaatacttttgagaagcagttgctgatatatttttccattcagtggaaacctatccgagcaaatttcatggttgcactgatctcttaacaatatgtattaccatgcttctccactaaaatatgtctgtaaggaagtacccagtacagtatgtctgtaaggaatattccattaaaaggaatatagtgtcgctgtcaattacatttttttttcttttgagatggagtcttgctctgttgccaggctggagtgcaatggtgcaatctcggctctcccgagtagctgggactacaggtgtgcgccaccacgcccagctgatttttgtatttttagtagagatggggtttcaccatgttggcgagatggtctccatctcttgacctcgtgatccacccacctcggcctcccaaagtgctggtattacaggcgtgagccatcacgcctggcctatttacatattttcattaaactcaattttcagagtcattttcagagcacatggatgatagcaagcaagaatctaccaccagtaaagaagaggaaacaaatattataagttccatagttccttcaacacaagatatttatcagcggcagaactcttcagacgttcataaatctctgttgcctgcagtggatgaaactacatgtggtcacacacactttcagcaaatgatagacaagtacattaatgaagcaaatttgatacctgaaaaaacagatttgcaaggtaaaattattttaaagcaatacttttatgtaaattaagttttaaattttcacctttcatcattttaaattttatgcagtgattgtttgagcttcatgttcttatggcctgctacaacaccgttttaccacagaatatattgagggcatttagtgagaaaggggatctggaaccaattagactcactgaggcacatttataggagattaattagcaaatcttcctttgccattgcagagttagctattacggctgaggcggtattactgataaataagagcaggagctcagaaatcatacagttctggatttgagtcat

SEQ ID NO: 66831 - DNA, 1071 bp, Homo sapiens
ggaagctgcggcaggaggatccctggagcccaggagttcaagaccagcctgggcaacatagaaaacaagtattcttgagcctttggtacaaatgattatatatacacacaaacatacatgagatacacaaggatgtacaaattatatatacacacatggataattgagatacacatggatgctttattctcttttctgttattaaagtcatattcagttcttatagaggaaaacatcctcagtttatagccatattgtccttattaaatattaatagaaaaagaaaaaatacttggtgtgagctgtagtttgagaaatcactgtgaccatccttatctttgtattcatgtttatacacatcaacttttatgcctaaaattgtaggttacttgcaattggatgataaactattagagactgtcagtatccaacttttacaacatgtaacgatgattaactgatttttgaatttcttaatgcaggatctgaacaatgttttgaacagcttcagccagaatattcttcacaggaggagagccagcatgctgatctaccaagtatttttagcattgaagcaagagattcttcccaaggcatgaaaaatcagaactatccctctgaagaacatactgaaatattacaaaacaagaaaaaaattgttcatttccagctttctataggaaacttaagttcagtctacagttcatctgatgaagctaatgtatttgatcagttaaatgtacagcatagcactccatgtggttctaactctagtgagtgctcaacaaaacaccaactagaaagcagaaaggaaagtatgggctttgaagaactatcaaaaagaggggttgttacaatgttacaaagtcaaggactcattgaagataataaaaatgaaacctgtagggttttagacataaatccacaggtagaggaaactgactctcgattatgtgtaagaacagtggagatgggaacttcaattcaggcaccatattccttaactactcaaaatgaaaaatattttgagaattcagctgaaacagacattccaaaaatcaccaaaaaact

SEQ ID NO: 66832 - DNA, 1039 bp, Homo sapiens
agaccagcctgggcaacaaggcaaaacccaatccctacaaaaaatacaaaaatcaggcatggtggcgggtctctgtagacccagctaagattgaggctgcagtgaggtgtgatcatgccgctgcactctaatctgacagcagagcaagacccgcttaaagcgtttaaaaagagtaaaacatgcaactttcttgccattaggtgagtgagtttctgcctcttgtatcagcaacagaagcctcagattatccagctgtatcagaactttccatagaaaaaccaaggacagcatctacaggtaagccttggacggcctccacacttctaatggaaagtagatactttgcctatttctgtcataaatttcttttcccccagcagaaacccctcgcaggcttacacctgtaccagggagcttacaagaagcatttataaagaggaaaaaatcatttatggagagatcccaccagaggcagaaagaaataaggaataaaattcatgtctctgaaaattctcaaatcaaaacagttaaagagaaaccatctataagtatgttgaatttttaaaatcttcaaccaactccctgaaatgtttaaagccttgtgtttacaacttgatttcacttttctttcctcaggttcatctgtgagtcgtctaaagggcgtgaataaagtcagagcatcttttcctgaagacagaaagactacacaggctctaaggcaccaaaggggtctaaggtagggttaattttttttttttttttagtgattcactttttgcagtgtttgtctctaattctatataaattctttacaggttatacaatcaactagctgaagtgaaacaacaaaaggaagaaaaaacaaaacaagaagcttatgcccaaaacagagcaagggcaaaagaattccataaggtgagtataactgagggagaaggacttaatttttcaagcatgaagtacacaactgaaactcaaatttttattccttccacagaaaacactagagaaacttcgagccaaaaatacatgctgactt

SEQ ID NO: 66833 - DNA, 4509 bp, Homo sapiens
tgcaatactgaagttcataacaacagttagactttaaacttaaatcttaagtttaaatctttttcctttggttcatgtaaaggagctacttgatgttactttttatttatcattcctctggctcctaagcacaacgtgattgtgaaattattgtttttgtgattaacgtagtaggaagtttctgcagttggcaatattgtaagagcatattgcagtttctgctcataatttctttcctatggagtgttagactttgttatttatgtgtataaatactagctggacacagtggtgcctgtggtccccagctactctggaggctaaggcaggagaaacacttgagcccagcggtttgaggctacagtgagatgtgatcctgccacatctcactgtagcctcgaacccctgggctcaagtgattcagcaagaatcacacgatttttaaaagacatggcagatcctgtgtctttaaaaaaaaatcaaaaccttgtaaatagtggttgaggtctatcccgatggggcttttcctgtagcctgcacatcgttggaaacgcctcatagagtaactctgtggttttactttactcacaggactattgttagatctgtgggaaggaattacaagacagttgctaaaagtttgaaaaagacggttgctaaacgttatgaaaaaccagataatctacttttttaccttaggtattggcatactccacacatctgtaccattcttgagtgatcgcttaggtaagttttaattggtgacagtataatcttttgggaaataatgattacagttcagatgatgaatttaactgttcaactgctgaatgataacgggcatgaactaaaacttaattctgacagagctggatatggctgtataataaactggatcttaaatttatacttgggttttagttttaataactggaaatgtatcctttctaaatctttaattggtactttctataggaatgaatgtgatttgaactcattcatgttgagaggtaagtaaaatatttaacttataataatcaaggactcaaaagatgaaaaatagaaattacaccatcccagtatttcaggtataacacagaattagtaagatactggcaaaaatattacaatgtatatatttgtatagagaaggaaaatgaagagactgcatgtctatacctaccaaacgaaactacctgtgttctttgcatcattattcaactggcagttacacatatttcatcctaaagtcacgtaaacctgtgtggatatgttgaatcaatagggatatgaattacataaaaagaattttgtgtaactggcagtttgagcaacaatgagcttgacgtttgttgtctgatctgttaagttacatgtatatattccatctttaagttttatagagagactgggcaaagattaggcaaagactagagttgtagcttaaaatgtagttaatgtagcttccttattacagtgacaattaggaaaaaagctcaaattattgtacttgttaaaggaatttgagaggtttgtgaaagcatttctcagcaatattgcaaatttgggaatacgagttgtacagttcagtcataattgcactgcatggtatctgcactcagcagtttacacctgctagggtgttcaaaggtcagtgctatagaaattcagtatctggcatcgttggttttcttggctttgtgcttgttaaacctggtatttctactgatacagtatttgtgtaggtttctcagagtgttcagtttgatatactctaaaatagtaagcaatgcttttttttccagggtgtcaaattgagaaccaggtagatccccaccacctacagtaaaaaggtaagattctctgtttctattgattctgcttgtttccctctatcagtagcactgccagcataacaagaacttcgtacaaatacactactaagctttaaagacttttacaatgcctcattctagagaatgggcactgttgatcatggtgtccaaaaatagttaatgtggctaaattgagacaggttatgcttccatcacagtatgcatattgcagtggtgacaatgagacctgtaacattttgctatgtttatgagtaaaaatgtaggagaaaaatgttgacttttcaatattagaaataacatttaataaggaattttcagctcttataggaccactttttttatgtgctgtatattgactgaaacattgtaatgtggtatacattactgtgtcttggatcaggtgtcaaaatgtaactgtactttgtacaattcaacttctaggaccctaaagtaaattggttgaagaaattagatcccaaagattcttggtaagttaattcattacttaaaaggccatgcaggttattttgttgaatactagcttttctccaaatgttattttaggttatttatttatctagcaatgctattgcaacatctatcaccacttaggagtaaaaaaaaggactaggcttacgttattatgtgtttaaacttcattattaacgatgttatgatgatgggcgaaatgttcaactgctctgaaggggctgaatgaaaatggcctttctgaacatccatttacattaaatattgcattgtatttcagaagattataaaagctcaaaggtaaaagttaccagaaacatgatcatagagcaaattcggatatgaatgggcatgggatcattgatttttaaaaatacctattagtttaaatagctattttaagcatagaattttcaataccttacttggggtgccgggtttcaggatactttggaacctaagcaacctcattcttgaaagatagatttatgtacttaatagtaaatataaatttgaaatacacatttttccacaggtgaattttgaagtcttcatcagtatatccatattaaaacgagatgacagaagccaaagtaattatggcaagtaatggtttttatcttaactataagttatttgctcaagggtgtaatggtcattaccaaggcttttagaatgcagtttctcatttgctgtggacatgaccataaaaaaatttcccagtaggttttctatctgctactttgctagcaatcagcttattgggaacagttgattaactgtaatagaaatgcaatacaaataaaatgtgaaccacatgtgatttttctttaaaatcagtgagatttgaaaattctcctagatctcttgaatcatgcaaatttgctttgcctttatattgtaacccttgtgggttgctaataaccaagcagtttgtagtagagttaactcaggctcgttctagggactcattcatgttcactcactgtacactcatctctggaaatgtaaaatttacttttatactattgttatgtagggctgacaggacaactggatcagtttcattaaaaaggtatgtatgcattagaaaagacatttgtatgggtcatttcaaagagggcttatgaggctgtgaaacccagagctcttaacgctgtgaccaaagatggaagttctctataggaagccatagcactcctaatgtttggtgctatgttttcctgaggagatataaaacgtaataatccaggattgttgccatgtgagagttttaaaggttaatcaaaatttctcttcttcagggcaaacttgaagataaatcttttgactccagctctttagaggatctaaagtgaccttgatggacagtggaagaaatcacaacatggaattcctcgaataacaatttattgactttaaataattttgtctaatgctacatatacacaattaaaaaacctttacactatttctagaaagtcagcatgtatttttggctcgaagtttctctagtgttttctgtggaaggaataaaaatttgagtttcagttgtgtacttcatgcttgaaaaattaagtccttctccctcagttatactcaccttatggaattcttttgcccttgctctgttttgggcataagcttcttgttttgttttttcttccttttgttgtttcacttcagctagttgattgtataacctgtaaagaatttatatagaattagagacaaacactgcaaaaagtgaatcactaaaaaaaaaaaaaaaattaaccctaccttagacccctttggtgccttagagcctgtgtagtctttctgtcttcaggaaaagatgctctgactttattcacgccctttagacgactcacagatgaacctgaggaaagaaaagtgaaatcaagttgtaaacacaaggctttaaacatttcagggagttggttgaagattttaaaaattcaacatacttatagatggtttctctttaactgttttgatttgagaattttcagagacatgaattttattccttatttctttctgcctctggtgggatctctccataaatgattttttcctctttataaatgcttcttgtaagctccctggtacaggtgtaagcctgcgaggggtttctgctgggggaaaagaaatttatgac

SEQ ID NO: 66834 - DNA, 1136 bp, Homo sapiens
tagcctccagagtagctggggaccacaggcaccactgtgtccagctagtatttatacacataaataacaaagtctaacactccataggaaagaaattatgagcagaaactgcaatatgctcttacaatattgccaactgcagaaacttcctactacgttaatcacaaaaacaataatttcacaatcacgttgtgcttaggagccagaggaatgataaataaaaagtaacatcaagtagctcctttacatgaaccaaaggaaaaagatttaaacttaagatttaagtttaaagtctaactgttgttatgaacttcagtattgcaacagaggatgttgttttcccaattcgaagatttcagcaaattttaattcttggctcaaaattaattgtcatccattataaaatacaggaatataatgtgcctgtaagttacgactttggcattatataacttttaatcaaactctacatcattcaaatttatgaattcttatgacctgtgtaatcatcttttattatactatattttgcattaaaccataaaatcctctgcctcattttagattgtgcattaattcaaaataatgctgtaggcttcaagtaggaaatccaaagttctgattattgctacaaactaacaaattcaggaccctctaatgcttgcaactaaaatgaatctgacacatcactataaaatgtgtgaatctaggattcttcttttcagaaatcagtataaatgggaattaaaagcatggtagaaatgtccctgaataaaatgaaacttgctctgacaacatactgtttcctacacataaacaaatatgatgtgaaaactcaaattgagacatacctttaactccagacaccatgttctcaagataaaagcctttaaaacaaaaagccattgtgtatatcatcaacatgaaattggaatgcaaaattaatactgctgaggatttccctcatatcccatgctgtttatctattctacaggcctggaatcaacctttttttcttaagagacagggtctgtctttgttactcaggctggagtacagtggtgccatcaaagctcagtgcagcctccaactctgcctcagcctcccccctttctgagtaactccaactacaggca

SEQ ID NO: 66835 - DNA, 4296 bp, Homo sapiens
gcatctcttccagactacatcctccggttcggtaggctgtgtttgttttactcagacactcttagcagtgaaccgaaccatacagccttttggagctcatacattgtcttgaaagatacagtttttttgtaagctgagcatagtggtgcatgccattagtcctagctagctacttgggaggctgaggcaggagcatccctggagtttccaggagtttgaggttgcagtgagctgtgattgcaccactgcactccagtctgggtgacagcaagacgatgtctacaaaactctttaataagagctgtagcattatgggctatttaaataggatgatcagtagaaaggctagctggttctgagcccatcctttaaaaaatttttaattctgggcatgttttctgagttggtcttggaagaaatgtacatttaggactgggtattaatggtaataagcagtaagaaaagaagatgaaattaatttttttcccatttttctagtgataactcttctgatagcagcttatttaaaactcagtgtatcccttactcacctaaaggggagaaaagaaaccccattcgaaaatttgttcgtacacctgaaagtgttcacgcaagtgattcatcaagtgactcatcttttgaaccaataccattgactataaaagctatttttgaaagattcaagaacaggaaaaagagatataaaaaaaagaaaaagaggaggtaccagccaacaggaagaccacggggaagaccagaaggaaggagaaatcctatatactcactaatagataagaagaaacaatttagaagcagaggatctggcttcccatttttagaatcagagaatgaaaaaaacgcaccttggagaaaaattttaacgtttgaggtgagtcagcattttacatacatggctacacataactcaagatgcccaaaatgatttgttggccaatttagaattgtctcagatatactgggaacagactgtctgcaattttgatactcttctatactgacttacccctaaagtccaccctatccttcaactgaatcttgacttgtatctcttaatataactacactttgccatatttaaaagatagtgctccaaggctctttgtataaaatcctttgatcttatcccatctcaggtctttaaacacaaccctaaaactcagtggggataataaaagctcacataacttgaaattacttttgcagtaacctaaactaaaaccacacatgccttatgttcagtggatatattcttaaggcctagatgtttctaagccaattatctgaaaaatacgctaatacttaggagtagacttttttaaatatttgagagttgtatgttgaatgaattcagaattaatttatgatcccttgccagaacctgaaattttatttgggaggattaatacatgttaatctcttcagttaatctcttaagtttaaggtgattatagtaaacattagaaatcttattcctgtttttacattttaaaatgcctttagtaagtcccagacatgacaagatatgtacttcacttttccatgttaccagcttaggtaaattcataattgtaatgtgaattttaataatcagcatttgataagtccacaagtggggagtagttaagatagcaaattcagagtctttgctaagggggggcattgccctttttgaacataggcacctgctgggtcttaaaaataaaatctcgacatacttatggtgtttttaatatatagcaagctgttgcaagaggattttttaactatattgaaaaactgaagtatgaacaccacctgaaagaatcattgaagcaaatgaatgttggtgaagatttagaaaatgaagattttgacagtcgtagatacaaatttttggatgatgatggatccatttctcctattgaggagtcaacgtaagtggaatcatatgaaatactttggtaataggttataaattaaatttctatgttaattgcttcatattttgcctttaatatagttatacttaaataatgaacaaagatacagagtatgacaattgggattattacagttgagccaagcttggcacaccgttcatctagaattctccagaacacaaaattctcaaattttgtgtttcctttgactagtattgcagtttcagttatatttcagagtggaatatacaactaattaggtcatcgaagattctgtcatctcgatgataaattttaatattacagagcagaggatgaggatgcaacacatcttgaagataacgaatgtgatatcaaattggcagtaagtgacttatttttttcctattccattttgggaaggcaggagttggttgatacagaaggaattatatttagtttttctcttacacttcatttaacttttgaaaagctctataagtttactgcaggaaatgcaagaaggaaaataattttttagagacttgataaagaacatggggttttcagtactatttttaataagtagcattctgatacatattattgctagttaggatgtcaaatgaaaaaataagcaatgttaatttggatttttaacatctacatgtagtctctaggttatctgaagtaatccagggcattcagctatatgtaattactaaactatttgagttattgcttaatccatgattttttgtttgttttatgcagggggatagtttcatagtaagttctgaattccctgtaagactgagtgtatacttagaagaagaggatattactgaagaagctgctttgtctaaaaagagagctacaaaagccaaaaatactggacagagaggcctgaaaatgtgacaggatcatgaatgtcaaaggtgaagcatatagaaaaaacgacttcatagaaatgaataaagataaatgtggatatatgtaccagtctggtggtgaagaaattctgaaacccagaactttataacaagaaaaaaaatttttaaccctgtgaagaagtttgtgaaagaaacttgtgaagtagtaataattagaaaaaaaaccattaaaacaccagagaaaatacatagaaaaatttgagaaattgtcatttgatttctgaataagagcttacaggtgtcctgtgagtattgaaacaatgaaatgtagtgattttaattttgaaaagaaaatcttaaagtaacttgacacccaaccatcttgaagaggggatttgaaatgctgtaattttatcccagctttgttcagccatgacaagtgacctgtcagatgcttagtattgtaataacctcatttccctttccaaatttagagtatctttaatactattttttttagacagagtctcgatctgtcacccaggctgtagtgcaatggccgcagtcttggcttactgcaacctccatctcccgggttcaagcgattctgcctcagcctccttagtagctgggattacaggcgttagccagcacacccagctagtttttgtttttttagtagagacaggctttcaccatggtctcgaactcctgacctcaggcgatccgcctgccttggcctcccaaaatgctgggattataggtgtgagccatggcacctggcctaatactacttttaactaccattttcactttttattagttcaagaaaaggcatacacatttattcaacatgtatacctggggagaaccagtcattaccccgatgttcattattttgatcaccacgatagagctgactactctgctatgtagtgcattttgggactgcacttatgtatgtttttgtttaacgtggacaaagacttacagataggtgcaaaaaataaatcctcttttgcaacccagaactcattgttcagtatgagttttgatacatataagaagggatattatgatacctgagacagttgattgatgggagtattgatagccataaaggttggttccaggccaggtgcaatgggtcaagcctgcaatccccacaccaaggtgggagtattgcttgaaaccaggagttcaagaccagcctaggcaagaaagtaagaaacacatctccacaaaaatttaaaaattagctgggtactggggcatgtgcctgtagttggagttactcagaaaggggggaggctgaggcagagttggaggctgcactgagctttgatggcaccactgtactccagcctgagtaacaaagacagaccctgtctcttaagaaaaaaaggttgattccaggcctgtagaatagataaacagcatgggatatgagggaaatcctcagcagtattaattttgcattccaa

SEQ ID NO: 66836 - DNA, 1839 bp, Homo sapiens
tgattgtgcaaaaaatctctagcttctcttgaatatgattataatttcattacagtaatgggtctagatgtgggtgtgtcccaagtcatttgttaccagggatcaagtactgacatttatgaatgatttatattaggtttataccgtagaatatcgaatatccttctcactcatttcctgataagcttttctgagtggaagaaaatgaatagagttaaagggaataaacccatcatgaatcatgataatcaggggtgtgtgatgagagtgtattgtaatgtcaagctgagaacctacacattcaagcagtatgaaagggttcttagagctacctctgcctttatttaaagtctgcctacacatagtggtagtttaaaaaagtagttagttttaaaattttcataaaattttcgaatcatttatattcctatcattttgtatggtgacttaaaaagttttttaacttcttgtatttaaaagagctgctgcaaccattgacagcttagcaagccgaattgaggatcctcagatacaggctcattggtcaaatatcaatgatgtttatgaatctagtgtgaaagttttaatcacatcacaaggctatgaacaaatatgcaagtaagtggccaaaataaaagttttgtatttaatatgttaatttgctattgatgtttgctgagtaattatattaagcatttggtttttatttgctagggtggcataatatttctgtaaattatataagctgtagagtgtttttttttttaataggtggagtctcactcttttacccaggttggagtgcagtgatgatcatatctgactacagccttgagctccggggttcaaggaattcttttgcctcaacctcctgagtagctgggactataggcatgtgcccccatgcccagctaattaaaaaaattttttttaagaaacatgtctatgttgcccatgctggtcttgaactcctggactccagcaatcctgctgtcttggcctcccaaagtgctgggattacaggcatgagccaccactcccggcccttgtttttttgtttttttgatggcaattagttcttaggagaaaattcataaagtctgtttttaaacattgtaagaatgagaggtaacaatgtctaaaaactagtctttattaagtaaatgtcacatatttgagctggggtaaacaatgaaccccggcactgagcagaaggctgccttaccttttgagattccaggtctgcttcagttcttgcctaatggttatggcaggtctagtatatttgaagtgaatagggccatttgtattctagcctatactctccatgttatgcctaaaataacccaagttttatagttctcatgacctggtgttgatcctgggtctaatcaagttcatgattatgccctaaaaactgggttgataactgtgtgtctgtgaaggaggtaagatggtttttgtccccaggcttcataggaatgcagtctacttgatttacattcacaaatcacaagttaatgcaattggccagtagcctttaaggactttttggcctaccttttgagcctttttgaaatttaacacctgacatttgtcagggtctgtgactacattttatttttaaagtgttagttgctttatttcctttttgtctcagtttgtgtttttgagatggcgtctcacaatgctgttgtccaggctgatctcaaactcttgggctcaagcagtcctcctgcttcaccctcctgtgtagctgggactacaggtgtgcactacgatacccttagttgctttatttcagcagacgtaactagccacagtaaagcaaagcatact

SEQ ID NO: 66837 - DNA, 1083 bp, Homo sapiens
tgctatatagacagttgcatggtctgctggcaagctgtggtcgcttcaaatgcttctgggtagactggtactcagtgtggtctatggtattctggggtgagtctgtttagttgaacctaagaagacacctgcatctcctccatggatgttggtgtgggttattaaaacttttttttttggccgggtgcagtggctcaggcctgtaatcccagcactttgggaggccgaggcaggtagatcacttcaggtcaggagtttgagaccagcctggccaacatggtgaaattccgtctctactaaaaataacaaaaattagccgggcatgatggcaggtgcctgtaatcccagctacttgggaggctgaggcaggagactctcttgaactcaggaagcggaggttgcagtgagctgagatcacgccactgcactccagcctgggcaacaggctttgagactttgtctaaaaaataataatattttctaatttgatgttaacgtttattatttatgaaattgtataagataattttgaacatctctgatttttagtatgtgtgtctataaaggtccattcaactgcaattgaatattggagttgagcagattcgagttgtacatagagatggaagagtaattacactgtcttatcaggagcaggagctacaggattttcttctgtctcaggtaacagttgcagattttgtcttaagcccccttcttcgcatagctacttaaagaacaaattggttaaaaagtagttaaaatgtaataaattgtgtaagaagaaaaaaaatttttttccagtagaaattaaattctgtttaatttctaatgcacattttacaacctgttggttaactggaagtactgataagctgtcctaggttttcacatagtttatgttaagatgaaggaccagttctgagactagcaagttttttttcccacatgtcatatttgtgaaggtttacaaaatctctagggtttacaacatctccagagttgttgtagaaagtgaagaaaactagagaaagggagatcatataaaaaactataatgaccattatccataataaatgaagt

SEQ ID NO: 66838 - DNA, 1049 bp, Homo sapiens
aaagctttgtgtttttcagtgctgcatgtggaaacaaacaaaaagatgatttcctgaaattatagaggacatttgacattcctaggtcaaaactcaccttgcttaatctttgtggtacaaataataattcatgaatatttataccatcctcttatatagaagttagagtttttctcttgcatgttgaaactgaaaaagcacttttttacaagaatatttaagttggtagacaaagtttttgtattcacagtagaatggagttgtgggatttatccttgttatttctagtttggtaaactagagtgtattgatattttggtttttctccacagttcgtaatggacctgaaagtggcagcaagattatggttcagtttcctcgtaaccaatgtaaagaccttccaaaaagtgatgttttacaagataacaaatggagtcatcttcgtgggccattcaaagaagttcagtggaataaaatggaaggtcgaaattttgtttataaaatggagctgcttatgtctgcacttagcccttgtctactatgattttttccagatgtttcctaaagaagtttccagaaactttgacttgaaatgtttgcagatcaactataagcacaaagaagagataacttccaaaagagtgctgtttttaaaaataataattaggaaatgtttatttagcactttcaaacttttcactttataaatgacaagtgctttgaaatgcagaagtttatgtacagttgtatatacagtatgacaagatgtaaaataatatgtttttcatgcagtttaaaatattactaacttaagggtttctatgtgctttttaaaatattccttctttgatgttgacatcaaataaagtatgtggtttaaaaaaatctccaaatacctttttttccccccaaatactttctaaactttttttttttgagatggtatctcactctgtagcccagtctggagtgcagtggtgtgatcatggttcactgcagtcttgacctcccaggcttaggtgatccttctgtctcagccttccgagtag

SEQ ID NO: 66839 - DNA, 1007 bp, Homo sapiens
attctccccaaagacaaccacagcttctggtttttagaataacttagagatgttctatgcatttatatggataactgtatgtctatctgtgtatgtgtgactgtgtgtgtatacacatataattactttatttaagtggaatcattctctatacactgttctgccctctacttttttcattatttttgagatcatctaatgtcaacacatatagatttgcctcattcttttgaacatttttgtaatatcccaaaacatgaatactgatattttatttaactggttccttaccagtgaacacacaggtgcatctccagtcttttgctgctacaattgactgtactgtgctttatgacaacagtgacacatatatctctgcatctatgtgcccatcttatctgtaggataaattattagaagtggaatttctgggtcaaaaggtatgtgctatttaaatatttttacagattgcatcatatgccatccaagcaggttccacccatttacaatcaccacactaatgtttgagagtaacttccatgcactcctgacaacataatgttatcaaacttcttcatctttgccagtctgataacggcccaggtcagtcaactttcccagcattggtttcactgggctgtgataatattgtataatataacatctgatatctaacaggtgttaactgacagaaatggtgactgttgccattttcgagtgattttcctggtttgggtacaaattctgaaacctgatgaaggggaacagcctggtagcctccacctaaacctgcatctgtttacgttgtttgggtttggctgacatctgggtgacttcccaaggccattaaacagaaagatcatggtgagccctctccaagatgagctgagctttggtttctgagcaatcaggcactgagagggggaattaccacctgagctcacaggaggtatgggtacctgtgaactgtgtgcccagggcagctatcagcactgttcttcaccact

SEQ ID NO: 66840 - DNA, 1014 bp, Homo sapiens
cttggtttccccgcatggttccggaagagcgcggcgcagctggctgtgagcgcagggctatcccggcggccgcttcggcagccagggcggcgcggaggggcagggccagagggaagcgctttgttccgcgcgtggttcccgcgcctgggggtgcgcgggagaggcgcgaatccgagtgccgcgcgcggcccggggacttgcacgggcgtgcggggtggaaccgcaggaagcggagctctcgggttcccgccccgccccgccccgccggcggcggaggcagcgagcgcgagagcccagcggagtcgctgggagcctgaggcaccgagacacaaaggcaggcgggatgcgggagcaggcaaagggaaagcgaaagccgcgcgcccggccggtgactgggtgaaggcgccgcgcagctttcccgacgccggctgtacccggacctcctggtcgagcctggcgcgccgcagccatggccatcgctcaactggccacggagtacgtgttctcggatttcttgctgaaggagcccacggagcccaagttcaaggggctgcgactggagctggctgtggacaagatggtcacgtgcattgcggtggggctgcccctgctgctcatctcgctggccttcgcgcaggagatctcgattggtaagcctcgcccaggacggaggggagtggccgccccggtctggcccggtgagctgcgattttacggctcacaggcccgagtctgggtacgcccagctgtgatggtcgtgagcgtcaggaagggcagtggccccagttttatggtccaaagcgttctttgcccaggtgtttcattggtaccctggtctactctgctcgcatccctactcctcagttcttttgttcctcatgcccctctgatcggactgtggcttatagtttatgttccacccttagaactggcaccttgccaccagatttgccaagaatagctgtgtccccgtttttcacccctgtctcctacatatttgtccagccgcctaaa

SEQ ID NO: 66841 - DNA, 1061 bp, Homo sapiens
gaagttgccaaattcattgtggaaaatagtttttagttttcctgctctttgcgcaggcatagtcatcgggatgttctttaagtttccatttgacagtggattgaggcttccagctgaaagcaaaaccaccaagtagcatgagtcctggagataatctctccctttggtcaattcctccttcagtactggctgtgtgctgaactcggtgctgacctccaaggacccgggagtaaaagaggcatgatccctgtcttggaggtgcaagtcttgggtacctggttgggacagaaaggcaggaggaaggagttagtcaccctctgtgaccaatctccacctctagcacatgtactagagggactcctaaggcacctgtacctgtaatgccttagatacgtctaaattggtgggctgtctgagaggtatttttggggtattgggagtggttttaactagcaagagtttgagctcatgctgtgtgcatagcactgttgtgtgctgagggagatgggaaaggattttgagaccttgttcttgccctgccctctccctgccctgtggcagtttactatgcagttgggcactagaaggtatctgttagcaggtaagtcattcagctgtgtgtaattcagcacccagccaggtgttgagctatgagctccaggctggtgaaggttggcaggcacttgggtgaggagctgtcaagcagactcccatgttttctgaagtgttttcaggagttccaggggaggacagacatgtgggatgaagctaacaggaccagggaagacctattagattaggtatacatttagataaaaccagaagaagggcttttgagaagaggggagaggtacatagattaatacatggagttggtacagtgggagggatcatgtcatgcagcatttaattttgtgtagttagtagtatgcactcagccaaaaacaaaccaaaaaaaagaacagcaataaagggagaatgaagtaattgaaatggagctggcactttgcccaccatattggccagtgaactcaggccccgggaagacactgagataaggc

SEQ ID NO: 66842 - DNA, 1075 bp, Homo sapiens
taaggggaaaagcattttattattccttttcttcctcctcttttaaacggattttatttttgactactgacgttgtaggtaaagaagtatgggtgtttgaaatttttagtgtgacattgttgaatgtgtatctgcctttaatatttgatggtcttgatgagtgcctaagttatttttgtttcctttattttttagtttgtgggaggtatctgaaagccacttcaagtacccaattgtggagcagtacttgaagacaaagaaaaattctaataatttaatcatcaagtacattagctgccgcctgctgacactcatcattatactgttagcgtgtatctacctgggctattacttcagcctctcctcactctcagacgagtttgtgtgcagcatcaaatcagggatcctgagaaacgacagcaccgtgcccgatcagtttcagtgcaaactcattgccgtgggcatcttccagttgctcagtgtcattaaccttgtggtttatgtcctgctggctcccgtggttgtctacacgctgtttgttccattccgacagaagacagatgttctcaaagtgtacgaaatcctccccacttttgatgttctgcatttcaaatctgaagggtacaacgatttgagcctctacaatctcttcttggaggaaaatataagtgaggtcaagtcatacaagtgtcttaaggtactggagaatattaagagcagtggtcaggggatcgacccaatgctactcctgacaaaccttggcatgatcaagatggatgttgttgatggcaaaactcccatgtctgcagagatgagagaggagcaggggaaccagacggcagagctccaaggtagggtttgcttttggcagaggctacgggagtctaccgagagcctttgcagcagccttgtgggaatattgacagtctttaccctgcccatcatttaaaccatttccaagcattaaaaaccttaataccaaggtgcggggtagggggagtgggaacccctcagtataaggagagagaggaaaagaattggtgctgctctacatttccaaagaagaataacttct

SEQ ID NO: 66843 - DNA, 1121 bp, Homo sapiens
ttgtgattagatgcaatgatgcttatgaagtgattagcacagtcccggcatataaaaccttcgatgattccattggctgctagctgcatcttcaactgtaattgctagaatttcttttatcatagcatgaactttatgaaatagaagtcagtgtaaaattaatatgaaaaaagacttctttttctgatgctcaaaattaatgacctcaagtggtaattcaaagaaataaaaaaaatcctattaaagcattttcaaaagagcctaagatcaatgatagctgttgcttacatcctgtgaaaatgagttactggtcctgtgatgctttctagaaatatccttaacaatttttttacttggtattgctattttttaaaaaaacactttaatcatcattctccctctgtaagatgcaatatcaatcaaatagcttaaatatggctaattatcctctttctcgttctgaggatcggattcaaaacaaagcacacaacagaaatgaaaaagaagtagaaaaaaatagcccaatagcaattaagagcatagaatgagagctgatgttaagaaatgtgactcaacctatagaattgtagaaaatccccttgaaacatttaattgcacggctctactctttagaggaactgtatcttccttttgtcccctctgagagctaatgaagaaattctcattttatgagaacacttggacacagggcggggaacatcacaccccgaggcctgtcgtggggtggtggggaagggatagcattaggagaaatacctaatgtaaatgacgagttgatgggtgcagcaaaccaacatggtacacgtatacctatgtaacgaacctgcacgttgtgcgctagaacttaaagtataattaaaaaaaaaacctcattttaagtggttatccagcaacagaaccagaaaattgttacttttacagaaggtaggttttattgcatatacaaaatggatattgttattttaaattagatatgtccaaggtaaacgatcgtatcagcaaacaagaacagtttgacttcctctttactgatttggatgctctttctcttttgtctgattgctctggctaggacttctggcactatgttgaagaggagt

SEQ ID NO: 66844 - DNA, 1168 bp, Homo sapiens
atcccagcaccgggcacggtggctcacgcctgtgatcctagcactttgggaggccaaagcaggcggatcacctgaggtcaggagttcgagaccagcagggccaacatggcgaaaccccgactctactaaaaatacaaaaattagccaggcatggtggtgggcgcctgtaatcccaactactcaggaggctgaggcaggagaattgcttgaacctgggagttggaggtcacggtgagctgatatcacgccattgcactccagcctgggcaacagagcaagactctgtctcaatcaatctatccatcaatcgataagaaccccagattgtatagctacatgttttagcccccttttcaaagtatatgttctccttggtacttattttgacattctgacttttctacatatgctttatcaacctcttaattaaaccatcattgtctattttgagagataactgcgctgcttcccgttgtgtgttttaaatgttattgttcagtttgagtcaaataaaaggatatttaatctgtggtgccttgacattaaaagtggtaaagtgatttttaaagggctcttggctggcttttgcacattatggctgattaacaaaagaggtttaatggatattaggctggttggcccatgcaaactttgttctgcctctgagccactgtgtagtcaagatggttcatgtacaaatacccaaaactagtgcataagtacccttgatcacagtgcctgttcaatatcagtaccaagtgtttcgtgtttatattttatgtaaaaatcagaattttctacatagaagcttataactgcagtctacctgttagtgcatttgaactgatgggatggtatatctgactttgagtacattttgctagaggcaaaaggccattgcttaataggctgagaggcccaactgcatttccgttggttcttgggtagtctggaaatgaaggcatccattttacactcattaaagtgttttaccataaacgatgagataaataaataaacccatcataggtatcctgaaagtttctagtggtttgtcattccagtactgatttctgaggtttttagtagttttaagtccagatcatatttttaaaacttgaaagagtatcaactttacagaaagttgcaagaataatggataactttt

SEQ ID NO: 66845 - DNA, 1048 bp, Homo sapiens
gtatccttaatggtgttctctctctctctctctctctctctctctccctctcccccccgttccccactcttcctttctcctttgctttttcttctctttcatacatatatgcgtgcctagttctaggaggaaacgggttaaaaattgttttaaactacatcttgaaaatattgaagaatttgttttaggtagagtggtcagttgaaccttacagtaaagtatagaaatatatttaatgtggaatgtcaatgccaggatttctcattaacaatattttatctcaactttggttcctgtgatacatttctgaatgggcaattccagaaatcttagtagcccatgttaagcttctattttttacttgttttcggggagaaataagaattagacatcttcagatttaagttaaataatcccattctttataatcctctgtaaaaagatccctgagattattccttcttctagttttatgcgacagctttactttaaaattcaagttatacatcttgggagtacaatggcccgacatttcttcataggtagaaacaaatacttgactcagtgatactcatgaccattagaatagtcatacctggaatgtgtcaaattataagagacagacacttggttagtggctgcctcatatagcacttttgaagaggcctaagtcaaaacttgcaatataacattctattgactttcttaaaaatattttttctgtacctaacttgagcataagggttatttgagcaagtaacattaactcagtggaaggcattgtcctgtgaaatattcttaggcagatctgcccacatctttattgaacttgaaatctaatatttctagtatttgaacaaagcagaaggttaagtcagggaagagcagtgctgtccatgatgtaatggaagctaccaggggaggcagtgtctggatgatgctgtgctacctacccctgcacaagccatgctggctcagtctgagctgtgggccacatcagctagtggctcttctcatgcatcagttaggtgggtctgggtgagagtta

SEQ ID NO: 66846 - DNA, 1009 bp, Homo sapiens
ttgctaggttgttttttgcataagtgtgagagtagctagctatttctagtattaaatggtaatgggaaataaaattacagctgtttctgagttggatctccatgtggcttcattattttttcgctgtgaatttccagaagagtagatacaactgtaataaaatgtaaatgagaaaatatattcaaaaaccaaatataaaatgacttgaattatttttctggcttacctatacttcatttatctttattaaggttagtaagggaaatgtgtgtggtttatattgtagatacatgcacacacagcaggataaattttcattttaatgctcattaagaatttaattgtacttaatatattttgcagttataaaggaaatagaaaaataaagtctatcccatgtgaaatgactctcactggtattgttttgcccataagaacttctgtcttgtttcagtgaagcagggaacaatcactaatacaacatttgtatctcatttcaggatgatgatgatgatccttttatgaacactagttctttaagaagaaatagaagataatatatttaatggcactgagaaacatgcaagatacaggaaaaatgaaaatgttacaagctaagagtttacagtttaagattttaagtattgtttcctgagcataactccataagtaagaaatttctagttcacagacatacaatagcattgattcaccttgtttttttaacctggttgttgtagtaagagctttgtttcaatatcactcttgagtaaagattaaaataaagctaccattttacatttctatttcataatgaaaaactatgtcagtattttaatatggttacatttagccaaagttgagggaaagagcttataaaatttaacttcttcataattttagtaatttcctagaggttctgggttttctgaaagtaaaacaatttatgcgaacctatgtctaaattcactgtttgttactatgtatgtttttttccaatgcttcttat

SEQ ID NO: 66847 - DNA, 1023 bp, Homo sapiens
aaatatttcaatgttcccatggttttcagaagtggaagatggtaatgtatacattttggtacatgataagtactataataatataagtaagtattgttgtagtacttaatatgtgtcaggcactgttctaagtgtttaagcatattaacacatttagtctttataaaaccattatccccgttttacagatgaggaaattgaagcacagagaggttaagtaacttgctcaaagccacataggtagtaaagggcaaaaccagagttcaaacctcggccccagagtccttttccttacagttaagttttattgccgctaatgtagattttaagggaattgtgtgttatttatattcgtggcagctgctggattgaaaaacttagccagaaaggcacacttgatgaattatgtagttcattgtgtttgtttttgtttttgttttgcctcaggtggtccagcacatcatccagcaaaatcatgtcccagagtcaagtatcgaaaggggttgattttgaatcaagtgaggtaaataagtaatattgttaaattttaattaatttttaactttataaaatttaaatagagactgccagctagttgctgaacttttttttctttgataaataacttcatcttttatgttcagggagtacatgtgcaggtttgttacatgggaattgcgtgatgctgaggtttggtacagatcccatcacccaggtagtgagcagtaggcagttttccaacacacatcctactctcagcctccactctctagtagtccacagtgtctgttgttcccatcttcatgtccatgtgaactcagtgtttagctcccacttgtaagtgaggacatgtggtatttggttttctgttcctgttaatttgcttaggatagtggcctccagctgcaaaggacataattttgttctttttatggctgcatagtgttccatgttacatatgtaccaccattttctttatccaatccgtattgatgggcacttaagttgattccatgtctttgc

SEQ ID NO: 66848 - DNA, 1342 bp, Homo sapiens
ggtaaggcataggagaaaataaacctaaattagacgtttgaaatttattgtaggttttgttttgttttgttttgttttgttttttgagacggagtttcgctctgttgcccaggctggagcacagtggcacgatctcggctcactgcaacctctgcctcctgggttcaagcgattctcctgcctcagcctcccaagtagctgggattacaggcacctgccaccatgcctggctaatttttatatattttttagtagagttggggtttcaccatgttggccaggcttgtcttgaactctggaccttaagtgatccgcccgcctcagcctcccaaagcactgggattacaggcgtgagccactgcgcctggccttattgtaggtttcgatgtcaaggaaaaagaaagggaaagataaagagctagctaaacttcaagtatctaaccaagtttaaaaggaaaaaaggtatggatacaaaggaatttttatcatagaatgctgttttctagaattctcctctggaatatttcttagatattgaatatggctactaaggtagaggaaaatgagaaactactggaaccccatggctcctaatgtagcaacagggataaaggtatcgtcaacaacaaagaagggattaggaggctttccttcaatacatttgtagttcatttggttaggtgattagattttatccttcaggtgtttttctatgaaatatttttagtgtgtgtatttataaacactacagtatctcaataagctgggaaataatgagactgacagttgggcattgagttatgcgtacctataattctatctccctttagatttttaaaaatatcaaatagttttataattaggcatcattcagttttgcagataggactcagaaaatctttagctaaagaagtatgcaagtttttctaagttattttaagaataacataatgcacatttcatctttttcattctagcctttaaatctacaagacagcagccttcccgaaatgtcactactaagaattattcagaggtaagaaaaaaagttttatggttgtgtattaataatttatgttttctgcattatgaattgtcaactctctgatttacaaagtaaataaaagaagaaaaattatggaacattaaagctggaaggagctttaccaattatctctagggcttctaggatttgattttttttttcttggttgctctctttttttaaataatggttattatagaaatccataaatgttatgtatacagtaatgttttcaaggataacagtgttgaaccaaaagagctcatacatggaatactaatattgaaggtgagttca

SEQ ID NO: 66849 - DNA, 1073 bp, Homo sapiens
gcctcccaaagtgctgagattacaggcgtgagccactgtgtcagcctcctttatgtttttatagtatgattagttcatgtcaatgcctaaattaatgatttttaggatggtacgttatctcattgtgtgtactttctccttcttctccctcttaggctatgaccagggccagagcactcagatctcagtcagaggagtctgcttctgcctttagtgctgatgaccttatgagtatagatttagcagaacagatggctaatgactctgatgatagcatctcagcagcaaccaacaaaggaagaggccgaggaagaggtcgaagaggtggaagagggcagaattcagcatcgagaggagggtctcaaagaggaagaggtgagcactgagttcagtcctgtgcacattcacacttggcagttgagtggaaaatacagaattagatcttgtcagagttgaattataagttttatttctaaaacacggttctttaaaaatctatttttataatatataaagacagtctttaaggcagttctgacatgtgccttttacttaaataaattttgaatggccacatgcacttagggttttaattgttcttagcacataccttataaaagcttcactgtgtttgtcacgtagtaccttttggatacatttaatgtcatatgtattttcacatgtgcaaagtaataggcaaatatgagttgttaaagaaaatagctaaaagcctttggcaacaggaggaaaactccagatcatacaattattatttttgttactgtcataagatacaaatacacatatgcttatcaagtagtctttataaagtcagtttaagaaagaaaactgccccccaatttgattcctaaaactagtcattaacatagtcaacattgtatttactgtgagactattgtcattgaatagttcacgccaatagaaattggtcactcagtgactttctcacacattatgtcagttcatctctaaagattttttaaaattgtttttattaaatatgcatccataggaattttaagctggtgaaatgaatattaatttggtttaaa

SEQ ID NO: 66850 - DNA, 1106 bp, Homo sapiens
ttttagtagagacagggtttcaccatggtggtcaggctggtctcaaactccttaccttaggtgatccacccgcctcggcctcccaaagtgctgggatgacaggcatgagcaaccgcgcctggccgggtattggtctttctctaattgatttgtaagagcactcacttgaacacatttgtgtgtgtgtgccctctctttctctctctggatatatacacatagtaatatagcatatttagggttttttgacacataaagtatccacttattcatcagcttatttgtttaaatcaggaatgattggtgattacatggttctgattttatgaagatatacatttgggttttttctttctttgttccattaatatagtgagttatattattatgtacatagcttattgacccatcctggtaatatatccattaccccctggtaatggatatattggtctttccataagcttctggagtctctatttgctttcataattataaataagattctgtaattttctttttgtgcacgcagttctttgtcagtactgtgtcatactggcattgtgaaaacagtttggaagctgtctttctgtatgctctggcactattgaaatagcagtgggcttatctgttttttgaaagtttggtagaatttacctacgaaactttctgattgtggtccttttttgggagtatttttcttttaataattttctcaaaattttctttgataattggtttgttgaacctgtttttttcccaccttggatcagattaagttattcattttccagattatttagaattgagcattctctcataagtcttgggtcttccctcccattcttccttctttctttttttcgagacagggtcttgctctgtagtgtgctaccactcccagctaatttttaatttttttttttatatagacggagtctcgttatgttgcccaggctggtctctaactccagggctcaagtgatcttcctgacttggcctcccaaagtatagatgtgagcttctacacctgtagtgctagtattagagatgtgagcctctacgcccgtccctcttatttctaatgatgtatatttgtgttttct

SEQ ID NO: 66851 - DNA, 1072 bp, Homo sapiens
tggaatattattcagtcttgaaaaggaatgacattctgatacatgctacaatatggatgaaactctgaaaacattatgagtgaaaaaaaaacagttgcaaaaggacaaatattatatgactctacttatatgaggtacctagagtaatcagattcatagaaacagaaggtagaatagtggttactggggagagggaggaatgtgaagttactgttgaataggtatggagtttcagtttgggatgatgagaaagttctatagatggatggggggatgattgcataaccatgtgaatgtacataatgtcactctactatacctaaaagtggtaaaaagagtaagtttatgttatgtatatttcaccacaaaaaaaaagtgtttaacagtaggatagtatgttttcaaatctcacaaaatgtatatggaaacatttttgccattggctctagacctgcactcatgagttaagctcttagaagtaatacattccaaagataacagtaaactctgtttttcataggaaaggtagagttaaaatacaatttgaatatacaatttgagatgataaaaatgaagatacagtatttagacaaagggaaaatacaaagtttagaaatgatggttagtaattgattccaagaagtaatcataatagggcatatttattttaaattttgctacatactgccacattagtccaaagatgtcttaactagtttatattctcaccattagtatttgggagtgcttgtttcctcacatctttaccatcgtgatgtattactgtatcttttgatctttacaagtctaaggggtaagaaattatttcctactgttgttttcagttcatactacttttttttactaatgagtctgcctaatttttatgtttataaatcatttgtatttatatgaaacacatggtcattttgtttggccacattttctctttcgagtagggtattggtctttctcttttttttttttttttttgaggcaaagtctcactctgtcacccaggctggagtgcagtggtgtgatctcagctcactgcaacctctgcctcctgggt

SEQ ID NO: 66852 - DNA, 1051 bp, Homo sapiens
atttgcaatgtaataaatatttcaagccttgtcaaggagatatttttgtttttaactagtttactgaagtgtaatacccatagggtattagaatttttcctgtacagtctgaaagactttttcagtgatgtgaaacattttggcagcaggtaatataattttgcttcgggtcaatatgagtttttttttttaagagtacattgtgcaattttaacgttaataattggaaaaatatgatttacttttgtgagacattgttaaatttgcaagttttataacataaagcatttcttaattgtagccccttgttttatatttacataactggaataggcaacatgtttgtgatttactctgttatgatctaggtacgtcgtttcagagaaaccagacaaaaaaatactaatgaagaagatgatgaagtccgtgaggtaattattctgctgcaaattcttgtgtttatatatcactttcttaaactagaataaccagtaggtttagttagaatagtcagtccataggtctaggggataggagtgagctggggttggcttaggatggctgcttttggttgatttcagttcagcctacaaatattctgctcattgctctttttttccattttgttcttgtctaaaacctgtttagcaagtgcagtgactcacacctgtagtcttggctacttgagaggctaaggttggaggggattgcgtgagcccaggagttcaaggctgcagtgaactatggctgcaccaccacactctagcctgggcaacagagtgagaccctgtctctaaaataaataaataaaaataaataaaacccatttaattgtatgtgtgtggggatatatacaacaaaagcccctattactcaaaataatatctctttgttagcagagcatcttatagataaaatcttatcttactgagctgatattattttgggcaaaaaagaaacttaaagtgttttggttagcaatgttaaccataagtaagcaagcatgggcaaatagacaatttctattatctattctaaaatattaaaatta

SEQ ID NO: 66853 - DNA, 1784 bp, Homo sapiens
ttagcagtattctccctggtttgtacccactagatgccagtagtaccccttctaactggtcgtgatgatcaaaaatgtttacagaccttgccaaatgtccttagagaagcaaagtcacctctggttgaggtctactgtatgaacttcacctaaatcctgtgggctttggtgacatgaatccagagaggaaagtagacgctggtgacacaaagtaatagaggttcattttaaacaccaggtgtgcacataactttctgttatctctgtattttatgtacatttctgttattgtacttagttaagttatattattttttataagcatgtgagtgtcttctgaactctttgaggacaggacccatatcttacttttctgtctcagcacttgacctagtacctggcaaaatgatgctctataaatgcttgttggattgaaataattgacctaggagatcatattcttatagattttctctgtgctgtctgatatgtattcactagcacatgtggcgtttacatttaattatttacatttaaatttaaaattcagtttctcacttgtactagccacatttcaagtactctatatccacatatggttttggcaaccatattgaatatgcacatagaaaaaattattgcagaaaactcttttggacttcattgttacagacagtttaaaggacaagattataaagtcttagatgtgaaagaaatctgaggacaaaaacacttgttctgtattgttcttgagatcaggaccaagttataggaaggcagtttttgttccaatacaagaactttctaagaactagaattgttcagctatgaagttggccatctggagatatctaatcactgtgcacacagccatttatgaaaataatctagtgctgtctccttgtaacttggttttacccttaagaacaatatagaacaagtgcttttgtcttcagaactctttcaagtctaagatgttataatcttatcctctcagagtatgagacaactccacatatttgaaaacatcagtcttattttcttttaccttgaactcttccaagataaataatctaaagtccttgcttattgatccctaaatcttctggtgagtctcccatggatcatatgactgcaaaaactagacttacttggttttaagttggtaagctgaggaaagccttattgaaacatgagtagtaatattttaagttttattctaaaagaattattttagagattgaaaaattatgaagaactttcatgaaaggaaaacattaaggaatagtattaaaggagcattacaagaaggtatatttgaaaaggtgtcataaatgacctaggaaataaagatgattatgtagttcaggaaaattcctgtggtaataagctgctattcagccaagttaaactcagtttactacgttgttttttaatctttttaaaaattttgagattgaagaaatgcttgaaaatgctgaacgggaacgtctgggtaattctcaccagccagagaagcctcttgtacgactgcgagtaagtcctatttatatagattgaatattattaattttcaaagcatagtaatgtacagtttacatggtttctttgaaaagtagtgaggagagtgctcatagtaataagaagagcaatcaccatcggaggcaaaaacaaagatataaggatttgagttaatcacagtttaagtgataggtttggtaacttatttttctcattttctaaataatttgttgttatatttaatagattggctgagctctctg

SEQ ID NO: 66854 - DNA, 2103 bp, Homo sapiens
gccacttctaacttctagacttctacattgttggcttttcttctgagaccctctctaatccgtatataaagtagcagtgttgtccacccttttaattccatagtgttaattcgccatcttagcatcctggctttttctccttttataatatttaatatttgtaactattttgttgacttgtttttgttagtttctttcactagatcaaggtgaacctgtggagtatgagaattgtttgaaagtcattgagttatttaaaaagcacaatatattaaaacaatgtaagaatattgtttttaaatacacttttatcatcccttttaatatttatttctgcacatgttataatgtatatattagatcaaaagtatatataatttataacaaagggatggtgaaaaatagtattactagaagttttaataagaattttaccatagaaaactcacatttttattctacattttgctggttttgaacatgtatatgtctgaaatggaaaatgtttttcaaatgcaactaactactgttatcaagaacctggaacaggccaggcgtgctggcacacgcctgtaatttcagcactttgggaggccaaggcaggtagatcacttgaggtccggagttcaagaccagcctgtccaacgtggcaaaaccccatctctactaaaagtgcaaaaattagccagacgtggtggtgcatgctgtaatcccagcaactcaggaggctgaggcacaagaatcccttgaacccaggaggtgaaggttgcagtgagctgagatcacaccactgcactccagcctgggcaatggagcaagactgtgtttagaaaagaaaagaaaagaaaaaaaaccctgaaacagctaggcatggtggcttatgcttgtaatcccagcactttgggaggctgaggcgagaggattgcttgagcccaggagtttgagaccagcctggacaacatagcaagaccctgtctcagttaaaaaaaaaagataaaaaaagaacctgcaacatacccacttataaattattccagaattcaaatatatctcccaacagtaaagtgaaatactttgagaaggacataatttagaagcaaaatagattcattttttaagccgaagtaagaaaacaatttaaaaataatgtaatgtccatttcaggatccattccagatgaaaggctctatcgaatgtttgtcaataaaaaagtaacaatgttgagaccaaaggaagatgagaactcttggtttaacttatttgtgattcatcagaacaggtaaaacttttctctgaaaaagtttgagccaagtgctgaggcttcccaaatctgtttctgagcttacctattttagtgaaatgcccttaatctttcaaggttgtcaatgcaagatcagacaaaacatagatttgctttgtgtgatttcattttgaaattgtttttagtatatattaatacctacaagaatatttgtaacataaggataaggcatacacatgaatactcctcaattcaacaaaaaggtagaatctttttgttggattatccattcctttatcccattccttttccctgatcccacctgcttccccctatcccaaagggaagcattattaattttgaattaattatttcattgcttttctttgctgtttaatcacatgtatactcatattatgctatatttacagccaacttatgttcagcattacattactgagatccattttgatgcttggatgtgtaatttatttttactgatgtgtacagttatgctttgcctcctgtcagtgaacaggagttttttgcttttataaaccttgctgttatgaacattcttagacatgtttcctgctacatatatgcaagtgttcttccaggatatacaaatatagctagattacctttcttttgttagtagttttaagaaatttaatctgttggcagggtataggattgattgaaaagaagacagacttgaagaagcaagatttattatctgatcactgcagtaaaaatgtgaggtggtgacagtgatggcaatgaaacagaaatgggagggacacaccggagaagttgtcagggaagaactcaaaggattt

SEQ ID NO: 66855 - DNA, 1032 bp, Homo sapiens
tttaatctacctctttgggattctaaagtatatggattttcttccctccccccactacgaataaaaaccatatgctaagtttttaaaattttgaaggcttattaacttttcattaattagatatactactcatacataccacaagcactgtttattatagttggggtttctttaaaatgtagtgctttgagatattttcaaactaattgaaatgaattgtcgcctatgattttattttttaaagctctaaactagtggtcatatgccaatgtagattatgcagtttgcctatgattgcattaatattttggaggagaatcttagggaaaacagcttttgtcccgtatggaaattttaagtaactttttttttttaaggtttccatgggtgaactatcaagatggcaacctcaacatttcaattccagtgtttagtattcatggcaatcatgacgatcccacaggggtaattattgttttcttagagtttgttggaattttggaaatgatcagtttagtttgtctgtggaaagcatgccttccctttttctcattgtgtagtcaaattgagtcaaaagtcaagttgacttttcacattcatacaagcttttatactgctttttagattttttaaaaatctgaaataagaattggtgtatgagctatgcttttatttcattaatactgatgttaacaataagaagccaggagtaggagtgaacacctaacatctgtatagtggtttacagtttgtcagtgtttttataactatcttataaaatctcacttttaggaaatgattgttcaagaccatctttaaatctaaattagattatcttattacctgtttgatatggaagtaagactagagatcctacaagtattttttcattttatctggtcattaatattatgaatcactgattatctatggtcttttttccccaggctttaagacggttgcttaatattacaaagcatttatctcatggctaatttttatttttttgtggccaagacatcataagttttg

SEQ ID NO: 66856 - DNA, 1054 bp, Homo sapiens
tcttacagagttgagaagattgagatgataagaaaaatggctagagtagtgaccagcataaagacaatacttgggtaacttaagattttctcattgttcttaacatgttgcagtcttatttagctgtggatttaattctgtttgttccgcgtgggctttatcatatattctaatgtaatattgtttttcagcaacttggggaaattcccattctattcattatgttttcaaatattgtttcctttctctttctgaatatcatttatatagcatactattaaaaaaaatattgcccataactttacctctttgtgtttcattttggataatttaatcttccagttcacagttcatgtagaaaataggcaaagatagggaaatcccaaaaaagaagactactaaggagttagtagccaattagatttgaagtataacaatgctacaataattgaaaatgtggtatggctcatgaattagtagataggtaagtgaaagagaatagaaactctagaaatagcctcaaatacatgtaggaattgagtatttgatgaaggtcaccatctcacaatgtaggggaaataatggattcagtaaaactgctaggagaaactgttacacatattttaaaaatctaggtgtggggaaggcttctaagtatgacacaagacccagaagtcataaaagattcatacatttgtctttgcaaaaataaatttctgcatgccaaaaactgcctgaagcaaagccagaagtcacagttcaatcaggaagaatatttgcaaccaattgcaaattaaggttgaattccccaataagcagttctttcaagacaataaaattcatgagttagtaataaataaagaatatggacatacttcacagaaaaggaaataacatgacatttaacttttatttttttttttcgagacagagtcttgctttgtcgcccaggttggagagcagtggcgcgatctcggcttactgcaacctctgcctcccagattcaagcacttgtcctgcctcagtctcccaagtagctgggactacaggcatg

SEQ ID NO: 66857 - DNA, 2845 bp, Homo sapiens
gtcttcaaggccctgaatgtaaattattgcatattagtataaaattgactcataaacttagaggaaggctttttaaattaacttcgattttcctggaagagtacgaagtcagataaataacaagtttatttatctgaggaaaacaagcaaacttttgggcctgggttacatgagtttgtaaaactggttataacaaggttataaatttttgaagcagttatagaaccttgtaaagatttatgtacatttgttctgtattgaactagtggttaggaaaactgtaatgttaatgataacgttgaatacttcagattttcagatgaactctaaggctaaaaaaaatgattttactctataactgttattatttattttataagtttgtctcaatttgtttgaatatcctttaatgaattattaatatattgaaatgtttcttctttcttaatatagtgatgatgaaaacacatttaaaatattagttgcaacagatattcatcttggatttatggagaaagatgcagtcagaggaaatgatacgtttgtaacactcgatgaaattttaagacttgcccaggaaaatgaagtgagtgtggtttgtatttgtgcactatctaccatattcccttggttaacaagttatttttccttctaaagttagagatttgttttataagctcaggtgcttaccttgcctgcttgaatatcaatatactgaaagctcaaagctgattttgtatgctttgtgtcttaaattcaagtaggagctacttttgtaaatagtctgttaaaatttacaaatgtttttggggtgtttactgaatgcaggatcctgtggcagtgtctattcgaaatgtaaggtgactgtcaaagcttctgctttcagataacgtagaagaaaactggtgtgaaagacaaatatccacaatccacagatgcaaggttgtatgtgataggagccctaagaaaattctaaataacatttcctttgagtttagaggcagaaaaaatcacgtttagattatagcaagatgagtttaatgaagaaggttgtgtttaacttgggctttggaggaagggtagacttttggccagtggggagcatagagaatgtacatccatgtgaagcaggagtgaggaaacccgtgagacagtataaggtatgttaggggccctgtagtcaatttggctcaccagcaggtcatagttagcaagcatgctgagagactagaaggaaggatttgagctgcattaatgaggacttcaaatatcagattgagaaatttgtatccagttcaagagaaagtcttttggcagcggagtataataccatgaattggagaccagttagaggctttttttgaagtattgaccttagggatggaaaagaggaaatgaatgcaagggatactgcaaaaagaggatttgtgtactttggttagttgtagcggggtggggatgagggcaaagggatgacagtgactctgaagtgtgtggagtttgggtgaatagttgtaccaaaaatagaaataggtagataaggaagaggtactgcttcatgtgggaaggtgacaaattctttgtttgatttcgacaaacttagagttggagactgcaatgggacattcagggaaaaatttcagcaggcagttaacacgccagcccaggagagagttggagaataaatgtaaaaattgacttgcaaattaacaccgccagccttgacttttctggagagttctcttaagtttatctgctaggtccttagttcttcctcccaaatatatatggttcctctctactactcttttcacactaataaacttagtccaaaacgatcacatttcacatggcctgcaggaggtccccttccatctttctgcttctattcttttctgctacatctactcagcatagcagccaaagtgaacttttaaaataataaatcagatcatggcactctgttgcctaaaattttccaagtgtccttccattgaatctagtataaaattcaaactacaaggttcgacttgatcttgacccctgccatgaaacttcatctcctactactctctgcctgatttacagtgctacatccacaccggcatgttctactctgaggcccttgcacatctagttctttctgcttggagcacattgatcttggtggggccgacttctgagagttcaagtcttacctttttggagacgtcttccctgatacttccaagcactgttttatcacattactctgctttttttcatagcatatttttaatagcactatctgaaataatttattgaattatttacttgtttattgtctgttgtcttcactagaaggaaaactccatgagagtggaaatcttttgtttgttcatgctgtatcttagtgcttagaaagaatcagaaagcagtgggtatacatattttaaatttcttaattaagtgaggcaatggctggattctttcttttattttaggttcaggggtacatgtgcaggtttgttacataggtaaactcatatgacagggattgttgtacagattattttggcacccaggtattaatcctagtacccattcattatttttcctgatcctctccctcctcctatcatctgctctctggtaggtcccagtgtctgttgttcccctctttgtgtccatgtcttctcatcatttagctcccacttacaagtatttgatttttctgttcctccattagtttgctaaggatgatggcctccagctccatccgtgtccctgcaaaggacattatctggttctttttaatagctgcatagtattccatggtttatatgtaccacattttctttatcca

SEQ ID NO: 66858 - DNA, 1050 bp, Homo sapiens
gtcctggcgggctcagcgttctgattccgaggttccctgcggtgagggcgtgttgaggcttggaatcccgacggaatctggagctccagatgtggtgggggttgtctcgcggtggcagccactcttccccaaacctggctattttcagtcatcctgctggtgcttaaaggtgttcctccgcagaccacgtgtttgtttatttacactcgctttaaacgcgggcccgttcccttttccaaactagccaggtcctttaaaaaaaatcgtggggtttgaataggaaatacaggattgcctctgttctccagagtaacctatgcgtgcaacttaaaaatatctgcacatctagagttgtttgtgtgttgaaccagaaccgtatgtgaccctttctgcccatttatttagcatacattaatttcccataagagcacgggaaaggaaaataggagtttaatcatcttggtgaaactaggaaacaggatgtacactggagatatattattttctatgctcagttcattaaaaaaaagtatagtgggtgcttagatgaaaatgagacttctaaatttgccagtctaattaagacgtctgtaccttgtgcagcgtaaatcatgttggttaaatacgtgcaggcttttaaaaaatgtgttttatgatgtaattttgtttttagaatttctagaatttggaatcgagtgcattttctgacatttgagtacagtacccaggggttcttggagaagaacctggtcccagaggagcttgactgaccataaaaatgagtactgcagatgcactgtaagcacctgacttctggaatcccttgttatttggggtttctaaagctcgtcaactgtgatcacagtaaaagaaaacttatttaataagcagtaaataaggaacctgtttatgaacagaaatattagtcatcaaaaagggtatttggaatgttttaaatatttatctgtttgttaactggaagctaatatgcagctatagattggagtcttgcagtaatttgatatattgatatagtattgtttatgttct

SEQ ID NO: 66859 - DNA, 1070 bp, Homo sapiens
tgcttcaagtccagttcggctctcattggctaccgcacgcagtgagggggcggggaaagtagcggcgaggccccgccctcacgcaggagccaatcctgagcaggctaggagacgaacccggaagtgagatgcaaggcggcgattttcccttctgtcaggtgggttgttattccctgtcccggacctcgctttttgatggaccggcgccatctaagaactcctgagcccgtgggggtgggtagcctgtggacacaggccgagccctgcaggtcaggccgcttcgtggtccccaggtaggaccgaagccgcttctccgctcttggctgtttggaaggccgcaggcggagctcacgggcctgtgagctcccggctggtggcagagtgccggagctggatcccctctccctccctcccagtcgccagaccctctacaggtgtcgcccctaggtccttgagttcagcacatctgcactgctttgtgctgagagcagtaagatgtatagtgcagcgaaaaataatgtagaacttttgaattagaacgtctgccctttcagttccattgaagggtccttgatctagggcaagttgttttaatctatctgaacctccttcaccagtaaggtttatagccccgcctatcactgagttgtttgtaaggagttgacatagttcggatctctctcaaaataggatatgccctttaagttaggaaacataccctgacattcctgatggaatatcaggaatatcatcatcaagtcatcagttttgtttcttaactgtaagtcgggtagatgcgcctaggcttggctttttaaactaaatataccagtaaaattttgtacataattttttgtatctggatctgtaaactcaaaatttatataaagggagtttttattgaaaggaaaagcatgttgggggagagggtaagatctgtggtataaggttactatatttgatataattacaagtgaacttttatttattagcatctgttaagtgtttaatgaattgatgtatggtcatttttgtgttgcaaggttcaggaattagtttgagaatcaaag

SEQ ID NO: 66860 - DNA, 1128 bp, Homo sapiens
cctgattcttcgaaatagtatttttaggaattagaagtttttatttctgctctatattatctgtgtgtctagtttataaaaatcttgaatgcacctgtcttcattgtattagttatacttcaaaacctttaagcattcatcactgttagcataacaccatcatacctaaaccagtagattaaaaataatagttataataatataattgacttagaagaaaacaacaaaagtaagaagcattagaccactattagatcatagtttgttgttttctgtcagcatcagtatttagtgtatgtaagggatatcatgagaaaaacaagagtttagacagggtttaattgtatatgtttgcaagacttatctatgcagttgataaagcctgaattattgttttactaataacttttgtatttgtgttttcagatcttgatgaacaaagcagtcataattcatctctagaaagatttatatcctggcatttgaaatgctttttatttagaatagtagtaaaaaatggaaaaagaaaaaggaaatgatgatggaataccagaccaagagaattccttggatttttctgaacactttaaccaacttgaattgttggaaacacatggacaccttattcctactggtactcaaagtctttgggtaggcaattctgatgaagatgaggagcaagatgacaaaaatgaagagtggtatcgattgcaagaaaaaaaaatggaaaaagacccaagcagattgcttctttgggctgctgaaaaaaatcgggtaaaaaaaaaaattacagagggaagtgtgacagtaggaaaagcactgggttcaagccagaagacctgcctttactgttatggccatcatacctatctcttgattgtgaggaccaaatgagacaatgtacatgaaagcacatattaagctgcaaagtgtcatgctaggtattatttgggggtttaaggataattatctataaagatagcaagcaatcatctatattttaaaatcatttatataaagtcattaggatcatttaggaaagagaggatggaaactaacatttattaaaaactaactataccaggtaccttattacattattttatttaatcatcatgtatccctata

SEQ ID NO: 66861 - DNA, 1012 bp, Homo sapiens
aaagtgtagttaacactaacttgttcattcttaaatcagtagtcctctcctccccaaaaagagatcttaaattattttcattttaaagtcatctactaacaagtaagtttttattcaacttaattaaatctaacaccacaagacaattttgttttagttattgttttggtttgagttgagttgaaagatttcttttttttcttctcagcttaccacagtgcggagactcctttctgaaaaggccactcacgtgaacactagggatgaagatgagtatacccctcttcatcgagcagcctacagtggacacttagatattgttcaggagctcattgcacagggggccgatgttcatgcagtgactgtggatggctggacgcccctgcacagtgcttgtaagtggaataataccagagtggcttctttcttactgcagcatgatgcagatatcaatgcccaaacaaaaggcctcttgacccccttgcatcttgctgctgggaacagagacagcaaggataccctagaactcctcctgatgaaccgttacgtcaaaccagggctgaaaaacaacttggaagaaactgcatttgatattgccaggaggacaagtatctatcactacctctttgaaattgtggaaggctgtacaaattcttcacctcagtcttaacaattctagtaattttcctaagtttctaaataccagtgcctcctgtgtgtgagatgtattcccataatcaaagttgacgtcaaacatcttactacaaaaattcagtgacattcattataacattcttccaagtgaattgcctgactttgatgtcaaaatgtatttgaaagtaatttgcatatatctttaattatttctgtggagtttgtgatttttttatcagaaataattttaatgtgtgtatacttaaaaacttgacacgggttgtacagaaactggtatttttggtgctgatacaagagaaatgtatttttaaatatcccacatcctggatctttgttg

SEQ ID NO: 66862 - DNA, 1055 bp, Homo sapiens
caatcctgtggatagtcctacctcaccctggtcaacctacatgatccttaagctaatggcgaatcacgatgaccttgtagacatgcacacaactatacctttgtccaacagatcataatatatctgctatccaactggttttacctgcctaatcctactgatttgggcactgcttgtatagtctctcaagttcacaggaaatgttgattttctaaggtcctcatttttacagagtatacaggcaaagtgacaggggaaaaggaattagtctaagagtaaggggatgattattatattgaggctaaaaccacaaagtggctcaggctttaaaaaaaaaacactgtggataatgacaaaaagcataagtaaaaatatttgagaaaaataaagtacaagttttgaacaacacaaaaggcatgaattcattttttacctgtgtatgtctttcttggatccagaacattattcatccagcacgcacttagttatttaacatctactcactcagtctctccagcagcaattttgcattgtctatctagcccccctgtgattgttcccaaagttttgtcttctcaacaccacaacactccaggggaagggaactaaaccagttgctctttacttcagttaaatttttaagatgtccaccaaggcttatctctttcaagccatcctacgtaacccagtcaccctagactaagtaataatgttatttaatcaaagattaaatatttatttttgcttagaacttattagatcatctcagaaaagtcagagataatatatgaactgaatcatcgtgacaacaggatcttgagagttagtgctttagtttatgttgtgatctcttcctagggagatgctttgtggcagaggttgctttctgtttaatctggcctaagttagtggcaccaaatgacagatacagctgacaggcagtgatgatagaataagaccttatttatccaagcagactgctgaatgaggttgcttagcctgaaagtcacagagctgatggctcctttctcacttgagaatggattgtacccatg

SEQ ID NO: 66863 - DNA, 1034 bp, Homo sapiens
caaatctcctttgagagctttatgagatctaatacctaggtagagtcttcacccacactgggcatttattcatccattcaatcaaccaatatttatgaagtgccaattatgtattcatagtattccagtattccatagaccccaatgtccatctatgcaggtagcttagttctaaaaaagtgattctcaaagccagaattacatctgtaagtttttgatggtctttcccattcacccaccccaacttatcaggcatattagtatttgtgctgtcattagaaagtatttcttcacttcctgtttccatggttgcattatgtttttcattaaattctcaaggttgcattacattttagtttcttcttcatggactttgtctatggcagggtttagacttggatggaggttaaatacccaatagaaattctttagtaagttattttatatggcctgaggcctgaaaactcttttctaggctccagaatctcctgagcaactctggggcttcctgtggctaaagggaggtgttggaatttcagtaacaggtgtgatggatcaaaaccttcctcaaaatacatgtgtttgatgccatttcattttacatttagtgcttggttttcccaagctgaagtgaaattcaagcatcagagaaaccagcaggggttgcaggttgaagttaataaaacactcaccatgggcctatgtagttcagattaataaaataaaatcatggatgtgagagcctaacctcacacatccatatcatcttgcaaatctgtttcctggaagccagagggtacctaggccactgggccaagagagatgggaatcttctttgaaaaccactctttggttaatcactaaagcctatttttgtcaaacaaagctcttggagtctctacttcacttcccaaagatactgcaaagattaatgaagtgattttgaattacctgttgtaaataagtgttgctttttaaggatgtagtattattgttaatactatttaataatcagcaaagatataaaatgttgg

SEQ ID NO: 66864 - DNA, 1045 bp, Homo sapiens
agatattgttatttgtttggtgcatctcccataagtatcatatttttccaggcagatagccaaaaagcaacaagtcaatctaccatgtctgcagtctggcaggcaatgcaggaacccgcagggcaactctgaacagcattctagagaccaaattaagccagctgggctgactacagcaaatgatgattggtgcctatcctaattaggctgacaggacttctactgtgtggatgtcccacttgctgcattcacagatgtgatgaatcagtcatgttcaattactcaatcactttcatttgagaacctgctacatgcagagcgttatcaagatctctttgtaatatgggcaagagtttggccatgagttgtaatcagcccaggtacagtttgcatatagagagattcttcaggctggccttctcagtggtggccaatggagtgggaatgatctttttacgaaagccaagagcccttgtaactgtgcctttctattatagttttcaaaaggaaaaggaaaattggtctccatggtccctcttggctctgaagtgttcttttaaaataatatttattgcatacctttttgagattacaaaagcaatacatgttcattgttgaaaatgcagaaaattacaaggaagataaaaagtagtcataattctaatacaatgaaaactgcttctaacttattagttcaagtttttttagtcattttttaggcaaatagaagagtgtgtatcttttaaataaaattgagatcccactatatcctgccctgaaattctaggagtctataaactatgcacaactaaatagtaaatttcttgctcaaagcctggcatacaatagtcattccacaaatatttgttaactgaatggtgaggaaaacctggtttgtgggcttgagcaacttcacactcaggccatacccaaatctagacaacgagctttgtgtgccaaaggaatgaaatgagctagaaactgaccactttccttcaagaaagcttctcttcacaaagagaacatcagtggtaattcaaatccc

SEQ ID NO: 66865 - DNA, 1075 bp, Homo sapiens
cacaggaggcaggaggaggtgggtctgcattcagaaggctagttcagagtttatggtgcttggtactgtaggtgcagtaagtcagggctgatgtcaccaggccgtgtctcaaatttcataactggcagctctgtttccttcttgatgaccaagttgtttacttctcagaggaaattaattgggtcttagatgtacaattccaggacagttgttctcaaatgtgattgagcatcagaataccccagagggtttattgaaacatggattgctgggccgcacccctagagtttctgtttccttggttgattgaggatagggcctaagactttgcatttctaacacgtttccaagcaatgctgatgctgctggtactggaaacacatgttaagaatgaccattttaaaacatagcccctttaaattgggcctggactgagatgcttaccctttggaatggagtttgttcatctataagtaattgagtttgaaacagatctatttctaaggttattagttgatatagctatatttcttcctctaatcactcttcttttgtgcctcactttcctgaccatgactttttcttctatcatttgtctctcactccttggaagacatgccacaactgggtatatggctaccatattgccttggtaaatcacttaggctctataaagtaagtgtatttactaaatatttatcttctaaggttattgtgtggcttaaatgacatagtgaatgtgaaagagcttcataagaagtgaaattttgtgtaaaatagttttcttaaaattattttctgcatcatcagtatctttttggagcagtgtctctgactgacggtaagtttcattgctacttgggggacttggtaacgattgcatagacatatgcagggaccatggacatactcagggacatcatgaagaaggttcctgcagtggatggatggttaagctagggtctgagtgccttccaaatggaaatgttttggaggctgattgataaatagttgtagtaaggaccaaaggagagcccagtgctggaaaattgcttgagcagatgttgaaatatta

SEQ ID NO: 66866 - DNA, 1022 bp, Homo sapiens
agagcaaagaaaatgccttctgaaatcacagtaagcttcaattaagacacctgggaaagtaattttaaaagcatcacacaaccatttatacaaacattgaagataatggcggtgtcaggtttgtttaaactagtaggtttgttaaaggacataatcctgtcaggcttatcttcccgtggtattgactggcctggcagatcaaaaatgagtggtaagtggcataaaaatggtgaataaatataccttagctgacttttagagttgatcctgtatgatagtcatcaaaaaactgaagaatagagtctaaaaagtctactttgagatatatattagcttaaccctgagttgaggcattacatttccccaaattctaacatttcttactttcaaatttctccaaaataaattccaggagtttggagaaaaaaattgaaataaagacaaatatttacattttaatgacatttattaagtgactaaaataactttattagtttaggaacaaaaaatgggttatgtgtaattgtttgttcataaaataaaatactgaatttcttgtattaaatttagtaatttatttaggcagtagtcacaattatgctaattgaatttactttgaatattttcaatttctcttatagaagagacattagggagcatgacatttcttattttggacagaatataaattaggcagaaatttggatacagaatcactcactccttaaatatctgttgagtgaataactctgctttgtacaagtcaatactgaggtggagaatttgatggggttacaataaaaggatatatagttcatccatctgatatttgagggtctgtcatgtgccaggaactgggctaggtgtgggatatatatcctttgctccccatggaattcatattctataaaaggaatgtaatgtattaagatgttagaaaacaaaagacaaatgaactgggttcgttctgctctaagaagagaagaaaggattcataactgtctttcaagtatttattttat

SEQ ID NO: 66867 - DNA, 1049 bp, Homo sapiens
tgatttagacatttttttcaaataattattgtaaatccattttgagacccttgatttggaaaaattatccagttatctgttgcataggatactaaagaaaatattacacattatataccttgaagtgaggttggcctttttaaaaaaaaaaattatcgtttgattggctaggccattaaaagactcaccgttttgaggatgaaaataggctttaaattgccatgtatgttatgatcctgaaggaatagactttttctgcatttttggtagtaaagagtttttcctatgttgtcagtgaaaggaacagatcactgcaaagaagagatttgaagttcatgttttgatctctgtcctattatatcagagatgaaatgaaagaaaaattatggaacaaaggtgctagggagaggaaaattcttttcctcttgtttgtaatgctcagtacagaggacaaatccatcactccctccctcagtaactaccctattgtcactgtctctgaagatggagcctcttaggcagctgagggtattcaggctagtctagtttctgataccttctccagggccacttagcccttgacttgcatgccaaggtggccaggtaaggagactttgaagaaccttttgacaataccatgtagccttttgttttgttctttgatagaactggacattttaagcttattttctgagtaatggtgtattattggtcttccctcatcccaaattcttggaaagttgaaaatgtaattttagcatagtttgttagctgaatagtctgacctaaacaaaactctaaaagctttcatctcttatctgcctgagcatcttgctgctgttctattttaaagagctcactgatttgatcatctcttgaaagtgaactttacgggggtgattcctgttatcttttcctgtcttcatgaacagaaactaaaatttaccgagcacttcctatgtgcttggaacactgttaatagccctttctgttgtctcaattaatcttcgtaacagccctatgtagtaggccctattattattctcact

SEQ ID NO: 66868 - DNA, 1050 bp, Homo sapiens
gttttgctttccttcagtggcctccctgcttccctcctttctgtcctcaaccttgaccattcagaactttgtgacacattcagtcccgcagaggacttgactttcgctggtgctgctgcaacccttggaaccgggttgtgtgagaacattagagcatttgcgccttcactcagtgtgtcttgaggactgttatgttgacctcacgggtcattttggtgggtggctggacttgtgataattctgaatagtaactttggaattttatgaatcaaaaagaaagagctccctctgccaagttgaaacactgtgggagaatgcctggtgggttcttgtgagtcacacaggaaggaaggaggacttgatgggcactcatattcacttcgctttctttcccccagggtccccttctgcttgttatagccccagtagtcctgtccaggttctagaagactccacctacttttccccagactttcagctctattctgggaggcatgaaacatctgctttgacggtggaggcaaccagtagcatcagggaaaaagttggtaagtccttttaccggcacttgtgttggaaaagcaaaatgatcttacgtttctcatctttagctcttttgcataattcagatgtttattctctaatcttgttttttaaatcatcatattggattattgattgtctgttcatagatgccttatttttaatcatgttttgctatggtgttaatagactgctttactctaatatgtgactctgtctgagagcatcatacctaaacatgtaggaacttcagaattataccacttattttcagtttttctctgattcctaaatacttttttctcccctttctcagaatctcatttcttttttccttctctgcttttgtttttatctctttttgcaaataatttagaagttaaaagaagtaattcagaactatagcaaggaaggagctgtctcctttgtaaaaacttcctatctctttttgagggcttttgagactggttaaactgtgagggaatctttaaaccactttagggaagg

SEQ ID NO: 66869 - DNA, 1737 bp, Homo sapiens
cctcttagtgttatatttggaatgaatgaaataacacatggagagaatttagtacaatacctggcacatcatatacatgtttaaagtagttcttatgcttgtattgaagttattaatgatgaacttggagattggcacgggaataagaaagagggttggcagagatgttgagaaggttgaattgacaggcagtggctgtctggatgttggggtaaagggagaggaaggaattttggaaaaccttcagttttctggcttgacagaaagtagatgaggcagggaatacaggggttggcatgggtggttaagtattttgggcgaggaagacatgttgagttagaaggactcagggccatcgtctggcagttgtagatgtatgggtcatgagtcagtagttgacgacgaggggtaggtgtggtgtcactgggagacgcataaaggtggaagagcactcaggacagagctgtaggaaacaccagaatttaagggacaggtggagagaagggagccagagatggtgcatagagagaggcaggagccaggaccaagaggaggggtgacctggaggccgaattaggagagcattgcaggaagagggtaaccaaccatgtcaaatgcttcagaaaagttaggtgtataatatgagggctggaaaattctcattggatttgcttactggtcagagcagtggggaggttagtggatggagcatttgggaaggggagacagcaagtgtagggtacttaccaaagacaactagatgagaaggaaaagtgagatacagggtggtagttagaggtatatgggagggccaagaaaaggtggtttcttttggtttgattttggttttctcttgtatttttttttaaatgggaaagacttgggtatatttatgtgatgaagagaaaggaccggtggggagattagagaaaagggaggggttgaaggatggaacaatgtttaagaggaagcagaggagagggagtgcagaatagtagactcgctttgaattggagaagaaaattccatgagacattgccaggtaaatggaggtgatgatgcatttgaaatcttatttttaaatgttgctgtagttagaatgttaattatgtaccacatagtcacagacatatatctcctgtggagctgcctgatatcttttttcctatgtttatcttttagttgaagatcctctttgtaacttccactccccaaacttcctgaggatctcagaggtggaaatgagaggttccgaggatgcggcagctggaacagtattgcagcggctgatccaggaacaactgcggtatggcaccccaaccgagaacatgaacttgctggccattcagcaccaggccacagggagtgcaggaccagcccatcctacaaacaacttttcttccacggaaaacctcactcaagaagacccacaaatggtctaccagtcagcacgccaagaaccgcagggtcaagaacaccaggtggacaatacggtgatggagaaacaggtccggtccacgcagcctcagcagaacaacgaggaactgcccacttacgaggaggccaaagcacagtcgcagttcttcagggggcagcagcagcagcaacagcagcagggggcggtgggccatggttactacatggcagggggcaccagtcagaagtcccgaactgaggggaggcccactgtgaaccgtgccaacagtggacaggcgcataaggacgaggcgctgaagg

SEQ ID NO: 66870 - DNA, 1075 bp, Homo sapiens
cttgaagaattaagtgcttaggagcttgatgcccttgaggaatttttttcccctgtcacttcatggtattgtaacattctctttggaggaattcagctttttgtttgtctgtgaattctctggtcttgcttgtttgtttttccaaatgtttttgtagcttataggatggtgatgtcaaagccaaattgctcctgaaaaccagggcctctagccaactcctgtttggtctggctgtgagaaactcgggcttctttgtccctcaacttaactaaggttctcatttttcccatttgtttgtcacatacacacatgcataccagaggcaggttactgtctgctaaaggcagaacccctggaaatacctcttaccattcttagctgtgtcttctcagtcacggaaactttttaaaactgtttctttcgaaaatggatagcgctgcagaattcccatcagctctaggccagaaagccaaaaataaaatattagatgtgaagaaaatgaactggtggaaatgaaatttcattttattggggtttttaaatagttatgttggagctttgttgtattcttgaattgagtgggacctgattagctctggcatgtttgcgttattttgggataaacccaaatcatgtttaaaggttgcacaagagcctatctccaccgctttgggatttgctaggcactgcaggttcaacatatctggttaaactcaagtttgtgttaagattctggctgttaaatgatgtgcctctctaaaaacagaagatttcttggacattcaatgatttgtttaaaacaacatattgatgagtcatgggtgtaaatgagtcagaactatatgcatttgatttcccttaaaattcttgcaggtctaaaaattaacagaaaaaaatgtgttggaccatattgttttaaaaataataatttgctgttttcaatgtagctggctggcaatcatcatcttacccttgaatcttattttagctattttcgttttctgtctcttatagaacttaaaggagactaaaatcatttcctaaaagaaaatgcctcctggtttttttatttcta

SEQ ID NO: 66871 - DNA, 1055 bp, Homo sapiens
taggtgcccattttacatattcataacatgccatgtagctacatacataatgtagtcagaagggggaggggacttgatttttgaattttattttgttttccttagatgctgcttaattctatctagttaaggaagagaattggacagaattcaggagaggaaaagtgggtgaaggagtttgtggagttttagcacggcaccctgtgatcacctctccacaagcatttacacctttctctgtatgggcatcagatgagattgataactgagctggggaaattgggagggaaaggcttcatgagccaatgcgagatgcagagctgatctctgttccagcatgaacaccagcctctccattctgtgtctgtttgcattgagacaaagcaagaaggtttcctatgatcaaacgcatatccttgtgttgccagggacaccacgatcatcaaccactcacggaatggcagctacggagagagctcgctggaggcccacatctggcaagaggaggaggaggtggtgcaggccaacagaaggtgtcaggacatggaatacacgtaagggacgactatgtgtgacgtgtggggcccgctgcattcacactccaggccttccagaacagattgcttctctgtcctgttctgaaaggctgtgagcatgaggtctccaaaaactctcctcccccatgctgtgccatggagagaaggaaaaggttccaacctaagcacgtggttccactcagcaatggatctggtgccggagttctctgggggaaattgcgtgtcacctgccggttttaagatgcaggctgagtctagtgacagaagaatttagatgtctgtgttatttcttggtgtctatctctatgacattatgagctgaaagggggaaacattatatcccaaagattcagagtttttgagccagaatttatatattccagtccaaaataaagaacatatttagctaatgcactcttctgatgggctacacaaaatttccagcagactttttgacataataaaactagcctgtcccccttcactacctaagggctt

SEQ ID NO: 66872 - DNA, 2083 bp, Homo sapiens
tggtttgtatttgtgtctgaatcctggcccagtcattctgcatgttcccactgtgggctggatcatctcacatgccctgtggtgagaatcctgggtgtgcagtggtatcggacgtgggtccattttagagaacctggaaagcctatgcccctcctgaggaatgggcagctgatgtttcccctctatttggcagagaactctcctggccatgggaagtcgcctgaccacagaggccgggtcagcagcttgctgcacaagcccgagttccctgatggagagatgatggaagtcctcatctaactgccatccctgtggaatttcagtacagaacactgacaaacaaggaaagcggcagagaaagaagaaagacctagaaggttgtagatgggaaatcaggaatgatttgaactgataaagatttcagactcataagaacacattttataaatgttaaacacaaaaactacatgactgaagatagaagagaatgcgatggattttattacacatggtggaagagagaagaggcgtgtaggtttgcaaacaaagttaagaaataggaaactgaatttttcattgtacagaaaatgtatctcttggggagggcctgtgtacccccattctctgattataaacagataaacccaaatgtggatcatccttggaatacccccattctccttgcctcttagcatgtttgatttaagaaaagcctccaggaaatcttgagagcctgtcttggcataatgcagtgtcacctgtgccaaccatggggtgtcccgtgagtgtgagtgtggcagtgagaagaagcatcgagggcgaggggaatatgaaagttggtcttcacctaattacctgtttggtttggattttcaagagatgattgggcttcttagcttttctgaattctgcagtattttctaaacaggatagattatgatctcggtccccatccatcctaacttctgagttcatctctgtctctgctttacagtctttaattttttgttgttccttcatttttttctttttaataagacatagcagaattccttaggtatgggatttatgagaccagtacctgaactgtcatcattcctactgtgtttgatagtgaccagtaggacaaagccacgtgccgacttcctggctgcttcacctttgcatagctgggttgcagctgcgaacctcattctgactgtgaactaagcaagctttgaggaggcaggagattccgtgggtccctgtgacatattgcattaagatcgtggcacttgcttttttgtctttcacatcggctgtcttgcaaggagcttgacatttccaaattccattgctctgtttggggaagacttaggacagcactccaggaaacagatgacaatttacagacagttgtctcagtggtttccagaatctcaccagcctcccgtatagcttcttgtattgaggctcatgagcgtattcacactctttcctcccccgcgcacgcctctgcttgctctcgatcagcatccagacctccgtggcaccaggttgcctctgttgtgaacttcttttgtaacctaccaggccagttgtatatacagtgttgtcaggtttttccgggtttcagttttgaggcagtttattcaaagtgagacagaagtgccacggaaaagaggcaggagtgtgttaggtggtgggtccattagacctctgctgtgacattgcatattcagctctgcagacactggcttcctttacaaatctaagagatgctggattagaaaagaggagaagctcatcgggccatcagagagatgctcctacagggtcctgatgtttttgtacctccaggtcagctggatcgctgttttcccagttccctttgctcatgcttacttagaggaagaaagaaaggggggtacctcttccaagtaccttctaaatgaaacactcaagagagtgctactcaggaaactttgcttggatcctaaaatggactggtcttgggtgtgtaaccccggtgaagttatagcctccccaaattgaggtgacagaaggaagacaagaggtgtaagctggagagggaagggaagaa

SEQ ID NO: 66873 - DNA, 1093 bp, Homo sapiens
agtcctccacccacctggagtacagggggtgcgtttattattctgatttcactgatgaggaaatgggctcagaaaggttaagtcccttcctgaaatctcacagccaggagaagctaggatgatttaaaacaaagtttggagaggcactgggcatagaccctggctgtacagcctctaacatgcggcactgcatcttggcagtctctatgcctgtctgtgatgtgtgtgtgcacgtgtaactacacacacacacacacacacacacacacacacacacagctatcacacatctcagagcctaagaaataggactaagcccagaactcctagaatcacctataaatgctaggcatagatggaaattattgtgttccaccagaagcacagctccaaactatacctaaaaaatatttctgcacttcccagagacctggacttcaaactttcccagtggagcctgattatagaacttgagggtcctatctcaggatgaaggggagaggccctggcttcacgggaaggtattccagcattgttctgcttcacccttgactgcgttgtctggcagtttctgtgtgctgccaggatattatatggaactggagaagttggagtcaggtctctgaagctagagtttcactaattagatgcctctgtacatgagaactattactgtctgcaggtccatatagctaagctgccaggaaaaacacattatcttccaaaactttcagagcatgtgcagaaccctttcttagcgttttcttctcagcattttctctgcctcccagaggctggcagccagtgacactgcagagttcagcatgttctaaccatgcacgcagggcaggggctgccttggccctcctcaggctttcgttgggagagcaggcagtggtggagcccttctgggtgcagtcctctggggttgctctttggaactcatgtatgagtttgactccacaaggcttggcatggataccaaaacagttgcaacaaattagttctgaacctggaacagagaattcagtgcttctgttactcaggaaggaggtgttcagaatgccccgtgcagagcagccagtcattactc

SEQ ID NO: 66874 - DNA, 1121 bp, Homo sapiens
tatagtgctgccaagtaaaaatatcttgggaactcttctactagaatggccttcagggcttggcatgttcctttggtttacccttagagatgagaaatcctcctcctttgaggatggatttaagttctggaaataatctcaagtgcttgatagcacagttggatgaaaaaagatggcaattaaggtaagttacaccatttttgtttctaaaaaaatccctaagaaatttcttggaatgagtctttggcctcagagcctctcaaagtgtccacttcaaggggggatcatcctcattagcacacagatttttaaaaatcaattctcttgccatgcctcctatgtgttcacatctctgcatacactacagatataagtgcataatcattcatataaacatctggtaggtattctgtaaaactgtgtttactttagtgcatgttattgtcatgttatgatgtgactggggtgtttctttgtcatgaaactttgcttcttcacagaattagaatactgctctctctatattgaactacatatacagcgttttcttgtatcagcccccaaagtctggatgcccggtgttgtgtttacatgtgattgtgcctaggagtctgttcacatagagacacctgtaagtatttattacaaaacggaatgtaagcaaatatatccacattggttttatttgaatcaaggtgtttttttgttttttgttttttttccttttgaggaggaacagggagcctcctcctccatgagcacttacagaattgtgtaaaattctgtgaaacagtggtaagcatgggcacccgatttcagctgtcctgctgccgctgccctccaacctgctctgtgtgtgtgtgtcgctgtgcttggtggcagtgtgccgtgctcgtgccggctcttcccagcagactggtatctggctgtaacgtttgacgtcttcatattgccagtctgtattgaggggtgatgtacatggccatacagccaaatgggtctgtgtaccagtgtggggattccaagaacactgcctgtcccccacagcaaatattgatgctgttggtcagccaaagattttcctctcctttgctgcttaaacttgtgccttaatattgtac

SEQ ID NO: 66875 - DNA, 1091 bp, Homo sapiens
tgaattataattaagtgaaataagtcaggcacagaaagataaatatagtatgttctcactcatgtggcggctaaaaaaggtcaagctcattgaagtagagaacagaattgcagttattagaggctaggaaggggaaggggaaaagaaaggctagaaagaggttggtaaacgaatacaaaatcacaggaataaattctagtgttctatagcactgtatggtgaatgtagttatcaataatttattgtatattttcaaaaagctagaaaagaggattttgattgttcccaacacaaatgagaagtgtctgaagtgatggatgtactaattactgttttgatcattacatgttgtatacaagaatcaaaatatatctcttctgtaaatatttgcaattagtacatgtcaactaaaaaggaaagaaaacacaagcaagcaatcaaatgtgagagaggcaaaaatgcccatatttggatatactgagcaaaatgctagtgaagttcaaaggagataagaaaaaggagtgacagattttcagaacacaaaattgatgagctctttgaaagttttgggtaaacagagtcttttaaaactcctacttgaaatgcactgtaggaagtaaaggatcattccttgtcaccagatctcaggaagcatgtggccacctgttaggaaggctgagtttttaagccaggcatgtctatattctttattgttgttgttttgtttttgtttttttttcttttcagaaaggaaaggaagggatgggaataggagaagaaagggaaggaacaaaaagtagatgtagttgaacagaaagcctgaggagttgctgatacataaggaggggatgggtatcccacctttggagcctttggagtgctacttcagcaggtcttccaacaggaagtccactgtgattacacatgatggactggtgttgaagtgtttggaagggaggttttatggaagcctgaggggcaaggacatataatgtatcttctaattaccctttatcgtgagcccttgatatggtttgactgtgtccccacccaaatctcatcttgaattgtagctctcacaattccctcat

SEQ ID NO: 66876 - DNA, 1108 bp, Homo sapiens
ttagaatatgcttattgatatatgcttaaaatttaaagcaattaatttgacatgtacttcaagaaagaaaatagatttaaatatggatctgtagcatttcacagttggaagagactaattactgtatgatatcaaccatgaaatatttataataaaaatgctaaattattttattttgatgagggagacttttctagtatgcctcaaaaaccaaaaaaaaaaaaaaaaagcctgccttgatgcttttgttgccataaaatcctaatgatcagttttgttttttttttcagtgagctaatataaaaaaaattgaacccagagttaaaataagtaagtgttaatcttcctttatcattgacaggaacaagaacaaaaagctgaagaagagaggattcgtatggaaaacattctgagcggaaaccctctccttatctcactggcccatcccagcctcaggccaacttcaaagttaaaagaaggtactatacagtaacggagtaatggagtgtgtgtgtgtgtgtgtgtgtgtgtgtgtgtgtgtgtgtgtatatgtgtatgtgtatacacacaggcatgcagattataagttggatagcaaggtgcattgtaaaaagcttctaaaagtccaccgtccattcactgatactcttctctgttcaattaggaataatggaagaagccaaatgaaagaaaataaacttattttcaatagatagttgcaataaccagctgtgtactagataatgatgtaagcactagggacagagtaataaactgaggcccttacattttaggtgtgcatatcaagggtcctcaagatggcctctcacattcagacactcactagaagaactcaggggacttggtgtatagttaatatgcttggctaaggtaataaagacacacagctagattataaagggaaaagacacacacagagaatagaggaatccatgtgcaggtgtcactatgctctgtcccttccatgagtggtcacacagcacattgtttcccccagcaaggacagtgcagcaacgtgtgcagtgcttctgcccagggaagcccattaaagatcccgcgcccaaggtttttactgggagtggctagt

SEQ ID NO: 66877 - DNA, 1782 bp, Homo sapiens
ttagggagggaagtaatctaagcagaaggtttttaaggattagcacatcagttaatgttaaaattctgtgggaccctagagcctataatcaatttgcagttttctacatacaggacagtgaaaaacctgagtggcatccaatgagtaatatctaactatgtatacatatcagcagttaattctagagttaattgatggagttactcataatagttaaaacaggaaacctaatttcaactgaaatttaatgattattcatttgaaattattttcttctgagaatttagcacacttttttgcacttttgagtatctttgctgctagcttaaagttgttttgagctacataaaattgttttgactttcttagggtgatacgttgtacatatgtactgtgttttggtagtgtgtattttccctccaatcttctgggctctcactgttcttttaggaggaagatgaagattttgaagaagaaagtgatgatgatgatactgcagctcttcttgcagaactggaaaaaattaaaaaagaaagagctgaagagcaggccaggaaggtaaaaccaaagtattaaatatttacatctatcttctcacatacactaaggtagaaatttttttgaatataagtaatatcttcttatattagaaatctcctttaccgtgtctaaatattatagcacttgtagatctataaatgattatttttatgacatcctaggtatcctggttatgtaagaaattctttccaaatagttcagatgcactgagtaatattcacaggcttgctagtcatttacttgtttattcatttgttcaacatttagtcgatatctgttaattgacaggagaatcaaagatgatcaagatatagttgtggtctacaaagattatctctctgcttgtctactgcctaggtactattaaggcaatcagtcagtagatattatataacctaggtcaagctacctaacttctctgagcccccacagtctctctgtttacacaatatgaggaaaaaatataaaactcaaagatagttaaaattctgaataaattacccagagtgataataagaggtgaaactgaggaggcaagtgcaagtcagagcattagaggtttgcaaaacaatactgaaggagtctagattttttctaaaggacatgaagagctggttgatttcagcaggagattgataaaactggatacgcattttagaaagattactctggcaaaatatggaggatggattggaaaaaaactgagttaggaggctgttccagtaatcctcccaattaagagactcttagcttgtatgataggagttggaattgaggtaagtaattagatgctgataaagctgattatcaaggaggtcaaagtgggaaggggagcaggaaaaaataaaaaaggaggttgagttgacagatagtgactgattgattgtagcagcagagaggaccctcactttctaggtaaatgttggtgccatcaatacagggaatgcaaaagaattgccatatttaggcagagagaagaggtagttgatgagttctgttttgaacatgttaaatttgacacattgtgagacattcaggtagggttgtctgcccctgttttcaaccagagcagcacagctttttcatagatttctgtgtaaaattttatttgaggcaagaattgttctgtttttaaaaaagaaagtaagaaaatatactgcatggtcaataccaggaatctagggaagtagacttcatgtgaatcaggagggccagggaaga

SEQ ID NO: 66878 - DNA, 1032 bp, Homo sapiens
taacactaaaattctgctgtgattttaaaatgtgaaattcctactaaccaggaattttcatatgtagatagaacaataaataatagaaataataatgcctcagagtatgcactatgagcaccagtcagtatattaaaagtattactgttaagttctgagttgatataatcctaataaaaattaaagacattttaatcactgtaaagccttattataggaaaatatgtgattgaatttggacttcttgaaatattgggaacatcacaagagtggctgttagtaaccttcagattaaattatgatcttgtctacttcccttttttctgcttgaaggacaaagtctcattcctgaattgtcttccattactacagtctctgtgtgtgtgtgtgtgtgtgtttaagtaacatttttgccctggtttgtttctactttagacagactactcaggatgcccctgaagaggttcgtaaccgtgacttcaggagagagttggaagaaagagagagagctgctgcaagagagaaaaatagggatcgtccaacccgaggtaccaacactatccaagacatttgtctcataaaattatgttgttgatagtttttctttatgtagcaattggaaaatgttaaccatttgtttacttttacagattgatgtgagctgtactactttcttaggtcattagagataataacaacaaatatttaccaaaggcttatttgcccaggcactgtggatgtgagttcactgtggataatgcttttaatgtgggctccttgtgctcacaggtccctaaaacattttaagaaatgaagtatttgttttactaagttaaatgatttttgtttccccccagaacatacaacctcctcttcagtgtcaaaaaagccacggttagaccagattcctgccgccaaccttgatgcagatgaccctctaacagatgtatgttttgtttcctcctttcatctctaataattgatttaccatgctattctaaaatacttgttatgtctttgctttaagaagtg

SEQ ID NO: 66879 - DNA, 1045 bp, Homo sapiens
ttgcttttccgacactaacagggttttagtgactgcatctgctgcacagtattcttgtgactgctccaagcagaaagtaacttgaggaatgagtccctgatttttggcatcagaatcctctgggggtgaggttcctgttttttttgaacaggccttaaattataacccacaaacgatctaatttatagtatgatgcctgttgtaggagaaaattggctcaacaaacggttgtttaagaatttttttctgtgtaactgtcattgaagtttaacacacttttctctgggacatttagtaactttgtcagtgatattttttgtttgtttttagcttttgtttctactagcctatttgctattgtgtgaagtttagataaaatgcaaaccttacagagtctggtagagtaaggttgagttggaaatttttaaaactcagtcatggcagtactgtattttactagggttttgacatgtcaagtgtcataattcttataatctatgaggaatatctccattccacagatgacaaagttaagccaggtgacttgctcaagcccatatagtcagaaggagaatagggatgcaaactcagatcttcatgacagaattttttgtactaaggcaagcctgagaagccatattccttgtacagcctaagcctcataatttgttttcttgaaaacttttgtttaagaagattaagcaggttttggggaatgagttttagaacttattttaccagtatggatattgattaatactctataaaatgagtgtttgtaatgttggaaataacttgattatatttttcttcaaagcataaaagatgacaacagcagccaggccaacctttgaacctgccagaggtggaaggggaaaaggagaaggtgatttgagccaactttcaaagcagtattcaagcagagacctaccctctcatacaaagataaaatacaggtagtaagactttctttttttattgttcacaaaacaagaccagatctgttaaatggcatggtcatgatatagtagtatgtttgagttat

SEQ ID NO: 66880 - DNA, 1005 bp, Homo sapiens
agtcttgccaatttttaaattttatataaatgttcaaaatgtttatgtaaatgaatatgtattcctttatgtttttgctttattcctcccacttaatgtgtgctatctgtagctctgatatactatttagagtttcattgtataaaaatacacaccataacttgttaattctagtaattatcttttcgttgtagtgataattgcaaataatgccacaatgaacatttctgtaaatgtgcaaaggtgcatgtgtgtgcatttttcatatatatatttcatcaacaggagatgagagttcttgttctataatctcaccacacttgattgtccggcttttcaattttagctcatttggtgggtatatagtgatatatcattgaggtctcagtttgcatttccctgattattaattcacatgttaattgtccatttggatttcttcttctgtgaggtatctgtttaaatctttctattgaatcatcttttctttatggatttctatgatttcttaagtttaggcatagttctctgtcacttatttgtgctgcatatacaatttgccacttctctgcttctctttttggaaccacttttagagtggttcaattatcattcttttcctttttgcttaatgcatggtatttcttgattatgaatgtccctacttgggaagtcataatgatattctcaggtattatcttctaaaggtttcatagctgcacatgaaattcatttttgtgcgtggcatgctggagaaggggccttgaaatccgatggagcagatattcttaccttgtcccacttttataagagtggctttgctattcttggccctttggactttactataaaattcaggagccaattgtcaagttccacaaaaatacttttggaattttaattgtgataatatttaatttacagattaagaaaacattcttaaaaatgtaatgacatttttacaatactaagtcttcaaatctattaacaggttatatttttcca

SEQ ID NO: 66881 - DNA, 1027 bp, Homo sapiens
gtttccatccagggaagagatcactgaggagttgacttttgggtatagacatgaaagaagtaagaaagccaattatgcaggcatctatagagggggaaaacgttctgggtaaagggaatggtaattgcaaaggcctggaggcatgagtgtgttgaggaagaactaagaggctggtttggctagagaagagtaaatgagagtagcaggagatgaggtcagagaagtggggaaggagacggcagatcatttagattcttctgagctatttgtaaaatattggggttttactgtgtgtgaagtgggaagcaattgtgcagggttctgagcagagagcttcgatgtgatctggcttacatttaaataggaccattttggctgctgcattgagaatagacatgtggtgttaagggcagaagcaaagaaaccagttaggaggtttcagtgatctgacaagacagtagtatcttggatcaagatgatagcactgtatattctggatatattgtgaagaaagagctcatagtctttggagtgagagaaagggaagagatgactccaagggtttgggcctgaataatcagaagaatggagttgtcatgaataagacaaggatacaaaaggaggggctgtttgggggccatatcaagaactcgcttttgttcataagagcaagaatataatactggttgagtatccctaatctgaaatgcttgggaccagaagtgtttcagtttgaagatttttttttggattttggaattagtggctgaacctcccaaatctggaaatctgaaatctgaaatgctttaatgagcatttcctttgaatgtcatgtcagtactcaaaaagctttggattttggaacatattggattttggattttcagatctgagatgctcaacctatagtggctaccaggggctgaggggtggggaagatgaggagctcttgtttaatgggtataaagtttcagttacatgggataaatcagttctagagatctgctgtacaatgtaatgcctatag

SEQ ID NO: 66882 - DNA, 1002 bp, Homo sapiens
ttcagcatgttggccaggctggtcttgaactcctgacctcagatgatccacccgcctcagcctcccaaagtgctaggattataggcgtgagccaccgcacctggccccagactacaacagattttaaaaagaacatcacgatggtgggtgtgagtgtgagtgaaggggtgttactgtagagcagggtgggataaacacaggtaatagactaggaaacagcctatctgaaagatgctttgaaacaccaggattttggtatatcagaatgaagtgtccatgtgccagagaaccaagtccttccaaactcaagcgtttgaagtaatagaccagtggggacttctccagagtctgggcaggatgattctagtgctgcctctgtgctgtaagcagggatgcatctcaccacttgttttcttcttgcagatcgatgaccccaacagcaaccttgaggaggcgattaatgaggcagaggccatcacctctgtgaacagcctgggaagcaagcaagccttgaatacagattaccttgattctgattaccaaagaggacagctttacccattctcccttagcagtgatgtccaggtggccacatttactctcacaaattcagccccaatgactcagtccttccaggaacggtggtatgtgaatctccacagcctaatggaccgggctttgaccccacagtgtggcagtggggaagacctatatatcctcacaggcacagtgccctcagactacagagttaaagacaaagtggcagtccctgagtttgtttggctggcagcctgttgtgctgtccctggaggaggctgggccatgggctttgtcaagcacacccgggacagtgacatcatagaagatgtgatggtaaaagatcttcagaaactgcttccatttaaccctcagctgtttcagaacaactgtggtgaaactgagcaagacacagagaaaatgaaaaaaatcctggaagtggttaaccaaatccaggatgaagaa

SEQ ID NO: 66883 - DNA, 1038 bp, Homo sapiens
aagtgaaccatccttcatttattcagtcattcgttcatctgtcaaacacgtatttggacatcaaggttgcagagatgaacaatgcatggatttcatctttgaggagttcaaaacctagtggagagaacacatggtacaatcgtaacacatgaaggacaagtaagtgctgcagtaaaggtactaataacatgttccttggaacagaggaagaaaaaccacgaaaccatggaaattagggaagcctttacagagggtgtgacaaaactcaatttgacattttcaagctatgtacaatgatgtgcaccttgcagatgctcaataaagtaattactgacaactcgttagcagttctgtaaaatatctaaaaggggagaatcctaatagttgaaatgaggcttggggactgtgaattgttgccattttcttcttgatccgcattaattcaagcagcttccagtgactggcttttgttcatttctttaaaagtttgcatcatacatgaaaaaacagagaggtctggatcagtgaaacaggacttagaactattttttaatgttattgctctgcaaagtatttgggacaataagtgtttttgatatcttgcataattaagcaccaaagacttactgcttcactgaatctgaatcacatagaaaattatagaaatacttttattagtttgtttattcattaggaagctcccacagtgagagaaattacaagcagtctctgacgggggctggtcctctctgtggcctttagtagggtgatcctcttgggtggaggtggcagtaattcttggctgccttcccagtgtgggcagcatcttgcctaagctcaccacagaatacgtgtttgtccaaatgttacactacaagccatatagtgtggactgcttgcttttcattaatgggttctcagtcttcccattgtctctctttgtaggtattttcccccaggtcatggattgatgtctaactccaaatcaatttttaagcttaaatttcaacaaagaaagtgcttataaccacttgtcat

SEQ ID NO: 66884 - DNA, 2141 bp, Homo sapiens
acccaattttacagttcataggacaacatcaaacattagtaagtctaaataagatgaatagaatttttgttatgtaaattttgctagaacagtctattttcttgcacccctcaagttaacctcttaaaaaaatgaatgtataatttctaccgaaagaatatcagagagaatctctctggcctatagtgttaaaatattgttcacaaatcctgattagttaagtgcatacattatgaaacttacagaataaaacttattatacatctctttcttaaattaatatctttacacattttcaactggctccccaagtctgataaggaaggattaaaagaaaaaagaaatgtattagttgggtggccaaggagtttcctttgtaatgttgagagacttccgctttctgaatttcgctggttctctaaggtaaaagagttaaatagtacccttgttcaccaaggaaagtgatccaaactatatatctagtgcagatatttcctttgcattatttagtcttctctggagagaaaatacagtttccccttcctctttctcttcacatttactcttttcaacccaaaataagagacatagaaagcaaaccacagccagtttggcatcttctcagtgctactagtataggcacatacacatacacagtctcagcaaggttataaagaaccctgtcaggtccacttgcaacatggccttgctacttggattagctcctttaagcctgaaaataactttcctggtcatggaagaactggacgcatcttttaacttatgaaatagaagttgaacttgaaaactctttttaaaaaatcctggttttgcaggacagctacataatgaatgtatatattaagactgtagctgaattgcacatgaaatcagattgccaacttcttgactttcaatgttagacatttatccttaagttgtgagcgatatatgtagcatgctgtgaaatgtctgttatagctctttaattcatcagtattaatacagaattatcatttgcgtttcttggtactttttattcaatgtaatcagaagctgtgatgttttgcctttgtagtcctgtgctttgttactgtaattttttttttttttttacgaagcacgtgactggactaatgtaaggcagatgacgtgatctttaagactgctatatatatcagtctcttactctataaggttttaaattagaataagcttttatcaaatagataattgatgcaatttaggattcacgcaagtttcagtgtcaaatggcggtcttatagtttcaattctgaaaatagcaaacttaataaacagccactttaaacttgttctggcaaaccagaccctgctgtagatatagtctaaggtagttaaccatataagccttttcaactcttaatgccctccacatgaatcagcagttaagaaggttctagaacccatgaaagcttttgtatgtattactaggttttgtttttcttatgtttgctgattttacagttctgactaaagctgacctaaatggatcagtttatgtgtaatattctagtgctttaatgactctttttttctttggagggagggtaacattatttggacagatgcagaaggaactgttagtgagtcaagacaaacacatctgaaataaaggaactgtgtattaacatgttaacaattcataactgcactttttatgacattttgaaaatctatttataggtacagaacaatgggttttgttaaactgtatcacatttatacttgcagaaatttatttcattgttattagtaggaattttattggttcaataaaattggcaaaactgaacaccaatcatttgcctactttgtttatactggagtagcattctcgcttggtttatttctgcttgattattgagacatgcattcttaaagatatcagaattataggagtcattattttcactatttttttcctgacccagtttcctggtgatatttcttatcactcactcaatattctattggtggaatattgcaaaagtgtaagttgtgcaaaatatatagttattgttaccttttaaaatatcaattgtgatcttagcaagaggcaaattaactttattattgtctcttgttaaccaaagcagtaa

SEQ ID NO: 66885 - DNA, 1688 bp, Homo sapiens
tatctcagtcaacagaacttatatgcccactgtatgtggagcttatttcaatgctaatttggcttagttagcagacctagaatctgcccaggtgagacctagaacaaaaatagctggggtgaaatggataagagaggtagaggtatatgtcaaggcagagccctatgaggaaggaagagttttcaaagaatatgaggaacatagtgctgagagtgtggctgccttcagcaccgtacacctaatctagagaaaatatttcccatgtgggaggtcctgtctgcattcagtccacccttttctgcctgcttcttcctccaagtgcctcaacctctacatgctcactctcctccccttccctcagcccatcttggtctaagcagctttcacaatccaaaccaaacatcaccagccacccgctgataagtcaccagcatttactttcctgagttactttttctccattcattgagactatggattcatcccaactccttctaaatccctcaaccatccagctatattttggctaacctttgccctagacactctaccagatgttaatgcagtatcaagtgtaaattgtgtcaccctattctgttctacccttttccctgctgccgaaatatcttgctctcctctacctcatccccaaagagcctataaattcagagtatccaaccttttcatggattcactcactgttgttcagtaatacaacttccatattttaaataaatcataaaagatttttgccttctatcaaagtaggaaactttatatttatacatgatacagaaattgaactatttctatcgttcagaatttagcatataacaggattttaaagtgattgaattgccatcctaacttggatttgtattaggttatgaatgaatactgttgttagtccaagctatttgaatgtaaagttaaaattctccagcaatccagaatgacttgtaacccttcagtggaatgggaaatttctggtatgcaaatagggtggtgttccagacatttgttttattggtggtgtttgggccttgaaacacatttctaatagaatgacatatggcaaagggtatttagatggtcctatgggatcacagaagcccatatgatttaaaatatagataaaataacacaaaattgggtacataagggtttaaccaggctttcctgggttagactaagcctctaacctctgttcctatcctgttcttatgggaggaaaaaaaatgttccatgggatgaaaagaaaatgcattgactttgtagtctttattctcctagccgcacttcgggtatatccagaaggaagaggaaatgcaaagaggaagaagatgtaatagttcttctctccagctaggtgcacttgaggttgttcataaatgtaaaattatgtcaggtttctaacatgggacactgcacacagttgtctgacctgatgaaccatcccatttgaaagtatagattattattatttcttgtagtatttggttgttttccatctcattcatgaacaactcaacctgatagtagtatccaataaatgcctttcagggctcaggaatgaattgacatcctagttaagaaatgagacttaataatggagactgaatgaggcggtttgtattaaattatatgccatgaagtgttcattttagctttaacctaattatgactgt

SEQ ID NO: 66886 - DNA, 2623 bp, Homo sapiens
cccttccccagaaaaatctccttggacaactggtttaaaaacgttattaagtcataggggaggaataagcggccaaaaagtcacatttttgcattggtttacgttgcttgattagactatcttcagagagcacattatgtgtttatagctttaatttgtattatgtcaatgaaccagtgaagtgcctaaagagatgcttacaactatccagtaggacacaactgcactgctttttaaacactttttggttagttaagggtgacttgaattgtacacatacatgctaatttttgaaaacttatccatttttcatagtaaataatatagataaaattttctgttagagttcccgcaaatatttcattttagacttacttgtgatataagatttaacttttcttttgtgaaagaatcgtgaactagtgtttcatgaaatcattttcctcttccatttatcatcctcctctggtacaatatattgggttgctttcttttagattttgttccagataggaaaacaaatatgactgtatacttattaacataaggtagttctgcatttttggattccaggatcctgtttgaaatcttccatgtgaggaaaaaattactaatatttttaaagacagggtggtttatttaaagagattattcagagaacttgtgccatatctcgtctgttttattgcatatgccatatgttaacttttattcaatattacattatgtagatatgtaatacaaagaaaatatttaggagaatggcaaaacacaaatggcaacataaatgtccatttgacttacctaacttcacaactttcaagttgaggatgtcatttattcttgaatttgtttttttactagatgctttcaattaatagccctatatttttgtgcaggcgaactgtataacaggataaaaaatgatttgtatgtattgaaaaggaggagaaattctcacagaacaccatatgagctttagaccaaaaggggaaacaaggtttaagtaactaaaatggccacttagtttgtgtttatttttttccctggaaatgtaagtagttggagtttaggctatggaaatattagtgcctttaatagatctctttccttgcaaagtttctttttagctcagcattgatctatcttatcaataggaaaataagttgacttggaactataaacaaaaacaacaccatatatttatgaacctcagtgaaccagcctagaaaaattgacttctgcaggtgctaaagcacctactaatacgcagcatgcacagcatttcaggttgtgaataccattttacaacgagtttgctgttaactctctttatccaatgcaaacttgaaattctgatgcggttttccagggtggtattttttcagagtattgaatttactatttagtaatttatagtatagctttttatattaaaatgtgatatttttaaaagagatatctggttcaattggtataatgacgtgattatgcaatatgctgatctacaccttgcgctcacattgtgccaaacttaaatgtgcaagtgtacgtgagaaaagcacatgtgaatgtgaattctttaattctttgcttattatgttaaaattagtcttcatagtccactgatgtgtatgcttgaataatgtctatttactttggaatttcaagatttccagcttcaatggtaatttataatttctcagatcaccttaagaaatattgagatactctcccacctgaaaataatctgttctttaacccacctgactatgggagtagccaggcaggtgcctcactggcttcttcagacgaggcttcctcaggtggatatatgactattaggggaaaagaggcttttgagacagcttattacctccttcccctttttgaactaagtacattgtctcagtcccagtatgaatttgtcccatttggggtatttttaaaataaaagatggctaacatggaatctggggcatagccttggcctttaattatggttgtaagcccaaataatggcagagaaacacagggctgtttttacaacagaaaactcaatataagttttatataagaatcctataaaatttgaaccagagctcctatttagttgttataatgtctcctaaagatcttaaatgcttctaaaagctaattattattccagagcaactttttccttttcccccttataaagtttttttttaaatccaaaatcttagatttctgtgccacagcaaaataaaatgatcaacaattaaagatctgtacttaaaatagtacaccatttttagtggagggagggtgcatgcctatatgatggtaagattcttttgaactctaaggacaattcctcatggaaaaaataaatttcagtgcatattataaaaatgatttgcactgtgttagcaaaataaggtgttttaggttgtattttaaagacaattctaaatcatttctctggaaagcaagaccttaaattcttctctttaatagaactgcttttatgcaaagagatggtcttaacatggactaaacagtacataacaataatgtttgttatgtaaatagtatatcacatttgcttagtagcacaattcaacagcaggctgaaagtcgt

SEQ ID NO: 66887 - DNA, 1549 bp, Homo sapiens
ttttcactttagtatcttttaagtaaatactaggaaaaattttttaaagcttttcacaggataagcataaactgttaaaaaaaaaaatgagggctgatttttagccatgtaaaattttataactagaaagaaatgtaatttgtaggaaaattataatttataaaaattagttttattttataacccaacagattgactttacaaaaataacaactttaataaagttatcagaattttttagattttatgggttatttttactgcttgcagagccattagacacaggtttgagtgttgcatcatgaacatggataaatatgcctaggtgtgtgtgtgtgtgtatattgcttatatacacataaaaaaacctttgtgaatgtctaataagattttccaggtgtttataatggttactaaactgataacattttcacttctaggttcatgtcaatctacttttaatggaagcacgaatgcaagctgaacttctttatgctcttcgtgccataactcggcatttgacctgaagtatcacccaaggaaaatgtcatacatgtgtaaagacctttcacataagataaacattgaagctatttgtgatatagcatcaaaaattattcagttctctagtgtcaaagtttagccgtttgtttttttttttttgttttttgcggctgtaatgtgcaatgatgtgttttattttccttgatgcttaacattactaacaattgcaaaaataatactgaggagcactactttgcattgtttgtagttggagttttggatactgatcataaatcatgaatctggcgtattaatgcttaacttcagcgcctttgggttgtgtgtatgtgtattttttctccccccaccccgcccttttttttttaagaataaggacaagtgcttacaatctgctcaagcaattgtttttcagatattggaattcagcaaagagtgacctctctggccattctaaaactttaatgttgtgtcctaaatctggtggaggaaaagcatgcgctgttgaaccaagctgctcactggacacatatttgtgtccccaggagattatttgtcaggcactgttttttatttgtttgtttgttcatttattgttgttttactgctattggcgataacatgaaatgtgatacagctattgcccataatttaatgtgaaattaatcatgatgaattctatagcatgctactgaaatgccaaattcagctattttctttctcttctaaaatggaagtttcagttttccatatcagatgtatataagtggaattataacacaatcctatcactgacagtaatcctcagtcaccttaaataatcagtgctcacagtgctgcttacagttcatttagttggcacatataaacctgtacccacacaagactgaccaaaaattttctttgcacatttttcctttctcatagtttttttctatatttcgttaagcaaaggaaggttaatatgcctatttttcctgttaggcttttagaaattattttccatgacttttgttcttataatagg

SEQ ID NO: 66888 - DNA, 1050 bp, Homo sapiens
tatttggcagcatgggactcagtgattacttgctcttccctgaaacacttgactcctacctcaagtcctttacacttgcttctttaccaccatctggtatttgttcaaatatcaaggctttcagagaagccttcctgcccaccctatttaaaataacaactcctctcctcccagaccaagttccatttcctctccatggcagttatcaccatctgactacaatgtgtttatctttttaatttttcttcgttttttcttcaacaaaatttaagctccatgagaccaaggatttttgtctgttttgttcactagtatatcactactactgagtactcatggcacataatgggtactcagtaaacatttgttgattcaattaattaacgagcttttagtatttaattactagacaataaatgtccttagtataactttggaaactaaatattttgattttgtcattataaagctattgttgtattgctcgtaggtatgatgactatgattatggagaagttaatcaattacttgaaagaagcctgaaggtttacattaagacagtgacctgctatcctgagagaactacaaaacgcatgtatgatagttactggcggcagttcaaacactcagaaaaagtacgtgtttcagtattaagcattataccatagacagttcttcagtacaagaagtaatagttatgaaaaatgacacatgaaagtattaataaattatagccattgacatggaagtggcatcatctagctatctggggtttttttgcttgtttgtttgccaggctggaatgcagtggcacgatctcagctcactgcaacctccacttcccgggttcaagtgattcttctgcctcaccctcccgagtagctgagattacaggtgcctgccaccacgcctggctaatttttgtatttttagtagaggtggggtttcaccatgttagtcagactggtctcaaactcctgacctcaggtgatctgcccacctcggcttcccaaagtgctgggattacaggcaggagccactgtgcccagc

SEQ ID NO: 66889 - DNA, 1050 bp, Homo sapiens
tataagattgaattatgacaaactcattcatggttattttagatgatctgctaactgtccatgtcactgggtaggtttgttcacatgggaatattccaagatctcctggggcccttccagataaaaggatagtgtgcgtagtacctgagtgtaggagatgaccagagttcatcactaacatggcaaatcccataccccatgaagaaacatccagacactctgatctactaactgatgtgaagggttattggtaaagccttagtaaagctgaaaacctagagctaaattagaaatagcctcgcttacttgcttcattagttatatttaataatacatagaatttagatggaaaatgcccactttgtaattaaatacattttattcttttaggactatacctgggaaaatcatgggttctccctggtgaacagactttattctgacattggacatcttcttgatgaaaagtttcggatggtctacaatctcacatataacactatggccacccatgaggatgttgacacaaccatgctgcgcagagctttatttaactatgttcactgtatgtttggaatcaggtatgttcattgtagagacagttttttacatttctaagtgaaaattcaagcatgagtcttatttttgtcctgtttgggagtatatgactctgggaagaaaatattacatgtagacttctgattttaaaaattaatttcattttatggagaagcatttttctttaagtgttatgaatcttaacattgatgcacatgtaaatatagtggtaaaaatttactgagggaaaaaagcatcagtaatgattggggataggatagaattagaccaaatttgagaatccttcctggaagaacaggtgagttttaaaaaaacaggtgtagtgtccctttagatcactataataaattctggtttgtttagttagtttggtctttttaaaacttattttttaaggaatggtaattacggtataaacaaaactgtactaggttgtgccttcataagcttacataaggtcacataacactg

SEQ ID NO: 66890 - DNA, 1590 bp, Homo sapiens
taaatagtgggtagtaaagcaaaagaaagcagttttatttttattttgttttgttttgttttgttttagccattaagtaagccaaatgaaagttttagatttggaaggagggaaagagagggatgagattcccccttacatacaccacacacacacacacacacacacacacacacacacacacacacacacagtgagagatagagagagagaaagggagagaaaatgaacaccgatgggaaagaatccctgatggattaattggtggaattcactcttggacaaagtggaggaattactgtttttaatgacttcatttgtgatccatcattcagctggagggtcaagtgaaatacagaatatgaaaaagtgcttggaaatttttaaaattcttattcagatgtgaggtagtattctacaatttctgtcatctgctgcaggttctttctccattagaaggtatctaaaggataactgaaacttgacttgctgaattggggtttttcgtgattttgtgagatgaagtttccaatataccttaaaatgaatggttttgttcgataatctttaaagtcctatctagctccagtgttctttgattctctaaaagtatttcattaaaatagcatactatataaaaaatgatttggaagcagaagatttattgtataataagggatttagaagacactacaatgtaattatattgttaggtatgatagttttaatggcgcattggccaaaatcatatctttaacatgtgaaacatttttaaaagagagttttaagttttattactctaagtggatatatgaaaattggtagattttcattgaaatttctttgtagcattctagaatttttatatttgctctgatttgctttcttatttcagaaacttgtcaaaactggagaaaataattggtctctgcctgaactggtacatgctgtggtcctcctggcacattatcatgctttggcaagctttgtttttggtagtggtatcaatccagagagagatccagaaatctccaatggattcaggctaatatcagtcaacaatttctgcgtttgtgatcttgctaatgacaacaacatagagaatgcatctctttcaggcagcaactttggggttagttttcttagctatttttctttactatttttgctttaaacttctaatattaaaaatatctagagagaatttttctccaattagataggatattatatacttaaaatatttttgcataatttttattactgtaaaaatttggtacctgaagttctgatttattttaaagaggcttttaaagcaaatacatattactgcaaatcataaagactaaacagtgatgcattctagtgatcataggcttttaatgttagaccctttggacagtagatcccaaaacaatatacttgtatgtataagatgctggaacaaccaatggaaaacataccttatgacagcaaaaagtaaaacaattgtgctgcctcatttttttaaactaaactataatatttaatatataccaaatgctagaattgtagattttatgcacacacatatatacttataaacttcta

SEQ ID NO: 66891 - DNA, 1943 bp, Homo sapiens
aggcatgtgtccttgtgtgtgtatagagctaagtataatttatggacataagaactgaagaagcctatggccttttggataccaagtgtcttgggtatatttggaatatgttaagccacttaatgcactgaatgtttctcatttaattttcagtaaaatcatttttcatatttaatctcttacaaataaagatgcttatagcatgcaaaataataccccacaagttttgtctttgctcttgatatcttgtttttatacaaacacaagttgtttgtgacatttttcttagtaattttatacataaagaatgtcactaatttggccaagtaagaggaaagtatcagtcagcattaatggagaatctgaatgagagaagaattcttgagtgaattataacacttctaagtatagttctgattacaaactggttaactagttattcacaggcaatagaggtcagagaggagaattataaagttttgtgtgtgtcggactttaatggagaaaaagaagaacaagaacataatgaaagtgctatatatttggagaagttggggaagaaactgggctgacagggctgtcataactagccaggagttaggagattaagtttgaccacgtttgatttgattgtcttttttatagtctcactgaacttttacacaacaacaaaaagcaacattccatgttttattgaatgatgaacttcactgaggctgtaattttagcttaaggttttgatgacactaagtctgaaagcagacttagaatgcttgtaaaatgtggagaaataagatgtagagaatagaaagaataaaataatactgttttactgagaagcagccctgaggaaaaaagaggtcaattgagggctgattctgactgcataggaagaaaagggtcagtgagcttccatgtcatctgagtaggaagatgtgtacaaatatgactgcagtcacatttatcttaaagaggataagagaagtaatcaaattaggatgaatcctgagttgttagaatgtaagttaatgagattttattatgttttaagtagaatgtaataggtatatttgtcatattgaaatggacctgtatttcctattcatagctagaaagtgggctatggcttaagctataccaacttccagacaaggaaataattggcttcatgtggcaattatttgcttatacaagtatcagcttcatgtattgaatctattacatcattatgatggatgttttagaaaaaggattctgtaagaaaagaggtactggctataaaaatcattagctccatctgaattatttgtttagaaatagtggaaagaaactctactgtgattcttttatcaatgaatttttttctttgtgctttaggctgcagctagacatcagtgttcttacttaataaacatgcatgtggatgaatttttaaagactggaggtattgctgagtggttgaatggtttggaatatgtgccacaaagactgaaaaatcttaatgaaattaataagctgctagcacatcgaccttggctgatcacaaaagagcacattcaggtactgaatgtttctttgaaataaaaaggaatttgcttaggacttaattttaaatatgtgtatattaggaacttggaacataaataatagtgtcttagtatgtgtagaaaagatgagtttagaaagtcagtttaatttaagcacaaatgaatacttctcctctttaagtgatcattatcttctacaactagtttggtgaatggctatgagaaaatttggtttctatttttaagtagtagatagactaaagaaaatacactagcatgataggatgcctgggatctagtctgtactctgttacaagtttgtgtccttttagtaaattaacttctatgggcttctgttctcccttctacggaatgagggagctagattaaatgagt

SEQ ID NO: 66892 - DNA, 1029 bp, Homo sapiens
tctctaatttttacatttttcttaaagtttcaaaacttcatattagatatgcttattgctattttaggggaaaaaaagcagactgggtaattgctttgaagggttgttatgtaatcttcttcgaatttaaccttttatttagttttcaaattgatgtctaacagtatactactataaaacactattttattatggaggttaatggttttcaggcatgtcagatgtgggcttaaagtttatggtgtagactgtgactaagggatatgacattttgaggaggctgtgctgcacttagcactatggtaggtgtttgccccattatctcatccatacagtggccctatgggttttctttgatctgaaacccaacacttactctggtctcacataatttaattatttattctctttattttagtaccttagcaataaatgtgtacaaatttaacatttcttagaaagtcatcattgatacataaaacttttcttttaaaaataggataaaagaatcagagtgtctcaacccttgacaagaggaccaagtgcctttattccagagaaggaagtaagtttatctgtcttaaaatataaaaagtaagatttaaaaataacttaactgtatcaaagaatatctcctgttaatatgaaagtaggaatgaattttgcttttgagtttcttgttcacatgtcagaaaaccatggagatattttcttttcagcttcacaaatatttacagagtgccaattattgtcttaaaagaagggactagtagaaatagaataatacctgatcattgccagagtcaacagttctttcatcatcagatcacctttttagtgaccttcccacctaagtgcagatccaaagtgacagtaacatttcgggagctcagtgacaatagctgatctcggtgaggacgatgcaccatgcactggagaagctatcctgcttatgcctattttcctcagatagcctggggctgctctaagttgcctactacatataaagacttcctgaagcatagtcat

SEQ ID NO: 66893 - DNA, 1024 bp, Homo sapiens
tcaacaaatttaataaatcattttttgtttccaaaatcccattgtccatcttaacgtgagtttatattttgctccccctacatgttctctaaattttatgtattttttattatttaaagatttcgatttatctccctgttgaaatttttttcctcaaacctcataatcataatttttcctcataatcagtttttccagctgctttgttcatttgaaatgaatagttgtccagaaaattgcttttcatatactacttcgttaagtttgttgttgtggtggttttgtgagatgaggtctcactctgtcacctgggctggagtgcagtggtgcgatcatagcttactttaaccttgtagttcattgagttatacagagagtgttcgaaatttttttttctatatcttatggagactagcaaaaggaagaaacctgttattttcctttaaattatctttctgggtaagtctagatttggttgacatagacaagaaataccaatattggaatcctgacttcatcctcttaacatgcagtcctccagtgtacttgaccaggagattgaggcctttgtcataattttgtaaatataacctagaaatataaagttatttctgaaactttaccaggttaagagtattattgtttaatatatttatttcaatagaactcccaaaattgatgaagattgtgtgtacagctcatgagggcagagagcatatctgttttcctcaccctgtatcctcaaagtctatcacagtatctgattaggctctcaaaaaaatcgtgttaaatgcctgactgcctactttcaccaatttgttttgtaactggttcctaatgaagtaaaggatttaagagatataaataactattttgtgtttgataggctgtttgattgtaaggaccaaaaaagactcaggttacctagtaatggggggagaaagggagggtgagaagaaggaccctattctctgattcgaatttttatggcttgtatcgcacttaatgaggatactaaaatatt

SEQ ID NO: 66894 - DNA, 1570 bp, Homo sapiens
gtgtatcacttgcagatgctgtctaccaccttttcagtgacatcctagaagcttctctattaccacagtaactggctaactagaaatgatctttccctaattttcatgagcatcttttttctgatataaaccagggagggaaaaaaacaaagttccttcactttgaaggaatattctcctttagtactgtgcaacagctgaagaaaggtcaaatccaaaaattatgtccattataccaaattgattggttcttggctacaagggaaagaaggaccctgagtagcaaggttagtctgtttggcttgaaagctgagaagtgtgggggaagcagcagcagaaggaacaagaaaagagagagaagagacagaactattaatgcagggtactgataacaagcattgtttgaatgtgggagttcctaaataaatcctcaaaggtatagtggactttctattgtgtgtgtgtggtgggtttgcgggggtggggttggggggattgtggtacactatacacaaaagctatgacagccagcaactacctgcattcagtgtggtcttgaaggcataagcataagggcctatttactctgtctgattagatctgctgagacctataagtgactagctgtatctaacttgtcccttagacatcactgtggtaggagtacagatggcggggaggaagtggaattcactatataaagtaaatacactaccaagtcaaaacgtttagtcatgtgtccccataacagtttccttaaacctgtgtgatttaaacaatttaaaatatatatcctatataacctaaacctgtagttaccatatagaattcctatttgtctttcaaaaatctgaagaaagactgttcttcaaaagtctgacgacatttccaaaaagccttttctaatcttccaactcttccttctccttctatcctctggactgccatgatattcaattgcactgcatttattgcacttagcatactgaattataattaacaattacataaacctttctcctactaggttgcctcttatttgggatctagttaatggagagtttattgttagcaaaataggattttgatttaaagacatttattttaaaaatatcagtagtatatttatattagatacaatatagccaataatatgaaaacttttctcattttccaaaatatgtctgttcttctatggctttattttgttctctttataagaaacactttcagaagtgcaatagcaaagattatttgagaaaataatcttataatgcatttgtgcctggacttctttgtttctttgtttttgctttcgagcatttcattatccttgtggccatgaaaatatttcaattaaatatcatcacttttgaaggaaattctaatagggagcaagaatgtcccaccaagagacagggtcaagacaccagccttagctgctggcctttctcagaaatgtaaagtggccattgcttttaaatggacacatgctccacttcttggaatctgttagtgttttataagggatggctgtttttgagtagttaagggtataccttcaaacttc

SEQ ID NO: 66895 - DNA, 1033 bp, Homo sapiens
agtcatttagttttagaaatgtaaatatgtgtaaatgttttaattttactcaacttgccagaggtagaatgtccctggacaactaactgatacatttctttagggccaatcgctggctttagaagagcctcagctaatcacagtagagctggactgttgtggttttccattcctttgcatcgtattcctcagtctctgcggaaggcactgctccttcctttcctttctaaatctctctctgtctctctctctctctctctctctctcgctctctcctcccctagtttatcctggactcatgctgagctcagcaacccttgaactcattttctatctgacatgtgaaatagttcttaggtttcattaaacatttggaaaataaacgaggtacttcgctctgccacttttcaggtatggtgaagaaaataaaatggcctccctgggcagtactagatgggttgtggttgtgctggccttgctcttgatgagatagcactactgttatttctgtatataccagacctgtcactttgcattttctatttctcagtgaagacatgaacatctagacattccacatgtctatggggaactagagtgtccaggaatggaagcaaatggaaacattctcattatgcaagtgtaactttagctgtgacctaaaatgtattgcctaagacttctataagggtgaaattgaaaattttccattttttttaacctcaatattgtataatctagtcactgttcaaaaactcctcaaacttcatttttcattacttcatagggtttttttgtgaggattaaattaaaagacatatgtaaagcactgagaacagtgtctcccctatcattagtactcagtaaatgttagctatttgtgttatttttaaaagatttcatacaaaaatgtatttttaaacagcaatcgaaatttacttgaattttaatgttttgggttccctagtaccatttaccaagacagtttgttttgatttaaaagggcctcaagtgcttgataacactcagggtt

SEQ ID NO: 66896 - DNA, 1026 bp, Homo sapiens
cagatacttgggaggctgaggtgggaggattgcttgagcctgggaggttgaggctgcagtgagacgtgattataccaccgtacttcagcctgggcaacagagtgagactgcatctctacacaaaattaaaaaattaatcgggagtagtggcacatgcctgtagtcccagatacttggaaggctgaggtgggaagattgtttgagcctgggaggttgtggctgcagtgagacatgattataccactgtacttcagcctgggtgacagagtgagaccctgcccccaaaaataataataatagaataaataataagagtcaaaaaattttggtatatttatagagttgcacaaccatcaaattttcataattttaaaacattttcatcacccaaaaagaaaccttatacccattaacagaaagagttacccatttccccatccttcactctttgttttaacatctagctgctggaaactgctaatccactttctccgtctattgatttacctattctagatcttttgtaaacatagaactatataatatgtggtcttttgtgactggctcctgtcacttagcaaatttttgatgttcataatgtagcatgaatcagtactcatttctttttattgccaaatactgttccattgcatggacctgccaaatcttttgtacttttttattagttgatagtcattgtgttgtttctggcttgttttcattgcttatttttctgtccccctccatgacagaagagaaggggtctcatccatgtctgtctcattcattgctgtaaaaccacgtgtgtggctctgttgcccatctgcccatgagcttctcccactcctgctgataacagactatcctcctcaccctgcactctcacaggagcccaccaggcttgagttgccagagcccatgctccccaccacaaagaaaaaggggttcttgggccaagagaaggaggccatgatttaaggagaagcaaaggcaagaagacacaaaaggcagtcaaagggagtgcca

SEQ ID NO: 66897 - DNA, 3343 bp, Homo sapiens
ttgaaattgatactgaatttgaaattgaagtttttcgttaccaccttagttattaataaccactgaataggaaagttctattgatcatgcatctgaacataaaaaattatttgatttgcacatataagatagtactgagaatatttgcattttagaggtcatgggtgttaattagcaagagtgattggagaagaagggtgggggaatggaagaataaagtttgaaaaaggttatttcatgaaaccactttaagatggcatacagagaaggcagagtgttatctgcccgtaaaaagctaaaattagaataaaatatgaagtactgagattaaaaaagtctgtctatataataaaaattcctggaacctgtgaaggaaaatggtgttgaaacataagtcagaggatatctttttaaaatgtgttaattttagggcagtgctctattttcatcactttccccattttggctcaaactacaaaaatgcttgatcattaatgtatttgtatatatagggatccttactatctaagttttcatatttaagagactgaataaggtgacaaaggcagtcaaaatgtgaaaatattcactgtacttacacattcctcttcactaaactagtgatggatggacatttaataatgaaattcaagtcagatgatgaaatgaaattttgaatctttgtaaaaattcaagctttcatgagataggaaatgatgatgtggaactgctcaaaccacactaaaatcagtgtcagatgactggtaactaaaggaacaacaagataatgagtggttctgatgggtgctttaaaaaaaattgaatatcattgggtgcatttggcaaagtaacaaattctgagttgtttttgcaaaaatgacctcttatgcttgttctacaagagagtaaacatagaaaaaagaccttatacagcttgccaggaaatactcctcccaaatcttgattcattctttgattttattaattgtaaattacaacttattttcatagttttcatgtttttaagatgaagggccaaacaccttttccctattaaaatttggaccttcttttaagtggattcactttgtttccttttttgtaaccaattgtgcatctttggacacaattatattaataatgacatatacaaagggggctgatgagccaatctagaattttccttctgcatgttcatccttaaagagatgaatgtaaaggtatcaactctttcatttaatgttagtgctttagtgaaacatttatataaatgaaaacagtattaaataagtagtattcttcagcatgacttaataatatttcaaacatttttaatcttgaatgtttttgtctcccacaggccaaaaacagagaactactcaaacaggtcgcagcattatcaaagggtaaaaaatttgacaaaagtggaagcatactaacatctccttgagaaagtcatttgtttagcatttcttcttacaatgtaaatttggggaaaaaaaattctgtgaagcccttaaattctgtgtagtagaaaaatatttttgcacaccaaatgaattggtgtgtttcctgttcacttttgtaattgatatacagcattttttaagttgtaaaacattcaaataaaacttcaactggtttgaagtaactttttaattatttgatatccaggaacttttttgccagcaatagtattaaacagttgtaaaggagtgcatgagtagtgctctttatgaaacgcaacatgcaataatagagtaggtatggtttcagaagtcagagcagcagggtttttttgttttgtttttgttttacactatgctaatttcagacaaacagttttcaatttagaaatacaaaaacttttaaactcgaaaaatggcgaacactggttttttgggaattgtgtttttactttgcatcaagatgaatttaggagaaaatcacggtgcttttattaaatgaacttcagatatatgtaaatttgttttttaaagttacatcattaacattagtaacctagcattttcattattggtataggaattaatgtttattgtacagtatctaaggtaaaatgtgtttctgttttgtaaaaactactgtagatttttacttacaagtgcctttttgccacctaatgtttttatttataggaatgctgatcttttgtacatacattttgttttaaaatcatgtttaataaatgtttgtatataaatgcatatgtacagaagcctatttcaaaaggaaatcaaagttgctagtaaaatgtttgagattacatttagaactaactgataatgcatatagattgtagaaaattttgtgatttgtttctgtgtgataagggaagctgttggtctttgaattcatttaattatgtcaaaatagttccccaaagatttaattttaagttgcttcttaaagagtaattttattttttatgtcatgtggcttcatattagtattgtgtgagttacatgttttgctttatattttataaaattttttaaaaattttaatgtttctgcaatgatccatgtatctgctttccctatgtgtggttatctaagttaatatttatgtacaatgtaatttgtaaatttaaagcaaatctgaaaaaaattaaatgatctttttaatccaatctgtgataatctttgaataaattggaatctactataagattcaggcattataagtaaattgtcctaaagtctttaaaattgtctataaaaggttaaggtagggtgggataggttatatgaagttattgactatattctgatccagcggttttcagcctgaaatagaatttatctcctagttattatcagttcagagttttagtttgattttaaagtattgctagatacactgtatagagtgagttgcttctcttaataatttatgggcaaagataaatttgcttcatgtaaaactgttactaaatttataagttttaaaggttttgttttatacaagcattgattgtgaatgtcatatcaaagattggctttcttaagaacacatgattgaaacaatttttttttaacatgacgtgtttcaatagactgttctcatagttcattataaagtgaataccaaataattctttgtccattttgaaagcataatatagggtaattttcaagtgatacaaaaagattcagttagaatcttgtaaactaaaccagtttatttttatgggatcttcatgtaataattttcttaaatttagtactctcaaccatgatagataatgccttaacatggattttaacgtttgcaggatttgctaaattcataagatagttattacctttctttgaaattt

SEQ ID NO: 66898 - DNA, 3750 bp, Homo sapiens
attaatattatctgaagtgatggttttgatgattaatgaaaatgcaaagtatttattatagctcctggtatgtataagtgcccataggggctattactgtttgatcatcttttgtacttgttttatggtcccagacaatgtagtttgacctgtatcaaatgtattatgcagtaggagaacactaaaatcatttcttttaaaagaataaggccttaatatgaatacatatatgacttatatccatctctaagtctgtgctgagttggcttttacttctggcattcagtaatttttgatacattttgccacaccttgatggttagtgggcttaatttattttaatacatttgtagcttactttaagcaaatttagtatatgaaaattaggagtgacatataaaataggatagttacgggtgtctttgtcttatggttctttttgattgacagcattttttaaattaatgagcctttatggaaatttgtcctgtgtacaaagttttagagacaggccagatatatctgcattagccttgagaaaagttgaataaaatgccaactttactgcaaaatagcaatgatttcaaaaccaagtagtaatcagttatagaatattgactgctagatttttctttcctctctagcataagaggtactatctttgtattgtgcagttaattgaagttttctgcttttgttagtgttcctctttaaaaaaatcacaacactaatggggattgaaattagcattgttgtaaggaaaatcctaatggtaaacctaaaataactatacatttgcaactttttcttataaatctaagatgatgaagttattttactgaattgatttcacaaagttatttaatgatttctagagccagacactgaactagatcatgaggatacaaagatgaataaataagacataattcttattttccagaagttcatagtgaggaggcaactcacagtgtagtgaatagagtaattgtcttagctgatctggtgtatgttggcatttcagaacagaaaatcttttgtgattagagaaagttagagagagagaacttagttatactttgaatttgacaaaagcaagggtttttttttttaataagactataagactccatgattttctctatttttgctgttgtatgtctttcagtttattagatactgggtaattacaaaggagaatgtgtaaacctttaaagctggcataatgaaaaacattaaaaaataacctggagttccctctgcatggttctaatagtgaaattacataataacttatttagtttgaagtcatgagatattatactgttaggtatgtcatttatgaaaaattatcatgtagccttcttcctcaaagcactgatttttttcttgtatttgtctaatttagcccaaattttatagtaaccttctttcctttctcattctgtgttagttgtatttctgtgctttgttctctatttttacctcaagtgttaggtggtattgtgtacataatcctggacataaattaaaaaatgaaaacagtgtagcttttggctgaaaagaccattcctttttatattacccagtgtgaaatttctttctttaagcattgaaagattattttacgcataagctagtttaaatgtttatattgtttttactattattgaagtacatttttaaatgaggcattttcccagttattagccgttaagcttttttcgttggcataccagttgccaaactctatttccagtcgagccatgtttaggaaaaaaagaaaactgagaagttttactgatggtcaggtattaacattaaaattatactattgtgaagcagatagacttcatcatttcaccaaacaaactttagatagcttgtacaattcaggaaactgcagttaacatcttctacttttgtaatgaaatgtgagtttattgtgaaagttatttaaaatggtgtgtgtgtgtatgtgtgcaaatatatacatatattttttctttaatctctcagttaactgaactaaaggcagactttcagtaccaagagtcaaatttgagaacaaaaatgaacagtatggaaaaagcccacaaagaaactgtggaacaacttcaggtaactaccatcatttacgtaaaatgataggcaagaagggctaaacttgagtaatagcattcattgacttagattgttattggtagccctattttgtgcatagttggtgcatttcagttttgattttgactttataatcatttttaatcttgatctcattagaagttattgtttgaaattacttgaaagggggattcagtactttaatcttgaaaacttttgcctaaacttcaaatggagtttttggaggagggtatcattggagtgtgttcaattaattattgggcttatagcaaaaaattaaaaatcagattaatgaaactaaggtgaaaagcaggtcttcagtagcaatcattcctcacattaatatttccttccagataatgggaaaggagatgggtgtataaaaccaattcttaaggacctggagtggcaaaaatgtgtgcaaagcaagagagtttacttaacctgtgtacagtggttcgcaaagtgccaaatagggttctgctaaatgctaacaggtagtgatccacctgaacctcagagtactgcaaagtagcagtttaagtatacagaacaactgaatggtaaagtcaagagtcaccacagtaataatctgatgtctggcatgcagagatggtgaacatccaacatggatacagaatgctaccatattaagctgcttctcttctaggtttcatacatttagaaatcagaccacactaaattaattacatgttctctttgatttatacagtctcacatttgtaaaattagtctttagtaacaaaatttttaaggtgaaagaagttttaaatgttaatggaagatggcagcacacagacgtcagacttgggagagtacagcttcagaaggaaggagttaatactgtcctgtttcattttgttttttttttttcacattgtaacaccaaaggatatttgctatttctttcttttggttttgtattattcatacttctttgcaagtagcttaaattagtaggatttaggaacttgctcaaattcgaggtacagattatctggtcttaatccctatcatactattacaaagactgttgaaaaaggaacctcatgtagaacctgagacatagtaggcattcaaataatttgttgactaggtggtgatttatggaaatgcccatcagccctctgttctgagagattgcccgtatcatatatcagattcttatatattagtcaatgtttttatccaccagcaagtattatttttaattttatgttattcctgtttttcttactcagttattaatgctgaatgattacctggaacaaaatcttccacctggtgatctttgatttaatgtaatgtaaccaaagctctgaagtaaatccagaatgagataacagaataactgcaataggtgctcagatatgttttaacttagtgctccccactgttcaaaagagcagtttgtgtgttggtttttcttttttaaaatcatagttgcaaatacatggggtcatctttgacttagcctgatagatatcttaggcctacctcctcttggtaattgaagtttcatgtagtataaaagtaaccaatatttaaataggacattttgacatgattttacatatgctgtct

SEQ ID NO: 66899 - DNA, 1491 bp, Homo sapiens
atatcccttcaactttgttacttaagtcttaccaaaatcagtattttcagtaatattttaggggaagatgaataacttatcatttggtttctctgtcctttttactctaactattcttattaatgtttggtttcagccataaatcctctgcaacaattcagaatgaaactccaaagaaaaagcccaaattggaatctaagccatctaatggagataggtaaaaatgaattcttttagtgttatgaaaattcaacttagttgaatagttatggttgaatgccagttattactagataaaaaaatagaaacatgtattttctacattgacttgagtcacctagaagaataaacataaattagtttaaaatttttagcttaattttggcaataagaaagtggcactgaactatgttgttctatttgggaaataaatttgggttttgaagaaacaaatttgaatggagaacattatttttatctttattcttcagtgaaacacaaatctaattgtgatattttaaattgacctgcttagaaaatgtttttagattaaaaatattatgagcgttactttgttttagttcattagccaaaagtttgctgatgttactgtacaaattggctgcctattgctttacactagaagtattgacccccttaaagctaatactgaattatatttctgcaggtgtatgtaatgtgtgccattagtaaggtaatttgccagttgcatccatttctgtcaggtacatatttttttgcattagccttaaggatgtttgtggaattgtctaatttatgcaatttgaacacctgctaattttccttctacttcatttaactgtgttttacttttttctttttagtagctctataaatcagtcagcagatagtgggggaacagacaattttgtccttataagtcaattgaaagaagaagtgatgtcacttaagcgtctcttacagcagagagaccagaccattttagaaaaagataaaaaggtaagaacatggttcattgaagcctggtaagagttatgtgttgactgttgcttgataatcgcaaattttattagacttcctttaataatttggtaatgtttgttgtgcgtgatttttataagacaaattacaaaagcccctgaagccatctaatgaagatgggtaaaaatggtctttcagatttttagttctaagaattaactgaggcttaattaggatagtaatttccaaactttaattttcagtaagcatgtaatttaaaaatagatctaatacctaattaaaaatgagatgtaaatggaatatttcataaacttttttgatttaagaatgtagtttgaacagtctttgatataacattcatatatttgtatcaatccagtcatatatttgtatcaatccagatcaaaatactgctgaaaagtaatggtatgggaatttcctgtagtagtcagtaatagtaattagcaatagatgtctaaaagctca

SEQ ID NO: 66900 - DNA, 1052 bp, Homo sapiens
gattttttaaaatgcaattttagtcttcacggaaaaatcaagaacatgaaaatacaaattaaactgacaaacacaaattaaaatggaaaaaacggacatatggcatgcccattttcagaataatttattgtttgttcttaaatttttctgtgagtctttaaagtttcagatagttatttaaaacagaatttacaaacaactgatgcccacctcattttggaacacatgcagtatttttagaatgtaatgtagttctgtctaattagtaagatttgttgtaaactgtatccaatcacctattagattatgaggttacgttgaggttagtgatgtttaattctaccatgttgtagtgttttctaaatgtggcagtggtagactacaatgcagtgtcttctcttctggctgttttgaagaaaccttgtgatctttatatcagagtatttcaagaagcaaaataatataagtctaccttgtttttgcttcttgctttaagaaaaaatatgacaaaatgactatataccataatagcatatgtcagacctacttctaagactcccaaaatgtctcctttccctattctttacagataaatttgtcttagcatgatgtaaaaggacacaatcagattatgtttgtgaagactaaagtatgtgacagcaacttaattttttgaaagaatgacaggtttcaaaaataaagggaaagagaacagtattgaaaatgaaagtcttcaatttttttacttctggttacttatgaaatacaaacactattttctatttgatggctgttgaccatttgatgaacagttactttgtagggtcctatcttaagttcaatagatcagaatgaaaatgaggagcattcatattgtgatagatagtgatcggcaggggtaggggatgtggttgccaggtggcactaaggtgggtctgaatctaggaatggacaaccctcagaaagataagatgggaattccaagtgtttctgtcagtgatattaatgtgattattcttaactttgagatatggttagtgctgttagttcat

SEQ ID NO: 66901 - DNA, 1033 bp, Homo sapiens
gacctgtgaacagtgcaaacagcaatgtgcttttgatcggaaggaggaaggaagaagaaaggtatgctttatttatgttatgacatcttctggaaattaaataaaatgccaaacaagttggaaattataattaatacactactgagactggatctattctttaggtccatgaaagcaagtagttagatgaaagtgcaggaatagtgagttttctctttgtttgcatgatacatagattcatgtactatactttaaaaaatattctatggtggctattctgtactagttggctatcccacatttggttcaggagatttaactaattgcttaaatatctccttttactttacccttttgctagttacttgacatcactggtgtgaaaaaaatacctgatggcacattggcacataaaattcagttactcttgtgccttttgataaaggctcatatttgaaactgttgtttgtttttgtctacctgcagtgacttaatgtaataagtatttgtgttcatgtgataattcctttgccgatcagcattcacacaggcctcctgttgcctatcaattttagttgatttggagaatgactacctctttgaggggcttcctcaggtctccccacagcaatgtacatatcccattataagacatgtccctccagcatgtctggtacataaacatcatggaatactatggatggaatacatgtgaacaaacagaagataaaaacttggttttatttttagaggtttagtcagtacttctggaaagtctcttctttgacacaggtacgattgattctcattatttgtggtagttctttaaagttcccacaaaacagtgaatacggtagtacccaccttatccatgggagataccttctaagaccagtggatgcctgaaactggggatagtaacgaaccttactgtgttttctcctgtacatacgtgcctatgataaagtgtagtttttaaattaggtataacaggagactaataaaaataataacaaaatagaacaattatatt

SEQ ID NO: 66902 - DNA, 1062 bp, Homo sapiens
agaatttcaacaagagaggtttgtatactgaatagtttttgactgttaaagacaagtgttgtctttatggaatacttgggggttgtaatcccatgtttttatgaaagtatttttaaaaaatggtttagccccagaaattttaagttgtaaaccttttatacatggtgggagagagaatgttgcgaaaaaaaccagtggtggttaatttacagttagactttatatgagagaaggaataatactacatggaaaatgtacagccttgctaatgaaaatgcaaatgtaaacagttatgttaaactaaaaaaaaatggtaaagccttaatggatctgaggaaaggtctgtagtgttaccaactgccttccaaggtgaaaatctaataatttgttacatagaagaggagtagtacgtaacatttttaacagttccactctgagagtatatacagaaagtagcctcagaaaagaacaaataatttcttcataaataggtgtgggcattataatgttggacagtagccaagtggaaggttaggtaggcactggtattgtaatgctgtgcagtaatagtgtcaagtgtgaagattttggagctatataggaaacattaagatgttttgtttacaaaaagtaatatgcaataaaaatgtataaaaacatttgtcataagttaatttgggtaaaacaactctgaaaatatccttgtatatttgaaaaaaatccgtggtccttattaaagttttaagtacaacaaatctttgactcattttattttgacattgtgctaattactttagaaagctacataaacatgatctatatacaatttatttttcagcaaaactaacacaatttgtaagaagtgtgctcaaaatgtgaagcaatttgggacggtaagtatgtcttatgttttcatgtcattgttaccagttaatatttttcataaagctggaccttttaaaaaaatatgtactgctggctgggcacagtggctcacgcctgtaatcccagcactttgggaggccgaggagggcggatcacaaggtcaggagatggagacca

SEQ ID NO: 66903 - DNA, 1007 bp, Homo sapiens
tcagtccagcttctgacgcaattctggaggtcggcgggaatgcctagattgccccgcgctccccaagcttccattcactgtggctgtgtcgaagctgcaccctctggctcccagtgaaactgggctggccgcccctgttccccagcccttattcaccttttggcgtagcaaccaaccccggttgcctaacattcccaagggccggctgggataactgcccactccctggcctgcaaaaatgtagctcttttggtcacgtgggttcagcggcccctctaggaaactcgccagatcaggtgaggcgcgccagtgtgtttaagagacgttgcagaatagtagtccgccgtctctcgagcgcttactagtcgttgcttatgctgtttcctatccctgcagtgcctcccactcccatccacattaacttcgttgtgtgatgctcgtagccagaacgcgcgcttcctgtcacctagaattactggaacttcaatgtggaaatgcccttttggagaggcgacagggggaattgattttaaatattgttttcgcctcatcaaatgtcaccatccagtttagttactggtattcactggtatttctcaaattggagtgtcgaatgcttaggtttttgaaaaccgcggcattggaaagctttgataggaagtaaatgttggagctcttatttctccagttagcaaatgttcgatgcctggtatactgttagggtccaaatgaacagaatagaaaccctgctttgaaggagaaaaacactgaagagaaactacacgtaattagtgattactgcgcagtatagtttaggaagtgctaccgtagtagaataatctagaggggagtgattaacagtgcttgggtaggctagagaaggtttcctagaagggaagatggagctagttgcgtgtcgaaggaattgtgattgcttgtcccaagagtagagaaaggagaaaaaggcagtgcgggaattttggagtatgtgctagaacagtaggtgc

SEQ ID NO: 66904 - DNA, 2106 bp, Homo sapiens
ttgacaatattataaagaattgaaaactcatcctattttccagttacctgtaaaaccagatgccaatttgccattaagtttggaaaatgacaaatactagtctttgttatatatgaacatactatagtagacttagcacttatttatttgagtaccacttttaagacttggccctaccctcctaagctctttgtccccacttttgattgtcatagccatagtgtgttttatatttatataaatagaaaatgttttatatttgctttcttaaatcacctggaaatttgcatgatttttaacatggaagtaaaatctttaattttaaataagatttaaatacagtgcaggtatttcgatagcctttgtttcaggagattgtttactgttttaaatattcattgtgctcttgtacttttatgaacacggattattctggtaaatgtaaatcttcaaaggtaagaattgaaaaacatagtttgctgtggccgtttgaggaaggaaagtggatgaacattttgaatagctggtagtcatatcttccaccttagccctcagcttcttagttacttcccccagtctaggaccatctgtcagtaggaagtcgcctacaacaaataaaactccacagttagcatctcctgggttgaaattattatgtggaatcctaaatttaacagaatctcattcatgacagaatggtgtactgtggaaataaagttttatgtttgagtgtttgatgggccttaatgttttctaattattttcttttttgttaattaaatgtaaagtatttgaggcaaggacagtgccttattttctttctggagttttgaatactataaatattcaagtagtagtttgtggatggggaatagagtaattcagtcatttgtagcagtttctggtcctgtaaaaataatgtttttatttttctgaacgtatatttcacagtatatatttttaactgcggtatttacattcattgtatcatttaagtatttctgcacagcatttgtattcaagttgtatgaacattattttcttcttgtgtctggcatatggctatattcagactaatatgaaacactttaaaagttgtatttctttaatgattgaattgtattgtttctagtcagtggattttttctgttgtctgtatggacagtcaatctcagtcataaatatttgtgatttaaatctgctatttgtggttcacacttttgaaaggtaatttgtgtctttattttttagaacagctttgctgagccatcaaggtctaatggaagcatggttcggcattcttcatctccatatgtagtatatccttcggataagcctttccttaatagtgatctacgacgctccccaagtaagcctacacttgcctatccagaaagcaacagcagaggtaatcgagcctaacgaaataaatgttatttgtgttttcttgctgctttaaaattcttaactttgtcctccattattttgccattagaggaaaatatatttcccctttgcttccagtttcagcccccagaaaatattatgcttttcttgtattccttatattgattgttgaacatcatcatccaccaaattactgatgctaaaacactttgagtcatcagtgactgctctgtaatccccactattagtccggaatgaagacctttttttgcttctgaaatataccaaaagcatactgttttttctgcctttttgtgttctcattgctttggttcaggctttcatcatctgtagcccagatgttcatagtacattcctcattaatctccctgcctgttttctcctcctcatccccagttaacaacatttctgtcatttgtcattatccatcatctctcccacaaaattaaagctttagcatctcttcatagcttacataataaattcttaatttttcataacctagaccctatatgcctcaccagcttcatccctaacttgtcttctgttttttcctttcccatcctttgctctggctactttgaaatacatttattcctggaacctgccatctgtattagttttcttgtcgccttaacaaattgccatgaacttagctttaaatatttgttatctcag

SEQ ID NO: 66905 - DNA, 1908 bp, Homo sapiens
ccatagtaatggggtttttacttgagcacatttcaaacactcaatgtcttttttttaatttattattattttttgtgagacagaatctcactgtcgcccaggctggagtgcaatggtgcgatctcagctcactgcaacctccacccctccacactccccaccccacccgggttcaagcgattctcctgcctcagcctcccgagtagctgggattacaggcgcccgccactatgcctgcctaattttttttatttttagtagtgacagggtttcactgtgttaggctggtctcgaactcctaacctcaggtgatccacccacctcagcctcccaaagtgctgggattacaggtgtgagccaccgcacccggcccactcaatgtctttaaattgattttttaaaaaacaaatatgagataattaacattttattgttcccaaagagtgatcctccactggactcatccatcaattttattttttatttagatgagtttattctttcttaatatactttctccgcatatgctgttacagcatccacgtttgtgtttgtatttggcagccatattttctgctcttaagaatcttcaagataagattcgacgcttggaacttgagaggattcaggcagaagaaagtgtgaaaaccttgtctagagaaacaattgaatataagaaagtactggatgaacagatacaagaaagggagaattcaaagaatgaggaatcaaagcacaatcaaggtttgttgatgaagaaaattaaaattctatcaaaataagtgttgtgcagtattaagtattctaaaagaaatagtacattagtgttttgtagcggtatcttcaagtactacaaaactgcattgtattctggtgcattttgaggagcaaatgctgttgtcatacatggcatttatttactgaatgcaaggccagtttgactagcacgtagaaagaatgatttaggtaatctgaaaaggcgtccaggtctgtggaaggtgtttttattgtatacacaatagatccaattcctgttaacagcttgttaaaactattttatgggtgagttgatttctgcttttcttatgtattctttttagaactgacatctcagttgttagctgcagaaaataaatgcaatctattagaaaaacaattggaatacatgcgaaatatgataaagcatgccgaaatggagaggacatctgtcttagagaaacaagtaagtaaagcacctcacagattgatactcaagaacagttatggggaaaactaattgaataaagactttttttctttcggtgaggattaatggtgctgttacagcccaggactgaaatttcttggcatcagttatgaaatctaaatatgtgattggctttttcttgttgttattgttgtgtttcgtagagttttacttaaatggtaaaaatacagttgtgagatgtttgaaagttatgttagcttctttgagtctacattataaaaagtgtaaataaccatatacctctgtatctctgaaatttgtttaatgactccagtgagatagtagatgactttgtaaaactcttcagaattgttacttagcatagcatttttgtgctttcttacaccagagatcttcgtatttaggtgacctgtacatttgtgagaagatatctcaacatcagtctcaaatatattgattgatcaattgattggatctcactctgtctcactctgtcacccaggctggagtgtagtggcatgatctcggttcactgcaacctctacctcctaggctcaggtgattctcatgcctcatcctcccgagtagctgggattacaggcgcatgccacgatgcccagctaacttttgtgtgtgtgtgtatttttagtatagatgtggccaggctggtctcaaactcc

SEQ ID NO: 66906 - DNA, 1037 bp, Homo sapiens
attttacatcactggatatttatagcattaaaagtgatcttataatgaagaaatatattggagttttaaaaagaaaatataaatttggagagaatgttcacattttacaatcttggtgggcatttttttttatgaaaatgtttgttaaaaaattaaatgtttttggccgggcgtggtggctcacgcctgtaatcccagcactttgggaggccaaggcgggtggatcacctgaggtcaggagttcaagaccagcctgaccaacatggtgaaaccccgtatctactaaaaatacaaaaattagccgggcatcgtggcgcatgcctgtaatcgcagctgcttggaggctgagacaggagaatcgcttgaaaccaggaggcggaggttgttgtgagccgagatcacgccatttcactccagtcagggcaacaagagcgaaactccatctcaaaaaaaaaaaaaaattaaatgtttttgagtatccttaaggcttgcatcacttggtttaagttgctctctgagctaattttagttttaattatttcatttgggagatatttaataccactgataataaagttccagatttagcctccctatccctctttacattcatgcagtgctgtgttctttggccatagattttacccataattttgtccagctacctcacagatgataaataattgaacacaaaaggagagcatcatggatgccatccagctcacagcctccattactacagtgatctaaccaccttatattgagtaggataaaatttacatgttccagtgctgctatattaaaattttacagacacttaagatttttcacctttatcccttttgacatttttatcactagaaaaaaatgcaagagttggaagcaaaactccatgaagaagaacaggaaaggaaacgcatgcaagctaaggcagctgaggtaagttaaaatgtgagaaagtgggctcttcatatttcttaccgctttttgtgtacaagtaaacaattacatttaggtatcttacattatttgtattt

SEQ ID NO: 66907 - DNA, 1183 bp, Homo sapiens
gctatgagagagatgtaaaaagtgttataggtgatctgataatggactgattgattacctggcagttttaaggaagcctttaaaaataatatatttgaactgggttttaaagaatgatataaatgttgctaatacaccaaaaaaatgtcatctgcaaatatggtttgttcacaaaatggagagaaggggaggatgataggacatgaggctaggaaatgtaggttgcagctcaatgatgtgtatgtagggccttattttccattctgaaacatagttagtggatttatatcaaaggatttcaaatagaagaacatcatgatgagaataattttaggatttatatactctactttagggggtggagagttctttttacctaggcttagggaatagaaagtggtgtagagaatataacttcaattacttctttcatcatttttcttcctttagtccacaagccctagccatgccgtggtagccaatgttcagcttgtcttgcatctaatgaagcaacacagtaaagctttgtgcaatgatcgagtcatcaacagtattcctttggcaaagcaagtatcttcacgaggtggtaaaagtaagaagttgtcagtaacacctccctcctccaacggtattaatgaggagttgtcagaagtcttacagactttacaggatgaatttgggcaaatgagcttgtgagtttttgtttttttttttaaattcagtttagctctaaaacctcattttttaaaaacttgttgactttattaaatcttactttcctttgttgagcaagtatggttgagcacaatccttataccaaccaagttactgggactttaacaaatacaactaataagggtaaaatctctctctttttaaatactgttaaatgttttgaagaccaaggtttatatttaagttttatttctttgagaacttatgatatacagtcatgcatcactgaatgacaaagatgtgctctgagaaatacatcattaggcgattttcttttccttgtgctaacataagagtgtgctaagcttatagcttattgctcctaggctacaaacctatacagcatgttactctactactaaatactatatgcagttgtaacacaatggtaagtatttgtgtatataaacatctaggtagagtaaaaatatgatactaaagtcttacg

SEQ ID NO: 66908 - DNA, 1057 bp, Homo sapiens
aattaaccttgaaattaagaactcttgcatttccctctagtgcctttcttgaacttttaaattcatatttttaattaaaaatttcttgatctaggctaggcatggtggctcacacctgtaatcccagcactttgggaggctgaagtgggcatatcacatcctggctaacagggtgaaaacctgtctgtactaaaaatacaaaaaattggccaggcatggtggcaggcgcctgtagtcccagctactcgggaggctgaggcaggagaatggcgtgaacccgggaggcagagcttgctgtgagccgagatcatgtcactgcactccagcctgggcgacagagcaagactccgtctcaaaaaaaaaaaaaaaatttattgctctgttcaaaaaatggagtcattttttaaacacatggagcagtaacccataatgaggtataatagacctaaccatgaaacacagaaaacttaaccatgttctacttctgctttgtatatagtgatcaccagcagcttgcaaaacttatccaggagtcgccaaccgttgaactgaaagacaagttggagtgtgaattggaggcattagtgggaaggatggaagcaaaagccaaccaaataactaaagttcgaaaataccaagcccaggtaactcagttttccttcactcaagtttctaatgattaagaaaaaaaaaacactttaattcaaatattaaatgatgacactaagtgtatcatagataaatatctacaggagatacttctttactgaagacatttgttcattgagaattggtaagtggattaagaaagaagacacttttagtcacttagcatattcatctaagaaacatctttcaaatactgaatatatttaatattctttatgaataagctttaacttctttgatgaatttaaattggagtttatccaagtaagtttttttaaaagcacctgcgaaattctgtttccaaaggaataagtcatacattaaatatgtgaaatatatttatgttgctaatcattttatatcagccaacaatgtagtactaccagat

SEQ ID NO: 66909 - DNA, 1054 bp, Homo sapiens
gatttccctggcttttgatttgaatttgaagtggatgcaagtatgttaagactagaagctttaaattcttgatctcttcagccattctacattcttttatgtggtatcaggccaagataaccaaggtttaaatgaggaaaatggcagatgcgtttgtgaaatacttggagtagaaagcttaatttttaattactgatttgctagccacttaaatgccctgttaaaaagcttatatttcacacaattaccaaagaaatcattttggtaccaattttgctaaattggatatactaatagaaacttcctcactgcaagaccaagagggaggctaaggttcagactctctgtatagtgaattagtgagtggaaaaacactgtatattttaattgtttgatttgggtgttggttaaggaaaaatgggtacaaactgaacattttcatctggggtgcatattcctccaataatttccaaatatttctggggaaaaaaaagaaatggcaactttggacaagaacaaagtttaaaagtcagttggaatttcttttaattaaaagaccaaggggacaagaagctcctttgttacagtacattacatatggctcttatgtagaataaaatagacatcagagtcaaatgtttctaccagcaccaaactcttacttgtagcaggtgaacagtgaagcaagatttcttttactggctttgagattgtaatacatcttttacatgcagtgtgttctttggtagacttaatcgttgagtgaaattacagaatttgcaaaggaaaaaaatgtaaaatttgagcacagtacttctcactataagctatttatacagaattcagaaaaaatgtcaatcctagtaagatttttaaatacttcttaaaaacttgctaattagcttctgtgtgttcagacacacaagacaagtgaaatacactgtagtaaataattagtttttaaaatatctttcatgatgtttctggtaattgggctaatctgaagggcatggaattctttgaactcctgtatggctactttctccccttcatt

SEQ ID NO: 66910 - DNA, 1102 bp, Homo sapiens
agggctgttaagagtgtgaaaaataggtgggatttattttttaaaggaataaatgggacttgacaaagttttttacaattggttttgttgtggaaatgcttggtcatcttctgcttgatcatctgcttcattcagcttcacagccacaaaaatcaaggcctagtaagtgccctttcttgtttaggaaatctgtcatgttaccctgtctatacttgctaaaatgtaggaaactttaaggcaaagttgttttcatccatgttccatttacatgatgtttatactattttcctccactataaaggaagggatctaagatgtaaaagcttggaagcaatgtgtattttcacagtctgcaatctaaatatttatataatttcttatcacgtacagccctataattggtagaatcttacatagaagcttccaaataattctgaaatattagataggatggattaaacgaaaccttctaactttcaggggttcgtaatttttcatttgattagtcccctaaaattgtgttgtgtaaaactaagacatccagtcaagcccctggcttgggttagagagtgaattttctttttgttagatgctgccaaaatagtggcttacaagggactctggtttgatgggatggatgttccctgaaaagtttacgtcggtgcaaaagtaattgccatttcaatggcaaaagccgcaattatttttgcaccatctaaatatttaataggttggttgacttgtaaattatctgccttagatgtttacttttgtgtattgctgacattttctggagacattattggcattttgtgtgtaatccttaaaaaagaaaaacaactatgttcttgaaaatttaaagaatcttaatgttgtttgtggtcattttgggcagagaatgcctagagttgccagaattgcctaagtcaaaattcagcctgcaaatttagggttagcagatatagcagatacagaaacatcatgatcagaaaagtgataacatgatttttgaaaagaaaaccatacgaataatgccataatggcttggaataatgtagatttgaatgtttaacttcattttaaatactacctcaaaaggatc

SEQ ID NO: 66911 - DNA, 1190 bp, Homo sapiens
atctcctaccatactacatgcagtagcaaagagttaacacatatttcccgttttgtcacacaggccattaaaaaaaaagtgtacttaagggatgagatttaataaaatcagtaatttttactgcgttgttaagtacactggcataagagaaatggactttttttctttaatttaactgtgagtgtctggtagggtagaatacagtgggtacgaatgcagttttaattataagcattgccctgcttgatgcctgcaaaggcaccagaatttttatccttcataacttctgcatcattagtgcaaatgccaacacactgaaaaaggtaaataatgtcttaatattatggaaatagttttgacctcacagcccttggatgtttgtggaccacacttttagaattcctgctttggggtaaggagcaggattctgttttcagttatctgagtcaaaggtcctcagaggaaataactgagaaactaggtagatgactgcatgcttggagggtggatgtcaagcatttttgacaggttttctaagatgtgtgctaatatggttcctcctgatgaagacacattagtgctaagataggagggggtacccttcactcagtggtcaagatatgaacagagaatggtgctttctgaggccagtgtccatgtaacttatttctcagagagaaattaaaatctccaggacaaaaatctggcctctgaggttctgactgcttccatcttttattagcaaccttttaggatctgagtttattaaacagagtagtaattcatattataagcacttgtgtcagaaaatatctgagcagtttgcacatcaaaatgtttctgcttggcaggataatgggtgattttttacttactttgcaatgctctttaaaagactttctgaaaatttttatgtatttgagacagggccttgctgtcatgcaggctggagtgcagtgatgcgaccgtagttcactgtagtcctgtacttttgggcgcaagccagcctcccaccttagcctcctgaaagctaggactacaggtgcacgccaccatgcctggcttttaaaaatgttttgtagagatggggtcttgctatgttgcccagacccatctcgaattcctggctccaagtgatccttccaccacagcctcccaaagtgttgggattacaggtgtaaaccacagca

SEQ ID NO: 66912 - DNA, 1072 bp, Homo sapiens
atctttagtcaaaacaatacaataactgctatagagtattttaaagagatccagtattattgctttcaggtgcttatcccaatttggtttaagcattgttttaaatcataacaaggcttcaattgctatatcaattatttttatttaaatagatgatggaatatttgattcttagaaacagatctctttagaacttttctaagaagaatcttacaccatgatttatgtagcacccaaaggtacttttgatttggctatttcgttgggcaaattaataggagtcagcaattatgaggtttttctagttttaaaagcaaaatttatatatcttctaccatttaaaaaaattcttcttaggaagggacaaatgtttttcctcatgttattgaaataatgatccctgataagctgtattagtaaattttgaagaaggaagtatttaccttgtttaaaaacaatgtattaaaaaatctgttttccagcttattcttgcaggggctcttaggattgctgacaaggtagagtcagggaagacgtctgtggtagtgcattgcagtgatggttgggatcgcacagctcagctcacttcccttgccatgctcatgttggatggatactatcgaaccatccgaggatttgaagtccttgtggagaaagaatggctaagttttggacatcgatttcaactagtaagtaaggaaccttgactttggatatatcacatgcattcatgccaaggcatgtgaaaaaaatgtgttttttaaaataagatattcatctgaaattgatcatttatctagtggggtaaacgtttttgcttgttttggaaagcattaagatatccctaacatgactagtctggagtcagagctagctatttgtcaagtgtctgacccagtcttttctgtgatctccactgggaaacatcggatatcattcagtgatgtccacgggtgtttctgggcaggcgttttcctaaataattgaaaaacttttagaagggtctttacccagatgctgtctgtaatgtttacctttagtatccagtagttaccagagtatactagcagtg

SEQ ID NO: 66913 - DNA, 1019 bp, Homo sapiens
gaacaagttattcagactgaagaattggcagttagctgtagctgattgttccagcagaataaatattagcattgtggaaattgaaattttggttcagttgaccaaatctataggaggagggaaggagagagaagacataactacagcagcaggtaccattactgaaaagcgctcatcttttcaagtgtacatttcagtgcttttagtatattcacaaagttgtacaaccatgccactacctgaatccagggcatttttattctatgtgtttcggtgacaggttctgtatagttgttaccactgctgtctttctagaatgttgcaacaaatttgaattgaaagttcctgtcttattcccactcttcagaagtaatctttaacaggtatcccttgaaatactgtaaattctataattgtgccaaacgatttcccagactctcagtgtcagaaaggaagctgaacttctgttctttcagtagtttgttgctggttatgagttggtggttttgttgtttcaaaggtgtgggtcatataatcacttaattttgtataatttactgctccagtattttcctaatttgtttctattagggctctaagaagtataattttacacgagttaggtaggagatagaatattttattcatgaaatataaaaagattaagtccagaaaaataaggttcttctttctagccatagcttattttgaacaccaaatattttctcattctattttgtagatgtagatttaagtctttgagaacattgatgatgatagcattctgtgcttttatccttgttctgtctttttatttaaagagaattatgtggttaaaaaagaagcaggtcattttgattgcaaagagtttatttctcagatatgaagattaaaatgaggtgaagaggcagggaggtgaagaagcataggtgaaccagacatgtggtctcagcacatgaaacttacagtctggtaatttcagtatatatgaaaggaagtcatctgtaagaacttatgtt

SEQ ID NO: 66914 - DNA, 1653 bp, Homo sapiens
tgtagtcccagctactcaggaggttgaggcaggagattcacttgaacccaggaggcggaggttgcagtgcgctgagatcgcaccattgcactccagcctgggcgacagagtgagactctgtctcaaaaaaaaaaaaaaaaaaaaaaaaaggaatatttgaagtcttactgtttccttccacctcctgaatatgcttagcacaggtccacactgaatatttagtgaattaatgtctgttatattaacatcaaattgggttccacaaatgaatacgtatccctacattagaatatctaatcctgaaagcctgataccacaggctgacaacaactatcccaacactttaggagatggatagtagaggtcagagagattgaacaggatggcttctgtcctggtgtcgtttaatattttagttatatagtaatttgtcttatgtttcatttcacatgtagggaattccaaatgaaagctggagaataacaaagataaatgaacgatatgaactttgtgatacataccctgccctcctggttgtgccagcaaatattcctgatgaagaattaaagagagtggcatccttcagatcaagaggccgtatcccagtaagtaggaagtttggatgagcctttgcaagtgcttttttactcaacataatgctgagattaatgagtaggagaatggattcaggatataaatagctacagcagcaggtctttcatggggatattggagattgatttatttagtaaagttaaaactggaagaaagacttaaagaggcttccagagagtgtgatatgggtattagataactgcacagaattgcatgattcttcactgaaaaagtttgctgtgtgtattagtcactatttatttatcttattgtatattctttagtcatgatgataaatgttcttttttttttttaagtcctagaaagaacaccttacagatttataactggatcttagaaagatgagcttaaataattttaggtacaaaattcatagattctaaaggcttttagaactgagcagttttactaatatattaagtggggtttacttagccctgtttcacagtatttttttcaggagataacatttcccaataatcaaatactttcctaaatcagtatctgactaaagaattagaccaagttttccacatcccagaattggcttgaaggaaaggtgatgatttttcttagcagcctcagatgtcctttcatggccaggctttggatccaattagaaagcagagctttactgagtactgtttttgagaattataaacagagaagtatgtaaaaggtgtgttaccattttttcctcattaaggttttatcatggattcatcctgaaagtcaagccacaatcactcggtgtagccagcccatggttggagtgagtggaaagcgaagcaaagaagatgaaaaataccttcaagctatcatggattccaatgcccagtctcacaaaatctttatatttgatgcccggccaagtgttaatgctgttgccaacaaggtcagatggtctcttagtaattataattatggtttcatgaatcagctgagtttggcagggccacagtgtagtaaaaagagctcaggctctacagtggtaaacatataggttcttgtcttggc

SEQ ID NO: 66915 - DNA, 1575 bp, Homo sapiens
aactactaatcaggttttataaataaagaaatttatgacagaaaatgggctttcacagggaaagcacatatgctgatagtttgtatcagtcatgatattaatcttcagatgtaatatcgttaatctccagtggttacatcaaatactacctctttcactggcctattttgagtccataagcataggtaaatttcctgccctctgaattctgcttcatagtagagtaccttgtgtttctttcagtttttcccaataaaccattataatttccctgtctccaggagctgatgtctgatttatttttgtatcccacattcacagatcttaacattttacaagatagttccaagtaaccttatttattcatttaagtaagtagtgaacaattattaacttggttcctaaatcttttctaggatattaggaatttacgatttgctcataaacctgaggggcggacaagaagatccatatttgagaatctaatgaaatatgcatttcctgtctctaataacctggtaaaatgtttcctgtctttggaaaatttgtgctataattattgatgtcgtataaagaaacttgtctaggctgtctagaatctctacatttacatccctgctttgacatttaaccagatgtatagtgtaagtgtaacttagtctcttagatcaatttctttaggtatgaaataaaggaagctggactagctgatttctgaggtccattccagcactaacattttatgattatatgatcttgctattcagggtgtttccatgatgaaaagttacctgttgtcttcattaggatttgtaatctcctttttaattgggagccagttaacactagcaatttgggagggaggtaagggtaggcaaaccctgagttcccactatgtgctttagacagtgttagactcccacgtttatatcatttcacttctatgtagcctatggtggtagatattatttatccctgtttagcgatgaaagcaacatcaggtaagcagttaactcaagggcacagttagtaggagtaccatttggaatcaacgttggtcttatgactccagttcaaatttttttcacatcatagttgtgtttaaatgtaatgtctttatttgaaagtaaacctacaaaggctaccaaggataatctgaaagaaatacaatgatatgttggtatttgataagttttgttggcaagtgtctttgcttttttgtatgcttaaaaatatgtaaaaaaatagattttcaaaatgataaaacaaaaactataatacaaaaaaggatgctaatacataaaatgttcttgcagataaataaatgaaaactttggatatatggatacatttctgattcattacctttgtgaatatcttttttagctcttaccattgtttacttttttgtagcctctttttgcttttgaatacaaagaagtattccctgaaaatgggtggaagctatatgaccctcttttagagtatagaaggcaggtatgtactttcttctctttcaattttagtattttgtattcttttcattccaaagaaaactgggtggaaccatgtacg

SEQ ID NO: 66916 - DNA, 1325 bp, Homo sapiens
ccagctaatttttttttgtatttttagtagagatggggtttcaccatgttagccaggatggtcccaatctcctgacctcgtgatctgcccatctcggcctctcaaagtgctgggattacaggcgtgagccaccgtgcccggccagtttttctacttctaaaacaatagtgtggaaaagttgatattgtagacttttcttatgttcttatttactggcattctttaaatgcgttgatacttgaatgaaacatagattgttacatttttaccattaagtcataggtatttaattctacgtaccacttctccaggtcactgttattaaggcctaattaactaacacccatgcacattgagattctacatcacattgttcctttctttttattctgccagtgccaaaagaaacagcatgtgtataattcaagatactttgttatgctaatcttagaagttttgtgactctggtattaaagctaatgacttagtaattatttttgtagttttctttttttttgagacaagagtctggctctgttgcttaggctggagtgcagtggcgtgatcttggcttactgcagcctctgcctcccgggttcaagtgattctcctacctcagcctcctcagtagctgggattacaggcatatgccaccatgcctggctaatttttgtatttttggtagagatgggtttcaccacattggccaggttggtgttgaactcctggcctcaagtgatctgcccgccttggcctcccaaagtgttgagattacaggtgtgagccactgtgcctggcctgtggttttccattatagtcagaagggctctgtgagtgtaatcgctggcaaccatgtgtcaagcacactgtttcctgatcacttttctgtagtttaagagtaagtagtgcatagaatataagacgatgtgaaagaagataattttgaatcttaatcattttaaatataatttctttccatggaacaggatcgttatcaataaacaaaaatatttgtagggcccctgacatggtactttcagagaactctgtggttaacagaatgattctgagtatctcacctagttataaagatatttactgagggaaaacaagatatcagcttaggttcccgcacatgtttattttaaaagatagtaaagccagcattctagttttggatcatatactgtcttacttatgtattgtgggtacactgtagtggagaggctttgtgtgtggttctacaaaatgaggcataataaagctattttgaattctgcctaggtaaaaacatttaaataaaatgatcagtcttaaaattattc

SEQ ID NO: 66917 - DNA, 1082 bp, Homo sapiens
ctttgcattgccttttgtttgttcttgaaatttccttgtttgttggtctgataatctcctatcttttgagactcagtttgaatatcatctcctctgagaagtcttccctgaactttctggccagaattggctgcttccttttcttttctcccatagatatttgtatgtatgtggggtgtttgtgtgtgtgtgtgtgtgtgtatgtgtgtgtgtatgtgtttctatttagagtcataacactgcaccactttatttacttgtctgtgtcacaggcttgtgagcttcatgaacatggggatgatgtcatatttattttcaaatcacagtgcctggtgtagtggttttgtacattggaccactcagtgaatgttctttggatgaatgaatggatgggtgaatggataaaaagaaggaattagcctggagtgtcttcatgagtattgggagtctatccagagggaacttggatcataagaatacttgacccagcaggaatagtttgtaatttgttaagacttagagataagattgaataggcaaagcagaacttagttggctgtggaaattttaataaatattggagttatattaaatacaatgtctgaaattggtctttgaagcccccatttttccaacatactgtacttttgtattttgtagtgcctccacttctcattcagagaattcagtgcatacaaaatcagcttctgttgtatcatcagattccatttcaacttctgccgacaacttttctcctgatttgagggtatgtatactattttaaagttctgatgaagtactttctgttaaatatttgtggccaacactatcaatataactaatttagcaggagatactgatggagtattctcatagatcccggtctacaaaatatcccagaataggccagcaaatttggaatgcttacttatttgtaaaagaaaaatgtgtaattcatctctgaggttgatcacctctaagttctttgccaaaagatgattaatgaattttttgtggtataaaagatttttatgattattctcataataaccagtaatagctaacatttattgaatatgtac

SEQ ID NO: 66918 - DNA, 1125 bp, Homo sapiens
aagagaattagtagttgaagaaaggcttggacagagaaaagtgggtgtaggaaacacaaagtaatatggtaatgaacatatgcgacagagtgttgactagaagttttagcatttggaacaaaggcccaggttgacaaggaaaacaggaatgtttggatggactgagatgaagtatataggcctaggaaatctggggaccaaaatggtatcggttacttaatgaggttagagactgcagtttctacttcaagttcaaatgccttgctaattacaagattcttattatttggagtttgtaattttaaaaagaggtggccatgtaactgaagttctctagtctaatgtgggaagtgttaagtgcagttatagacaaagtctatgaaagtgtagaagactgagagtttagttccaactggaagaccttcttggaacactccaagacttcttggagaagttagttttttaaaccaggtcttaaagggtaggtaggatgttattaaatagattagggtaaaggaacattctattttggaaaggcctgaagcagaggcatgaattttgggaaatacagagcttgtttgtggaacagttcataaaaaataaacatagagagcttgacttcaagatgagcaagggagaaatggaaaaaaagcagtggaaattagcgtgtgttataccagtagccatggtgactacaagcatgcacagagccagtatgacagaagaacacaaacaactacagaaaagagaactatgcatcctactgtgcccacggccaccttcagtctgagtagctgctaaaggcagcactttacgtttataccagaagttttaacagttctgctgcacctgcatgcttacttgctctctcatgctctctctgtctccctctctccctctatcctgtgcactctctctccctccctctctccccctttctctctctctgtgtgtgtgtgtgtttctgccgtaatcacaagaacagtactatgatgtattcccacactgtacccctccagttcaatatttgcctggagagtaaaaccctttgtagactggttatacagaaatatacattagtgcttattaaactataacactgtggatcataatatctacctatgt

SEQ ID NO: 66919 - DNA, 1050 bp, Homo sapiens
tgagtaggagaaaagagacaagttatttgcactagtccagagaagtggtgttaggatggtaaaaagtaggatagagagaagatatacccaagggatggtagggaagtagactgtacaggactttggatagattggatgtgatagctgtgtgggagaagaggatggttatggtttaaaaaagtcacttggggaatgggagaatcattgagcactgtgttgggcctagctgatgtttctaatcgtaagtcctaagtggccccagtttgaagatttccttcactagtagccaagaaagatggttatgttggtccacatttagggattagcaggacagtcgtggctaatggatacggatataaggacactgatggttaggaagggaagcgaagtgggcaaaggagagcaatgaatcatgaaggataataaaaaatggaggggttgagggtctgggtgtctctactaggttgaagatgagatgaagggaaagttaagaaagttaaatatttagaaagggttggcatctagtcaaagattaatttcctcaagtttaagattatagtggcagggtaattcccagaagtgataaagtccaaggtgtaatgacaagatgcacattgctgaagtgggaatgtgtatgaggttatgtaggaattgaggaattttgagctaggttgttgacagtttatctttatggataataaaattcccataatgatggcagctttggagtagaaagaaatgctagagaggaaagtgagccagatgagaaaacccttagtgagtgaggaggatgggtgggtggatgatagtaacaaggaggttgtatactgaaaagccataaaccttagaggaagaaggtttttatatgtgaagatgcaaaactaatagtaatgtagaagcctgagagttcagctgggaaaatgcttgtttcatctttgggcgttgttacatgtgggaaaagaaaagagtctcttattaaagtctgcagggaagtggattcctgtgaggagaggttagttgaggcagaggtgaaggggagaatcctgttga

SEQ ID NO: 66920 - DNA, 1319 bp, Homo sapiens
cttgctttttgatccttattaaaatattttgatccttattgcaagattttataatgcatcattatcattttataaatagagaactctatccccagtatttagtacattgatgatatcagtaaatgtttgtggaatggaggggaggttaaaaaaaaacaaaataaaggagatttaggaagttcctgctctagagaggacaggagggaagatggctgaggcctttagttagaggtggaagacctcagtctccatccttccgaggaagctaagttggtgttttgaggtgtggaatatttggatgtgatcagtgaacccctgctatctggagacagatttttctgcctttgcagcattaaaagggattcttataagtccagagtttgagtcagaatatgcttctgtagtaggtaccaaacttcatttgtttagacataatcttaatttgaaagtttcttaggaatatttgtaactaaaaacaaaatctacatgaaacaacagcaaaaaaataagtgaagagtgctttgtcttatttattgattctattttgaaaagcatatagagagtaattttccccccccaccaataatgtttgtataactttgttcacctaaatgctacactttgaaatagtagaacttttgagaccaaaagagtggatcattgcttttaagaatagtgtaacaaaggaaaaaaaccctttgttataataacagcagagaaaaaaatgtgtgggaatgactaagaatcagatgatgggattactgttttgatcttatggtggaaagaaaactctctggctgagatggtggcaggactattagaaaaccaaggcagactagtgctgtactatattattctgttgctataaacctaagtcttattatttcataggcatgtgtatatgtatatattccagagtgctggctatactctgataagttttgttgtttttgagaaaatattttctttatcaccacttcattcatttctaagggttccagtttcaatctacgtatagataaccccctcacagcaccattaattgaatagagtcctttccccaatgcttgcatttgtcagctttgtcagatcagatgattgtaggaaggcagcattatttctgggctctctattctgttccattggtctgtgtgtctgttgtttttgtaccagtatcatgctgttttcgttattgtagccttgtagtatagtttgaagttgggcaatgtgatgcctccagatttgttctttttgtttagaattgctgtggctattcgggcttctttttggttccagatgaattttagaatagttttttt

SEQ ID NO: 66921 - DNA, 1054 bp, Homo sapiens
tgaggatcctgcaaatattctgacaataagtcttttgtgtctcaaatgttttatacacactgcaggccttttattattttttttaaataaaatcttcaacagaatgactaatagagcatgaacagtgcttatgatactatagtgcattgtgttaagtattgagagcaaaatttgcgttcctagaaaagcttgttcacaatcagaatatagaaggcatgctttaatgttcttgggcaaacatgctgtgtatgtgctcaggacattacttacaagaaaatcactttttaaaaagaaccttttctttttacggaatattgaagaaaaattgaattggcagcaagagtgaaacagttaaaggcaagtggtttagatcttattgtaatgactatggtcagtagaaatgcagcctctcctaaatcttctagaggcatttgtttactaggatatatgaaaagatagatgacttgaagtttccaggttgttttcactttagagtatatactctaaagtgtatatactctttatatgtttgttcatctgcatctttaattttcagaaatactttttcaattttataaaaaatatttttgttaaattataaatattagattctgttcattgctgtgaagtaccttcaggtgttgctgtgattgacaataaagtaatgataattccattaacactcggccaaaccagtggagccagaaagggtcaatacttttctaacggttacattgaaaaatactggtggtgaaattggttttgtgattgaagttttgggtctgtcttctgattgactatataaaaaatcatgtagggtgtgtgtgtgtgtgtgtgtgcgtgcatgcgtgcgtgtgtgtgtgtgtgtttatatttaaaaaaatttctccccaatatttgtgctttgtattatgtgattcatcagttaactaaaacttgtaagtttaaaagtatgtatattcaattttcctagtgcacatgaagacattttacattatagagctgaatgaaaagtacttttagggcctagtgctttgcttaattttaatttaat

SEQ ID NO: 66922 - DNA, 2444 bp, Homo sapiens
ttaggaatcggcatttaacagttgaagaaccacccatccaaatgctgttggatgctagtctagttccaaaagttttcagatgtggaaatagatctagagaactctaataatttaccccaaagcacaataaatgttagagggccaggaaaggttgtggttttcctctgaggtcatagagctatttagtgtcagagatgatctcctaattcccagttctagactttaccatgtagcatcatgatttttttgcagggccatataacttcactgtatttcctgtctatagaaccctctgcttataggatgtataagattataaccaatccatcactgttcctgaaaaaaataagaggacatatgggttatgtaaatgaaaaacatactgtttcttcatttttagtcagatatgtgactcattctggttttgaaatcattggatagacttggtgaaggaaagaaaaaacttttttttgtatccatgatattatttctacctggatttaagtttcatgcttacgaaaatgaggatctgatttcattttttgagtgaaatagtaggtacaaattttatagtgttttgcaaatagtaggtgcttgataagctatactatgaacagtttactgttaaaacttttcttcatttgtattctgtgaagtacgctagttaggagtgattttatttgcttcatacagaatctgatgctttatataccaagccagaaactttaaataattgaaataattttattgtatttataatactatattttatagttgatattcacaagatctctgagggactgaaatttataaagtatttttgaactataagagtttgaattcgttttagtattgtgtatattttatattgtattatgtatggtatattgatagttactgatttgtaactttatatgagtaaatctcgttatcttaattttggaaatactctgtaattctcaaattactagagagtttaatgatgcaatgcctttttttaatatttcaagacatttttattctatgatttttaaaaaacgtcattttaaaatagcctattgatttctaaaaaattattatatttttcaattataaattttcttttcattaaaaacttttttgttcttttcataaccatggaaacaagattgtacttataagagctctagaaaggaaccttatctattatgtggttttctagtttatgatttctaacaactaatctggtaaatagggaagagtattcaaaattagggagagatatccttggcaggcatggatcactgagtactgtcagtattttgatttttagcttaacctttctggactacaaagagaaagatgttgaatgctctacctttcctactgagagttttaacttagtaactgaaaaaaaaaaaaaaaacccacctgtgttaacttcatttatatgactttgaagtttgtgcagaaaagttgtatctcattacattgaaagggtagtgaaagattaattgtataataaacagttttgcttgtcttggaaaaacaaaatatatctatctggatagcaaaaataatggatatatgactttctaatttgaataatgaattcaggtttgcaaggtggagtgagaaaattacatgacagatcatttttcaagacataaatttccctgttttctatacttgtccaagtaagtgtttgttgagcaagtgtttagggaatagatcaccttctctcttttagtgtttttgcctgtatactttagtttgggatggaagggttaatttcagagctctaataatctgaccagttttcagtttagtttgattcttctctcagttaagtgatatttaaataactttttccctcttggctacttatgaatctgtgtgttttcatttgagctgtcatctgaatttgaatcggaggtttttgaagagattctgagaagctccttaaacggggtgctgaggctgtgagattggtgctggaactcaaggtccttcctgccctccagtcctcacccctgtctcccagggacacattcattttccgcagaatactttggctttcacctctttatttatttaaatttcccaataagttctttgaagaaacaatactctggagaaaaaacagacatatgtaaattattttctatacaaactggttgttcagactctgctgcattatgaaatcatatgcctgtgttatattttgggaaatgtaattaatagacctggaaataaattgataactgtgtccagggtcacatgtaccttagaaccttgggattttccaaactaagtgccaacatgcaccagttggaaggctgtcccagagctcaaatctcctttgtttctcggaagaatacaacatgttgtctcttatttctgtcaatcagatgccatgatgatcatttatataatcgtttttatcttatgaattggctaagttt

SEQ ID NO: 66923 - DNA, 1083 bp, Homo sapiens
tagctttattatgcaaagctaattgtgcctgtccctcctaatatgtttctatataggtaccaatgttgtcattaatacaaactgttaataagcaagcttcataattcttcccttccccaagtacataggacctatggccataatcactggtgaatatttattctttcaaagactcttactttgtgtgaataactcttgggctctttaaatatttttagtctagagtaaataagagcaaatgctgtgtattaaatatattaaaaattacctgtaaaatatattttaattaaaaatttaaacactgttatttggaaaattcttttttttttttaagttctactttaggtttagcagcacataacaaaatacaaactgacagtggcttaatataggagatgctaaatttttttccacatgaaagcctggagatagtcaatacagatctaatatggtggatctgaagtatcaaggacccagattgtcttacattccagggttacctcatgaaccaaaattattgttggaactccagctattatatcttcaggaggaagggaagaagaggagcatactctctctctttgaaggatacttttttggcagtcacatgtcattttttttaacttacatccagttggctaaaacatggatggtcccatggccatacgtaggtaaacaagaggctgggataggcagtctcatctgtgaggcctttgtgctgagctaaatttggaggttctgtcactgaggaataggagagaatgggtattggagtcatagcagcttttccccttgggtacagatgaatcatttaaaagaaagacattttccacctaaagtctgcaatatttcacttatgccagagacacccttagagctgcaaatgcgatgaccaaaatagaaaacacactgaaagagaggaggtaatacattgctgcagaccaaaaaagagaattgtatcttggagcactctgaactcttgagtttagctttctatttttttgtgtcttgtcttgggtcagatttttataatcctaatctggaaccataaaatgaaagtggtacatttaatattgacaagat

SEQ ID NO: 66924 - DNA, 1111 bp, Homo sapiens
gtctcagaactgtaatgagttacacagcagaatttgacattatattggtaataatctgccatcttagtctggttttccatttttcagtttatacactattataaaatgcactgctttagtgggtttctttgattagtttgtattgtgcataatcaaatggtaagatatctagtgccgaataggtgctgagtgaacatctaaataaaagaatgttgacggaatgttcaccactggtcttgtttgttgttcccattcaaaggattaaaaaggattccttctgttgaatttggcctgaacacttgcaatttcaggtctaagctgaagttatttttatgggagactggacatcttgagctgattttactgttctgtgcccagtcctacacacaatgaggttattatgtcctcttcaactacctatttatccatctgctactcttgattacttttgccccttttgctctaacttgtgttgttagtcgttttaattaatgtgtgttcttgtcatccttcatataacctcaggctttagttattctgggtaccatacttgtttatcccagattatttggttttatcaatttgtagtatataatttcattagcattgatgagcatcttatatttacatttaacttccattaaaaaaatcaaagggggggtacacatactcaaagtagttctcaactaattgcatttataaattgcatgcctgccttaaaattatcatcatttgaaaacaggaattcctagatttctgtttccatggattttgattatacttatagcctgaagaagtagaggagtttcctagatttctaaaacacattttgttgcaaggtctcatctttagttttagcctcaaggtcacttaagagtgacgtgttggaggccaggtgcagtagctaacgcctgtaatcctagcagtttaggaggctgaacagtttgggattgcttgagtccagaaattccagaccagccagggtcacatggcagaacactgtctctgcaaaaaataaaaagttagctgggcatggtagtgcatgcctgtagtcccagatacttgggaggctggtgtgagaggatcacctgagcctgggaacgttgaggct

SEQ ID NO: 66925 - DNA, 1015 bp, Homo sapiens
ttaacacagtagattttatgtcctttcctgaaaggtaagtctgggacgatgaagccttatccacatcctcttaccaaactctatctttacccaggcatttgggtaatacttgttgtaaataataattttaataagagctagggggccttcaggcagcaaatgcccagactagtagttctccacatggtagtctcagtcttgaccattctttctagaacctggtgacagctcctctgtgaaattaaacaatagacttcatatataaattaggacttgtcagttctagcctccacccaggcaaaagaaatctgctgtgatttcaggaaaagcttttctatctcttgaagttctcagaggctttaggagtagagatccatgccagttccagactctcccttgcagctcctcatgagctgccctttgaaggccactctggacttcccctgtgccacacagggaaactggggcagatggtcaacctgggcagcatattgcttgcagagcctatctctatgtgtgggcctggtcaccccaggaccaacaaaacaaagctagagaaggacaactgggtggtccactgtgttagggaaaccaacacgtgtcaacagactatgagaattaggactctttcatctgtaaataaactatgatttttcaccaaatcttggagtgtataggactcttgtagcacctattatccatgtaattcattttagcaagaattatactctctcaaacactttttctgtttagccttgccttccccacaggacttggaataccttgagaacaggaaatatgatttatatttcttttgaatactaaaaccacagccctggaaacacaatagataattctccttgaactgaattaaaatggaaagggatataagaattagagaccaccccttgaagcttggaaaaggtaatttgagggtaaaaataatgaaaggaaaagaaaacaaaatgtaatcttaaattatcaggtagcaagtttacagaagttcttacccaca

SEQ ID NO: 66926 - DNA, 1054 bp, Homo sapiens
aaaaaaaaaaaagagtcaatcaaaactgaaattaagaaagcttttagaaccagaaagttcatataaggcatcatttttaccaaagacatcagtttttccttaggcacaaaagtaaactttgtttcttcttaaacgtgtaaaaatttgcatggacaacatgagcaaaacacctgaaagtttgaaaacaaagtgcagaaacaaacctcaatgctcaactgtattagctgtaagccagacgggaatctttccaaaggagcaacaaagaaggtagggatggatgaaggaagacacatctttgacctttgagaggaaagaaaagaaaagggttccgatggccaggcaacctccagccatcagtcccatcagttagaagagcagaaggcagctcatcagaagcagcgacatttgggctactgcaagagcaattattttgcttgccaagtcaattcagcctgtgagctacataggctctagtttaagcaacatgaatcatacaactgctctcattatcatgtttgaaggtgtcccttcacaagcctgctgttttaccacacagtactggtctgcctaaaaaacagtaaaattgaattaaacttagcccgagcctcttgaaggcagtgactatgtcatatttatatttgtaccccaagtgcagtgcctgaaatgtgttagacattagatgctaaatgcatgatgctaaatgcatgttggatgattaaacaagtatagagcatctgcaatataccaggcatcatgttaaggcccggggatggtccctgggagttcactcacagtcttgtagaaatgagtaaatgaatatattggtaagtttgctgcattcaagtagactgaataattgttactaacaaaacaaggaatggcaacaattaggtcactacagtaattgctcaaagcacaattaacagactggagcattcaattatgtggcaaccatatggttatgcatttcaccatgttgacatcatactgtaaaattcacacattatatgaaaagaaattacgccaggaaagtacaggctaccacaaagtaaag

SEQ ID NO: 66927 - DNA, 1047 bp, Homo sapiens
ctaatgaacatcaaagatttcaacctaaatacattgagtgcccagtatgtgaagggccttatttatgttgttttaaagctttttaacatactttaaagaagggactggttaatctccactgtctagatccattagacccggagccggatggccccaggggcctttgggaatggcgtggtgggacagtctccacttttgcacatacccaagaaaagaatggtcctttgggaattttgcagacctacaatctggagataatgtacttctgatcataattcaagtgcccccagatatagggttgccagatttagcaaataaaaatataaaatgctcagttaaatttgaatttcagataaacaatgaattatctttcagtacaagtatgtttcaaatattccatgggacatacttataacttttaaaaacttatttgttatttatctgaaattcaaatttgactgggcttttacattttatttggcaacctacccagtcaggaattggagggaaaattttgagatttgaattttttggcatacataaatactcttctatgtgaagacctcaaataaactaaaaaacaaaaagaaaaagtgtcagtattatacattcccataaaatatgctccattttaaaatgagaccaatggggcaggaagttacctcacaaaagtaattttgtggaaataatataaaaatctctgagtttttatactttatttattcaagaaattctggccttaaaatagtagtcagttgacccaagtaagtcacttgctctgcatcaagataaaaatgcatttcatgctgtgtacgctgaggataaaaaaagacatgctgaaaactggatttccaagtagtgcccctattaaagatgacaattaagtggggttcaccgaggatgcatggtgccttaggattgaattataagaatgatgattgtttttggagttggagtcaaatatcagcctttaaaccaagtcaaagccagggttacagctgcgttacagctgccttctgtcactgacactgctgtggaaaaattcaa

SEQ ID NO: 66928 - DNA, 1041 bp, Homo sapiens
ctagcatataatagctcaatgaggaatgatcagcgacccttgtgaatccagctggacttcagaacgtagaggacaaatgttggttggtctagtgggttcatgacttaatgtgttcctcttctctttaaattgtaggccccagatacatttctcacatgtttaaagatttctccagttagatacttcaactaagaaatttttagttcttcaaggcaaaaggaatcattcattagtgtttattttcacttttggagaaaaagattgtagcacacaaagcctgcattttgtttttgttggtataatggcatctcatggtttcttgatattcttctatttcccatgtcaagtgttctaataaacgttgtagaaaacagtattaaactcacacatctacaaaaaaatgtgctaaagagtgagtgcccttacttaatttctggttaataaactaatgtgagattaaaatagacaaggagaactgtaattgcatttttggtgtggacagcaaggtctgtagagagcacaaagtttaacaggtctgcagtgaatgaaaaagaaaaacccccacaccttgacagttaacatcactttagtttatggcttgtttagttttaaattttataagtgatcaaaagttaaagtttgtggattacacgatctttcattcgcccttgttgatggattggttcctgctttcctgagtttttaatggaaacaattatatcatataagaaactatctcacttgtttctattccctggcatcatatatggaaaaatacagcagttagttgaattgtctgctagaaagtggcctttaaaggaaaatataagtggaagaaaatttgcaagtgtgtacattaaggttgaagtgaaaaggggaagggagaaggaggaggatgactgaggtcacattccaatttttgaagattatttgctaatgttcatgaaggaagttacagttgcctctgaaatgtagtacaaattttttgaggtcatttaaacttgtattataaaattcaacatgattagagattgtagggaa

SEQ ID NO: 66929 - DNA, 1150 bp, Homo sapiens
ctgacacagtaatgttttgatatgcttgtcatatttacagtggtcacaatttcaatttttcctttttctttttttttttggtttttgttttttcatttcactgtggtcatggtgacccgtaagccccagatctgtttgaagaacatatttcgttgaattacatttgatttaatttcatgttttcattgaaaaaatccacacgaaacagccttaatgattttaaaatgttgcataatgttatttaaaacattatccactacatttttgtaaagcgcaagtgaatacttacctttagagttaattgcttgaaaagctttgctacttctgaggctgctgtgtactttttctgtattaattaagaagtatgtgacaggaatatggttctttttgttttggttgtctgaagttttacagccaaatttaagaatgaaccataatttttataaataaaattaaagcttgtaaaacattttatgttatttttatctcaatcttaacattcggatttgggttctctgtggttctgctgtttctaaaaatattttgttagacttgataaaattcctacaaactgactcataatttagtgttaaaagggaagaggtagatagacatagataagcagatatattttgcattatgtaaattatatagttaaattgatttttcctaggctggtatgtaaaaaagtaggaattatacaaatatttgctattattatcagtggctaatttgaccaacacttatactgaactagcctatgattatttttatttgtactgtaaatgcagctacagaatatatcattttattaaaattaaattttagttgctatgatacttgagagttaattacatttgtgatatgctctattgggaatgcaaaatctcatatgaggcaaaaccaaaattagaatttctgttactctcttcatagtgatccattatctaactaacactatcaaggatggggttttgtgagtgacaatggggtgtgaaagaacttatgaatttattcattctataattaatataaggtaaatgaacacatctttaatatatcaagatctaatatggctccagtataacttttaactaagtttcatcataatgtatcataatctattttgatataactataatgagatgag

SEQ ID NO: 66930 - DNA, 1050 bp, Homo sapiens
gccttataaaagagtgaggaagcaatgatttatattcttaggaagcttacaacgaaacataatacagatatgtgaaaagaactaacgtggatggtttcagatggttgagaagtcattggaggaactgcagtcagcgtgtcttcgagggagatatctactgatgggattggtgtaggaagacagtctggcagtacagggcagcagggacagcactgaagcagaaatgaataatcttcataacagggctgacaaattggtatatttttaaaatgatagcagttaacaaatgagaaacgaggggagacctgggaaacacgtactgttagttttgaaagttagcctaaactatcccgtaagcttcatggggacttttgcctatcctatatttgattcactgtggtttctgccccttgaattgtgctgggtccttgggggtgcagaatcatcatgtgttgagtacaggccatgacagcaatgcagcacataccactgcacattttaagacctgcttgtggttcactgtgaaggacgtttttaagcttagataattgaaacacgagaatttaattataagttaaaaccaaaaaacaaaacaaccagtggattccgtgtcaaacaaatgctgttggtaattaatgaagataatgaaattgagtacttcagaaaacgaaccaatagttttctagttagtaaatttactgattgtcaatttctgaagcatcagttctttctctggactcacttgtatgtttattgtgtgaaatacaactgtatttttgtggttttatatcgtatagggtaaaagcatgtttcttaggaggacgacagtattattagaaaatgacttgaatttcaccgtaaaaatatgctaaaaatataaatttcagtagttttattttgttggtaggcaagtctgcaaaaaagaaattaattaaaaatatttttttgtaggataagtcttgtgagagattttaggaaggataggaacctctgaccccctttaaattaaaaactatctttaggttatttggagaatgaatgcattgggtg

SEQ ID NO: 66931 - DNA, 1035 bp, Homo sapiens
agctgcagtggactgttgcctccagcctgggcaacagagcgagactctgccttaaaaaaaaaaaaaaaagacaccgtagtgtattcagtgtattaaaggcaaatgctgtttaatgaaacttgtttctgttttataagtacacatgcatgaggatacaatatcagatttgaaaatgtagttattactgcgagtcatggtcaaaataaaaaattgaggtacattatcttatgagttcaggtgtgtgtctctagcatgtatatagtgaagcctgattcactttttattccaaaggtatgtgggacagatcacttggagaagagagatggtttggaggtcacagtgtttgtggcatgagacacattttataggtcttatgaggcccttcaaggtagaacttggccagccccattgtgaatagctcttgaaggtggtcatagccactggatctagcatctgatactaaggtcaagaaagaatttatttagttcatgaaagcagatattttctgtgcaaatgcatgcctttgacataaaccatgtcttttaattttgttctattaagaatatttcagacttttggaggagtatagcttggttgtcagaaaaaaggaagatttactcagataaacaaatttgaaacagcaaaatgccaacctgcaaagtttgaagataaataaattggacaaggactcaaacacaccacgaatagaaaaattaaagttacatataggtagggaaatggatttcaaatggtaaaataaaagtgtatttctgaacaagaatttaattaaactggaatcatctaccatgtggtgcatagtaattttttactaattctcacagagtaaattctcacttagactaatttctcacatagtaatttctcccttcatgtatattaaatgcacagattactaaaaaagtgaatcctatattgagtaaattatcatgtaaattagtttcttgtttatgtaatggttcagtactttatttaacgtgacttatttaaatatgtattgcatttgatagatttcat

SEQ ID NO: 66932 - DNA, 1085 bp, Homo sapiens
ttaggtgaggattttactgcagattaagactgtaacaggaggatgtatctactttgagctctgttggaagttttggccatgataattatttaacatcagtctccatggcagcaaggggaaaagctctaggcaaacaaacagatggattcagaggaccttaagtgatcaagtccggtaggagccagcagctggccttctgtgggctacttattagcattttccttagcttgttgtctgcctgcacttggcagcaagctggaggtcagatttgtgatgcaaacacatttgcatccaggttctggtatctactcactaactcacaggtgacctcacccatatctctgcctctctctttcctttttttcttttattgtgtgtgtgtgtgttgtgtgtgcaggttcaaaatgacaggtggtaaaatgagcagcaaaaggatactcttggctataccggctcttcctgtctttcagatattgcacatcctgagcctgttgttttacatggaagaaaaatgaagccccttcacacattcatagagaagtgtgcttgaaaagagagaagaagcagcagagagtgcttagcagcaaggctatttactacttctgtatcctaggcagttttccaggctgtagtttcacccccaaccttgcctcccctgctgaatgtggctggtgccaaattcctgctattggctgagtcatcatgtcctagttgatctggcaccgtagtcaacatttgtagcttttaccattgttgctttggagctagatcactaggttagattataggctagataattaggttttcctaaatagagaatctgctggtgctgaaacttgccccagaaggcacaccgtggtggttattcacgtagatggcctggtgtatgtgagatgggaaaatccagtaagtcactccttaattcaattcagcagccttttactgattgcccagaaactggatgatctggcagaattaaatggattattttgtttaaaacctaaagcaaaaagtttaaggtgggattccatatgtaagttgttcctatgaatgattgttgataatgttggaaaaaaatgggaaaa

SEQ ID NO: 66933 - DNA, 1051 bp, Homo sapiens
aactagtagtgagtctgacaccaatatcctcactcttaatatttttttaattagatctatttgtgttagaaggttatgcaaagaaatagaagcccatgacagccttttctttaatgatttatatttgtgaaaaattttagtgtttttttgtttgtttgtttgttttttaactgaatgctcactccatcaagcttgaatagaccaccaggatcatttttatagtggatgttttataaggcaatgttgagattgtaggttagcaggtaaaaatgtccggactgcttttgtcagcagccaggtgtcccccactcacccccatcaccctgcagcttgctaacagatcttaaatgaaagaaccttctggccattctctctggctcctcacatctcatcggcttgatttgatgtccatatcttaagtctgtgtgtttgctggggctctggttttcctctcttcctcatagcaccttttatagctaggggcaagcctgtgtctaggcacctggcttcttatctctaattgctctctgccaatcttaaaaaggccttaatttacctctcctaaatactctgaattcccacattcagttctgtttattgacagcttcctattttcaaggtcctgtgttgggtgcagtaaaggctggaggggttctctgccctccacaccttgctgttcagggagagttataagatttagacacaaagaagtataataataaaagggatcattgtctagggtatttcagtagacatacaaaaaaggaggtagagtacaataatgcaatatttctcaaagatttctcctgaagtacatctaatacgagaggaggggaaaagtaccctctcggtagtctggggacatagcccaaactggctgcctcagaggaaatatcaggtacaagctaattcatatgaaataggctttacctcaatatatgcatttaaaaaatgcaaaactgtgtaaaattacttggcttccttctccccaattttcaaataaaagctgtagccccaggaagacacaataagagggtccatagctttctga

SEQ ID NO: 66934 - DNA, 1050 bp, Homo sapiens
ggtagttccttgataaaggctttggtaaactgacttccagataatacacatctgccaccaaaactctcttaaagcagtaaatctccactgtgtagatcagaccagatccattttcagtatttatagtgtctttaaattttggttaaattagtcaaactggtattttaaaggattctggttaaattagtcaaactggtattaaaggattctggttcatataatacaaaatcaaagttatataattttacatttggaaactcattcggattcagtggaacctcaccttatggattttttgcttaacttttacttgcagatctgtctatggcagtgcagaaattttcccagtcattgcaagatttccagtttgaatgtattggtgatgctgaaacagatgatgaaattagtattggtaagtactactgttttagaaagttctattactaatatttattttactgaaatcaaatagacacacacctaaataataaacatgtaaaatattttctgactttgacaatactataagagtgattttaggtttctatggaagaaattttttctttttggagacagagtctctctctgtcacccaggctggagtgcagtggcgtaatcttgactcactgcaacctctgcctcccgggttcaagtggttctcctgtctcagcctcctgagtagctgggattacaggcatctgccaccatgcccagctaattttttgtatttttagtagacacaggatttcaccattttggtcagcctggtctcgaactcttgacctcaggtgatccacccgcctcgacctcccaaagtgttgggattactggcgtgagccactgcgcttggcctaaagaaaatattataaattgtttttaaatcgaagctctgtgtttgtttgtttgttgtttccataaggaaatgacttaatcattctataactcaggtcagccgagctttgaattattcgttcaaacaaatatatattaggtatctactattaaatataccaggcactggtttaaaaaattatcttccttttttttctt

SEQ ID NO: 66935 - DNA, 1044 bp, Homo sapiens
tttgataggtgtgccatgaaatacggtctcttgatacgtacacttttgtgtaacgaggcatttactttataattagatgacatgaaatgtgataaatgtgaggcacaactcaggttaattcaagtacaaaaatcctttctttcaccctggaaagaagttgctttaaccttgttagctcttgtcagtgtagaatcatagataaaagctgcaaatatttggatttacttgttgagttattgacagttaataccaaaggggtttttccagatttttttttttgctgttactttttggtttgttcaggagttgagttcaatttaggggcagaacttcccctcaactctcagtggatttcactcttctttgcagtgacagtggctttaaaaacctcagaagtataacacttttatgaatagcaatggcatgtagtacaaaatgtggaatcagttgagttagaatataattttcatcctttattgttataatcacattctgcatttctgtggtagtcagcagagaattaaatctaaatttcataccatggttctcaagaccttcggtgctctgtacccagtcttcatctctattttccattgccttcactaggctttcatcatgctagccttcttttcatttcatcaatatgtcttacggcattggcacttgctcttctctctgcctgaaagccttcttccagatctttgagtaggggttggaggcggttgaggagttcttgtaagtaatgctggagttccaaggtatctcctcactgaggctttgcctatccagtttaattcagtgccccctactgccgtcattttttgccacatcatcttgttttgttttctttgtggctcctgtcattatctgatattatcttgtttatttttggcttacttgtctgtcttcctgaactatgtaaacaagctccaggagagatttgtattacactgtaagtatttgcttgaaaatgattgagttacaggcattaatgaattatggcctagtggctaaagattgaagtattgcaaactaagccaaaaa

SEQ ID NO: 66936 - DNA, 1032 bp, Homo sapiens
atggtggacaaccatcctcccaacaacatttgttattttaagtaagaatgtggtgaatctcatcacggatttgtctgtatgcactgcttttactttatacaaaatcagccaattaaaaagaaaaaattattttgtttccttgggattgtgcagataagtgaactcatttgttagccaacattattgaaatctgtgggtatgtttgtgtagactcagccctagagcaagcaatatatttgcaactgaacacatatattgagagaaatctggtaagctctaccatttatattcatcatagtaaacagctcactgactttattaataggtttcacttaatacagcttcttactgttctgtatttagagttgattttacgtctttctcttctatatacagccagtaataatctgaagccaaatttaatgctctccagagaccatgcaacccacgtttgcatcaagagcctggtgatttacagactctgagttggagagatgacctctacaattactgtagaaacccagtgagaagtgaagtgagctcactgtagaaagatttcaggcattgaaaaaacttgccttatttggtaaatgtggttaactggtcccagctggtaatactggtgagctcattgtgagatgtattgtctcttaaagccaaattcttgtatttttaaaaatctgttagaattggagtattaaatagtatttgttcagtttttcttgatgttctaggaagtaaatcaaatcagaaacaatagagttccattttgaaaactaaagctcagatgcagtgacacttaaaatattcccagtatatcttttcttgtctcttatgttgcttaccttacttagcctctggggaatttggagtttaatttatgccttgaaatacaagactcctacgggaagcaaatttatgtggccatgtgtgctttactatacttctttgctcatgtaagtttactctgtatattacactttcaggatagattctgttaattgcattttctttaatgaccagtagcatttc

SEQ ID NO: 66937 - DNA, 1125 bp, Homo sapiens
agacagagaaggtggctgcgtgttatttacatgagaaaatggtttcaaattgtgtttcttccttaatttaaaataataagttacagatacattatgagtgacttttcaaaaatgttttctaactttattgcaggaagaggttgtgggaaagattaggttaggagacaagtctgtgaaataaaatccctgtgaatgaaatgaaaatgcttaaattttttttccaatataacgttccatataacctgtgtcctgtaattccatggagagcctgtcttaatttatggataaaaacataaatacacatatgaatttgagattagaaggttaagatcatagaaattatgactttgtaaagatttcactttctctgaaatgaaaaacctgtgttatctagttcaatgattttgctcaccacttccctgttttatgttctttccattcctttgctaaaatgttgtctattcaatactcaaatcagtactgccaccttgtgatactttttcttaatttcatctggccaaattctcattccttcccttgggtacttcttatctgtgatttactggtttggtcttccttacgttgcacatcttttatccccttgttttgattagaagttcttccagggtgggatctatgctattatactttagtcgttatcttagtggtctcttctggatatttcttcaatgcatttgaatagcagaatagttaacatgacaaatgtccttgatcagcctcaaaagttaaattactgtctaccaaaaaggaaataaaaatccttttgtggtttctgttttataatcgtaaatctattgcctgccttgccaaagccattgaaaatgtattagtttgaggaattataatgaaatataattttctccctattttatatcattaaatgatcattaaaacacattttcatggtttctttatctctttatctttgcagcttttgtcatttcttcagggcttatttactttttaccatgagggatatgaacttgcccaggaatttgcaccgtataagcaacagctgcagttcaacttgcagaatgtaagagtatacctgttcttactgtctctcagcaaatctgcaaatctgatttcacagggcaactaatt

SEQ ID NO: 66938 - DNA, 1082 bp, Homo sapiens
ttggttttagtgtctttttacctgttacctagttatgatatgaggctttccacattgttccatattaattgtaattgtttttagtgactagactgtaccacatcagggtcaagttctcatattgtggaattcatagatggctttgaagaatgtaactttttcatcctttttgatcatttcaagggaaatagtttgaaactagtctccttcagactgtcctgtaccaaaaacacttaatgattttatcacctgtgatcattagaattaaaaacattttttgcatgcctagtgatttttctgaaagtattatacttcagtctttttcttttttagaaaaattcctatgtttttctcctctgtcttcatttctcttttctcttaactttttttcttcaaattttatctttttagttaactgagaatttaaaaagtagtaaatgtgtaaatatagaaaatatttgtttttaaataggcatgggatcatcacgttacaggccttctcagaagctaataggaaactctggcttgaagccatggatgggaaggaaccggtaagactatgacacattctataatttaggttttattgtcctaataattataatgtatggaaattcttttcatagtatacaatgttttgcctgtagtataattgaaaatattaaaaaaggaaatcaggggagtagagacttttatggtttcctagtctcactcatggcccataactctacctttctgacttattttataaggggacttttgggactaatttaaaaccctaaaattacttcttaaaaaattacttacactcatcaccttggctccacccattaggttagcttattcagttaataatgatcgcatgcccagtctttgcaaggcctgtgctaggcatgtgattagagtgatgaacaaggttcagggtaagaactgattctctaatcaagaccatttttaaaaagtataacttaataaaactgcctgtggcttgacattttcacttccatacatatccccatttttaatagttattttgaaattgtatgatagtctacttacaaaaaataggaaggcttacgtaa

SEQ ID NO: 66939 - DNA, 1023 bp, Homo sapiens
tggcttccacttattctaaaatactcttgttgtcctttggaaactcagttttgcataatatgtatttgtgtttttgaactgctgaagacaatgaagtttaggatggtaaaatatataacttaggtaaacgtttgtttgaatgccagccatttagaagcaatcataacatctgtgccttcactgaaaatcctacaagcaacagtgtgagaaatatctaatgttctaaaatagggccatagtatgaatttacagagaacaaatgccatagaatgaagaataaaactatgctgtgactgtagtttcatgctactctttgtgagactaacatgcaaaagtcttcctaccttgtattaatagttactcttaatttaccattttcaaagtatggatgccataaatgagacttgaaaaggaaagcttgaatcacctttatgaaaaaacatcaaataagaaaataaaatattggtcaatgacagggtattgaatttacaaatacttttctggttgtaaaatatgctgcaatatccatgaaattgtaagactttgggaatgaatttatttttgtagtagtaatatctatcatcagtattaaacagatgccattcaattaagattagcactaaactagtcctcaagccatgacactggggacatttggtaaaaagtagctcacccatatgttttctgtagttctgccatttgaatacatctttcaaaggaacaaattacattttatgacatacctttcctgccccaagacctccatcttggaacagtcatttacagaggcaaaagcagttaacatttcttctaggctttctttctctgacattctcaattggtgccctgagccttgtccccattcaaatatgagttttgtgtgatggcttctgagctggtccttcaaccctgggtctggagaaggtgagcactgtgaaagaaaaggcacttagatctcattctctcatgcagtcagttcaaaaatattccattgtgcacctactctactccaggtactgcgag

SEQ ID NO: 66940 - DNA, 1034 bp, Homo sapiens
ttagactgtgaaattggataagtagctttcaaattttgttaggcatatgtctgagtttttaacattctgtacttgccaagctgtatctcaagccgttttcttgtgattttccttcctattaggtatcaccattttaggactctaccgaataggaggagtgaactccaaagttcaaaaactcatgaataccacattttgtaagttttggatgaagcaacttacataatttttgtgttcttataggtaatctaaagtatggacttctttgactagtgcttgtctttgaatattttcaaataatatttaaagttcatatatgtattcagtttttaatgttcatttataatagatgaacgatgagaatttgagggggcatttttataatactgtattttttttccccaagtgtcctttggtaagctagagatacaataagatgcatggatgctagctggagtcatttggaatcctagctcagccacttacaggttttgtgaccttgagtaatttgcttaacgtctttgtgtctcagcctcctcatttataaaaatagggataataatggtacctgcctcttaagagttgtgaggattgactatgttaatctccgtaaagcacttagaagcatgctaggcacatggtaagtgctctgtcatgttaacaattagcaataatttcatttgggagacttatttcataagatatatctttgaggtttagtgtcagctttttatcaattcacgcaaacaacagtactaatgttaactcttggcattctaagaaatgaatacctctctcttttgacctacttacgtttgtgcccatttttcataattgcataagaaatattttgaactgcacaatttaaacaccttgttttattctttccagctcctaaatcccctcctgatattgatattgatattgaactgtgggacaataagacgataacaagtgggctgaaaaactacctcaggtgaggagggtttaactcctggtactctggatgtaatctctgactcaccccttgagta

SEQ ID NO: 66941 - DNA, 1041 bp, Homo sapiens
tttgaaacatataacttaagatatttttgttgctttttatttgcagagtatcactacacagccaacaaaatctcatgactgtctcaaatcttggtgtcatatttggcccaactctaatgagagcacaggaagaaactgtggctgctatgatgaatattaaatttcagaatattgtggtagaaattctgatagagcactatgaaaaggtaggcggaattttcatgtggaagtgtcaagttttatatcttggttttataaaggaattttgcatttgatctgtgagctcatgagttttgtataaattacttcttaatggggacttcagttttctttccttgttgtttttaagtgcttctcaaaatccttcagttaggtggttttctttccttctacataatagacttcaaaaggttttcttctttacattgtatggtaagtttattgctcctgtgcagagaacattttaaaatcactttgtggttggttctattttaaccttctctttgtatccctttgaaatcaaactcttaattatatagaggtaatgttctaactaaacaaaagaaaaaaatataggcaacagtcttgaagtcttctctatatctagtccctaagaaggatttcttgaaaaaagtgagatcttagaataactatgaaaatgggaaattttgaaagctgaattagttggagtattaagcaaattgaaccatttaaggtctaacaatttgtaatccttttatctctgatctggtccttgtgagagaatgattaaggccttctcctcccctgggtcccttcccagcacccacagaagcatgcccttagtgtctatctaagggcacaagctctctcacaatgcaagagcacatggctgtgtcctgtagctctgcacataccttaacctgcagctagccacactccttggcagctcagagccaacagcatggcagcatcttctcctgagaagcaaggagccattcagtgggagaaatgatatagagtgagcctcagctcttctcaggttatgttttttcagagtat

SEQ ID NO: 66942 - DNA, 1427 bp, Homo sapiens
ccgtactaggtaggggcctaccactttaatggggtcaggtggccgcagaacacatggtaagttggagaacagaagggttttggtgatgctgttatcaatagatagttacagttgctttcatctctctccctcctactccttaggtgactcctatagcagcagcccagacagcacacctatggggagcattgagtcactctcttctcattcctctgaacaaaatagcactacaaagtcagcttcctgccagcccagggagaaatctggagggattccttggattgcaaccccatcatcttccaatggacagaaaagccttggtctgtggacaactagtcctgaatcaagttccagagaagatgcaaccaagacagatgcagaatcagactgccagagtgttgcttcagtcactagcccaggagacgtttccccacccatagacctagtcaagaaagagccttatgggctttcaggactgaaaagagcttctgcttcttctctcagatccatctctgcagctgaaggtaaggcagagtggaacttgtgcaagatgtcattgtctcagtgtcacttgtgctggattattcagcatggttaagcagggataaagttaatggtggagaaactaatgatgcttatctacttttttcctgtgcttggattttacaacctaggcactgtgacatttttcctgaatctttccatgtctgtgaagtgatgtctttgtaattattgtagattttgatctccccaagtgatgggttgctgtactcaaagaacattctgtaccttcccatttgggctcagagaaaaatgcttccttttgttatgcacatgtacgtgttattgctattatgttgtctaatagcaccttgcctattttcttgggctttctttttaggaaacaagagctacagtggatctattcaaagcttaacttctgtaggttccaaggagacacccaaagcttcaccaaacccagacctgcctccgaaaatgtgcaggagattaagactagacactgcctcaagcaatggctatcagcggcctggctcagtgtaagtgagcgtttgtatatttgctgtgtctcccagggatacagagaggagttgagtgtttcagaagaactcttgggaatcccacaagttgaatacattgggaatactttatctgtagagtgggtacagtccacttctgtaagactctattcttttctatgagtgatgtggaagtcttcggatatggacagaatctctctcacagggcagcacttcaagcactttcctttgaagcagagctatgacttaatttgaggaaatgaaaactgatgtataatacagtagttataagctttggaactaaaagtgttcccattaaaagctaaacatccatctctccgctgaagagactgccacgcattgactata

SEQ ID NO: 66943 - DNA, 1122 bp, Homo sapiens
tgagcatgcacagtttctggtatccacaaggggtcctggaactaatcccccacagatactgaggactgacaatccgatgtgggtgtttaacccatctgtttatataattatttgacactaatgttgactgagtgctatttatttatttattttgccagtgtacccatcagtggaaccaggatggttaaaggcaacttatgaaggcaaaacaggactagttccagaaaattatgttgtcttcctctaatactatttagtggatggcagtatcttcatggtatccatggtaacgaataaatgctatgattttatctgacacagatacacggggatcagcccactaagtgaaaacagtcaatttctatcaagttcttcaccagcagactatgtagctccttattaatggaaaaaaagatttaaattgttggccattcttttttggttggtttcttattttaaaatatcttacttgtgaaaaatgtgtttttggataatatgtaactctccacaatgtcgcttccgtagcaattgtagagtttcaaatactgtgttaaatactgtatcccagaaatttggaaaccagaaatctgctatatggattttgagatctgtcctttactgcctggcattctctgaggatctctgaaattgttacttaaaaatgtaatttaaattgttcatttattgttttttttttcttagaaatatactgcttttatatatgattgttttgctggtcctaaacatttcaaggatgtaagtctttgttttaatataactttatttgttttccaagtagatgataatattcaaaagcaataatgtatatgatatctataaaggaagcaaaattaagtcatacactgattccactgtaaacaatctgtccagaattccagacaccttcagcaaactttttctgtaaaggcctgatagcaaatatttttgtggtgggttgaatttggcttatgggttatagtttgctgacacctagtttagagggtgtgtaaaactatcttcataactttgagatttttataaaattttacatgaaaatatactgataaattatatgcacatattttctaccagtagcattatagtggcatcatagaagaatat

SEQ ID NO: 66944 - DNA, 1032 bp, Homo sapiens
aataaaaagaataagattagaattaacaagtagagagaataacggtaggcagagtcagaatcaggaataaatatcagtgaatcaaaagaatgaaaaatattatgtaataaaaattagcaatgtaatgtaaacgtttgataaaagagtatctttttcttttatctcttactgttgacctctgtgcactgtaataaggtgtgttgctggatcttcttggtcgaggtccttggtgaccttagtagtaataacagcattgctgacaccctaattgccctctgctggaacagaaggtagttttccagtgtaccagtcccttagtctatacagcacccttggtttaagcacacttgccatcatctggtatcctgctagactagaatctcttaaaagcaaattggttttctttcaaagaccaacttgactccaaagagagattcagaatcctacttctcctgctgctgcataaagaatctcaaccttcattttatttgaacacggaccaaagtgttcctgcttctgagttgtctgtaagctaattctgcagatgttccattcagatttaaagcttttttactgcataggatgtggataggaagcctaactattgtatctgatggcaaggcatatgttgcagccacagtactggctatggtccctttgctgaaacaagctacagaagcactgattcaagttgtgcttgtgcttgaacttttaatcttctagatttgtgaggatggctctttttccttcataatggattacaatgtaagcaagtcatggccatatactggagacgggctaaagctgcttttcccttaaagtaagtttcctacagataaggtatttatgagcactgagaaagtcaggacatgtactctaaatcacacagaatgttaattccacaggaaggcaatgccagacattgaaagaggatcacattcaacttttaatagtagttcaataacaaaaccttagcttttcaggaacaatgtgaagatacattagaattgccacatccatatcttcaaaaca

SEQ ID NO: 66945 - DNA, 1044 bp, Homo sapiens
taattgtattgaggttttagatgctataattcattaataaagagagatatagaaattagtttattctttattatcacacagaataacaagaattagagttaaattcacaatatttttaaagaaaacattatgtgaagatgattcatttcaaaccaccagccaatttaacataaaacacttgtcaagctgagtagactgttttcttatgtgaaccacaaaatattttctctgaaatctacacttagtttaaaaacagagatgggattttgcatattagcttgaaaataagtatatgatgatgatattaggtgcccactagcacctagtttttacagctttgcattgtcaccccatcactgccagggacccagccccaggcatacacagatgaaaggacagtttcaccttcttggcaaaaaccttcagaacaattgtcaacatactctcaaatgtctttcccactcagaaatgaggagcaaggtgtatgactttagattcaagaagtatatggggctaaatatctttaaaagtataactctggacaatgtacttagggacctactacttactcaaaatagggtagtagcattaataactaaatagggcgtgagtcatgagaaagattccctgcatctcttgccaagtattaacactagttttactaataagcaacggggtagataactttgaagattgcatcaacttcaacacaaaaaaatgtgaatatctaccatgtgcaaaacagtcaaagtatgttaggggaaatttaaaacattacatagaaaataagtatgtgatgatatcgttaaaatacatgatcacttaatttttacagttttgcatctgttaccagccagtgccaggagaactgtcaggcacacatggatagatgaagagtctcaccctcttgacagaaaacctcatatgaatacccaaaccactttgaaagtatgtgctcaactgaaataattaatctttgtgtttttctctttggcactggacctttctcctggtcagttggaggcaggcatattgctctgagga

SEQ ID NO: 66946 - DNA, 1041 bp, Homo sapiens
taagccttatgagaatttggagctgaagaaagacatataactcaggaaagttacagtccagtagtaggtataaattacagtgcctgataaataggcattttaatatttgtacactcaacgtatactaggtaggtgcaaaacatttacatataattttactgatacccatgcagcacaaaggtactaactttaaatattaaataacacctttatgtgtcagtaattcatttgcattaaatcttattgaaaaggctttcaatatattttccccacaaatgtcatcccaagaaaaaagtatttttaacatctcccaaatataatagttacaggaaatctacctctgtgagagtgacacctctcagaatgaactgtgtgacacaagaaaatgaatgtaggtctatccaaaaaaaaccccaagaaacaaaaacaatattattagccctttatgcttaagtgatggactcagggaacagttgatgttgtgatcattttattatctgattcttgttactttgaattaaaccaatattttgatgatataaatcatttccaccagcatatatttaatttccataataactttaaaattttctaatttcactcaactatgagggaatagaatgtggtggccacaggtttggcttttgttaaaatgtttgatatcttcgatgttgatctctgtctgcaatgtagatgtctaaacactaggatttaatatttaaggctaagctttaaaaataaagtacctttttaaaaagaatatggcttcaccaaatggaaaatacctaatttctaaatctttttctctacaaagtcctatctactaatgtctccattactatttagtcatcataaccattatcttcattttacatgtcgtgttctttctggtagctctaaaatgacactaaatcataagaagacaggttacatatcaggaaatacttgaaggttactgaaatagattcttgagttaatgaaaatattttctgtaaaaaggtttgaaaagccatttgagtctaaagcattatacctccatta

SEQ ID NO: 66947 - DNA, 1041 bp, Homo sapiens
ggctcactgcaacctctgcctcctggattcaagctattctctcgcctcagcctcccaagtagctgggattacaggcccccaccaccatgcctggctaatttttgtattttttagtagagacagggtttcaccatgttggccaggccgatctcaaactcctgacctcaggtgatccacccacctaggcctcccagagtgctgggattacaggcgtgagccaccgcacctggccctagttccatctttaaagtcaagaaaatctctgcttctggatcatgaacaagtcacaaggatgccattaaaaacacggctttcaacttcctttgtcccctgttgagctcactacttatttgaaatgaatataaaatattatatttacactagaacacactgtggctcaacctttatattttgttcctttttttctgtgtagggttgtacattgtagtcgtttgcagtcaggttaatagggaacaaacaagctctaaactttattcctttaacgggagggattaatgtattccagttatgtactgagagtttacaatgtgtccctctgcaaagaggggtgaattcagtgtgaataaggcaaaatcatcattgctctcataggactaaggaaaaccactttaattgtttattgcttcctcaaccccagaggaagagcatagggtatgtgcccagagattaagtagtcagggcaaaaacagtgtcagtgttgtaaaatgagaacaaatgacttctttcattcatctccctaaagtggtttgcaaacttgctagttgtgtataatgttaatctctaaatatctgagtctaattattcccattgataattgtgcatgtaataaaatgcaaattctggaatttcttttatttctactttcctaggatgaatctacattacgcttacggctgactacactgcctggaatagttacattccatttacaattttagaacttctgctgtaatagaattgcgctttaaaatatttgtaaggatttttaaagcacaaagtcaaagttaagctaagaactta

SEQ ID NO: 66948 - DNA, 1062 bp, Homo sapiens
ctagcaccatggattctgaaagtggggataaagacagaaacttgtcaggtaagtggagcctctttggaccaagatgccttcagaagtttgattctggaagttttgccacccaggcctaccaaggagcctagaagccttctccaatggaattgatccatgcccaggccagctgaatggctgaagatccagtaaccttgaagctgcccaagatgaacatcctagtgatggaagggaagaaacagccaccatggacccataagctcaaaccacctgacttgaatgtgctcacacccactggcttctagagccctttctattctagggactctaccttggctgtgacataggaaggttacatttttcaaaacctgttaaattgagactagcactggagacataattggtgtttgagaaacattagtacaaagcttgcccttgttgtgtgcaaaaagccattttgtactgctttaaagttggactaaataatctcagcagtgatgtatgggggatctcattacctattttttcatcatttaccctagataagaacttcgatcattgcttactaggtaaagaatgtttgtgctgttctgaaacccagacttcttgattcctttaccactatccatgtgagcattgacaaatcatggcatagaggggttcactgactcgttgagaggactctgaccctcttgactgctggtgctgtgccccagccttgtcagttaggggccccaagatatgtttagaacctgggtacagataaaagccagacttggcatggacccctctttctaggctgaaccttgagtccccctgctttttggtagacctcatggatcactgtcctgcagccagttcttcatgtggggcctcttaggccagtgctgagggaggcatgcttctctttctattccgcagaacaaaccctagtctggcaaagcctttcttgagctttaaagtgagattaatttaattccaatttggttgaagacttcctaagagagaaaaattcagtctactgaattggcataggtaaatggatgttaaacttttttaaag

SEQ ID NO: 66949 - DNA, 1062 bp, Homo sapiens
ctggagtgcagtggtgcaatctcggctcactgcaacctccacctcccgggttcaagcaattctcctgcctcagcctcccaagtagctgggattacaggaacgtaccaccacacccagctaatttttgtatttttagtagagactgggtttcaccattttggccaggagggtctcgatttcttgacctcgtgatccacccgcctcggcctcccaaagtgctgggaatacaggcatgagccaccatgcccagacagatattttcaatttttaaaaactcttgtagaatgaagaaaagcataggcgtttttcttgttcaacagtgtgcagttgcttgaagtcttagaagagttaaactgtcagaacaactttgctttccctgcagcaaacatgtatatatgattacagcaagtctatgctaggatcattaaataacacacatcatctttgttttatagaaatgatcttcattgtgcattagaatacctagttagttttcatgttattttaacatactattttgactttgacttcatgatatctatatctatctgtgtgtgtatgtttatatatacatatatatatcacataaattctatgtatttggaaaacaacaagtgtatacaatgtatagtgagaacactatgatttacttattaaaaagttagacttctctccacagataaccaataatcttaagtaatgtatatgaaagtgctttgtaaaatttgaaattctatataaatatgagatattggaatattaagaatcaggtgttaggttaatggacatatttttatttattgaaaatgtaattaagctgaaaccattgataaactactatcacattaaaaatacattttcagtggaatgtaaacctaaatgtgttaagaaataaagtaatgccaagaaataaggggcttacaaagaagcagaggtatatcagtaagattattctaatgtggaaaatgttagtggtagataaaaataagatgttggcaatctgatcatgtaaaagagaaaaaaaatatatgataaagtgcagggcatttagtgcttaagccc

SEQ ID NO: 66950 - DNA, 1049 bp, Homo sapiens
ttttaccctagaaataggatatgattcctaaatatgtaattgggtgtgaatgggaaattgaaaataaatttgaataattgataggtttagtggacatgttttaggattttagaaggggatacctggaaaatttaacacagattttttaatgttaattatttgacttattttgttttattttattttattttaagacagggtctcactctgtcacccaggctggagtgcagtggctttatcatggctcactgcagcatcatcctcctgtgctcaagcaatcctcccacctcagccccacaagcagctgggactacaggtgtatgccaccatggctgactaatttttatattttttgcagagacagggtttcaccttgtttcccaggctggtcttggcctcccgagctcaagcgatctgcctgcctcagtctcccaaagtgctaggaatacaggcatgagccaccacacccagccaacaatgatactttttaaataacatttagaaatgtaaattcatgggaataagtataatagaggatttgcttgacttctacacagaaggctataacactgttgagagaacttaaaagaggcaggggtaggggtatggaaaaaaaattaaagaagatctatgaaatagcggagcagggggaagatatgccatgttcatggattggaaaagtctgtattaaaaagaaggcaattctccacaaactaatccgtaaatgtagtataatctctatcaaagttccaataggatttttgtgaaaattgagaaactgagtctaatatttatatggaaatgcaaaggcaaagaacaaatgcaataatcttgaaggacaaagttataaaactactagatattattaaagctaaagtaattattacaatatggcatttttacaggatatttagaccaattaaatagagagtccagaaacagacctacatatttaaacacttgatttttggcaaaggtggcactgtatagcagggacaaagagttcatcttataattcatcaataggatatatagaattagtaaaaatg

SEQ ID NO: 66951 - DNA, 1065 bp, Homo sapiens
ttggaattttaactcttcttttaagataactgagtttacttcatgcattacatgagcatctacttgcaaaataaccagggtgccagtgtcaatcatatattacatgagtaaaatttaacttctaatttttagataataaatatgaattggaattctaatatgttcttgaagcacaccagtggattatcttacacaatcttctggtgttctgtgtcatgctctggaggttactgctctaaactataaatccctcagaagcaaggattttgttgaattcatcattttaactgtgccatgcttagagcatataagaggagctcaataaagcatgctaactgaatgaattaaacttacagagttttcttgatatttgaaagtaacttgaaaatttgcagtgggtatatattggctactcaactagcataatttttaacattgtgctggcatttgtttaagggtctactgttatgagaagaaaacgaattgctgaaactaagcggagaaatattttagagcagaaaagacaaaaccctggatctgtaggacagaagtacagtgagcaaattaatgtaagtatggtattaatcaaaatctctattcaatatttaaaaattgcttggaaaacagaggttcttaaaggactatgctcttgctgtaaactgtataccacaacataaatataattatagccaaagccatttgtgaagcagtcttggaatctttatgctaggagattattccactatacctacttgctatgttctgtataatcagttactaatgaaagttttaaaccaactttaaatcattattattattttagttgttattattgatagccaatgctggaaaaaatgaggtcattcacaacaaaattcaacaaagctacttaaatatacactttaaaaagaaagtaaagtaaattagagacctggatagaagaaacaagtatgctaggccaggcgcggtggctcacacctgtaatcctggcactttgggaggccaaggtgggtggatcacctgaggtcaggagttcaagaccagcctgaccaacatggtgaaacc

SEQ ID NO: 66952 - DNA, 1121 bp, Homo sapiens
accgagaggccgcaaaggaaaggggcccagggctcaacttcacaaactcggccgccgctggcaacacacccacacacaaatgccagaggcccccctccccctttcccagcccggcccggcgggagcgaaggtgcggagcgcgcggaggcgcgcgcattgtgcaagcccaccgcggcccaggcccgacttttccccacccccttccttcctccccacccctcctccactcccgccaacctctcgggaaccccgggaagaaagaaaggaagaaggagggaaagcacgccccccggggctgcaaccgcagagagaaactcagaagggaaaaacaaatctcagccccggactctgggaggagtggggagctggtcaccgcggcggagtggacgactccagttccacttcgcctcgggacccccaccccagctagagttcccgcaacccccctcccctgaccagagctggcggccgcggctcccgagcgcccccccggtctgaggcccgcccgacggggaaacggggagaggggcaacgaggttacctgtcgggagtgggatttgggctccggcggcttgaagaaggagtcgggcagcttccggagcctcatgggcacggtctggggcacgttggccgtcttggggttcatgacggcgttgaagagcgcctccaggtcggtctccgagtccccgcggacgtgcacgatctgatgcccggcggggggtgcctgcggcgccgcctgggtcgccgcgggtgccggttgcccgggtccggacggcgggccctgcccctgcgggggctgcgaaggcggctgcccttggccctggggggccggttgaggcggcggctgctgcccgggatccatggcttctgcctcccccgacgcgcaccccctgacccaggcgagcgagggctacgcccggacgccccggctccacgggccgaggtggagaagcggcgacggctgcgggccgggcggcgctgtcctcgctctcagggccggggggctgcgccgcggccccgcatcccccgccccggcgcctccgcccccgccctgcgccccggctccactggtctggcggctgcgcctcgggaggggctgcgaggcactcggacctgcggcg

SEQ ID NO: 66953 - DNA, 2044 bp, Homo sapiens
taacctgatgacaaaaacccgggttaaggaggaggaaagaaggaaaaacaatttagctgcttgcctaaacacttcaatttgtcttaggtatgcttttttctcttacccctcgaagtgggtttatggactcattgtgggtaaatgtatgttggcatgcaccctacagactgcacggtatgttttcaaagtataatacacatagattggatcccccattttgtggcatcagccacaaagaattacaactgggaagtgtactttttcttctagtaaataatttttacaagaatttatatccagcagttctaaaattcataaactattatagttttgtttgttttaaataagtttttaactaagtgttttgcatctgtaaattcgacttttatttctcctaatgatttcctaaatcatacttattctgatgggaaactcaaaaaggtgtatcactttaaggcattaatgactctactgagtccttccagtttccttacctttgtgaatctaggaaattctaactttttgataatcaaactctaatgctaattaaaaatattttaaaaactatgcaagattatgaatagtacaaatctaggttgtaaatactattgttcacaacacaaactggtgactgtaagttctttcatatacatccatttttctatcatgaaaactattttataaaggagaaaacaggcatatggaagttaagatacttgttcagtgtcacactagccaacttagactggaactcagatctttggggtctgaatgcagaattttttctgcttgtatagagttgtggatgtgtgtgagttcttaagttaaaattggactgataacatctttatcttctacatacaaagatatagttgggtttttttcatcctgttcattgtagatggcttttaagaacatttgggcagttcaaatttgttgctctcattaaaatttgtgtaatttgttatgatttctttattgatggcattttatcatggttggaataaatgacgagggcttgatttttcttgagtttgacctagaaaaaaaattaattacttaaaacctagtaaaaaatacatattctttgtgttgtgtttatacttagaacattttagaacttggaaaagcacccataactgcactgacctcttaaaaattaggttttaaaattcactattatttttggaatgttttattcattcagtactagttgcccttacatgtctagtgtggaccaggggaaattcattagatggactgctcatcaatacaattacaaacatttataaaatttatattaaaattatataatattaaaagtatccatttgaaaacctgtgttctccagtgtcgaatattaaatgttgaaattttcctttggtacttagatattcggctgcaattaagcgctgactgggaaatttaaagggactcagttgtgttttttcttttttaatttttcatcttaatattccctaataggccagtactgatgcaggcactgcaggagccctgactccacagcatgttcgagctcattcctctccagcttctctgcagttgggagctgtttctcctgggacactgacccccactggagtagtctctggcccagcagctacacccacagctcagcatcttcgacagtcttcttttgagatacctgatgatgtacctctgccagcaggttgggagatggcaaagacatcttctggtcagagatacttcttaaagtaagtgaaaataatggtgggagacagttatctaagacaaatatgtattggaaaacacagtaaagtggtgtcaagatacagaatatcatttatttttatgttttatttaatatttatgttaagctctgtagctctatcttccatatatatgtttcagtttggtatgacctaaatacctttgttagtatgggtaatattttgaaagctttactgagtcttggttctgagcctctttataatcttttcttttgtggaagtttggttattctcattttgagcttgtgccaaaccttttaattagcctagca

SEQ ID NO: 66954 - DNA, 1662 bp, Homo sapiens
aaattttcaaattctgggaattacagggctagcagcgtcttacaaaatacgtatggtgctacttgtatctttttaaataaatattttattggtagagaactacaaaataagtagggcttttgggggagtctaattttacagtattttaaattgtgaaatgacaagcactacaactgaagcttgatgtgacttaccaatatttccccccaaaaatgtaaagggaaataaaaatttttaggtttcatatgcagtcgctcagtggcaaacttctttcaagctagtaggtcttcacaacagaaaccctcctctctgggaaaacaaaaacatgaccgttgggttgtttatttatttttattttttcagtccttttgtgtttaataaaatggcagaattacactaggctgaaaagacataaatagaattttctctcctctgattttgaaattacagataagacctcaatttttttctggcttgtttggatcaagtatatattgaaatgttgactaaaactaattatgatagactgaaattgatgtctttaaaaaagctcacttaatagtgtttaatcaggttgagataataaagtgaaaaacagtgtaagttttgattcggataggtcttgacagtctactcctaaggcaaatgtaacatttatttatcataccagataacaccattaaggatgttttgttgtgtgaatcctagtatgtgttttatattgattgtcttccagggtgggttgctactttgtaatgtaagatagaaagttttgtgacagacttacagaagagcaaaggaaaaggtttgatcatgaaaagttcgtacagtttttttttgccccctttcctgcaactttttcttttcttttcttctttttttttaaaaaaattcattttctggtgtcctggtatccatttcaaaggatcaggtttcaaccagaacagtaaagggcctgagactggaaagtacacacaagtctggcaaactcatctgcatgagcaagatcatttgttctcaagcagacatccaaagtaaatgattgaaagagctgctagctgtgaaggatgtgtcttgaaggggaagggagtggaaacaaaccaggttgttaggaagaaaaagaaaggctgcacttttttgaacctctccctgctgggtcacatgctgacctggggagattgttaaacagcttaatagcctgctttccttctttctttggttgatgctgtggctaaaagtataaggttaaagagcaacatttatgctcttcttcttagttctttgtatcttgtaataattgcttgtaggtgatacctgcctacgatttcattattttgaatgaatgatctttttttgagctgaaatcagtattctagatacagttggccttccgtatctgtgggttcagcattcatggattcaaccaacctctgattgaaaatatttggaaacaaattacatctgtattgactaatgtacaaacttttttccttgtcattatttcctaaataatgtaacaactatttagcctttacgttgtattaagtattataagtaatctagaggtgatataaagtatatgggagaatatgtataggttatatgcaaatattatgccaccttatatgaaagaccagagcctctgtggattttagtacatgt

SEQ ID NO: 66955 - DNA, 1603 bp, Homo sapiens
gtcctggaaccaatccttgaccacagatgctaaggaatgactattcatttttcaaagtttccagtgattcttcctttgtgaagaaatgtttctcttaaaggtattgatatatgtagatggattaatgaagggtatataccttccaaccccagtcacctcaattcacccctgtcaactatgggcctgtaaggaagataaaccaggctaaaataaataaatctcaaattatgtcataggagaaaaggttgcaagggtagagagatatttacccggaaaagaaaaaactgggaggaggagagataagacatgattgttgtttcagtgtttctggggaacttttatgtgggagtaggattagtcttactatataagaaatgtgaggaattttgattccatggaagaattttcttatataaaacttttaagaactagaagagttttcctggacaggtaaatcttgctcaataaatgtaggtaaaatcatggttacttggtatctgtcagggattctatggaggcccctaaacattggatgtgggagaagaatgctgtgggcttataaaattttgtattttaaagagtatctgctttatgaacattatgcaatttggagaaaagttatgaaataagattatttcaccttctccagttagctacttccatgatgttatggaccgtatagttgttacaacttctttttgtgtactgaacagacaaatgagattaatatcctaaccattagtcaaagatgatgataaactaagcttttggtgccaagtttctgttgtcaaagttcatttttatcctagttttgatgttttaaaatagggctgtctttgtaatcaatatttatatactttcctcttgtatctaaagaggagtgttgttgtcatcagatgtagaatgaagatttaaattagttgccttacacttgtttccgcaatgaaacattttattttaatgcatctttttagatatttgttggaactgacttttaagttacaaagtctataacttattgagatttatatttggcatgaagaacctgactataaatggtccagacaggcaagacgatgtaatttgagaaaaaacttagaaatgttaagaaacaacccagttgttggccttgtgaccatagatgattgagtttttgaagttagttggcctatcatctagtttccaggcagcatgattactgaaagattataagcaggcaatcattcgttgttttaaagccctccttaggtcagtgagatcttgtggaggagactcataccttactttggcaagtgatacggtggaagtatggtgctagttacatttatcagtggcttgttttcaagctctgggatgaatgtgaagtatgtaaacaaggcttagccatataatatttgttctactacatttactattcaaaactattttctttaccatcgtattgagctttcattttaaaagaattcattctctttatgactctgagagttattaccttcttcagctgtcttacggttttcctacaggaaatagttcttcaagtagttggtcaacaacttcctatttctttataagctgctgaataacttcctgactcagtatt

SEQ ID NO: 66956 - DNA, 1047 bp, Homo sapiens
tgataactgtgaaaacagtagcaaattcaaattgacagtcatttgtcataacctccttaatggaactgtcctgcttggaatttcccacttctgggaatgataagcaataggaatgatttctttcatagtacctgattaagataaagtggccttcatcataaagacgtgtaaagaaaactaagcaaatgtagaggctgacagatatttgtagagggcatcccagcattggcagtccagcctgagaagagacaggatgacctccagggtgctttctggctccagacctgtgatcaagagtccataagcatagctgattgagcactgaaagtagtgattaccagagaaaccaatgtttaatgaaaagtgaaaattcttgacattgtagaaatgattatttatgcctatatacatagagaaatcccagtaatattttctcaactatgtacagaattagttcaggttatatagttcttgtcatgatcttagggccaaattattcccataggagtaaagtacatattcaattgtattatttaaattggagaaaaaaatttatgtaaagaaagttaccttatgccattttagaacctctgctatttaaagtaagtcacctgttgtatgaatttgtaatgtggcttattgatttttctaggatgcatatttttaaagagcagaataagcttctgctttcaggaattcagcctagtatttcaaatgagagctcatgtattgcaacattatttatctatttttgtaaagggctgttaatcacttggtgccaccctgtctgagttgtgtgcttgtagattgttcacatgaaatcacttgatatggcatctcatttctgcaagaattttttctgtatttttagcccaccagcctagcatgaagttaaattatttaatagaaatatttagagaccagaagcttacttttaattttgcgaatgttgccttaccctttttggaataggttactgtttaaaaacgtgtcgatgtagttatgcaatataattcatttatcctacctttggccaaaacacacaca

SEQ ID NO: 66957 - DNA, 1781 bp, Homo sapiens
atgtctgtaacctatataagaaagttcacttctttttgacatctgacatgtagtagttccatttaaaatagtatttgttcaggaatgtcagtttaagcaaaacagtagaatatgagaaaaccaccaaccatcttttgaagaggttgaattgctattttggctcttttgggtaaataaatgtcttactgtatgtaaagatctgagattatgaaagaacatgtaaaattgctaggtcaattattttcctgaaataactgttgttattcataaaaatacccaggtgctaataagtctgccctgctaattttgatgcaggttgtttgggaaccacattttgaaaaacacttacagcagactttctgtaactaaaatttctcagggctgttttaaaatatttctttatttttagttctgccatttctctttttttgccttttccctgtaaggtgattattacgaaaagagctaggtggaccttatcattggaattctagtctttgttttcagttcatactctaatgacatctgttgttttctatatcatgaaatcaggacaaatacaatttttgaacttttgggaggaatattctcagtcactatggcattaggaaaagatgttcaattttgctgaacgtaacttcaggtacacgccatttgggatcaagattgagagaactgtgcttgcttcaggaagcctccacttgagctttggcattattctcatggctggtccatcctcaccctttccttagggaataatcatttcccaggggagatgtattatatataaacatgtcagcatgtcactttttttgtcaacatgtttaagttgtgtttaaattggtttcatgcttgcgggcaaatgttaattttatcaaacctaaagctatagggtcagattatagtgtggtgtacagtttgtagacttataataaatggtcatgtttgcttttatgtatttctgctcatacttgttcataattttaactcattaacagccttcagtgatagcttaattatttaaatttcaatttaagattctgatatcctgtagtgcagaaaccatattatcatagaggcaaaatgtttacgtcttctcatgcatgtcaaggaaatatagtatatgcataatcactgaatttttgaggttctagaaatagtccaccatggacatatacaaatataaaaagcctatagttgtggtttaggaactgtggctcatggaaggattagattgaacaatgtatcattgttcctagagtcagttaagcgtgtaggtttagctagtttgggaacagcctctagcatgtgactctataacacttgcacaacaaacatgggcctgataagtgagcagtaaatctgggctgactgcccactcccagtactgccatcatagtattttgagggcctgacaacaatattaaaagcttaaaacattcttcacaccgttttgtattattcctggttttccagttttattgtttactaaaagtcaatttttcttaataaaaaaagattgtttagttggtcatttgatttctcattagatactaggctttgtgaggtcttacatatatttaagttcaagttttctcacttttcttcagggaagtgggtgacttggttgtcctgatgtctcttttgggcacataaagcacatttttgtcatgttatctttgttcacttttatcagaaaaaattcagtgtctgagcaggtcactatcatcaaaagtgcatgtttgggtttttttctcttttccccttacaacacaatgaag

SEQ ID NO: 66958 - DNA, 1028 bp, Homo sapiens
tttggactggaacaataacagccatgtttccttaaattatctctaatgaaatgaatgaattcagtttctccacattttggaaattctgaagaatggtgttgcggaatttttttccctgacataaggttatgaaagatgatgacgaacgctttaccaactgcagagatcaggaagaacaaagctttttaaagaaaaaaattttttcctttaaaacagtgaaataaaacaacttttctgtaagcttaagtagactattgattacacacacagcttggtcttttgttttaagaggaggaggtactttaaaaaaacactaccaccctccagcacgttatgtacacacaggcatacagttagatgtgcccagaaaaagtttcataaaattctcttattgcatttagtttccctttttgggcccaccgtgtgtgtattccagacaggcttgacaatatgccagagctttttattttgtggcccgacttttaatctgttccagaccttttcactcagagagctcaagtgtaactgaaggggggcaggaaagaaaaaaacgtgtgggtttctctgatctagagtgacagcaaatagagacaagctgttagctgctggatttgaagttttccttgaaatcagaagttctgcatagtggattatgttttatctctgccaaagaaatataaactatccccttgtttctgaccctttgggccatacaaacacaaacaaatggtgtaggatattgctttcatgattgtggagtttgcttttcgatattcttcaaatctatattaaaatatttatcaatttttggcttaagtcaagtagatgtgtgtctttcagtgtcttagaatgggagctaagcccctagagaagcttaattttagctccttcaaacaaccccttttatatgtttatttatcagatgctttcagattaattatagttagaatatagccatttgctttaagattaaacatatttagtaattacacttcatttgctgcataataacgtttcagtcagcggca

SEQ ID NO: 66959 - DNA, 1810 bp, Homo sapiens
gagaatcagtcagagtgctccagtgaaacagccaccacccctggctccccagagcccacagggaggcgtcatgggtggcagcaactccaaccagcagcaacagatgcgactgcagcaactgcagatggagaaggagaggctgcggctgaaacagcaagaactgcttcggcaggtgaggccacaggttagaaaccagccttccacttttgggggtttgttttcttaaagttgggcagatttcattttaacatttattagttacagaggaatgttgtctttgtaaaactgagtgacacagaagcattctatccagccctgtccttgtcttagttttgtgactgtgaatggcctttgatcaagttacaagggatgtgacttggaaacctgtatcatgaagagctgttttggtcatggtcattgcaattgagcaaaaattgaaggaagcaaggatgctttctctaatgtacatggaattgtggattgctgtttttctgaggatttcactaaaggggaaattctagaacatcactcaggagaaaacatcctttattaataacttacgtggcgggatacaccaatatgacatttctcaaatgacaaatatacttcggtattaccgaatctaagaattttcattgaaaacaaaataaatgttacctttggccaggtgcggtggctcatgcctgtaatcccagcactttgggaggccagggtgggcagatcacttgaggccagttcaagacaagcctggccaacttagcgaaaccccatctctactaaaaataaaaaaattagccaagcgtggtggcacacacctgtaatctcaacttctcaggaggctgaggcacaagaatcacttgagcttcggaggcagaggttcggtgagccaagattgtgccaccgcactcaagcctgggtgacagagtgagattctgtctcaaaaacaaaaagttatcttcaagtttagaagatgccagtgtgctttaaaattacctgcttatggatgtttttttattttggggaaagtaggacatagtagagagctttgaagccctttaatcaccaattccatcagctttcttccagaaggtactgttggtttttatgttcctaatatatataattaatctcaacattaatttttactttatcttatttcagagtggttaaatctactaagttcagatattggagataaggtcttttgttaagtagcgtagatatttttaaatttccatataaaatttttttgaatagataatagaaaaatggtatactagtgatagatgtacagaggtgaaagtacactcaaaataagatcttttccctgtttttctagttctctcctatggggcctaaataactatgagtttcttaggttttttgttttttgttaatttttccagagatactctgtttacatacataaaatacatgtatctgtgccattttttccctagctaaatcacagcatgctaagtatagacatttaaaaatcgtcatactcggccaggcatggtggctcatgcctctaatcccaacactttgggaggccgaggcaggaggtttgcttgagcccaggagttcgaaaccagcctgggcaacatggcgagactctgtctcttaaaaaaaaaaaaagctctacatttctgttaccaggaaggaggcacctaaaggtctgttttttgttttttgggttttttttagggctgtattttaaaagtatctcttgagtgtcagtgaaaatatgtgaactcagtactacctgaactctgatttggggtttgaggaattggtacttcaggagtta

SEQ ID NO: 66960 - DNA, 1052 bp, Homo sapiens
caaatatattgtatctgctttatctaatactcagaaacaaagaacctacgtgaccaatatcaaattttattttttagttctgactcctaaagtcttgctgtcctatcctcaatgctgttaaaaacttctgaggttccagttttgttatgtggtgactccattggctcctgtcttcgtcagtctgcttcttcttgggtagcttgggaattctgtgctatggtgatatgtctggatacaatttgtaagtcagcctacacagccagaccatgtggcttaaagtaatttttatccgtcttattttttactcttaggcaatgcggaatatcaatcccagcacagcaaattctccaaaatgtcaggtaggctcttatctgatgttttagcactggaaaaaaaaaaaaaaagatattaaattaggaaagagaaacttacattccagggtcctgtccttattggacattagcccagagaataactttgagccatctttctaccaagatactcaggttaacattgcccttccaagaaagtctacacagtctgctccctccctgctcctcctagggagtttctgtttattttgattccatggaggtcttttttattctatatttaaatgtattgtgtctcagttgtacatcctatcagctaggtatgcctaatttttatttgaatagcttaaaatagtatgtgtaatgatttaaaggaattaataaattgaacagtaacaaaagcagtatttacttggataggctactttaggaaattttagagtcatgatactatgaggaagagaaaaattctttctagtggacattccaaaggaaaaatatcaaaattatcaggagagtatctgcctggatagtgtttcaggttttcttgttggcttttatcagcattctctgatgaaccccagggagccctggttgtgaaggcatcttatttagaaggaaagattgtggccaatttttcttctaacacaggcacttgtctgactcgtgggaagaatctcgttcttaaaaccaaaaagattttaggtgtttgaggtccac

SEQ ID NO: 66961 - DNA, 1061 bp, Homo sapiens
ccagattgggtgacagagtgagaccctgtctcaaaaagattaaaaaaaaaaaaaatctagaagcacatcttataacgtaactactgtagcattgaaatagcaatgatcataaatggtattttaaaatatttgcaacaactacaatgtgatatgaaaacatttatatgttctattggtgaaaagttaggtacagtgaatactaatggtgcatactacattggagaaaatgttgacaaatttagcgaaagttaatgtgtaatttttttttttttaccccattgaagttcagagactctctgaattctgtcatggtccgctggttaagaaactctggtttaaaggatggtatatccagaaggcataaacctaaagaaaaataagtggtatttgcatgcaggagaattgtagtttagaagtggcagcgtagagctaggagaagctttccatacttcaggaccccatggcgattgtggaggtgagggctggagatggtggggccgtgcctcagtgagcagacttggctcagaaagctgtgtggaaggatgacggagtcaggccagtatcctttgtgataagaaactgtatgtatttcaaatcaaacccaaaaagtagagggaaagaaagctgatggtctagtagagatgatgtttacgataggtggagaggcacagtgaaaattcttaggagggtaagaaacagtgaacagataaaggagagaaaaaggacagagtagtaatgagtgtgctacggatgggtcacagtgagatgaactgtttttgaggtcctgggcaaatacaggctgaaacctgggaggtttggaagcccttgaaggcaggccttctgcaaccatcagagtagcaacctacagcctttgctcaggtttacagggagaatcctgctgagaaattgttggatgaccctgaagaaattttaccccattttaaatattatgtttgtggtggagaagccttgggtttgtgttttaacttctgatgtctttttttcattttcctcctctctccctgctagaggatggaacatattctatccagctcaggata

SEQ ID NO: 66962 - DNA, 2266 bp, Homo sapiens
atattccttaagctctaaatactttttgccccaacttgccttggcattgactcttagtagtaatgctgagttcccttagttcccttttacttttaccctcaaagctcactcagatgtccccctccatgaaacttttaccctttacttctaagctccctgtttgttctgaaagcactgtgcttacatctgagttcatatagcccctaaatatgattcattagtatatttgttcatttccctccttgaagttgtgagcctctcacaaaacattgtttgtaggtggtggtgattgttaacctctttatcctcaaagcctagtctaatgcctgtcatgtagtagcagatgctcagtgaatgtttactgaatgagtggggcctgtaggaagtggggttctgcagggagcagttcctcaccaggaaaatggccctgtaaactctgtcctcaggaatgcccatgtgcttcccctgtggtttggaatgaactctgcgcaactctgtaagttcagttattcagtaatagactaaaatgtctgatgtgtgtcccatgcttagcagccgaatagagtgatgactaggaccaggctcttgtcccagatcagggcaggcaaaatacaaacaaaccacatcctgaggccttctcatatatggctgcattgtataccaatggtctcagaggcaaatgtgtgttttcttggatctgtgtgaggcttttgagccttggcaaaatctggcagaagcattagagtaaaccagtgatggcagtatatagaatgaggggagagagagaacaaggcaaatgcattgcatcatttagggaaggcagttggggtattgactgagcttttagccttgagcaattgttaaacttgtttttattttttaacttttatgtaagttaaatagctgcttattaaatgtacaagccgtagagaaagttgaagttcacactcacacagaccattgaagaataacagctgccttgattttatgcgtttctctaagattttgtagagttagtagaactcagggaatgccagctgatgtctagatgctactagcttaggaaagtgttctatttctcagggtaatggatatttaccatacttttaatgtaaatctgggaaaccttacttagtctaaagtgaaaatctgtgttgggtcattttattttcaagggatgtgccttgcagttttttgttttgctcttttctttaactggagctatatgatttcccgtttcgtttcgtactgaagtgtttgaggctttttcctcccccgcccaaacacagaagcaaggagatcaagccacgagtattcttatcttattggcagtgactcacctattttggctcagtcctaaaaggaattctggtggtttatttggggttgatttttccttggcttatgttctctgcacaatagctaggaatttaacttgagtctagtgcagacctgtctcctcgcccacctggagtttgtgttgtgacgtctctgtgccaccaccacctggagaattgaggccttgggacaagtaagttgtatgggttcctccgcacccccagattcaaatgatattacagagaggagaatactgatgcagagaattttctgtcagccaggaaaactaactgggggtatctttttttgtcccttattgtcaccaagcacagaaccttaggagaaatcttggttccttagagctgccagcttcaattaggattaacttgtctatttcacttcatagcacaagccctgtctatggccctgagggagggtgcttgtttcagacattgcaggacaggaattttcactaatcctctttgagaattatgttgctgctcagcaggtgtttatttttaccttgaattgatttttaaaattttttgtgttggtctttaactgtcatgtttatgtagtggcacctatcactctcgagatgagagtacagacagtggactaagcatgagcagctacagtgtccctcgaaccccagatgacttcctgaacagtgtggatgagatggatacaggttggtattctttattcctcttagtaacctgacttaacagtgggatatgttatcaccaggtctcataaggtattgtaagcaaagatgattcagaagaaaaccaattaaaatcctgtaaatttgaattaaattgatcctgctttgtctctatacggtgatttgtaacttgtcttttcctagtttaaaaaaatatatatcatggattggccgggtgcagtggctcatgcctctaattcc

SEQ ID NO: 66963 - DNA, 4020 bp, Homo sapiens
ttcccaaagtatatttaaggccaaggtaggtctataccactcatgtttatgtttagtcttattatggtggtgcttatctggaagacagggtagtgatgctgtcgtgttgtgtacttgttctttctcccgctgctgcatataatttttcaagggcttttttatttttttcatgactcctttagtgctcagcacataatagcaatcaagctgttattggatatctgaacaatgttgaagcaaaagtaaacttggcattgttattttgttatctgtgagttgtttgacctgatataaattctaggtatcagtttaggtcagtcaggagcgcttttctttccctgtgcatttctctgtgctcatatgatacagccctgatgttagcttttcaaaaaggactttgttatctctgtgtgtttccactaggtgatactatcaaccaaagcaccctgccctcacagcagaaccgtttcccagactaccttgaagccattcctgggacaaatgtggaccttggaacactggaaggagatggaatgaacatagaaggagaggagctgatgccaagtctgcaggaagctttgagttctgacatccttaatgacatggagtctgttttggctgccaccaagctagataaagaaagctttcttacatggttatagagccctcaggcagactgaattctaaatctgtgaaggatctaaggagacacatgcaccggaaatttccataagccagttgcagttttcaggctaatacagaaaaagatgaacaaacgtccagcaagatactttaatcctctattttgctcttccttgtccattgctgctgttaatgtattgctgacctctttcacagttggctctaaagaatcaaaagaaaaaaactttttatttcttttgctattaaaactactgttcattttgggggctgggggaagtgagcctgtttggatgatggatgccattccttttgcccagttaaatgttcaccaatcattttaactaaatactcagacttagaagtcagatgcttcatgtcacagcatttagtttgttcaacagttgtttcttcagcttcctttgtccagtggaaaaacatgatttactggtctgacaagccaaaaatgttatatctgatattaaatacttaatgctgatttgaagagatagctgaaaccaaggctgaagactgttttactttcagtattttcttttcctcctagtgctatcattagtcacataatgaccttgattttattttaggagcttataaggcatgagacaatttccatataaatatattaattattgccacatactctaatatagattttggtggataattttgtgggtgtgcattttgttctgttttgttgggttttttgttttttttgtttttggcagggtcggtgggggggttggttggttggttggttttgtcggaacctaggcaaatgaccatattagtgaatctgttaatagttgtagcttgggatggttattgtagttgttttggtaaaatcttcatttcctggttttttttaccaccttatttaaatctcgattatctgctctctcttttatatacatacacacacccaaacataacatttataatagtgtggtagtggaatgtatccttttttaggtttccctgctttccagttaatttttaaaatggtagcgctttgtatgcatttagaatacatgactagtagtttatatttcactggtagtttaaatctggttggggcagtctgcagatgtttgaagtagtttagtgttctagaaagagctattactgtggatagtgcctaggggagtgctccacgccctctgggcatacggtagatattatctgatgaattggaaaggagcaaaccagaaatggctttattttctcccttggactaatttttaagtctcgattggaattcagtgagtaggttcataatgtgcatgacagaaataagctttatagtggtttaccttcatttagctttggaagttttctttgccttagttttggaagtaaattctagtttgtagttctcatttgtaatgaacacattaacgactagattaaaatattgccttcaagattgttcttacttacaagacttgctcctacttctatgctgaaaattgaccctggatagaatactataaggttttgagttagctggaaaagtgatcagattaataaatgtatattggtagttgaatttagcaaagaaatagagataatcatgattatacctttatttttacaggaagagatgatgtaactagagtatgtgtctacaggagtaataatggtttccaaagagtattttttaaaggaacaaaacgagcatgaattaactcttcaatataagctatgaagtaatagttggttgtgaattaaagtggcaccagctagcacctctgtgttttaagggtctttcaatgtttctagaataagcccttattttcaagggttcataacaggcataaaatctcttctcctggcaaaagctgctatgaaaagcctcagcttgggaagatagatttttttccccccaattacaaaatctaagtattttggcccttcaatttggaggagggcaaaagttggaagtaagaagttttattttaagtactttcagtgctcaaaaaaatgcaatcactgtgttgtatataatagttcataggttgatcactcataataattgactctaaggcttttattaagaaaacagcagaaagattaaatcttgaattaagtctggggggaaatggccactgcagatggagttttagagtagtaatgaaattctacctagaatgcaaaattgggtatatgaattacatagcatgttgttgggattttttttaatgtgcagaagatcaaagctacttggaaggagtgcctataatttgccagtagccacagattaagattatatcttatatatcagcagattagctttagcttagggggagggtgggaaagtttggggggggggttgtgaagatttagggggaccttgatagagaactttataaacttctttctctttaataaagacttgtcttacaccgtgctgccattaaaggcagctgttctagagtttcagtcacctaagtacacccacaaaacaatatgaatatggagatcttcctttacccctcaactttaatttgcccagttatacctcagtgttgtagcagtactgtgatacctggcacagtgctttgatcttacgatgccctctgtactgacctgaaggagacctaagagtcctttccctttttgagtttgaatcatagccttgatgtggtctcttgttttatgtccttgttcctaatgtaaaagtgcttaactgcttcttggttgtattgggtagcattgggataagattttaactgggtattcttgaattgcttttacaataaaccaattttataatctttaaatttatcaactttttacatttgtgttattttcagtcagggcttcttagatctacttatggttgatggagcacattgatttggagtttcagatcttccaaagcactatttgttgtaataacttttctaaatgtagtgcctttaaaggaaaaatgaacacagggaagtgactttgctacaaataatgttgctgtgttaagtattcatattaaatacatgccttctatatggaacatggcagaaagactgaaaaataacagtaattaattgtgtaattcagaattcataccaatcagtgttgaaactcaaacattgcaaaagtgggtggcaatattcagtgcttaacacttttctagcgttggtacatctgagaaatgagtgctcaggtggattttatcctcgcaagcatgttgttataagaattgtgggtgtgcctatcataacaattgttttctgtatcttgaaaaagtattctccacattttaaatgttttatattagagaattctttaatgcacacttgtcaaatatatatatatagtaccaatgttacctttttattt

SEQ ID NO: 66964 - DNA, 1288 bp, Homo sapiens
attcttatagataggaatgaatttatttccctcctcctctgtgagagctatctttttgaaaaaagtagtttattgtctttactggttataaaaataacacatacaccatcataaaattagaaaatatggacaattaggataatgagtatgatagctaatagttttttagtatgtgtgatgtgttcagtgctcttctaaatgctttacatatgtaaatatgttaaattcctcatattagccatgaggtaggaaatattattgccaccattttgctgatgatgaaactgagaggtacggaggggctaagtttttttttcagggtcacacaaccagataataaggatcacaaataatcacactgtctagagacaatcatcatttcagtgaatatgttccgtgcttttctttatcatatctttatttaaatgagatattaaatgacaattcgtaacctgcattttttttagtctgtcttatttatttgttactcaaaaaatcttatttttgactagattcagacttggaagtagaaactcacagagaggacagtctgcgtctcttggcaatctgttcttgatgcttctctttagcctccttcattctcttggccaaaagtttagcatattctgcagctacttccttattttccttaattctctgtttcttcagagcaatatgccaccattcgtgctgcagaacatgtggagtaacaagatacttagtcgtgggtgctttggtcctaggtttcttaccttctttgtttaaagcctttcttacaacacactggtggacatcatcatcttcagagagactgaaaagtttgcagattctgctagctcttttgggcccgagatgacaaggcaccatagtatcagtcagtccaggaatatccttctctcctttttttacaataaccaagttgagaatgctcagattggcatccacaatgcaaccacgtgcagatttttgctttctttttccagttcttcttggtctgtaacaggcatgccttttattcagcagcaggtggacatggccatgggtcaagacaccctgattcatagggaaaccttgtttgtcgttcccactgttgattcagaccacataacccttccattctttacccagagcatcagcagcaacttctgtggccatacacttctcataaaaagtatgaagtttgtgttcattgtccacttcaatgagtttctggcaggcagtggccaggaagatgttcagcttcatcttgaagcagctgatcgccttcgagccaccatgaaaaagagct

SEQ ID NO: 66965 - DNA, 1060 bp, Homo sapiens
ttttttttctgcagctgctatccacatcagacagcccaggagatgaaaatgcagagtcatcaagtaagtacaatggataataatgaatgcatttaaatagagtcatttggtactgttaatattgaaagttgataatagtaatgtacctgtatattgatttataatttacgatgaatgcattttcaaatatactgtgttggtatttcccaaacttcagtgcatatcagagttgcctggagaactttaaaaaatatgacagatttccagtttctacttcagacctactgaattaaatctgagtatctaaaggtggggctcaggcatgtatagttttaacaaactacatacatccagcctaacacttgttcttgggccagtgtgggagcagatgtactatgatattagattgctcacatattctttctgtgaaagggaaagaatagaacacgttagtcacctttttaaatagggacgctgaggctcagaaaggttaaatgacttgtacatcaccttacacctaaaatgcaacagagctaatatttgtacaagcccctctactccattatctcatgttcaattcaattcagtatatatttattgtatattgtatatcgcctgttctgaggaaagcatagagaacaggatagagccaacccaaatgtccatcagtgatagactggattaagaaaatgtggcacatacacaccatggaatactatgcagccataaaaaggatgagttcatgtcctttatagggacatggatgaagctggaaaccatcattctgagcaaactatcacaagaacagaaaaccaaacaccgcatgttctcactcatagttgggaattgaacaatgagaacacttggacataggaaggggaacatcacacacagggcctgttgtggggtagggggatgtgggagggatagcattaggagatacacctaatgttaaatgacgagttaacgggtgcagcacaccaacatggcacatgtatacatatgtaacaaacctgcacattatgcacatgtaccctagaacttaaagtaaaataattta

SEQ ID NO: 66966 - DNA, 1453 bp, Homo sapiens
agaccgggtgtaattaaagcaatcatgccagtggtcgtagtgccggagccactgtttcacaggccactgtgttaggttttgttttcgagttgctttctgtggtcgttgctttgaaattgtaagggaatggcagagtttaagagtttatattaatgaactcgtggtgcattttactgcagttttcctagtcgtggagagacttgatattacaaactaacgttgctgtcttaattcctgctgtactgctgctgacagggtgtagtggagtgtctgtctgtctttttaaccaatgtgcctttgcctccagcagagtgccagagttacctttaggccagaaaaggggaggagagcaaggacaaaatgtttcctgtgtgaaaatttccatctgtctctgaagttgtgcgttttaaagacacgtatagttagtgctatggggagtatgttgcatttacttattttaattaatagctttttcatttagaaagttgtgacaaattgctggaattaagatgtattatctaaagtgtgaattattcttagactttactgaataaattgaagagtatgtaagttctatttggcatgcacatacagttttctaaaatactttttgttttttcttttcagatttacaaccctgaagaatctccctatccctattttgtccccctgcagtaataaatcccattatggagatctcgaaactttataaagggatatagtttgaattctatggagtgtaattttgtgtatgaattatatttttaaaacattgaagagttttcagaaagaaggctagtagagttgattactgatactttatgctaagcagtacttttttggtagtacaatattttgttaggcgtttctgataacactagaaaggacaagttttatcttgtgataaattgattaatgtttacaacatgactgataattatagctgaatagtccttaaatgatgaacaggttatttagtttttaaatgcagtgtaaaaagtgtgctgtggaaattttatggctaactaagtttatggagaaaataccttcagttgatcaagaataatagtggtatacaaagttaggaagaaagtcaacatgatgctgcaggaaatggaaacaaatacaaatgatatttaacaaagatagagtttacagtttttgaactttaagccaaattcatttgacatcaagcactatagcaggcacaggttcaacaaagcttgtgggtattgacttcccccaaaagttgtcagctgaagtaatttagcccacttaagtaaatactatgatgataagctgtgtgaacttagcttttaaatagtgtgaccatatgaaggttttaattacttttgtttattggaataaaatgagattttttgggttgtcatgttaaagtgcttatagggaaagaagcctgcatataattttttaccttgtggcataatcagta

SEQ ID NO: 66967 - DNA, 1985 bp, Homo sapiens
gttattcaggcttcatagcttgtaaccaaatataaataaaaggcataatttaggtattctatagttgcttagaattttgttaatataaatctctgtgaaaaatcaaggagttttaatattttcagaagtgcatccacctttcagggctttaagttagtattactcaagattatgaacaaatagcacttaggttacctgaaagagttactacaaccccaaagagttgtgttctaagtagtatcttggtaattcagagagatactcatcctacctgaatataaactgagataaatccagtaaagaaagtgtagtaaattctacataagagtctatcattgatttctttttgtggtaaaaatcttagttcatgtgaagaaatttcatgtgaatgttttagctatcaaacagtactgtcacctactcatgcacaaaactgcctcccaaagacttttcccaggtccctcgtatcaaaacattaagagtataatggaagatagcacgatcttgtcagattggacaaacagcaacaaacaaaaaatgaagtatgacttttcctgtgaactctacagaatgtctacatattcaactttccccgccggggtgcctgtctcagaaaggagtcttgctcgtgctggtttttattatactggtgtgaatgacaaggtcaaatgcttctgttgtggcctgatgctggataactggaaactaggagacagtcctattcaaaagcataaacagctatatcctagctgtagctttattcagaatctggtttcagctagtctgggatccacctctaagaatacgtctccaatgagaaacagttttgcacattcattatctcccaccttggaacatagtagcttgttcagtggttcttactccagcctttctccaaaccctcttaattctagagcagttgaagacatctcttcatcgaggactaacccctacagttatgcaatgagtactgaagaagccagatttcttacctaccatatgtggccattaacttttttgtcaccatcagaattggcaagagctggtttttattatataggacctggagatagggtagcctgctttgcctgtggtgggaagctcagtaactgggaaccaaaggatgatgctatgtcagaacaccggaggcattttcccaactgtccatttttggaaaattctctagaaactctgaggtttagcatttcaaatctgagcatgcagacacatgcagctcgaatgagaacatttatgtactggccatctagtgttccagttcagcctgagcagcttgcaagtgctggtttttattatgtgggtaagaagcaaataactatacattttatcattttattttaatttacatattagaacatacgtgttttcaatatttagtcttttttttcctgaaggtcgcaatgatgatgtcaaatgcttttgttgtgatggtggcttgaggtgttgggaatctggagatgatccatgggtagaacatgccaagtggtttccaaggtaattgttttgaaaaaggtatttgtacaaaaaactctgtgcttaaaagaagtaggcatgcctacatgattttgtttacctttaaattataacaaagcctcttttatgccattggggaattatccttctaaaagatcacattttaactttaattattttgttgaaaaatattctgcagtcttctgtgtacttttgtaagtcagttacaagtatgaccgtacattttatttatttcccatttcttttaaagagtacttaaggattacaaagacatataaaatagattaaaaagacgttagaaaaaggtaagaacaggaaaacaagaagggacatagaatggatgcaggaataagtcaaatgtaaaagtccatgtattaagagcatatcttagatgggcgtggtggctcacacctgtaatcccagcactttgggaggccgagataggtggatcacctgaggtcaggagtttgaga

SEQ ID NO: 66968 - DNA, 1049 bp, Homo sapiens
cgtgatatataacacacagaaggatgtatattgttttatgataattttgttcctgttagatatgtatgtgttctgggttgtgacgtaaaatgtttttactatggagtacaatgaaagatttgaaagccatttttctagaatgatcaggttatatttgatatgaaacaattttaaaaaataattttcctcatatgttttaggtgtgagttcttgatacgaatgaaaggccaagagtttgttgatgagattcaaggtagatatcctcatcttcttgaacaggtaaatacatttttaaaattaacaacattgaattctgctttataataacaaaaatattattaggttggtataaaagtgatcatgatttttgccattgaaagtcatggccaaaaccgtgatcacttttgtaccaacctatattagaagttatgcttatttctcttttattaattgtaggtacatactttcatccatgttaatgacatctttggtttttacttttgtaaccaacttgatttttgagggctttttaaaaaagattgtttttttgtttttactattttgaaaaatcatttatgctgccactgtacaaatttgtgatgggattggagaaggatctttagtgtctctttgctgttttccagaaaaacaaacaaaaaataacttgttaggagctgagacccttggagagtaacccagttaaaatcttattttccaaatgaaatgagaaaccactgatacatttttctactttcctgaaactagagaaatacttgatttctaatttgggatgacatgaaatttaaggaaatctatgtgattagggtaaaagaaagcaaagcaaaggtcataaatcactcagttctcaaaagaacatatacatttacttaaagtaagcttattttagtgttgttcttttcagattgttggggatatctgcttttacctattaacttttctcttgtttcatagctgttgtcaacttcagataccactggagaagaaaatgctgacccaccaagtatgtatgagataattttaagtataga

SEQ ID NO: 66969 - DNA, 2116 bp, Homo sapiens
taaatataaattaactgtggagttttatgtgatgcgatattaaaggaaaaacattggctttttaaaaaaaggtcaggcttgattcttaggtagttttttttaattgctataaacatagacatttataaaataataatggtagttaactatgtaccacatattgtgccagatgctttacatgtattattcaatccttacaactttgaggaaggtaccgttatgtatattttacagatgaggaaactgaggtgtatggggaaggatgaggacacatagctagtgagtgggcctagccaacactggaacctaggtctgttttgacttggcaactcaaaccctacaatactacaataccacgtcttaagtatggggtgttgaaaagaacactggtctaggatgcctggttctgcagcttattctttcttgtgatcttaggccactcattcttttctgagtcttttttctccctatgtaaaaatgagaggcagtaatactcgccttgtttaattgacaggatcactgtatcaaatgagacaaattactatgaaagtgcttacaaaagtaaaatgatataatggaaatacaagagtattattatatatggtggggggaaatttttactgtcttctacaaatctcttgcaacaaaataaagtaaaagcggagttctaggacatgtaaatatatagacttaaaaattaaacagagacttcctctggaagttttccaaacaacaaacttacaaatgcaaacaagttactttgttcttttttgaactttatttagtgcctaaattgtttgtagggttggttattagtgactatatgagtatagttaaaggagtttaaaatctaatggatttctttttctttttttaatgaagatgatttgtcattaattcggaagaacagaatggctctctttcaacaattgacatgtgtgcttcctatcctggataatcttttaaaggccaatgtaattaataaacaggaacatgatattattaaacaaaaaacacagatacctttacaagcgagagaactgattgataccattttggttaaaggaaatgctgcggccaacatcttcaaaaactgtctaaaagaaattgactctacattgtataagaacttatttggtgagtttgttgggaaaattattttagaaattcttaggactggccagatgcggtggctcagttttgtatttagtagagtaatggtttttatgttttctttcctcagtggataagaatatgaagtatattccaacagaagatgtttcaggtaaaacaaagatttaaaaccaacatgaactattaccctttttttttaatgaagtggaaacaatttcactaaagttattttttgttattaggtctgtcactggaagaacaattgaggaggttgcaagaagaacgaacttgtaaagtgtgtatggacaaagaagtttctgttgtatttattccttgtggtcatctggtagtatgccaggaatgtgccccttctctaagaaaatgccctatttgcaggggtataatcaagggtactgttcgtacatttctctcttaaagaaaaatagtctatattttaacctgcataaaaaggtctttaaaatattgttgaacacttgaagccatctaaagtaaaaagggaattatgagtttttcaattagtaacattcatgttctagtctgctttggtactaataatcttgtttctgaaaagatggtatcatatatttaatcttaatctgtttatttacaagggaagatttatgtttggtgaactatattagtatgtatgtgtacctaagggagtagtgtcactgcttgttatgcatcatttcaggagttactggatttgttgttctttcagaaagctttgaatactaaattatagtgtagaaaagaactggaaaccaggaactctggagttcatcagagttatggtgccgaattgtctttggtgcttttcacttgtgttttaaaataaggatttttctcttatttctccccctagtttgtgagaaacatctcaataaagtgctttaaaaagattgtgttaccagaatattttttctttcctgatttaaaaagtaattttcatgtgtcttcc

SEQ ID NO: 66970 - DNA, 1909 bp, Homo sapiens
tcttcaaggtaacaagggtttgggttttgaaataaacatctggatccttatagaccgttcatacaatggttttagcaagttcatagtaagacaaacaagtcctatctttttttttttggctggggtgggggcattggtcacatatgaccagtaattgaaagacgtcatcactgaaagacagaatgccatctgggcatacaaataagaagtttgtcacagcactcaggattttgggtatcttttgtagctcacataaagaacttcagtgcttttcagagctggatatatcttaattactaatgccacacagaaattatacaatcaaactagatctgaagcataatttaagaaaaacatcaacattttttgtgctttaaactgtagtagttggtctagaaacaaaatactccaagaaaaagaaaattttcaaataaaacccaaaataatagctttgcttagccctgttagggatccattggagcattaaggagcacatatttttattaacttcttttgagctttcaatgttgatgtaatttttgttctctgtgtaatttaggtaaactgcagtgtttaacataataatgttttaaagacttagttgtcagtattaaataatcctggcattatagggaaaaaacctcctagaagttagattatttgctactgtgagaatattgtcaccactggaagttactttagttcatttaattttaattttatattttgtgaatattttaagaactgtagagctgctttcaatatctagaaatttttaattgagtgtaaacacacctaactttaagaaaaagaaccgcttgtatgattttcaaaagaacatttagaattctatagagtcaaaactatagcgtaatgctgtgtttattaagccagggattgtgggacttcccccaggcaactaaacctgcaggatgaaaatgctatattttctttcatgcactgtcgatattactcagatttggggaaatgacatttttatactaaaacaaacaccaaaatattttagaataaattcttagaaagttttgagaggaatttttagagaggacatttcctccttcctgatttggatattccctcaaatccctcctcttactccatgctgaaggagaagtactctcagatgcattatgttaatggagagaaaaagcacagtattgtagagacaccaatattagctaatgtattttggagtgttttccattttacagtttatattccagcactcaaaactcagggtcaagttttaacaaaagaggtatgtagtcacagtaaatactaagatggcatttctatctcagagggccaaagtgaatcacaccagtttctgaaggtcctaaaaatagctcagatgtcctaatgaacatgcacctacatttaataggagtacaataaaactgttgtcagcttttgttttacagagaacgctagatattaagaattttgaaatggatcatttctacttgctgtgcattttaaccaataatctgatgaatatagaaaaaaatgatccaaaatatggatatgattggatgtatgtaacacatacatggagtatggaggaaattttctgaaaaatacatttagattagtttagtttgaaggagaggtgggctgatggctgagttgtatgttactaacttggccctgactggttgtgcaaccattgcttcatttctttgcaaaatgtagttaagatatactttattctaatgaaggccttttaaatttgtccactgcattcttggtatttcactacttcaagtcagtcagaacttcgtagaccgacctgaagtttctttttgaatacttgtttctttagcactttgaagatagaaaaaccactttttaagtactaagtcatcatttgccttgaaagtttcctctg

SEQ ID NO: 66971 - DNA, 1018 bp, Homo sapiens
aaccatttttatattcattagtttatccatccattcaacagatatttgttgaaagcctattatgtgatatgaaatacgttgagatgttcagacagagatgattaagacatgtccctgcactgagggaactctgtcttctgggttgtttttttttttcttcatatcttccccaaaatttctaactttatataaatttagacttggtttctgttgagtcttttactagtttgagacattttattgcagtatagtgcaaagtattaatgggctaagtatgttaaatgctgctgtatttgtaagatctcttgctttgtctgtgaccatgaaagtctcagtgaaatgggatcttattccctaaatcatagctctggttttaatgtttcttgatattattgcagagactctccaacatgtgccttctgaccatacaaatgaaacttccaacagtactgtgaaaccaccaacttcagttgcctcagactccagtaatacaacggtcaccaccatgaaacctacagcggcatctaatacaacaacaccagggatggtctcaacaaatatgacttctaccaccttaaagtctacacccaaaacaacaagtgtttcacagaacacatctcagatatcaacatccacaatgaccgtaacccacaatagttcagtgacatctgctgcttcatcagtaacaagtatgtattaaagctgaccttttttttcctatgctgcaagtagttaaatgccacatttaagtcattattctgtctggcaaaaataatatagaaactttatatgcctagatttcccttaattcctaattaaatgttcttaacacagaaaatcagagagctttaattacaatgttaaaaaaaaaaaaataacgctaaagcccttttttgttttcttttgttctagtcacaacaactatgcattctgaagcaaagaaaggatcaaaatttgatactgggagctttgttggtggtattgtattaacgctgggagttttatctattctttacat

SEQ ID NO: 66972 - DNA, 1106 bp, Homo sapiens
atcatcgcgttaagagcgacaatagcagggaaacaaaaacaggctgttgtgttagcccagccaaaagatgatggtgagtggcaatggagataaaagggtggattctagatctatggggggttgggactaatcacttgctgatggattggagggtgggatgaggaagagagaagaatcaaaggatgacctcttggttttggggttgagcagctggtaatgcaacaattgggaaggttgggggaggagcaggtttatagtagaaaatcagtagttccattttggcactcatatctgcaggcttaggaatcaaactatctggtccaattccagtctctgccactttgtatctgggcggccttctctgggcctcagttcttgtctgcaaaacaatactcctaagaattgttgagagggttagatgagctaatgcacataaccctggcttgtggtaagcacctaataatgttggcaattgtttgctatctgctgctaaatacatctacgtagtctgttgaccttgatctttttcaagttaatcttacactgtatccttttgtgataaatagatgatagtcccatcaagaagaagaaattctcacaaagaagaaatttgcccaagaagtaaagataaatccttcaaagttactgcttttctttgtacttggaggatttttttttaagtgggggagagttcatctttgtgaaaaggacacaataatacacttgctctctccctatgtgttatacatatttaatcttcattagacaaagactcaaaacgaataaagcactctgaaaagttgcttaattgggacatagaaatctcttacattttttccaaatctaaaggtgtactaatttaaaaattaaaaccctactgagaaggtgcagttaaataagaaaatcctattttatccctccattgtatgaaattaggggtgttggttgggtggtgcaagacctagagatgcctgtgagtagaatcggcctctcctgaaatggtccactccactcagaagagcagagtcctcagtggcagaaattggcccatctgtccccaattgtgtgggtaaatgaattttggcaaagctgttgcattcggtggc

SEQ ID NO: 66973 - DNA, 1038 bp, Homo sapiens
ctgtctcaacctcaacttgctcaatctgtaaatggagttagacatacaacctcatagggttgttgcagaaataaatgaaaataaattcatgtaacaagcttggcatagtccctgacataaagtaaagctctataaacactttctatttttagttctctatgattctgagttttgtatattgtcaaatgtctttatttggaaaaatatcttactatttcccttgtctgtatttgcagggttcttttatttctttactggatcttcacagttggagtttgacccaaatgcaaagaaagtgacacacactttgaagagtaacagctggcttaattgttgaaagagatatgtagaaggcacaatatgggcactttaaatgaagctaataattcttcacctaagtctctgtgaattgaaatgttcgttttctcctgcctgtgctgtgactcgagtcacactcaagggaacttgagcgtgaatctgtatcttgccggtcatttttatgttattacagggcattcaaatgggctgctgcttagcttgcaccttgtcacatagagtgatctttcccaagagaaggggaagcactcgtgtgcaacagacaagtgactgtatctgtgtagactatttgcttatttaataaagacgatttgtcagttattttatcttattgttgtgtttgtttgtttcaagggcaagttgttctcataatttgggcactttatgggctgagcatgctcagccagtagactagagtctccatggcttggggttcacaatgggttccagaactgcagagaatctaccacttgccctcctcatgagccctgcaaacaggatgcttatttctaccacctagacattttatgtgtcctgacatacctaaggcaaaaaatctagaggggttgtgacattgtagagcaggctctaggaaaaactgtgaagggaatcctataatcatagcaaattgccttgtttgcacatctcattttacagggtgaggaaatcagacttgtttttcatcttttccttttacttata

SEQ ID NO: 66974 - DNA, 1034 bp, Homo sapiens
ttcagaggggttttcacataagattggaattttataaactatatcataggagaaaatagcatctgcttcaatttttctcctacaggattgtgaattatacaccagatttgccaaaagatgctgttgattctgctgttgagaaagctctgaaagtctgggaagaggtgactccactcacattctccaggctgtatgaaggagaggctgatataatgatctcttttgcagttagaggtaaaaaaaaaaaaaaaaaaaaaaaagcaaaacaaaacaaaacaaaaaacacatgaaatgtatccattcatctatctggtgttgttgtactggaaaaggctcaaaagggatccttgttacatatctttccaataaatttttttcctactagaacatggagacttttacccttttgatggacctggaaatgttttggcccatgcctatgcccctgggccagggattaatggagatgcccactttgatgatgatgaacaatggacaaaggatacaacaggttagttacacatctctcagaatgattttggcattaatttttttatatgtagaaatctgttaataaccaagaatgctcaagaaatgagatgttctggattttccagtggatcagagatcagcagaatatatttttgttttaattattattgaaaatattttcagatgctttaacagttttcctatattggtaagcacaatataggaaatatcattaagtatttctttaatgactggatctttgtgatctaggggtaaccattattaagaaaaatttctcatatcaaaatacaaacattcaagggatagtatattgcactgaatctacattaaaatgtgctctggatgttacttatgtaatttcctccatttacttctttactcttcaaaccagaaataagaattaaatttcagaaactgagattctcttttttttttttttctggctgaggcattattttagtacttttaggttaaaagaatttttatgggcttgttctgaaggaaaagactaactcccaaat

SEQ ID NO: 66975 - DNA, 1048 bp, Homo sapiens
gagaaatattttatgtggtctttggtctctgcttacaaaatatggcagcctattcttgaacaaaaagaggtgtttcaggatgtctggtaattgaatagtggtttgccttcttgactttttaaaatatgtaaattaaactgatcacaaaaccatttttgtttttggacatcaataaagacctattccttagtattctcttctctgatttctattcttatcctctaaagagacttttcaaatgtcaagaatgatactcttttttttttttttttttttaaattaaacccaagagcccttttttggtttttgtttcccatgatcttgtagaacgaccttcttcttcttgaactctcctcttttccaattttcaagacatcactactctagactgcctacctccttgatagttcctcagctcattactgtgagcaattccttgggctcagttttgacttctggcctcttctctttatatccttcccatgagagctcatccactcaagcctctgctcttccttccctgctatgtggatgcttctgaatttatattgctatacagtccatgccttcacaggatattttccttgatcagttctccttcaacttgacttaacaagtgtaaagcaaaactcattgtcttaacccctaaactaagttcccttccagtttgttctcatcagggaaacattcttctgcagcattatccttcattcctcataaccagctagacattcaattctgcagacttttttctttgaaatgtctattatatctctttcttcctcttttgtgtgcaccaccatcacacaagtcacacaatggattattgcaccaattttctggctggtcacacagaatttatctgatcagtcaatatatctggtctccttctttccagtatgcttgcatcatggtacccaccttatcaaatatttttactggccttattttcattcaatagaacaatctaaatcctctgtgtggtaagttccagggactagaagtggttgttttagtaaaattagagagagggatggagagggaacat

SEQ ID NO: 66976 - DNA, 1840 bp, Homo sapiens
atttacagtgtagttggcaccaagtaataaatgctcagtaacatagctactatggctgtctttaaaagtggattggtttgacttcataggaaggactctatttttaaaaaagagaaatattaaaaaataaaaagccaaaattctatgatgtcttattacattgagtctcttaaatcagtttttttttaattaagtagcaggaccctattgcaaaataagttttacctagaagcacagtatttaaaacagaaagctaaaatactctggttaagtgggaagctccctgtcttcctcgctgctagtattatttctgaaaaacctcaaaggaactccttgctctctgaatagcaggttttaaaaaccactacttgcacatttgcaccttgacatcaaacatgtgaacaaagtaatagagtgagaaaactgaatttctatttaggaatttctattttattctctctataaaaagccaagaagtggttggtgtttggaataacatgaaaaatattccaagtatctttggaaatacttacactagaactataaggtttatgataattctatcttagattcattatctagagctggtctaaaaaaggatgatatgtaagaactaccaagagagacttggagtagatacaagaatgaaggaatgaatcaatatccaataaatatccataggcccaggctttgctatgccctcttattacacaggataaaacagtgtagttgttagtttctacctttgaagattatgatccttaaaaaggaaacagctctgtgaacagagaccatgttattcataggtgttcctcacttgtttccaccacataataggtatttaatgaatgaaaaaattcacgtctctctttgatcctagactgcaagttacttaaaagaaatggaccgtattttacttatctctcatggcctgcaaattgagtttgcttactgaattaatgaatgaatgaccaattgtacacatatgtctgtaaaacgtttacatatccacattcccattagactgagattcttgagggcagaaaccatgtcttcagctctcagcatggtgcctgactcatggtaggttgtcaaaagcatttgcagaactgaataaaacttacgtttaagtagtactggagcagtctcacataaccgggcacagtgtcttctaaatagacactaaaattatttcataattaaagacagatctcactaagcattttctgagttagtgccagttgaataatatgacaataagctataggagttcagaggagagtgagttctgtggactgaaatagtcaaagtggattttcagagcagatgagacgcgatgaaggctggggctactttggtgttttaagaacattaattaggcagcaggaaaatctgaggacagggagactagtaaggaaggctggaaagagccctgggtttggagttcagagatctgtgttcagagtcctttgcttcttagtgactatgtgaccttgagaagataacttgagctccctttttcctcttctgtgaggtagaggtaagattgatgtgcatattgatattgtacttaaaagtgtttgtaaaatgctaagtaaaacctaatgctatgctttgaatgtagtgggttccaaatatttgtttaatgacaaagaataaatgatattgactaatgaaaataatggagccactggaatgtcacctcctgcatctgccagtaaacctgttaacacaggggtggcgggggggggggggaagtaaatatgtgaagccaccaaatctcatgatcaggagaaaaactttggaactcccatgagactccaaagttatgtcacaggtg

SEQ ID NO: 66977 - DNA, 2867 bp, Homo sapiens
ctgcctgattgtaggtaattacgtagggcattatagccctttctcaagagtaggactttactgagtgagctagcaagcaattaggattcagatcaaagcaaggatggaagcaggtagtagtaggaagataatatggtaaatccaggtgacaaatggtacaatttgagattaagagtaatggaaataataagtggtcagattctgaatgtattttggtggtagcaccaaaaggatatgctgatagaatggatgtgaggtatgaaaaaaagaatgatcaaggtttttggcttgaagaatgaagtgggcattaataagatggcgaagactcagaggagcaggcttaagcgggtagattgagagtttacttttggatatgttatggtagacttgtctgtcagacgtccaaaggaaaatgtagagtgggcagttggatatttgaacctggaaaagtagaggtctgggctggagataaatatatttggaagtcatcagtgtgtaatcttattttaagtcaggacatggatgaaaccacttagagagtaagtgtagccagaggatagaacttaattgaagacatatgatcgatgaaattcaaggccaacttttgtgatttttcaaatagaaataaaatgttaacattttctaccacacatatacaaaccattactttctatagtgttgtagaagcactaagatttaaaaagcaagattgataatagttgccaaatatgtaaacaaatggcaaattaaattgaggagggagtgtcactttattcttggaataaagtttttgttttgaagtaatacagttttttatattaagaataacaacatctggagtgctagtttctttttctcattgttggaaattgctattccaattcaatttgacagttttagcactagagggcaggcttgcttctagattgtgaagagttctacatgaattaatatagccaaacagcgcaggttgaacatccttaacttgaaaatctgaaattcaaaatgcttcaaaatccaaaactttttgagtgttgacatgatgccacaagtggaaaattccacacctgacctcatatgatgggtcacagtcaaaatgcaggtgtacaacagtttactctgttcccaagagaaaaataaaattagctgcaggctatgtgtaaaaagtgtatatgaaacataaatgaatttcatgtttagacttgggtcccatccccaaggtatcttattatgaatatgcaaatattcaaagatcaaaaaaaagaaatctaaaacacttccggtcccaagcattttggataagagatattcaacctgcacctacattcaatctcaattaatgaatgcagttgtttcttatgtgacaggtttgccatctactatgtttttttctagtgctaggaaagcataaaataaggctaattgattttagtacatctaggactggcagttgacgctaatatacatttgaatataaatgtatatttatattccaaggagtttccaaggaaactcaagtgtagcttaattatactcagatttgatatagagggtcttccaccacatatatgaatattaaagccagtcagaagaaatcctggacatgaaaacattttttcaggaaataattaactatgtgctgggtattattatatgagcgtggctacaaagatgaataaaatatagtccctgcctaaataagctttgttgtagcatcttacagcacttaatatcttgtgctgtatctatttaaatgtctttttcccttcaataatagaaatcctgactcacttatttttggtgcctccaagtgcccatcacacaattcagtttacagtgtttgaacatgtgaataatgagagagagaaaaataagaaaacggtcagggaattggggcctttgaaaaaacttattttcacatttttacccttagagagatgcttttcctattaacacgtctaaagattatggagacaattctaaccttctatctttgctcccactacttcttcaagcagactttaaccccattcctcaagagcagttattggcagccatagagagtgggaggtcaagccttttttagtcattggagtaaacaggagacatagatgtggaaattgggaggttctctctatctggcttacgtcagtttgagaagtttgacatgaaatggaaccttctggaatgaggttctttttcctgcttttcacctggaaagttttcccatacatggtcctcttgcacccctagtccttttagggtacctatttctgtgtgctagttctttcatttccttgtctgtaacatgaggataataatagtccttatctaatagcattattttgaggatgaaatgaaatacaggcagtaaatattagttactctttgctatctggaaaaacatcaattgaacctcataggatggacttgtgttcaataagtgttatatatagtagagtcaaatggaaaaattgaaccactcagatacatttttttcattgatacataatagatgtatttatttggggggtacatgtgataatatgatatattcatataattaaaattcattgatacatgatgtatttatttgggggtacatgtgatagtatgatatattcatataattaaaattcattgatacataatgtatttatttggggggtacatgtgatagtatgatatattcatataattaaatgaagataattgggatatccatcaccttaaatatttatgttttctttacactaggaacattcgaattctctttagctattttgaaatgtacaatagtttagtgttaatagatcagtcatcctactgatatatcgaacaccaggtcttatttcttctgtctacat

SEQ ID NO: 66978 - DNA, 2203 bp, Homo sapiens
agtccgtcagacatcatagcaagaactatgtgaagaaaatgcaaacctttcaattcccacgtgtatacaagctaatgtgatgagggggaaaaaaatccaacgggtgcattttcattcatatgaaagacttctcatagtacttttttttcctttttttaaaggaggtttttcttgttacatgtgatgggcattgagccacacctcttcttagactgaatattgaagtttttgttttgagttatgtttataacatttatttcagaacaataaagattcagatttgtgacaaaggccttaaagtgaagatgtcccttgagtgtcagagtggtatttatttttgtaaatttgaattttttgatttttgaggttccaattcaccgtgaatttacagaattttcaagattttaaacagtcttaatatttggcaacatagtctgctgatggtatggctcattatagtcatctctgcacaatttggaagactgttggccttgacttctgggataatgatttgctgatgcagctaataaacatttctaggtattggaaaaatgctcctacttttagctctgggtttctataaaagctgccaaggtcttatgcagatgtcttatctcagagagcttagaattggaaagattatgtccagttgttttgttttctaaaaaagttgtattattaagttgtatcatcattattattgttgataatagcatatttatatttttaactgtcattatatagggaattttgtttaaagcactttttttttttttttttgccttaagagaacgttagctgtgatatggatttaattaagatacacataggaaaagaagacaatagaataaggaatcatgagagaactctgggtataattaattgtgcacaactcaatagagccatttacgttggtagtattgcagcttgctaattatcacaattttctgcctgttggtaatcaagtgtcttgaggaaagggaaggctttcctaattcatgtaaaaggcacttttgtactagcagcaggcctgtttgtacattccttttcaaaccatccagtatcccagtgatatgaaaactttgttcatattcatagcccagtcacaacttcagaaacatttctagtgtcattgtttgagtagagagaagtaaagaggttatttttccataataagggagtgtttctattaggatttaaggtaaaggttgatttttcagtggtgaatttgtttaaagaatgatttctccatattgattacctaagagaatgacattttaaagtgttttattgtttgctttttagttaatcagctgggaaaaaaatgattgccactgttttacttgccttcttaataagattactttgtacagttttctgaaacacccataatagtgggagacagttttcctaaatgtcttatagaaaaggataatacagaatgctcctcttaagtattagaatcactgagttatgaactgagcataccagtggtgttaggatttaatattatgaatgatgttttaatatcaaatttattataaggaaagcatttagatttgtagacctttaaatttataatttagttgactcttcaaggcacatctgaactgaagaacatatccacttttgttaaattccaaaacatataagcaaaatcttataaattgtccatttgtaacctgaactaatggtaatatctttttcatcttcagtatttgagtaaaatagggaacacttaaagcttatagatgacatgttttttaaaaggtatatttatgaaagcacaggcatccttggtatacgcaggagattgataccaggacccttgtgtatacccaaatctgtgcatacttaagtcctacagtcatccctgtggaacctgcctgtataaaaagtcagccctccccgtgtatgtaggtgtcgcatcccgggaatactgtattttcaatccatgtttggtttaaaaaaatctgcgtataagcagacccacacagttcaaactcatgctgttcaagggtcaacagtatttactttgcatacttatccaaagatacctttaagactttttgagtctgaaaatgaaatttactttattttttcccttaaagtcaactgtcctatcctaccctagccatactttggagtccagtaccactgaggccacgcttgctttactctattgctccatctatttctctta

SEQ ID NO: 66979 - DNA, 1079 bp, Homo sapiens
taactttcccaaaatcactcaattaagtggcaagggtgggatttaaatcgaagcctatactctttcacttgtttccaaagatgccaaactcaaaatgtggctaaacagtaaatcttgagcaaagaaatgatttactaggaagcagcacaatagaacatactggatgtaggaaatgttatatatcttgatctcattggtggtaacacaagtatatacatatgaaaaagttagttttatccttactgttagtactcagtgctcttattattcctcaaaaatgaaaaaaaaagtaaaaaatagattatgttaatatgtaaatgcccatgaggaatctcttagaaacacaaataattaaaaaaatagtaaatgttttagaaaaaaccaaatcacaaaaacagttaaaacttagtttactaaattgagtaaatgatgtttgtttaaatatttaaatacaaatatttaaatcatttttgcagcaatcaaagtatcgtgttatgaacaaagatcaatggtacaatgtattagaattcagcagaacagtccatgctgatcttagtaactatgatgaagatggtgcttgtaagtataacataacatgttcctttgaaaacaaaatttccaaaaatattaaatgagagtatgcatttgtgtagtattagcatagaggttttaaactttgtaatagtaacttatttaattgtgtgagggattgtgggagaagtagagagagagcttagattcagcagtattatataaaatctatgctggtaaatgaaatgttttcagttcctcggcaaccaaacattttagctaaatttaaattataatttttgcatccagaagctaaaattcagctttgtttctgtctttcctggcatttgcctatggaagaaaagtacagtcatgattttaaaaatataacagcaaaacaatcagccacaatagaaaaagctttaacattattgtaatattatgctacccattaacaatatggcaaataatgtcagtataacttctctctgaaaactataaattgattgtgagctaactgatagtgaaatagttataatttttcaatc

SEQ ID NO: 66980 - DNA, 1063 bp, Homo sapiens
gcatatctttatggtaggatgatttatattcctctgggtatatatccaataatgggattgctggatcgaatgatagttctacaaacaatacttatcaaaacttgtggttgcagctaaagttgtattaagagggaaattatagccttaaatactatattaaattaattaaattctggtaagattggtcaagaaaaacaacaaaaaagggatgaagataatgctaatgcaaattagaaaatgttataaattttaatcatatttaaataaacttatatgtaaaataatcagttatgagaaaagtatgggaccaaaacattcaaaaagaaatagaaaatctgaatggccctatggccattaaaaatgttggtttattagttaaaagttttccttccctcaatactcacctgagtttggacagatgctaattccagggttacataagctttttcaaaaaacgggggggaaaagtagcaattctcttttcattttctgagtcttatgtactacaatcttgttaaaaaaactagcaaggagagtaagaatgaaacttaaaagctagtctcacttaggaacctagcaaaacaaccccaaaatccagcaatgtataaaacagataacatgaccaaatttgacttattctagaaatgcaaggtttaattaatattagaaaattgtccaaaatatttacacattaatgaaattatgttactacacattataggcctttgcattattgatttagtatagtcttagttaaatctgagaatgccaggtggctggagagcatgttgaataactaaaattcagttttgagtggaatactgtggaccacagtagatggcacaattaatttgattaaagggagtcagatggtctctcagaggtggcaaaatgtgagttaggtcttgatgaataatatttttatcagcatgtttgagatttcaagtggaaataatgggtgctgaagtatggcagtggcatttgggaatggtaagtgatataattagagcatggtaaggttatcaggaagtggcaggagatgaaactagagatttgtgccaaa

SEQ ID NO: 66981 - DNA, 1171 bp, Homo sapiens
ctgacaggaggtggatatgctggctcactcgcctgccgcttgcctcctgctatacagcctggtttctaacaggccacaggctggtaattatgctcagcccagacattgggcaccttgctgtaaccataaaccaaggagaacgtgacatgtgctagagtggaaatacaagatactatgaaagcacagatgagtaaggttaatttcagctgagtaggtaggtaaatgtaggtgtggcctgtgaactagaacatgaagaatgattaggattttgtttgttgaggatacaggaaaatgtttcagaagagggaaattgtgagcaggaccttgaggaaggaaagcatatgtttgaaggaagtagtttgatttcttaaaattgtaaagtacataaaaaaattgccaggataggttttgaattctaatattttgagtgatggcttcactgtagagtgctttagctaatacgttgagagagtttaaatctatgttacagatattgggaaaccatcagagattttaaagcacaggaattttaaaagatttgggggataattttcaatgagcaattgtttttaatattttaaagtcacagtctcttttgagagtcttatgagaactatggacctcgttcccattaagaggcacatgtactgctagacacaaaaatttgatgtgctctcaggaggttatggaatttctcttccttcgtctatagatacgaggtttcaaggatacttggcgagtttttgttctggcatagtgtactagagtggaggtcttttctcatatctgctagctgaaagtctggtgttggagcaagggtgaaatactataccagtggagaaaactgaatatagacctttgaagaggaccgtacttgattatgataatgaaaaggacaagacaagagcatctgacaacagtgatagtaattaagctgcctgccggtaggttgcagtttgtaaatctagtctctattgagccccggactttgaagtgtaaaaggaatggcatggcttgaccgtcttagcgagaggggaatagggaacatttatatgatttttttttttggtgggggtggaagaggagagtaaatgaaatgccatcgtgtgtgatgtgactgtcattcatttagcatttggggcccaactactaattgccattagcatccttt

SEQ ID NO: 66982 - DNA, 1052 bp, Homo sapiens
atttcaaaagggtaataaatggcctgttttataggtaaatatattccccttctgattactgtattgaactttgtgttggttctgatattccagtagattaagaagctccagctgccttatgttttttcatattcatgcattgtcaaaaattttattcagagtaggctctcagtgaattttttttttaatggattggtttgagtttttgtactaacttgtgattgatactaatggagtatttctttgctgctttttaaattttcttaatttcatattgtaatctggtgttcaaagaatacttcacaaattttaaattttaaatcctgtagcaaatatttatacttatcaaagctatgccaaaattcaaatttaattatttgcaaaatattatggtgtgttcatgggtacctttagcatgacgatttatgttttatgttgatattataacaaaatatgttaattatttttgtctttgaaggtcctgatgaagttgtagggccagaaggaatggaaaaattttgtgaagacattggtgttgaacctgaaaatgtatgttttatttctaagtagaatggcatataagtggggtatagcatattcgtaaattactaaaaatcgagacactttaatcttgtatgaagattttatttcttcatgtttaatattgtaaatttgcatttaaggtatttttaatcagtttaagttgggcaaatgtattctttcttgatacaaatgttatatgtaatagaataagagattctaccttcagaaactgttagaactttttacttttaagaaattggcacatctcaatttctttgtatatagttaataattccagaggttgtactctttaatagttgaaggatggaagtagttgtgtaaaaatgctctccatgataaatatagacatgattatctctatgctgacttttcccctatcctttatgttctgttctttccagattattatgttagttttagcgtggaaattggaggctgaaagcatgggattttttaccaaggaagaatggttaaagggaatgacttca

SEQ ID NO: 66983 - DNA, 1378 bp, Homo sapiens
acaaccgaccctcgatcccctactcccgtatcgctcctctgcctttttctagacttagaagtgagtacatatccgcagaagggtcacttctagaatttctttgtagagtgtgaagaaagcagaacataaggaatcttgacaactgtcttgggaatggtagaaaggaaaacttgtatgctataattggcctccatatttagtatttggagtggcctaacccggaaggtcccagcaggaggccttttaaattgcaggagccccattttctggaagtatagtgcctcacctatgccaagtccctgtgtgcagagttggaaaggccctgcatgctttttgtcttctagcattcaggacgctgttagctctcagcataaattaaataatttgtgagctcttgtactctgtcctactggtaagaaagaagacaaggcagaactatatagtagtagctctttgatccccttgtagcatatcatggaggcatcacagcaaaatttatgctacaaaaaaactgcaattttggtttgagaaatggtttttttgtttttttgttttgttttgtttttctgagacggagtcttccactgttgtccaggctggagtgcagtggcgcgatctccgcttactgcaacctccgcctcccgggttcaagcgattctcctgcctcagcctcctgagtagctgggattataggcgcccgccaccacgccctgctaattttttgtatttttagtagagacggggtttcactatgttgactaggctggtcttgaactcctgacctcgcgatccgcccgcctcggcctcccaaagtgctgggattacaggagtgagccacctcgcccgactgagaaatgcttttttaaaaaataaccatattagctgccttttcatcaatggttggcacttgatatgacaacttcagatgctactattgaaaggagactgtagccaggattataagaaggaaataatgatagagctctccttaaagagagatctgcttaaactgtgaggtagatgacttacatagtctgcatcttcttttttgtaattggtcgacttttttccctcattactgtgttttggtaaaggagtctatggagtattaggctattaatgtgaacgatgatacatacacctcttgtttgtcaacattagaatttgacatggttactttagtagctcacatttttataagatacaggcaaattattattcatttttgtactatatcatggccatcttaagtatataatgtattaaaattatttaagttaagtacattaagatagctgagcaggcagtattattagaactcaggtgatactttgctctatcaatttaaatttttaaatatgatactcttactttactc

SEQ ID NO: 66984 - DNA, 1063 bp, Homo sapiens
ggctagatgtctctcttctgattatgcgtgataagaaatcagtaagaagaataaaagacatgtttgagagccaacataaacttgtccgaaccccttacaatcgatgaccgcagggagccgctgaagagctccgaggcggtcgatagcctccgcgagctttgcgtgcgcgtgccccgagagggcaacgcccaccgcgcgccgccagcgacgccgccgtagtgctccgtcgccatagcgactacccctggcaaccgcgaagctctgcggtcccgcggtcgggctacgggtttgagcaaagctcctctcttcccttcacttccctccggactggtttcttcttccttcccccttcccccaacttccctccaccccttccaatcatggcgaacgggactgcggacgttcggaagctcttcatcttcactactacccagaattacttcgggttgatgtctgaactctgggatcagccactgttgtgcaactgtcttgaaatcaacaacttcttggatgacggcaaccagatgctcctcagggtgcagcgatccgacgcaggaatctccttttccaacacggtacggttccttgcactcctgcctgacccctgaccactcttcaagtccccaggcccagccagagggacgtcgggtcacactctttagctttaccaaccagatccttttcaggaacccaaggctgtctccacttctcctgcattattggcttagatgcgttggcctcgtgcttaagcaggtagtttccaagctttgcatcctacctgaccgaagcatgtttcccttccatacatctgaatagaagcaattagattgtgttttattttaaatttttatacggagtttcgttctgtcgcttaggctggatggagtgtagtggcgcgatctctgctcactgcgtcctccacctcctgagttcaagcgattctcgtgcctcagcctcccgagtagcaggcgcgcgccgccacgcctggctaatttttgtattttcagtagagacgggggtttcaccacgttggccatgtgggtctccatctcctgacctcaag

SEQ ID NO: 66985 - DNA, 1032 bp, Homo sapiens
cagctaatgaactcattactatgaactgacctattttaaacaagattgctgtagtgaattccaattgagttcatctggttccgatttaaaataatctagctatatgacaatttaacaaagttttatgctcttaactctttaaggaaaaattttcagttaagataaagttaatttcaggagatagacaacttaagttcattttggtagttttgagtgcatgtataattttaaaagcaccttttaaaatgctttttctaagtaagagggtaattaattacattttgttatagactttctgggttactagagaagcacactactcattgtgtacctggagcctacagctttcatctgtactattactgattctggctagaatggactctggctggaatggaatctggctggaatggaatctgactggaatggaatagttagcagtcaacaacgtatatattgttttatgtttataaataacttatcaaagtgactttatgatctaatgtaagtgggaataagtttttaaactgaagtattcttaaggaaagaagagataaattggttttaatatatttatttttaaagtaactatttttttccaagaggtataattatagtgatagaactttgtctacatttttttcaaatattaaattttatgaagataacattaaaaatcatttatcactttagattgagtttggtgacacaaaagataaagtgctggtgtttttcaagctgcgacctgaagtaattactgatgagaatctacatgataacattcttgtttcatctatgttagagtcacctattagttctctttaccaagcagtacggcaagtattcgcaccaatgttgttaaaggtgagaaaagaagctgtcattttttttaactgaggtatttggataaatgttttcatataaacataaatatctattttttactgttaatgttagtagtgttttaattttaattaaaatatcttttcttaactttttttaacttaaattttaatgtaagttgtggtaaaa

SEQ ID NO: 66986 - DNA, 1380 bp, Homo sapiens
cctcactcgagtatttgaaccttttactggcctgaatcctgtgcaatataatccatatactgaggttgtatatatatttgtttatgtctgtacagtttcctgtttatgttgttctttttaaagacagatttaaaaaatactaaagtctaacaatgttgttaatgtatgtagcccttgtggaaagctgcggtgtctcaatatgaaaagattattgcacctgcggaacaaaaaatagcaggaaaattgaaaaattatatttcagaaattcaagacagtccacagcaggtaaaacattgagatatttcacttttaatatttctcttaagctaatatatatataaaaatatatatatatttactgagttgatccgttgggatgaacatgtacttattttattttatattagcttcttcaagcattcctgaaatataaagagttggtaaagcgtccaactataagcaaagaattgatgttagaaagagaaactttactggcaagacttgtggactcaattaaaggtaaaagtttatgagattatagtgtttgcttgagagaatatttttgtatattacttttttcttcgttgcataccatttaggattaaagatacatttttctgacattttcatgctgaagattaatttacttattctgttataaatgacagatttttttgcattaacaagttattataattcgctgtttcatttgatacatggtacagtccttggggataaggaccaactcattatttttctttctacagcatctgacatagtgcttggtacgtggaagttatttaggaaatctttgctaattctttgtaatcatttatttgatttaaattttatagattttcgattagactttgagaatcggtgccgaggaattcctggtgatgcatctggaccactttctggcaaaaatctttcagaagttgtcaacagtatagtttgggttcgccagttggaattgaaggtatttattttaataaaagatgaagagtactaattataaaatctgctaaattaaggcatgtagaaggtactctagagctgtagtaaatatattctctgttttccttggcatgtctgtctaattttcatacaaaatgcagaacactgaaaaagtatgcagaggagtcgtaatggttctattccttctttctgtagagataatgcatcatttattccaattgcagttgttccaaagaaatacctgtattcaggaggaaaacatcctttatgctgagtaaaaaaaagaaaaattattgtttacaaaaatgagctggacatggtgctgcacatctgtagtcccagctactcaggaggctgaggtgggaggatcacctgaacctgggatattgaggctgcagtgag

SEQ ID NO: 66987 - DNA, 1035 bp, Homo sapiens
cttatataaccggagtagttatcaaaaccaggaaaaagactgttttgaattttacaattttccactaacattcttttttttttccaggatacaatctagaatccaactctgcccttagttgttgagtctctttagcctcccctcctcagtcttttccttgtttttcatgactttgatgagtactgatcagttattttgtagaatctctcttgatttgggtttatatgatgttttcccatattagattggggctatcttattttggcaggaatagcacagaagtgatgttttgcccttctcagtacattggtcaagtattgatatgtcttgtatagattaagttaaacttgatcacttggttaaggtggtatctgtcaggtttctccactgaaaagttactatttttccagcaatactttgagactagcatgctctaatttttcataggtggttgttcttatgaatattgatctgcttcggcagcaacagcgctggaaagatggattacaagaattgagaactggcttagcaactgtagaagcacaggtagagtatgttttattttgtgtgtatactttgaaatatgaccttttcagaatgtaagtacaatatatgaattgccgagaagttcataaaagttatctttaaatcttactaataaatacctaatatatttataatttttgactgaattatatataaagaccacatatgaacaatcaatttacatttaaaaatataaaaataagttcctgtagtgtcttatggaatgccaaattcctcaattcagaatttgtaggtttttgtcttggtatttaaatatctatcacttattagttctcttctaggtgatcgtgatagccgtaaaaaacaaagttaagtttaggtagaatcctaatgattggaataattttattccagatttttttcctttttggaggtaaaatttgagttctattcatattttgatataatagttgatgcatataaaggtggctagcacaaagcctgctacatagtagatggtaatgaaat

SEQ ID NO: 66988 - DNA, 1046 bp, Homo sapiens
gagtaacaaggatgtaccagttttacatatttgaaatgagttggttttatttttgtgattataattgtgcattatgtgacatgaaagtattaaatgaaaaatccattctactgcctaatttttaaattaaaaatgtgaatgtaacatattagggattccaagcaagtgacatgcatgcatggaaacaacactggaatcatcaactgtacaaagctctggagcatcagtaccagatgggcttagaagcacttaatgagaatttgccagaaataaatatagacttaacttacaagtaagatgttttttcaaccccaatttaatgttcattgtataattttctaacaatttatgttttaaagttatttatttacttttagacagggacgattacaattcaggcccccttttgaagaaatccgggctaaatattatagagaaatgaagagattcatcggcattccaaatcagtttaagggagtgggtgaggcaggagatgaatctattttttctattatgattgatagaaatgcaagtggatttttgacgattttcagcaaagcagaagatctgtttagaagattgtcagctgttttacaccaacataaggtatagaacatgtaatgttccatccttccatcataaaattatttctgattgattgaatttacattaaatgtatacattaatagtttaccttgtgtggcataacattaaaatatggcaaagcagagagctggattcgtagatacttatacaacctagatttatacttcagaagagaaaaaagttatgggaaagattttttttttgtctttgattattttgtgacaattgagaaacttgttttttttggttttttatttttattttttattttttattttatttattttattattattatactttaatttttagggtacatgtgcacaatgtgcaggttacatatgtatacatgtgccatgctggtgtgctgcacccattaactcgtcatttaccattaggtatatctcctaatactatccctcccccctcccgccacccga

SEQ ID NO: 66989 - DNA, 1039 bp, Homo sapiens
ttctatcagtttgtgtcttccaggcttcaaacctgcaagcagtctttgatgtttctttctttcttcctgactgtgaggaaatgtctaaagtattcttcctagataaaatggggaagatacttgaaagtaggcattgaggatacacaaaacatttgttgagcaccttttcttgccagtagtagtcctagggatgtaaagatgacttagtttattttcactgaatgttcgcagtctaatgaggggctgagtcatataaataagctattaatgcagtgtaataaatgtagcaataacagtatgtctaacttacagagatagcacagaggaggagtaaataactttgttgtatatggtagttgttaaggaggaggtgaagtttgatctgagttttgaaaaattaatagaaattcaccaagttgctggaggtgaaagaatgtcttcttagataaagggaatagcgtgtacaagttatagacatgtttgtggaagatgctttttataatattggagtagaagtggggataggtaagtttaaaagcaagaaattcctttttttaaaaaaataaagatgttaagtaatcaagatcagaataagagtaatggctctgtccatagagaggaagggacaggcattttaccggttggttgtatattgaagagagatactttgatttgttcagtgacttcttgaacttaaattgttttaatggttcccagcattaaaaaatgggtcttacctagacctgtgagtaccttggaattgcaaccatcatatttaaaggttaggtttgtttttattgaattcttctgttcagcagggctttttagcctttttttttttttttggccatctgttgaagcctatgaacccttcttagaatatatgtatatatatatattttttttctttttcttttttttttttttgagatggagtctcgctttgtcgcccaggttgtagtgcagtggcacaatctcagctcactgcaacctctgcctccttggttcaagtgattcttctgccttagcctctcaagta

SEQ ID NO: 66990 - DNA, 1050 bp, Homo sapiens
agcatggaagtatcttgtataaaataactatcattaggatattttctcttatttttaatgaatcatacatataataagttatttttattttctatttttttctagttgatcctgattttctaaaatcatttttattaatccatgaatcttgtaaagcatatggtgctacaccaagccgatacatgacctttttacatgtgtattctgccattagtagtagcaagaaaaaggaattattaaaaagacaaagtcatttgcaggtatagtattggtaatcttgaattattttatctatatataggaaacaagagttttgtaaatcacaatgctatgttgcgggtggcatatatctggtattaataaatgtactgtattaaaagccttggaaaacagtctcactttcctacctatattgccctgtaggttttagtgatgatttgtattttttttaaaattcagtggttatttcttttcttcgctggttggcatttatggatttttgatagcttatggtactctctttaagagtctctttcacatgaaaacatttttagaaattaagaaaactctgttattcagcataagatgatacagtggactttggggacttgggggtaagagtagggtggggagggataaaaggcaacaaatatggtgcagtgtatactgccctggtgatgggtgcaccagtatctcacaattcaccactaaagaacttatgtaagcaaataccacctgtacccaataactaatggcaaaataaaataaaataataataaagaaaaaagaaaaccctgttattaactgaaacataatatccaagattatattttataataacctttaaaattaagattatattttataaagtaatgttttcatccatgtcacctcacttagtacattctgaacagttttctttccgtatttctttaactataaagctttaacttaaatgtgacattagaatgtcagcctctgaagttgttagagaacatttcctctctaaagttttagtttccctttgttagggtagtaaagtaggctcca

SEQ ID NO: 66991 - DNA, 1049 bp, Homo sapiens
taaaattttatgtgagtttttacagcatcaatttcaaagttattgttcatccttattcatcctgcagcacatgatttaagatcattgaggttcccatattgagaatgagaaaattctttataaggtattcttgtcatattgttttggggctggattgataattataatataaataattaaaatggccttaacctagattgatgtagatagtattttaatgctgataggagactgatataaaattcaacttatattgtattattgggaattgattgtaattttcatttcttgaaagctttaactctatacattaaagaaagatgcgtcattttttaatattatattagtatacaagtttaatgcacttgtttagtcccttgaatttgatggttaaagatacttgtttcagaatcagctttgaatctggaggaacaatttataggcgtactttttaaatgtttataaatttcctaatgaatttccaattataatctacaggattctgaaaatacagaacagagaatccagtcacttatcagctcattacaacatatggtatatgaatatatatgtcgttgtctatttaaggtaagaagcatcatatttttcaaatataaaatactacttgttctgtgatttaacgtaatatttatagttatagtataactctttccctactggaaaggtattaaaaatggtatttctggtatttttccagaacatttaactggaatgccttatagcattcttggttgtagtggggaaaaaagtgacaagtgaagaagggacagcaaacactgcgttagctgacttagttctaaatattccagtggtcaccaaaagagataatgacaatggattatgtatctcattatatagctagactttctcatcctcagcaactgacattttgggctacataattctttgtgtgtgggatgttgttctgtgcgttttaggatgtttagcagcatctctgccttccagcattccttcccatcaattgtgagaataaaaaatgtctgtggacattgtccaatgtctctggg

SEQ ID NO: 66992 - DNA, 1050 bp, Homo sapiens
ctgtttcccttacttcttggaattaatatcttagatttgaaatggcatagaaaaatggtggaatatgaggagaaattgttttcatgcaaacttcttgaaagttagtgtctgtgccgctcaccttgcctccatttccatatgaatttgtttgttgatggagtaaaattcagatatatattatgttttaaagtataatattactaacctcacatgattgtatttagtgtgcaaataatttaatttggattctgctattttttctgcgaagattagtttttcttatatgaaaaagtggaagttctgtggttggatgtttagaaattttataacttgtggctactaaagtgaatcttaataagtgacacaattttcttctgcttaaataactttgaaactcctagaattgtatctaatcctttgagttttctgaaaatacagttgaatgtgcataaaattattcatgaaaatgagtgatttagtctcaagcagtatgtgaatgcccaagttcaatgttatataaactgctttgagcttaaagcatgacttctcttcacaaggtaacatttcttttatacttttcattgaacatatttgaaagcaataaatatagtagagtagaagtaaaaggaatgaattacttagattttttactgcttccttagtctctttgaggatcatggggtttatggaatgttttggaagtaaatttgatatgactattatatagtatatcagtttactgtatatcaggtagttattttactgatcaccttttgttaagtgccttacatatactgccatttaatgcttacaacaattctgttatacagaggaataaactaagatttacagctaataatctttaacttagatctagaggataaaagaagacatttatgcagccaacagacacatgaaaaaatgctcatcatcactggccatgagagaaatgcaaatcaaaaccacaatgagataccatctcacaccagttagaatggcgatcattaaaaagtcaggaaacaacaggtgctggagaggatgtggagaaat

SEQ ID NO: 66993 - DNA, 1340 bp, Homo sapiens
tctcggctcactgcaacctctgcctcctgagctaaagccatcctcccacctcagcctcccaaatactgggactacaggcacacaccaccatgggcggctactttttgtactttttgtagagatggaatttcaccatttttcccaggctggcctcaaactcgtgagctcaagtcatctgcccgcctctccctcccaggatgttgggattacaggcataagccatggcacccagccccttaatttttttattcttaattttaattcagtttaactggaaataatgcagccatgcacttgtgcgcatgttctttttctctttttctgtaaattgtgtttttagtattattcttgaatcattattgttctgctttataatgttattgttaaatacttatggctgaagggatttattggtacaggtaggcaaccagatatagggccaaaagagctttctttgccatttccagcttagaaaattaaggaagaagatcctggttggcctgtctgaggtcacatggaaacccttgtatcaatgtctatggagtgctgcgatgtgattgagcaacaccgtaattatatgctcattcttaaggtcaggatatcttctgtaaccagataacaggagaagggtaaccaccattacccacttattgtctacatattatgtgcctattttttgacaacattttggagttttgggctcagtaataattagcaattagtttactgactccagtggataatctgaggaccatagactgacaggggctttgcttctgttcttgaacctagagactacattgttcttcctcagtacaagtgaagaaatggctaaaataaatgtagtagtactgtgtgtacatttgtttgtgtgtgtgtgtatatatatatatacacacacatatatatatatctgtgtgtgtcacagatatatatatctgtcataaagaattaactaggccaggcatggtgactcatacatgtaatctcagcactttgcatggtcaaggtggaaggatcacttgagtccaggagtttgaggctgtagtaagctatgatcacactactgcaccccagcctgggcaacagagtgagaccatgtctgtaaaaacaaacatcaaaacaaatgaaaagaatttgctatatcattaaattataagtattgaacaatatcattaaatgataacgtttttgaattaatacatttattgtcttatttatctttatcgataattatgtatttctttaccttaaactatatgttattataatcattttaaagattcattaatttataaaatattcatcttactagcttctccagctcatcattatttaac

SEQ ID NO: 66994 - DNA, 1088 bp, Homo sapiens
catacggtctaacagaatgatataagaaattttattaagacttttgaattgttagaaagtttagataaatattagaggaattttgttaattgttgatgggtacatatcctttagagatctttaattcttaaatctgctaacagcaaaatttaaatcttttgttttcataatatccacaatgttctttttttaaaaaagtatccaaatgctattgaccccaaatttacacatacagctcagatcaattttctaggctgtatgtttgcatatctggcagttgacatatccagttggatgtctcaaacatgtctgaaaattcacgtattctggatcaagcactagaatttaagcttcccaagtgcacagatatttgcctcttgtttattgctatgttttaattgacgaaaacatggcctggtatatagcagtccaaaacttatgtttttgtttaatgtgtttgtttaaatgctttgttaagcttttgtttggtgatctcatgatattccttcccaaaccttgtattctttcagtgtttcacttattaagaatgacatcatccatcatcaatttgaatgagcgataagcttagaagtcattcttaacagccctctttttcatgtcttcatactccattacaatccaatacaaaaattctgttagttttattttcctaacgagttcttaaatctgtctacttttatctttgtatgtcacccctctccccattagggtgactttccctctcctctagattaggtcagatctctttcatatgtgtgaaacatactaaatgtttctctccatcaaagttattatcattttacagttgcatatgtatttgagtgattgtctccagcccactctttcccacgttttactgaaagctacatgagggcagggataatttttttgttcattcttatattcccagagcctgacatataatacatattttaaaaatattttttgagtgttgaatgaatgaatgaaatttgtatcagtattcctaatatccaagtctaaatatattttaatttgaacttattttattacttagaactaattagtcaatagaagccatatagaaa

SEQ ID NO: 66995 - DNA, 1040 bp, Homo sapiens
ctggaggataaaattttaggaaatatcccaatgtatatatagcaattagaataaaaaatgtagtatatcagtttgttctctatgattgtgttgccacataactaactaaaactagtatggtattataaagtacttttcatgctatggccagttaattttttttaagtttactgttactttagatttattatgtgttggttttattaaaaattctcaggagttatatatttttaagtctatattgatcatttaatttaaagacagtgatacatacatatatatctttgactactgcttagttgtttacttaaaaaaattgttttttgacagggttggacaaagttttatgaattttctttatcagatcttcgggctgggtacaacattattgacagactttttgatggtaagttctaacaaaaattttaatctcatattaataaaatattttatctgaggtcttattaactatgttttcttcagaagtggcttaacttcctatcacaaaatttgcttgtgctttttattttattttttatttgacttctatacctgtgttatctcagagttcttatatggatctgtttttacatggattcttctttctgggagcagaagtctagaaagaccttgttttcactttgtggctttcaaaagtttcaggcactaactgaatttttcagatgtctttcaggggaactgttaaaattcaggagtatagcagactaagattagtaccaaggatctgtggagtcataattgaattactaagtaggattcaggaaacaaggtacaaataatagattgaaacacagcagcaaataaagccatttaatctgaccccctaaggccatctagctatcagcctccttgaaaacaggaacagtctaatctctaaagtttattgtgcagggcgaagggagggggacactagagtttagaccaatgatggattagagaatagagtatgttgatagtaatctcaaacttaaaaatatcacaaacaaatctctcaattcctgtctcctccccacccccaa

SEQ ID NO: 66996 - DNA, 1027 bp, Homo sapiens
aattaaaacattacaagtgtgaggatataatgaaacccatgaaccaataacttaacccaagaattaagatattaccataacttgcatcgacttatgtgattttcttctatccagtctccctcccgttctgctgaagtccccaccattctgttttgtttaaaactctttttgtggttttacatattttttagtagttctattacgtgcatgcattctttcaatctctcacacatgcatttgtgcccaaaaacatattgttttgcttatttttcgaacattataaagcagtgttgcaagggatgtcctaggatttgcttttttccttcagctttgtctgagattcattattgtggttggtttggctgttgtttcattctttattgttattgtacaatatttcattatgtaaatataacacaatttgtgtatccattctcctattgatggacatttgggttactccagttttttttttggctattgaaacagtgccactaggaacgtttgtggctatgtctccctactgcataagctcaagagtttctctagagtatatgcttaggaatagaattgttatgtcaaattgtttttagtggttgtactaattcactattgtgcgaacagtatgtaatatctgcatccttttaatcctactagtacttggtattttgggatgcctttattgttgccagtctggtgggttaaagtggtacttcattgtgatcttgattcacattttttattgctgtggagacagtatgcatctttccatgtgttcttcagccactcctgctttttctattggaaaaacagcaataaggctgatgtggctgaagcacagtgagggagaaggggagtggtgggacatgaggatgggaggtagctggggtggaggtggactaggtcataagtcttgtgagccatgaaagtaaatagattactctggcagagtatgttttctagaaaatagactactggggagtaagacttaaagcaaagagagatgttagaaaacagttgcagtagc

SEQ ID NO: 66997 - DNA, 1050 bp, Homo sapiens
gactcatcttgcccacttaccatcctagagcataagggcaactctccctcaggaagaaaataagtctgcgtgccagtggtgccgatgaccagcacatttttcttcaaatcgatggaacattgatgtctccggagcatatctaggcctagaagcatatccatgggttgatcctcaagtatggagaaagagcactgtaagaaatcaccttcaatttgaatctgagctagatgaacacggccaataattctctgtgtgcccactcctttagcaaccccagcccaccgtcggtccaccagcctcatgatgttacatcgctcggcacaagcctggctcataatggtcatctgggcgcccgagtcaacaaaagccttcaaaggatgcccattcactttgcagttaatgtagagcatcgtcacttgtccaaaactctcgggggcctcttctatcgctatattcatgttttcttcaatgttttgctgccggatttcctcttctattttggcctgagcttcccgatccagtgggtcggctgtgtagagacgaagcctctcttgctctctcaaggccttttccctttgctgctccatcagcacctgagaaaaggtctcaaggcttccgctgagcagggcttccgccaagggagggttgcgttccttgagcagggacagatcgtgggggttggagagcagcatgctgcggatcagggcggggctgcccagaccttgcaggccggccaccttctctcctgacgccaagccctgtgaccgctgggcagcgggtgtgcgctgctgctgctgtccagggtgctgtggacgggagctggacgtcccaggcaccgcaatgccactgaagtctacacgaggctggttcggggcacgccctggagcccgaggtcccacattgtccttctgcagtaaaaccacgatatcgccatctttgaggccgtaggagcccagggaacagtggtcctcgatgaggagtcgctccatgtggatgatctggatctcttcgacggggactctggactccgcttcgcagaggaccttgaag

SEQ ID NO: 66998 - DNA, 1048 bp, Homo sapiens
agtcaattctatctgttagttcctcctcatctttcaccatctcatcttgaaagcctttctatgttcccttagtattgagataggtgcccctgcatttggctgccccaggccttttggcttactttccacataacagccaataccaggtgctgtaatagccactgaaagggtaaccactatctatttagaacttattttgtgccagaaactgtgttaaatgttaaatgttaaatgttattatattaacaccatctaagtgtgattgtctatttaatataacagatatcttagtcagtttgcctgccttccacccatggttattctcagagggactaactgtagcccctactgagagggcagtggatgccctgctcctccccactggcctcagggcactggacaagggcagacacatgactcagccttggttagccagatttcctgtgataagtagctggaatttgaactcggagagtcagtgaggtaggaagtcatgaaagctaagctgagaatagctacattccagtttgtgccttcagaaggaagaggcagtcagaaaggagactgcagatgtgcagcccagggtttttcaggagggtagacctctgcttcagagtttgaggtgtaggcttcagcccctcctgagacctgaataaacatactgcctcaacttccaggagacatcttcgtgttcttaactgaaatactgactttgcacttcttgaagatacagtgtgtgtaggatctcagagcttagcacatgacctgacacattggaagtgcttaataaataaatgaatgagtgagtgcatgagtggatgaatcagtctgtcctatggactgggtaccaccatctgatgctcaaagccaggtaagactcttcatacccagttgtttctgaagctgtatgacttgaattaattaagctttttttttgaggtttattctcccagtttggaattccattttgtatatgtgatcaattttctaatccaacacaataatttcctttaatagtatacttaggatattttaactgtgattaatg

SEQ ID NO: 66999 - DNA, 1048 bp, Homo sapiens
gtgccaacagttctagattcaggaattttttatgtagactctttatatgcttttatttttattattttgttttattttcttacagaaggggcagggtcatggtagaaggatgttctagtcagatgcaaaaaaagatgtcctcaaaatgtaatactgatttatggagctcatagagctagttgagtaattttttaaagcacgagttatttagaggagcatagatattccacaccagtcctggctaatgtccaggtaaagataggtgcattgtttgtcttgtgcagatatttggaaattctagtaaatgaatgatacaggaaaacactgctgttcattttaccccaatgttttgtatttccttttcttcacctctcataggtgttggggggaaattcagaaattatgtgacaatctgcttagtctttgaaagacgcatgagattctgctatactctaaagagaaagaaaaatatttcaggtagagagaacagcattacaggaaaaagtgtaaggtgtatggatgacattggagaacgataatgcatctggagaatagagtaggggtaggggggatggcaggtaggtggtggagtggaggggttgggagagggactggacagcactgcgaggcagggaggggccttgtaaactgccctggaggataggataaggatgttatgccatattcttccacagaagacagcaagaattattttaagcagtctataacataattatgtttgtgtgttaaaaagacttctaatagcacggttcatcattcatgtatatagcaaaatgtggttcctttcccatatcaaatacactaagaagccgtttcctagacaaggaatgttattttgttacttcagttgctgtttgtaagacccattttggtatgtaattctgctcactgtttttcagcaagaactgttagttctagcaacaaatacttagcttatcattgcaaccatgtatcttccgaactgcaaaccaagtcggttataataaacaggttggaaaagagctggcatttggtgggaggaaagtaa

SEQ ID NO: 67000 - DNA, 1070 bp, Homo sapiens
tagagttcagaataactttataaatcactatatttgttatgcatcatatatcagatctttcatgtacatatataatatatacatgctgatacggtttggctgtgtccccacccacatctcatcttgaattgtatttcctataatccccatgtgtcgttggagagacccggacgttggagttgaatcatgggagtatgatagtaagtgagttctcctgagatctgatggttttataaggggatttctctctttgctcggcacttctctttcctgtcttcatatgaagaagaacgtgtttgcttcctcttccaccatgattgtaagtttcctgtgtctccccagccatgtgaaactgtagtcaattaaacctctttcctttgtaaattactcagtcttgggcagttctttatagcagtgtgagaacagaataatgcacatgcctttagcattttattctttatttcacaaaatttgctaatgattgtatgttataaaaacaaagtcactgtgaaaataatcctcatttaacagaattgataaaatcacagattagaaaacaagtttcaatatttttattgagaggacattgttgctaaaatagtattttattttcaaaaaagcaatgtcttaacctctttatatttagaaaacgccatcatctcagcccaaaatctcttcaagctgataaggaacttcagcaaagtctcaggatacaaaatcaatgtgcaaaaattatatcgtatcatattttaaagggccagtctgggcaagatggtgtgaaaccacttctccaccaaaaaaaaaaaaaaaaattagcgtggctgccactgctatatagtcccagctactcaggaggctgaggcagcaggatcccttgagcccaggagttgaaggctgcagtgagctatgattgtactccaggctgggtgacaaagtaagacactgtctctaagaaaataaactaaaaataaataaataaataaataaataaataaataaataaataaatagagacattttccatttccatttagtgatagtaatactctagattttcaaaattattagac

SEQ ID NO: 67001 - DNA, 1051 bp, Homo sapiens
tgaacaaaactactggcctcataagacacttggccttagcctagatctacattggagtgagtagagttctatgtaggtcaaattatttttcttccactttagagaatttgctggggcaggtgtattaaacttagtatgcaaattcatgtgtgaaaaatgttattatcctaaggagctactttcacatataaaatttgtgggatatatactttagttcaggagtacttagaaggtttgtgaagtacttagacggtttaggaaaaagcagtttgctggatattttgtgtgagaataatattttagtctttttttggtattataaacaagtcaactgatagtatttaaagtagatactagaaaaacgtaaacgtacagaaatctaaagctgagtactgagtatactttggcctcaaatgaagaaacttttaacatgcgttgtggaaattagttgcagtgggttggtacacaaacacatttattttaactattatgaaaagagatatatctttgcttatgaatacccttcatttttagtgccatattaaaagatgctatagataacttattttttgtaatcccattatattttgagatacagtctgttgggctaaggattagacaaacacacacaacaaaaatcatttgcatctctcaacatacacacacaagcacacataaatcttttctgagatatgcttacaagagctacctagtttgctattaagtatactggtgtttattgtgtgtaccaagtattttgcatttacaaactaagacatcgcatggtaaaggtatcaatgccacttgtgtcccagggaaaaataattgcacaatagaatctatatactgcattcctctctttccagatgttcactacactaggaaggatgaaacttaccagggccattttgaattctaaatttttcatttaaatccttcctatttaattaaaagataactaaaattacaactcctcatgaagaaggaaacaaacgttgctttttttctacatttctttaagactcacaaggcattatacatgtttgtgatt

SEQ ID NO: 67002 - DNA, 1530 bp, Homo sapiens
ggcttcagctagagaaggagcggctgcagattgaaagagaaaagttgaggttacagatagtcaattcagagaaaccgtccttggaaaatgaacttggtcaaggagaaaaatccatgcttcaaccacaggacatagaaacagagaagttaaaacttgagcgagaacgcttgcaactggaaaaggataggctgcagtttttgaagtttgaatctgagaagctgcagattgaaaaggaacgcttacaggtagagaaagacagacttcgaattcagaaagaaggacacttgcagtgatttttccaggcttccatttagcaaatgtttgaaaactctagatttttctcatatcaggtgatataatgatggttgctggattagctgtggtttcttgtctaatgtcagtgttcagtaggaaaaagttatatgtggataactgtatgcctaagtagtatataaaagctgtgccctagcgtaaacagtatagcagaaacttactgtgctggactctttaccttataatattacatagagtcttgtattgtctgtgtacccagagtttacaattatgtccatataaaattctagcccagaagttctcatctggggtagattttggccttcagaagaccaatttggtgatgtctggagacatgttgggttgtcaaaactggggtggggaaaaggttgctactgtgcaatgcatacctcctcaacacccccccacactcagtaaagaattttccaacccaaaatatcattagtcctgaggttgagaaaccctgtcctagcctaactgtgtacctctatagctatgttttatagttttagaatattaaaacctcagatatttatgtgggtaggtacttaaatggccaaaaactttaactatgaaatgttactgtgtagtatattgaatataggaagtgatgaagattataggtattttattcccatgtttccatctataaatagccttctcagattcagaaaacaatacagagaacatcagaaattttctaaaatgggtcactttgaaaagaattctttttctcactattaatgctttagaagcaagacgcaattttaaagctttagttccttttctttcagtcattgtcttagtttgggtacaaaaatgtcatttcagtaatgtactgaaatcttataagtgaatagttgaagctagtaaaaatgataccagtataaaaatggtacttgtagtccatgagcttgaacccaatgactgattgtttgacttttaaaataagtaatagcagccatttgggagtagggggtaggtggggaagatgtactccgtatcaaataataatgatgttgaaataatgatagtaggtatgtattatggattggagaagcacttattacactatctaacctaatatgtagaacaattcttgagagttgtatctgtcgttatttctgaatgtgaagctcagagaagtgacacagagtaaatggctgatcttctatattgtagtatattttgtccttccctcttccctgaggaaca

SEQ ID NO: 67003 - DNA, 1074 bp, Homo sapiens
taagtagatttttaatataatgttgatcacctcaaagtaaaataaaataaatgtgctgtgggctaagaagcagccatatggctgagacagaaatgactgtgcacatgatccccaggttggtggtagacagagttaatgaacctgttgtagagcataggatgttctgtgtctgcgaatgttcctaagttgatctgtgaacatgtacacacacagacagatgcatttcctttgccaattttgttggcttgcatcaactatagcatctacgtggggattatgtgctaagacatccatactctaacatgacatttattgcatatattccattatgtgacttaatagtttattcatccagtccccttttgataaatatttctatttttaccatgcttttaccttaaaaatgtgatagtgatttttaaatggctcaaaaggctatgtaaatgctctgaaacattctgtgtattttggaaaccaaaatttatctttatcacatgtaggcatttgatttggtgggatgtgatatatctttggctctctgttctgttttttgaggacataaaatgtgctgattttattttttttaatgtccttgataacctatttatggttggtcaatatgcctgactagcaatatagcctgttagctgaagatttttcttcagaattttgaataacctgttaactgtctcattgtttagtgtagttatagggtggacatctgttcttcacttacaggctaactgcttcttgcctatgttgacttgcttctgttttcttataagcatatgctttgtgtgcctatggaaacttcagttttcctgacttactttccttgaattagtttctgtttctctttctataccctttcccatccctttatcattttcttgttttgagttcatatttttacctcctcctatttgttaggcacagtgccaggtattgaagatcctgtttttagagcagatgggcgactatctcctaggtccttagaggtggggcagattgtagaaggaaaaagccaagttttgaccaataattctttcacttgtcctgcaacatagggtacta

SEQ ID NO: 67004 - DNA, 1026 bp, Homo sapiens
gcaagaatcatcacctaaactcacaggaccattagagattataaattgttgtcttaagccactaattttagggtgataactggaacagaaatgtcgaatcaaggttttctatttttctggttctccaagttcccaatcctcttttcctttctgtttcccacttccttgcttttgatgatgcaacttttatgtttagagctgaatttgcagttcatgatattcacaattatctgatctttacctatcttggatttctgacctcatgtttaaaaaatctttcttaattaagatatatgtgattttcctttctacttttaaatagcccaacttggaaaagtgcttgcctttttcttcttcactaaagccataactaattaatgcaatctaacactgatctttttcaaccaattatcttgtaaaagtctaacctcagaaggcatatagtctatggtccaagatcagcattttaacagctactttgttaccagaagagaatggattggaaaggagggggattgtgttgggcatatactcaaaactatgttagaaataatacctcttatgtatagtaataatattaatcatgtagtgaaatcctatataagctatttatacaacttgtacattttgctatttaacacaattatatagccttcaatgttagcccttatgaaaaatatacttttattccaatgagctcaacatttatgaaaattcaaaaggaatttaatattaaatgtcaggaaaacaaatgtttaaaacaagttttactgtcttattatttttcttagtggttatttttgtgtatttgccatcaagagggcgaattttggagtctgaaacttgcattaggtctctactacatcggtgattttgtttttattctagttctaaggacatatggaattggctatggataattcatatgctttcaatcaacgaagcacatgtaatggaattccatctgagaagaaaaacaacttccttgtatcagaagatcatggacaaaaaatcttaagtgtacta

SEQ ID NO: 67005 - DNA, 1014 bp, Homo sapiens
ttgttccgtgtaggctgttgttgactctcgtatgaaagcccacgcgatccaagtgccctgcaggttttggtccagggaaaagttggtctctgcagatgactgtaaatgactacctggaggtcgattaaagtgcggtactgcgggattcagccgatttccttcttcctctgactgcccggaaatatcagccaaaggccagcggtagtaattaacacaattacctgcctatgatttctgtcctatttaagatgggttctattatgtttttatctatacttgtcttcattaacttttcgtgatatcataagccccccgaatccctcgaaagtagatgggattctgagcacacacacacacaaattcagatccccaaaggacagtaaaacgaattattggcttaatatatcatcttagctaaccaaaagcctgtgtcagctgccatgttgaaaatctgcttaccagctgcagggagcttacaatctggtaaggcaaataaatcatacgcataaaaagtacaataagagacagtgtaaagatacgtaagtgatactaatacccatatcagcaatgatcataactcacttctccatttttaactaagaatcatataacctttccttcttgtcgttttaaactgatttttataactttgatacattacgtttctgtttccaaaacacttctgtgtacgttattgcacatgttctgtgcactagttattactgatggagacaatgagctcagaaagagaatttgtttaaattcaggaattcatatcccattattttaccatcgagcaagatctctgtgtattagatctatggagcctaatacacagacagtaacgtagggattatttgtacttggtctagaatctagaatattctccccttctcccattatcacattccttgtttcctctgtatcattcaggcccaaatctcataccaaacagaatgtctctgttcacctagtctaaaatagcttactctctccacttccaaacctcagccc

SEQ ID NO: 67006 - DNA, 1090 bp, Homo sapiens
gggtgatcaatatatgggatctagaaatacatatgcacagatgtaggtacagtagggttgctcactgcagagttgtttttgacagcaagtctagagccagcctaaaatgtccaataaaggggaaataatattatgaaatatgctacagttaaaactgcatggaccagacgtgtgtgtacagacataaaatacttcccaatacttataaatttaaagcttatatgtggtagaatactgcataagtataatctcatgtttgtgtttatatgtagagttagcaaaaacatgtaaatgcacatatatttaaatacagaaaagactgacaggatgccagctgttaactttggtcactagcaaaggagagggaattgctaaggcgggctttaactttttatctacttaagcattgcttaagtcttaattaacgtgtgtttaatacttaagtattttgaaaagttttaaaaatgaaaattttagaaaccaaaaaaaagtactattgcatacagtgtgcttgtatctttagtagacatcagtacataccaaatgttttatgtacttaacaggctggtcgtctgatgataaggaaattagttgcagagaaattgaatatcccttggaatcatattcgtttgcaaagaactgcaaaaggaaaaccagttcttgcaaaggactcatcgaatccttacccgaatttcaactttaacatctctcatcaaggagactatgcagtgcttgctgctgaacctgagctgcaagttggaattgatataatgaagactagttttccaggtaacgttgcatttttctagtatggcagttaagtgtctcgatgcctcagttctattgctattgagtaatctcaggccaggagatgtattagagatatttcagtttagggaaaatgtgcttagtacacaaaggtaatggagagcataaatctgaaaagggtatatttccatgaatatttacagacttacacataaataatagattatccgttactggggatccataactttgcctagaggtaaagtgaaatattaagtgaaattttttttgaattatacttcaatttatttcacttaaacat

SEQ ID NO: 67007 - DNA, 1096 bp, Homo sapiens
aaaagaaaaataaatgatggaaagacaattgagcaaaaatttaagatttagttttcctgttaattgtgttattagacctccccccaccagttttttttagttgatcttacttgactaatcacaatgtctaggccttttccttttctttattttgttgtgaaaaagctgttgctatgtccagtaacacagaaaggaagagagattttccaattgtcactagtgttgttaccatgctactgattcctgaagcatcaatggacacagcatgatttcttaatgaagatgggaagtagacactgatttgcttcattggagattctttgaattgctctacttattgtagtaagtgaggagattgagcaagggatttttcctaagagtcttgctaaatgatgctaggcaaaacttaggagagcagcaaggaaagtactctgttttgtactaggcattgttactagattgccaactctaaagacagagttggcttttgggggttatcattagtgcattgaaagagtcaattccattactctgtcttgtcctataggtaagaatccactaggaactcagagagtctttttctttcatggtgcattaaccatttctgctgagtgcagctcatttccctccctctacctgttctcccaactgttgctgtggacgtgcaggagagaacatacctagtatatagcctaccatatgccaggacggtacattcttactcttaggaagaatggtgttttcctggtcttcatcttaatttattaccctcttttggaaaattttggttggttttccctttgttttctaattttttctaccattaaaagtgtttgaagtgataagcataaagggtaacttttgaattgtttagttttgtgaccatatttacaaagtaaggcaaaataaaatagacaaaatacataaaaattatgattgaaatttgggaaaggaccagaattttccccctatggttttacatgttcgtctttacatttttaaaataaactttgctggacttttttttttaaatgcacttgggatttaaaacctgtaagtagttttagaaactcacacatcactttgtactctgaat

SEQ ID NO: 67008 - DNA, 1097 bp, Homo sapiens
gagactcttaaaggagaggcaatttccgtaacaaacacctctggtttaatggaagccacatgatttatttgactactggtcactcatttttaaaaagaaaagagaaagacaaaaaaagagaaacccttcacaagccatttttagttttcctaggaggtagtgccaacctctcggcagctgcacatctcagtgaagctgggatagaagcttacagagctacaaatagatgctttctgaaggtggcagatagaactagtcttggttacaatgattaaggtaaatgaaagtgtcagaacatctgggttgaaggaacaaagaaggcccaataccagctctgccatatgccacagaaaaccctgctaaaattagcatagaaaaacagactaacactatgcaagtgatattaaaacaaactatattttttccttttataacatgcctggctgagctagcattcagtgagaagaatatacttttgtcttatgaatcatttaaaaacatttgttgttgttctgacattaaataaattacatattcccttagttgaaaaatttaatcacaaataataggaaatatttattttgtgtcctgaaatttttaaacttttggcggctgtactctacgccatattcttcttcacattcttctcaaattgggtttggctgctagcaaaacaagtgtggaactttagagcagaaaaatgtccatctgtctcttacagaatgtgccagagtatttgagctggagagagaatcaccccatagcatttaatggtattctgtgagacacgaagactctagtcttctaaacttaaaagtggttaggtagtaccttaatcatcaaagatttttcacttacatgtaactggttaattcatatagagtttgtttagaacagaaactttaaaaggagggaacaaacctgagcaatttttaatcaaaattatcagttagaaaaagaatttaagacaaagatttattgtcctgaaagagtcaactcactcatatccaaaacttagaatgtcagagacttttgaaagttttctgaatgtgtcaacttcttcagcaatgagagattcaattaatgttgtttctagg

SEQ ID NO: 67009 - DNA, 1922 bp, Homo sapiens
gtcaggctatactgagatagtgtgcaaaattccttcctcacacttgatccaaacaattgaaacctgcgtatgactgttcttccatcccttgttttcttccttcctttgttccttctttcctttaattaaaaaaggtcactgatacatttataacacaggaagtatcacagctaatcccatattctaaaatagttttataaagtgattaatatttttagtttgtgtgtatgcatctgtgtttattgaatgtagatgtttcatgattgaaagaagtaagtttctttggaaggacttgggaatgcagagaagtaaagtttgtgtctttatttctaatatgttataaccagatcacggtttcagttaagtacctcattgccatcccatccttaagaaatgacctagttcagtggttcagctgatctgcttggaagtatctggctggcttcataagaattccgtagggagttttaggaatacagaagactagtctttaccttcagagatttggattcagtaggtctcaggtagggcctaggaatctgtgtttagaaaatcactctaagtaatgctaatatacagccagacttgggaatcattgaaaagtattcaaataatcccaattactaggaataaatacaagttgactgggatagtgatgttatttcatttgtagttattttgaaaagttaaatactctaggcctcataccattatttctttcacaaattttaattttagctttgatttccaatttgtggtcttctttctgagcatgaatcttcaaacttagagacagacgtcaacactgataagcatgagggatgaatattgctcactatagggctattaggcatactagatacagtaccattttcttagttactgccagagctgtgcagtatattacaacatttgctaatcctcaccaccgaggtaaaaactatgacctttgggacacagaagcaaatatcaaagtgacagccttacttctgaatgctttgatttttatgtcatgaaaagacatcaacttaatacttagtctcactatgtacttttcatattgaattgtacattatctgaaaactgatttccaagcaataccgtgtaacaacctttcaagcaataatttaagccatggtgatgatgccatatgaagcttgcacttctttgcatttcatagagcctttgtgaaaacagaaacatgttttatacaagcaataatatagctggtgtggactttttaaagatactcattattctgtagcaaaatgagcagcaagtaatgactcagattaaaaatattcgggcaaatgacatgtttaatctatctcagaagttattcatttgcaaacatgctgtaaagtgattaatatacatcagattatttctggtgcataattttaaacatggctataaaaatatgatttctattcctgtcaaagagatttgtgtattatttataatgttgcccaatttttggatctttgtagtatataatagtaaggaagaagttaaggatggataaatgagtggaagtagagcataggttggaagaggtgattgagaaagtaggctttgcaaaaatatagatgggtcttgcggcagatttattcaaatgttggtttgatatggtcttggaagatgaaagagtaaagataaaagagctcattattactgttttcaatgatagctacacaagtttttggtaagtatgatagtattttgacttcagaatatgattgactgaaagtcacctgtagcacaataaataaaagtctgaaaatgattattcagtaatactgaaaaaacactaaagctttcagatttcgaaatgaaaaaatcatgtttttagtctacttaaaatacaattttaatagaatgtggcatagtcaatgataatcagttctttagtagttaaattt

SEQ ID NO: 67010 - DNA, 1027 bp, Homo sapiens
agggaaataagatgtgtccattcatatgagtggttttggtcatatatatacacatatattttaattacaagtgtgggtcccctttcagaactaaccaataaatagattccatgttttcttgtttatcacacatacaagtatctttccctatatatttgtaccacttttgagagccagttttgattatatattcctacatttagtgagttggtgggtgaggaatattttctaagtttctttttctgaacagacatttcatacatgtatcatggcagtgtggtaaacttcccaactggaagaattgtaactcggcaaaatattttagggatattacctatttttatacatatctcttctagataactacatttcgcacaacattattagattttcagaatctgcttctgtattgttagtatattatatataatgctaacctattaatctaatatagtttcccttatttagagagatcagtgcttcgactgagaatacatataaccaaggatttcagataccaagaaagcattatatgtctgcttagtaaatatatcttttagatttaactaatgtagcatggaatccagaggaaatggaatttcctaacaccagatgtatctgtaaccaagattaaagaaaggtctttttgccaccttctaacaaatatcagttaaaatgaaatgctttgctacactggatccttttcaacttagcacttacaaatataggtagcttttgcaacactaaactgcattctaataaacagcattcagctaaatgacatgttagttacccccttcctcttccccagttgatgcctcctaagagccgactgctattcttgagaacaaattcctggatactggcattagtgacaaagaagtgtcaggacagtttgccaagaatgttgtttcttcttgtacaacacaaagcaaggaaacctctgtattttatggctttgaggttttaaaaaatgttctgcagtttgattgatatggcttttaaattcagtgaatcactttcatga

SEQ ID NO: 67011 - DNA, 1050 bp, Homo sapiens
aacatctccaggtgattctaatgtacagccaggattgagaaatttttgaagaacaggtaactccatcttgaaagatgggtggaattaggacatgtggagattgccggaggtaactttaggtgaaggaaataacataagcaaagattaacctactgatggcaaggatttgccattcttttccacaaatgaagccttttttttctgttatgtttacctgaaaggtaattggaaaaatgatgccttaaagttcactaatttgtgagaatcataggcaaaagctttcctgtgatattagagaagagtaagatattgttcttgataacatcctgcaactcatcatttatagcataataagcccttccactctgattctgttagacaggcccatccatggcaagatattaaacaaaacaggatttattgaaaacatgtctgataatagcaatgatattgaaaaagagcaaaacagtacaatcctggtttttatgtttctgctttgaccacaggcttaaaatgtgtatttcaagcctataaatattgattgtgagacacaagaaacataatataaatattttgaaggaatagtaattaagagcagtgagtcacaggtagctaccagatgaaaataataaacccaactttgtcagggcttcagatcagagtaaggtttcaattttgatatccacggagaagagccaaattgaagatgaatatgagtaaatattgatgatccatactactgaatttgtctggtgataaatgtttcttaggtattgcacatattccgaactcataaatacatatactacataaaaacatggaaaaaacccttcagaaatgttttcctgtattatattttcagaaagtcacaagttttagagaaatcatataagcagaatggcagacagcatgggccatatttccatgtcaaaagtaaattgaaaatctaaattagtacctgaggttaaaaatacttatgtccacagattccagaatacaaaggaaaagtaatgccagccaaatctgaaacataaacaactataagttttc

SEQ ID NO: 67012 - DNA, 1029 bp, Homo sapiens
aacaattccattggacatgtaattggaaaaagtattgtactacaagttaccccaagaaacatactttttcaaagaatatatactagtaagtcactttcaagtatgagtcaacgaaatattaccaattgtataactataaaatatgaatccgctaataaggatctacaaataagatcaaaccaacacattttggccattagataaggtattcagctactttgtgtgattataaatccacaaatcttataaaccatgtaaagatgttacataacatcaagaaaacatcttaaaaacctaaaataacaaagtttattatggttttgctcttccagagtgactaatagaaatgaatcatgggcatattaaagtcaagcctatcagtttctgccttggtattttatactagttcaacctctgatatattatggattaaggttacgaaaatgttaagtgggggcatttacttttagtaatccttattctctctctctgtctttattcctgtatcagaacctcatgccacaaaaatctgctgtaagactctcccagataaattgtactatgtacattttaaatacctaatgtaaaattattaattcaaaagaacctctcttgattgtaaggacctgcataggagtggaaagtaacctttttggaggaacatggggttgtgggtgggatggagatagctctcctggtgctcctaaaatcaaatctagtgtctggccccacaagactctgccacgtagtgatgactatatagcagtgatgcttctgggatctctcagtcagccatctggagatctcctttgcgacggtaaattatttaacgttcttggtctgtagtgataacatggatacattgggaagtaaaaacaaaataataatatatagcatttttgatgatgtggcattatacttttaaattttggattataaactgttttttttttaatgaactattactgctactttagggctcattttaaataaggttcaggaccaaatggggctgatgttgtccttatg

SEQ ID NO: 67013 - DNA, 1348 bp, Homo sapiens
aaaaaaaagtgctcaggagaagtaaatacatgtttttgtttaattgttcaattttattaatgtttcttttgtgtttaatttttttttggtggtatatttagttccatcaaccaaaatatttagatttttcatccagcctgtgatagacatattcaagtatgcgaacctgtttgaattttgcttacacctgctatttaaagcaaaacttcggaaggaagtcgttttacaaaaagagcagatggaacagtatcctcctccttggactctttgagtcgtccatttatataatattttaagaagttaggtaaatgtaatgactcttctacagtctggattgcttatattttctgcccaattctctgtcaaatgagaagaaatgtttgtcaacaagtaggctactgttgccaaaaatgcactactaggagatggaaatgacataattatggcccttaaacatcacttcaggacaggatctgaagatctagaattatgtgctgttagctcagagtacctcataacattgagggctagagtcatttaggaggtagggcagtgggaaatatcttggaaggcgggaaatttgctggggctgttgtagggaaatgagaaagagtaaacattcttataaatagtgagaaatcacttccagagcaggctttatttgaggcttattaaacagttcttcatttaatctagtagctctcaagcttcattgaacacaagacatacctgaggaaaattgttagaatgcagattcctgggtctcatcctcagaggatctggttggatagttccagggaggggcccaaactacattttgaacaaaactccaggtaattgctcagcatgctgaaggtatgtctagaggtgactgaattccagaccttgaggactactgagcagtgagctctatgggctgatttttgggaagaatgatcctgaaagtcgcttcctttgggattaatgtatcccagacaactattacctttactgggttagggataaaggtggtgaattggtgctgttatccccacatcctatggctgtatcttttgtggtcgaaataatcttactggttgtatggtagaaggtatttgaggtttcaccatttgtagctttaattatctgtggactctgcccgtttttcccgaggatgttttgttaactgcttatgtttatgttcagtagttcgcatgtcattactataagtatcttgtgacccctttttccaaaacagagaaacagatatttgaaaaggttggggattgtagaaaaaaagaagggtggttgtgagggtgaatttgacattatcaccagcatttgtgtttttcagagtgagattgacaca

SEQ ID NO: 67014 - DNA, 1035 bp, Homo sapiens
tagcaggtcatgatgatgcacgcctgtaatcccagctacttgggaggctgaggctcgagaatcgcttgaacccgggaggcggaagttgtgatgagctgagatcacaccactgcactccagaccctgggtgacagcgagactctgtctccaaaacaaaacaaacaaaaaccctcaagaccttaagacctgattgaagatgtataaatcatttattacattctttattttaaaataatataatagttgggaatacatattaagcaacagctggggatttcacatcaagggtgaacttagcgacttatttatttggattttattcttaaatgagagttgcttagttaccctatcactgcgacatcaattttgggtttgctggtgtcagcctgtcagtgaagatacaccactagagtcatataagggcaaggcttctctaggtttcttgacagagaacattgcaagtggctttgaagacctcagaagctttagagagcagaatgtcaggaaaaaaaagtaacagaattggaggagtggcaaataaggagaggagagctactgacctgtggagttgttcaagaaacagagactagtgaagaggaaaaaatgaaggtggaagcttagattcaagtgacaaaaaagcataaattattattttggggaaggaaattatcttaatacatgtcaaggaaagaatgaaaaggcataaaatactttagcttctgttgatattaaataaaatgagctctctgacatgtataaaccttgaaaaaaaaccttagaaagtatgtgtgtaactaacatgtagacaatgaaaaatgtaaaaaatatattcgtaaggtaggctattggacaaatttaggtagtttaattaaagctttttaaatttggggcttaatttggctaacaaagttatagaaacagattcattaccattataaaattatataaagtatatttcagttgtttaatgttttcacatttgttgaaaatagatactataatctgaaatcagaatttaatggcaatctattgcct

SEQ ID NO: 67015 - DNA, 1068 bp, Homo sapiens
tttatgcttgaacattgtcatggagaagaacttgttatattttatagcagaataaacagaaatagtttcatttctgttttcattatttatacatgcttgtgtttgtgcttttctctttctttaaaaggaaatcataggtgggatgctggatatagaaccaagactttggaggaaaggcatccgagaaagctttgaggatcagaggaaaaaagcactgcagtttgctcagtggtggaaaccatatgacttcaccaaaagtaaaaactattgaggtgtaccttccattttaaaatttttcttcagatcccgttcagttttatttccattgcatctaatgaagcaactgaccctcaggtcacaggcagagagagtcacagcagcagactgctctgggtcagtgacaactgtacatcaggagattgtgttgttttcttcttcacctgctcctatctatggacttcattttagtcaccatggagtaaaaacatatattcgatgatctgctcacattcctgctctctacctacttcttggtattccgaattgttcagttaatttagagaaggccttttctgaagggatatctaaaaagcataggaaatccttggttcagagggaagtgggtctgcttcatggttgttaagtctactgtctggcttcttttgcatttttaaaaataagacgatttaattttaatttcataggattttatagaaaagctcttaattttctactagcagtatatagtatcacttctattctttttgttaaaggaaaaggaaatgtccccaaagtattaaagaattaaatgatactgaaaatttgtatgattcaaatttgtttttatttctggatttttaaatagtatctttgaattttggtggttctaaaagtaattcttccaaataacatattttagggttgtttggggtttgcatgaaagttaaaatttatagccaaatcattggttttgagttgtactgattgtcgtaaaatcttaagtaatgagagtttttatttatttatctttttgttttgtttttatttattaagacagagtctggcttt

SEQ ID NO: 67016 - DNA, 2623 bp, Homo sapiens
gccctagaaagaatccattcctttgccttttctagctgttagaagccacctgcattcatggcttatggccccttccttcatcttcaaagccaagagtgtagtatcttccatctttctctgactctgaccttcctatctctcttattagtgtccttatgattacattgggcctatctggataacccaggaaaatcccctcatttcaagatccttaataatatctgcaaagtcccttttgtcacctaaggcagtatattcatggcgaattgaggactagggcatttcttcatgtttctcatgagactcagagatgttaattaacttgtctgaggtaacacacttataagaatcagagttgcaattggagccttgtctatctcctttactttgttttttcctaatagtcaaggtcataacatgattattatatttaaaaatgtggaaatatagaaaaattaaagccacaaatggtatcccatttctccatatttaatgttatatactatttcgtgaacagatttttacgtgtgctttttaaataacatgaaaaactttttataagccctaattttagttgccttataatatttcaaggtgaccactctccactatatcatactgtgcccttctacattgtgcctttttaaaaaggacacaatacacaatttgtatggttaagtaggaccatgtgattcactgcccaaataagtaagtacagactatatgagggaattagagaggagaaatgttgctataaatgacccacttggataatttctagtggcaaagtttgggctttgaagcaaaacttgcaaggacacaaaatctacttaattgatagagaaaacaagaatttgtggcttttcctagtcatgaaatagtttaaagtgtgtgtgtgtgtgtgtgtgtgtgtgtgtgtgtgtgtgtgtgtggtggggggggtgtgtgtagagagagaaagagagagggagggaaggaaagagtaaggaagggagagaaaaagacagtagggatttaatcctggagatattttgaaataaggctggtaaactaagtgttgctgtatccacttcaccagctcgtaaaaaattatgattgtttttgtataatttatctttgataaatatataactgtaaagattcaaggagagctctaagtatgtgcaaggtccctcttgctgttctccattgtgagtggaatacaagaaggcatatacttattctctatttgtgtagtctaagggaaattattctttgcatttgtatttttaaaagtataatttcccccgttggttttccccaaggacagcaaaatagttggttttgattataattcatagataatgatgaactatctggctgaaaggctaccaaaatgagatattttactcagaaagttaggtcattgtttaaatatctctagaactggaaattcattttatacatttgtcttgaggaatgcttaagattactgtccttccagagaagaggggagggattaaacataactttctggtttcatactgtattccatttgtgatttgtctgtttatttaggtacccagagggttaccttacttctctgtggattttggccttcacggagggtttgcccatgtcattgaagatcagcacaaattccctcattactttggaaaggtaggcttacaaatttgataaaatcccagagttagcaatttggtaacatttttcttttgaaaggaaataaaaactttgggcacagtatacaaagaaattggtgagtactgctccacccagtttttagagagggaatacctagcaactattaataaaaatatcccagaatgtatataacagagccaggaatgttactttggaaccaaacatttcttgacggtgtcaacaattactataatggttgtttttggaggaagccaggcttgtgttgagaatgatgataattgttaaaacttattaagggcttacagtgtgccagctactgttctaagcattcatttaatgctcacaataatcctattgtgtggatattattataaatttcactttacagatgaagaaactgagctacagagagattaggtaacttgcccagggtaatgcgctaataagtggtagaactaggagtacatatagtcatggttgaactagagaaccaattttctcatcttcatttataattaagcaaggcgtagcccaagaagaacacatgactcattttacgctgatagtttctgggcagatattagcatacagatcttttgattcactaccacagattgccttcttatattctgtggggtataatctttaaattaaagtctacagaatagtgtcaggaactggaataaagttaatgcagcaactgaaacagtcaaaagtagtctgggcaatgattgctctagaagtgagcctttaatctagtatagatcaggcctttccattcatatttatccctatgtagccaggccctctgaaaaagaggggccttggtgaactctgcttgggattccctgttctccaccctgctccccactttcatctcctgcagaggaacatcttctgcaatgagtagaaatatctgaagaggaatctcaactccagaggtttgattcaaaacttt

SEQ ID NO: 67017 - DNA, 1049 bp, Homo sapiens
atcaaagttaagttgctatctgcttgaaatagacttatgcttcctggacttttaaaaaataggctttattttctagagcacattttttttcctgtatttttacttcttcattatatgagcagaaatagttcaagaccttggttgctagaaaacatgtaaattactctgttgccttttggaagaagagcagtaaaactaaatgaatttatttagtaatctctatgaatgcagtgctataaatggaactttatgatcacaaattatgtttcatattaaattgattggtcttattaaggattgccatgtaaagttgagctcaagttagtataacagttaagaatgagtaaaagaatattatctttggctaatggtaagatttcaaaaatttaagaagttcttattttaaataactaaaagccttaatcagttcagaataatggcttactatgtataatataccccataattaatttgctatattacttgttataagctgtttctttttatttacttacatgttcttttttcacttaacaaatggatatttcttagaaagccataatggaatctgatgaagagtggtccatgaacaagaagttgatagatctctcttcaaaagatatcagaaagtctgtaagtatgttttttcctggtaaaagaaattaccctagtgctcaggatctttattaatttccatgtcttagttgacaaagggaccatttggttgagtgactgaaggcgaaattactagttcgacaaatgaagttatttttatcctacctggtctagaaaatgcttatttgtttgtagagggtttttatttgttcacatgaatgtttcttcctgacctttggccttctgccactgtagtccctataattggctatggcagctattagagtctgccgtgagaactgctgtggtgagcttctcagcccctgtgggacaaatggtgagaagggccttcctgaaatatattgttctgcaattatactgagagaaaaattttcctagatgttccattttgaatttggaactcattttctttt

SEQ ID NO: 67018 - DNA, 1432 bp, Homo sapiens
gaattggtcttctctgctgctgtgtttttgtggtgattttgttactagctttaatttctgctctttttccttcataatctggcccagcttttggattcagggatttgtttttgtggctgatgctttaagagagtgaaaggcacaacatgggtgaaattgttgctgaattatttcaagacctaataatgaccaggaaagaaaggaagaaaactctttatttttttaatgccagacaactgaataggggctacagggagccttaattagaaaatgtgaaaattgtaagttagcactgcacaagagatgactagtctttgcagcatgctgataagtatgtcaaaagaagagatgttttgatggcatttaatgaaatttagtcttgtataccttgtaattttaaagtttttgctgtcaaagtttaaagggtagattgttttattgcatctgcaaccaagcaaaagtaagaatatgtctttttgatgtgaaagtttgcgttttcctagtagtggatgccagtgccagtaggtaatttaaggtggaaagtatggaaattcagttcttagaattattttagaacatttccaggaagccttttaaaaatttatacatataaaactgatttaatttagagcaaaatgcagtgccaaaaatattttaagtaattataggaatacaatgtgtatatgttttatatttctataagaaatcaagctgcttaatgaaaacagtttaagtggatgaagatttttattcaatttaacagatattgagtacacaaatataatattttaggtgctgtaagaaatgaagagatcaagtaattcattaattctgccaaaatatgtggtgtatttctagtatagtttacattatagtttagcagagtttggaaaccaagtgtactatggaaaactgcgaaagagaggaaaagccaaattgttttatgcaaataatggtgttgtagctccttttgtgtgagaaaggaaaataattgttagaagttatcaattattgtaggctagtgaactaatgaaatatttgaatcctagcttgatgaggtacagtttgctgttgctgttgttgttgttgttattttactttcaaatatgtacaactcaaattaattctaccctagtgagtatctttgattattcacctcttttattggatatattaaaaaaagatttgacttagcacaaaatgttgttgccaaatgttgcaatgcaggagccacttctttcaagtggttttaaaaatcaccagtatctagtaatatttaaatgtaattttagacttcctatttaatagaaaatgcgaagatgttttagcatagcatacttgagtaatcacagatttcaaataagatccaaattgctggttttgtttaatatgtaatgaaacttggttccctctaaatttattgttatcattt

SEQ ID NO: 67019 - DNA, 1040 bp, Homo sapiens
aaaatgaggaaataaggcatagagagagcacagagaaattaaataatatgttcaaggttatacacacaggagatagaactttaccatggtcattttgactgtggaatctaagctttaaaccattatgactttatgtatgtatgatttagttggctttcaagttcaagagtttgaacttcattctgtacacagtatagaactctcataactacctaaggaggtacataaaataagaaaataaaatttgtgtttttgtattttgaaagcatcaatctgtccatagttcatgttgggagagatatggagaaggtacctggagatgtggttaaaaaaaaaaaaaaagttccacattctatatagtgtatatgtgaatttttaaagttacaatttaaacctctctgtgattcagtttcctcatctattagttgaaaatgaaaatgctaatggtccccaccacataggagtataaaacatgaacaagtcatatagaattgtatatagtaaatattcagtaaactttagctgtggtgatgatgatgatagattgactctagaagatcaaacaaatattaatcatgttttttcttttcttttaaatgtattagttttatcatagaacttacagatacagatttaggataccacagtgcagtaaaatcttaatcactaccttctactctctattactgttattttggtttttcagtttatgggaaaaacagatggagactattacaccctggatgacatgtttgtctccaaagcagctgagagagaacgtcttggtgaagaggaagagaaccaaaggaaaaaagctattgctgagcatcggagtcttgctgcacaaatggaaaaatgtctgtattgttttgacagctctcaatttcccaagcatcttattgttgcaataggtgttaaggtaagaagtatttattatcctttgcttacattctcatagaactttttttgtttcttcatagaataacttgaataagtttattattttgtctgttttacttgtttattgggtctttccccta

SEQ ID NO: 67020 - DNA, 1058 bp, Homo sapiens
taaatatgcaaagcaatgccagttcctacctatgtgcagtggggccaatggaagtacaggttgctatggaaatgctgatttcacattgggatttttagttcatcctgcctgataattacagcagagtagcaatttgttttgtatgtttaatgattaaaatcagctctgctaaaaatttgaggcgttactaaaagcctataaaaaaaagaaagtatttgaagtgttggccatttctaagaatactgtgcctaatcctttcactcttaaaagtttatgaactaaagtagctaagttattgaatttttgatagtaatattgctggtatatagtttagttatgtcaaatagtttcatgaatgactccaaaagctcattatcctatgtttctttttattattagttaaaaatgattagtctagtttaaagtcattagaggttggcaaactttttatgtttctttttattattagtttaaagtcattagtttaaagtcattaaacagaggttggcaaacttttcttgtaaagggccagacagtaaatatttttagctttctgttgcaattaccagcactgctgttgtagcacaaaagcagccatacacagtatgtaaatgaatgggtttgactatattccaacaaaactttatttacaaaaacatatggatggcctgatgtggcttggaagttgtagtttttcaatccctggactaggatataaaatcttcaatgcaaatgtatttgaatttagatacaggttgaacatacctcatccaaaaattagaaatctgaaatgcattaaaattcaaaatttgttgggcaccaaaataatgacacatttgctttttgatggttcagaatacacaaactttgttgcatgtactatttaaaacgttgtataaaattaccttcaggctatatgtattaggtatgtatgaatcataaatgaatttcaaatttagacttaggtcccatccccaagatggaatgtatatgtaaacattttaaaatccaaaacaattcaaaatctgaaacacttctggttccaagcattttggata

SEQ ID NO: 67021 - DNA, 1025 bp, Homo sapiens
tttgctaatttagcaagtttgtctttagttgttttatttcttataatcagattttaataggatctttaaatttaaaaaacattacatctactgcataagtgatgggcacatggactattgatacttcgtcatcttttaatattgtctagatgaaaattttatttgaaattttcttctcttgattgcttttttaaaaatactaaaataaacattgggtattttttaccctttccccaaaagattatgttcattttatagtatagagagtaatgaaaatccaggagatttaaggcaatccacaacgttatgtggaaacgttaatcattttaatgctttttttgttattaaataaaaacattcaacattcttcacaataatttcaatagttatctctaaatctttttatagaatgaagaccagcaagaagtaatccttgtcagaacagatcagtctggaagagtatggcctgtgaacacacccggaaaatctctggaatcacaaggaggaagaagaaagagacagatggtatgtttaacatatgtctttgtttattaattcagaattccttcttccccttggggctttctttgtatcagattataaaatattttctgaaatgtggcttttgaatgccaatattggaaggtaggaaatgatgttgttactacttttattcttagttatatctctttgccttttacagaatggaaactaatccaactattttttcaaatagttgttaacattgaatgtttaaggcaattttaattttagtgtacatttctttgatgttgttttcagctgcttttggcatacttgctatagctcttagggaaaactttggtctctcagagctgttactagtgttagacagctaacttgagacctggtgatggggtatccatacacagtaatggcttaattatgtaggtgccatgatcctttataaaactaattttcttttccattttccaactctagtaattagtttttagcactaccttgaggctcttgagctggcaaaa

SEQ ID NO: 67022 - DNA, 1024 bp, Homo sapiens
tttggagaatgtaattaccttgtgtaaactaccaccgggcagtggtaatattttattttattttattttattttttattttattttatctatttttttgagatagtgtcttgctctgtcgcccaggctgcagggcagtggcatgatcttggctcactgcaacctctgcctcccacgttcaagcaattcttgtgcctcagcctcctgagtagctggtactacaggtgtgcgccaccatgcctggctaatttttgtatttttagtagaaatgggtttcaccatgttggccaggctggtctcaaactcctgacctcaaatgatccacccgcctcaacctccaaaagtgctgagattacagatgcgagttactgtgcccagctggcagtggtaatattttaatgtgagatgtgtctgtatatgtgtctgtgtgtttatgtgtatgcatgcttgttttaaaaaatttagttttctatatattctcttacattctatcagtgtgctctggtggaaaaaagcctcgggctgagaccaaggagtcttgcttttattctggactgtgctgcttactgattgcttctgtatgagtcaaactgcttcttaactgtctccttcagaatgagagacttgaattagttattcatttcatataaaacaaattactttggtctatgattaattcatctatctgttagtgaacaaaacaaataaaaacacctacctgcatggaactttcatttgggtagggagggaaacaataaattataaaaatgataagcaaattaaaaaataatacagtgtatcagaaagttaccctatggcagggtagtggcaattttgagtgacaggtgggttggtggcttggaatgcacaggccaattctgttgaaaaagtgtaaggactttatgtaaggacttgtagttaatggaagagtgaatttctgtgtatttgagtgaagagcgcagtagtcatagggaacagagatttaaaggcccaaagatggaaatatgtctgatgtgtaggaagaa

SEQ ID NO: 67023 - DNA, 1041 bp, Homo sapiens
tggcctggttcgaacgttttttgtttgtttcctttttaaagttacgagtatggggatattaaataagaagagttgataagtactatttatctcattgttattgggattttgatcagttattataactgccataggtggttgtggcattgtaacagagaactttatcaatttgtggaaaaatattgagtttaatttacatgtattacaatcatgatctgctattggtactgaatgctttgttgaggtcagttaaaataacatttgagtcttgatgttattgcttgcatcgcacctatatttcatatgctgttaatctttcctattccaatagcagtccagagcgtgagtccattcacatcctgagtgttgatgagaagaacaagttgggagccaagattatcaaagcagagatgatggggaatatggtaagactcttagatgttgctttagagaataatgattaaatgtttaacttcttatgagtaattttagaagttccttagcagtgtggatatagcacactgtgaaaataactgttggttattgattccttaaagaaattctcaggcctggcaccatgcctgtaatcccagcactttgggaggccaaggcaggcggatcacttgaggtcaggagttcgagaccagcctggccaaaatggtgaaaccctgtctctagtaaaaatacaaaaattagctgggtgtggtggcgcatgcctgtaattccagctatcggggtggctgaggcaggagaatcgcttgaacctgggaggcggagattgcagtgagccaagatcacgccattgcagcactccagcctgggtgacgaagcgagactgtgtctcaaaaaaaaaaaaaaaattctcgaacctttctgtgaagaatactatctacttctaaataaatgatctactttctctgtcagatctctgaaattgaagatactaaggaacttcatgcttttaaatttcttttttacttggctatttactttattcctgcatttgtaactcattgagcatatttaagggagataaagatg

SEQ ID NO: 67024 - DNA, 1291 bp, Homo sapiens
ggtaacaacttacacgtgaatgatcattaaaatatgtttaaaaatagcaccaaatgagtgggacactaaaggaagaggttttaggaaataatagaaacacatggttgtagtagataaaagcactgtggtttggggttgtgagtctgataaatcacttttgttaatgactccatctgaagcagtggattataaaactcagtgtgtaattttcggtgggagggagctggcaaaatctgaactgagtgattaagccccagtcaaatggactctggttcacatcagggctttcctcccaggaagtggaaggagaaatccaattgtattgactaaacaaacatggcagggattattgtctaaggctgtatgcatatgtaattgtccagtcttcactccaggtgccctgggtggtagactatttccagttcccagtcactaggggaatgaggctcttatttcctgatatcattaggattgggttagcatttggatgatctgtaggccttcttctgtgactgtagctaagcaaaatgtctgcaaagtaataccacacgattagtattccaaccggttgtctgattgctgcatatttgtatgtcttatttaagttgtaagcttctgatagatacactataatacaggcactcactaaaagctgtgtatgtatataatttttcggtttgaagacagcactcactaaaagctatatatgtgtgtatatatatgtatgtatacatgtaatttttcctttgaagacagtattctttgttcgctgtgttaatttgatggtacagagggtttgaggctttctatgaattctgtgactggctggagagggaaagaaaaatctaggaatcatccaaaaaaaaagattcctgagaatgtagagtggttgtaaagtaggagaccaagacaggaccttgaagaatgcctagttgttacaaataatctttgtcttataagtgaatggtcatgattggaaaaattagttgaattagtttttacttctttgtatgtattgttcatatatctttacctttcttgttatttacaccagtattattttttagaacatgccatttgtaatcttaataaatgtatatgtataaaatttaaacaatatagacagaagagtataaaacaagaatatgaagcataggtgagtataaaatgaaaaagtaaatctccctttcatgtcacttccaaccctaatcctatttgccaggttaacagtgttggtagtgtctttccaaattttttagtgtatttgaaaatgtgtaatatatatatttaa

SEQ ID NO: 67025 - DNA, 1968 bp, Homo sapiens
tatccatatacaggctcacacttattcactccttccctgatctagtccttgtaaaggtttttttttttttccttgagttttgagattcaggtattagggtttttttctgtgtttttcttctttctcccccacccaaggctattggatgagtccttctgagaaatcggctggggaaattttcttatatatttttaaaattaatgctctattcccatcatctttgctccatctttctggaagtactaataaatgcatattagattttctagaatcaattgttcatgtatctttttttcttataacttacatttatttactaccttttcctaaaatatagagaattcccaggttaatttagttttcagcactgtcttttcttccttttggtgtatcttggcagctttttgggacacacaattttttatttccaagtctttcttgttcttgaactattctgtttttttttttttttttggtgagaatctgttttagcaatttaacctcttgaatctcacaaccagtaggaattaagtattttttgcaaagtttgtctctactgttttctgtgttatactttgtgttagtgcagagtgtttggtgtaactggctatccttttggaatctttttgttatttaataatttttaattgtttacacatttttagaaagtattcgtttccgtataggatgattgtatgggtcttctttcaccccgttagtgggcttttcagtgtgccacttggcagtgagtcatacagtgacatgtggggtgcaagtcactgagccgttcctaattttagatatcttgtttaatttttctcctttgtagtcaatggaaatatttcagtcaaaattagaagatgctgaaaaagctgcatccacgaaagaagattatagacgggaacggtggaggaaacccacatattcagataaagcacaaaattgtcaagaaagtagagaatcagacttagtaaaatatggtaacagttcaagggatagatatgctacaacagatactgcaaaaaatagcaataatgaaaaatttattggtgatgaaaaagataagagacctgggtctttagaaacgtgtagaagagaatctaacccaaggcaaaatcaagagttttcttttggcaatttgagagctaaattcttgagaccctctgatgatgaagaactgtcatttcacagcaagggcagaaaatttgaaccacttagttcatcttcagcattggtagctcagggctctttgtgtagtggttttagaaaacccaccaagaacagtgaagaaagattaacatcatggagtcgctctgatgggagaggagacaagaaacattcaaatcaaaagccatcggaaaccagtactgatgaacaccaacatgttccagaagacccaagagaaaaatcacaagatgaagtcttgagagatgaccctccaaaaaaagaacatctacgggatacaaagtctacatttgctgggtattttatcattttttaacctaataagttaagatccagagagttcaaagaacagaactgtatttttagaacatcagttattagctgtgactatgatctcacatttcttaaaattgatagaaggggtaagatatgcagatttaacaggcagtattgtggtatggattgcattttatttcataggtttttttttttttaagagctgaaagcagtagctatatttgttcaaaatatgttgctgctttgcaatttaaaaaactgaatgagttaatgttttaaatgtatgtgctgcaggagatattttggtagattttgttaccaatgccattactttctaaggaaattatcttattgttgagtataatcataatcataaatactgcatgtctataggaagtctaggagacaaaaggaaaacacgctgccacggcccaaatataaagtgacaaatacatgccagagatcttgcagaggggagcatgaatt

SEQ ID NO: 67026 - DNA, 1051 bp, Homo sapiens
tatttgtacaattttagagtttatatggcacagttatatatcagcttttttcttggcaaccatgtaaaggacagcagtgtagatagtattttaatattatagctcaataaaccaaggcttagagtggccaggtaatttttctggtagtcgtgttagtagtactagaacccaggtcttctgattcctagtccagcattagttactctagattctttagtggaagactatttttattaccatgtagttagtaggaattcttgcttacagactcctttgatgtgattttgttcttcctattgatttcttccccctttttattttttggctttttctgctagaatgtgagttgaaaagactttgaaaggtggtttaaattggctgccttatcttagagatgaaggagcaaaggtccaaagaagttaatgacatacataagattttacatatatttaatagtagcagcaagactaaaatctaggtttcctgatagtttatcactatttttatgttagtctgttttctgagagagttgggtaatatagcccagattcatttggttgtattaatatttggtctataacagtgtaactttgagttatgatggaagcatatgatggaagtttcttcattttttacttataaataacagatttgaaatctaggtgtatgttaagtgccacatatcagtgaatttatataattatttgatatatctttttctcagcatagaggacctgaaccatgctacattcatgtttgtacttcctattgtacattcatgggtttgttttttttttttttgggtcggggggcgtgtggagtctcgctctgtcacaaggctggagtgcagtggtgcaatctcggctcactgcagcctctgcctcctgggttcaagcgattctcctgcctcagcctcccgagtagctgggactacaggtgcatgccaccacacccagctaatttttgtatttttagtagagacagggtttcaccatgttggccaggctggtcttgatctcttgacctcctgatctgcccaccttggcctccc

SEQ ID NO: 67027 - DNA, 2467 bp, Homo sapiens
ctttaaaaaaatttttttttttgagacggagtctctgtggcccaggttggagtgcagtggtgtgatcttagctcactgcaacctctgcctcctgggtacaagcgattctcctgccttagcctcctgagcagctgggattacaggcatgcgccaccacgcttggctaacttttttgtatttttagtagagatggtgtttcaccatgtttgccaggctggtcttgtactcctgacctcaagtaatatgcctgcctcagcctcccaaagtgctgagattacaggtgtgagccaccacacccagctctttaaaatttcattgccattttgtaaaggggaaatacagtgtaagaatttttttctacgatgttgaatttctaccacttaacagcacagaatttttatatcaaagtatgcaaatttgacaatttcacttatatgctaaatgttcttagagctctgaagatgagtgggttgaggctgttccatcccagactcctgacaaggaaaaagcctggaaagtgaaagatgaaaagtcaggaaaagatgacacccaaattatcaaggtaagcaagccacttgattttccttccttgctttcttccttccttccttccttcctccctccctccctccttccctctctatccctccctccctctctgtccctctctccctccctccccctccctccctccctccctccctcccttccttccttccttccttccttccttccttccttccttccttccttccttccttcctttctttctttctctttctctctctctctctctttctctctttcattcattttagagacagggtctcactctgttgcccaggctgggccgcagtggcacaatcagagctctctgcaccctcgacctcccaagctcgagtaatcctcccacctcgacctccctggtagctgggaccacagttgtgtgcccaccacgcctggctaatttttttattttgtgtagagttggggtctccctatgttgcctagactgggtctcaaactcctgagcttgagcaatccttccacctcagcctcccaaagtgctagaattagagacgtgagccactgcacctggcctatcacttggttttaaagaaaaaagtatcaacttttgagaataaatgaatatgaaaatgaaagatgattaaaatttcttcaggagaacaattagactttgaaaacaatatactttaggaataattttggcagtactgctgtttgctgaatgtttagaacccccttccccttctactgtgagaaagtgagtgttcctctctattctcgttccttagaggctttcatgcttttgattgttgataagaagtggcactttccccttatgtccctaaagccttatactgtatctctgtctgacccttctatagtgagtggagttccatcacagttttttttcccttcacctcatgccttaattttcttaacaatacttaacagttgaatagttcaaaaattttgggctatagttcatctgcctcaggaagaatgtaatttgtccactgttagccacaggtgaaggaagaaaggtgaacaggaactaagtttgattgcttgttgtgtgccaggctttgggctggatgctttagatctgttatcttgtttactctttaaaacaatcctgaaaggtagggattttataccattttatagaggagagactaaagtatagagagatttagaagcttgcttcaagttatatagccatgtaggacttgtttcaggtttgattgcctccaaagtccctgctcttattaccaagtgtttattaaattctaatcagttcagattgaaatgatgagtggatgactgttgattttatgtctttttttttaacagagggatgagtggatgactgttgattttatgtctgttaaaactgtgtcatcatcatcactcaaagctgaaaaggaaactatgaggaaaatagagcaagagaaaaaccaagcgcttgaacaggtaagagaatatttgaaatgctttaactttctaatttacctttaataaacttacaagacatttatataaatgcagtttaacttgtaaaataccattttattttttatagtatttaatacaattagtgagaacaactatgaaatacatcagtttaagaaaaataaatttcctataggaagtgagtttaaaggtttactagatttataaatctagggcatatataaagttgagtgaatattgagtttaatatcattaaattgaaagtgaactcactcaatttttgtttcagtgtacatactgaattagacaccatgaaaatacttccatttcaagacatctagaaattctggtggatataatgtaaaataagcatgcttattttatactttattgttgtcactttgctagtaaggaagcaataggaaatctgtagagaccaaaaaatgaggcaaaagcatgaatccagaga

SEQ ID NO: 67028 - DNA, 1693 bp, Homo sapiens
ttttttaaggcggagttttgctcttgtcccccaggctggagtgcaatggcacgatcttggctcaccacaacccccgcctcccgggttcaagatactctccttcctcagcctctcaagtaggtgggagtacaggcatgcgccaccacatctggctaatttttgtatttttagtagagatggggtttcaccatcttggccaggctggtctcgaactcctgacctcatgatccacccgcctcggcctcccaaagtgttgggattacaggcgtgagccaccgcgcccagcctggggtgctactttaaggatcaaagaagagaatattagttggtattttggttgcaggtaacagaaactaaatataaattggattttgcaaaaaggatttattattaaagtacaaaattctcataagacatatagatgtaggaatgcagctaggcttcaagaatagctggaattagaattgtgaatggtttttgcaattttcttgccatttttcatttcccctaccctgagttctagtttttaaaaaatttttgctgatttctatttctcatgacagaaatggcctctcccaatgccttcccatttcttagttttagataagcccatttagacctgatttcagattcctgtggaatggctcaggttgatgtgaattgggtcaggtacctacgtttgaactaatcagtagtggccagggatagaggtaggctcgtatggtaatcatgtattcactctatggtatatttaataaatattttaaaaatgaaaatggtaggcttgaatatgtgaggtaacatcatcctgagtttctgacttggtttaagtgggtggttggttgttccagataactcagttcaatactatacaaggagaagtagattttgtagaagaagaggatagctttatcttctgttcttactgagtttagcatgccatccaactgcagtagacaattagtcagtgaaactttggttagacaaatttgaaagatatcagcacaatttattgtagttcaggcgatcagaatggatttaatggcccaaagggaatgtttagacattgaaaaatgtcatgggcaaagaatggaatcccaaataacaagatatttaagggctaagcaaaggaggaagagttcatgaaggaaatggagaagaaacagagtgggaggagagctgagaggtgtcatggaagccaggaaagtgagttatcaacagagttgcattaagcagagaggtctagagagctgaagactgaaacgttttgttgagttcggcacagtggaagccactggtgagtttggagaagtttcagtagattaatggggacagtagatgtattgtagagttttgagaaaatgtatgaaagtgagagtgtgaaggcggtgcatgtagactactctttcaagaagttcatctgagaatggaagccggaagattaattcctgctagaggaggaatatacggggtcaaggaaggtcccccttccctccttaaaaaaaaaaaaaaaagggtgggaaatgcttgaaattgtttctaggccattagggatctttggttaatgccgtgagaggagaagataattgatggagcaaggtcctggaggaacagaaagagttatcaaaatctttagagcaagatctgccttaaataggaggagttaactggaaataaggataggcacagccat

SEQ ID NO: 67029 - DNA, 2978 bp, Homo sapiens
caccctgttctttggagtccatcataagccctgctcttttctctgatatcgatttttctgtttggtatataaccattgtattcatcttcttgcctacaccaagaattattatatgcacccagggaaaagctagctgcagaatgttggactacctctccatgattttcccttttctggaatattaactcttctagttcttgttgcttcagcagttctctgatataaacctttaataaattatttttatatttgattaaaaaaaaaaagaaaatgactacagccaggttttaaaggggaagagtgggcgattagtcttgggtaggtgaaatgttggtattgtttcgtaatttcaacatatgtaatgtgtgtgtgtgggtatatatatattattcattcttttctctttggtatttccagcagtttttggagggagtaagtttcgtaagttgagataaatcttatagtagagatatgcatagaatttgaaaaggaccaaactgagctttggagttacagggaaagaaagagggcaggaacgatttcctaggaaaaacttgctttgtttgactatcattgaagaatggataaaaattaccaatatgatcctttctttatacagagatgattcttcctgaggcatttttggggctgggtattggggctacaggcattgcatattgaaggcgtggaggtctaactgttgcaaaagtcttaaggcagtagccatgggaatggtgaagggaaaagggattccaagtcatattgagctagggagcttagagagatgggagggcctggactcagtccctggattctctctgattggtaactcaaatcactggagattggaaatgcagaaggagagatttttgctttgttttgtttatttatttatttttttatttttttacactggagaagcaaatccctggcaaggaatagacattcattcatgagtggatatttttgtataaaaatgacagaggtttttgttttcctttttttgtgaaacccagttgggtcaattgccagtttgtcttttttttttctttggttgtaggctaaagccaattttgaaaaagaagaaaggcgtaaagaacttaagcgacttcggggtgaggatacatggatgctacctgatgtgaatgagagaattgaacagttctcacaggtgaatactaacaggtttacgtgatgtaaggatatctgtccttttttgcacgtattcaagttaatattggatgaataattttatagaatgttttcataagttacaaaatgaatatcacatagttggcattgctgaatagtttcatctctttggcagaggtaagatattgtaatattttggacattatgactcaagttttgttatttgagtttggctagtagaagacagcttcaaatttctggcccactatagcaagcttataggcctaaaaatttatgcattttaagctttatgtatttattttattttatttttttaggtctcaagcctgttttcctataatttttttaaaaattatttttaattgacaaataataattgtgtaaatttatgggttagagtgtgatggtttgatctatgtatacattatagaaagattcagtcaagctaatgaacatatccatcacctcatcaacttatttttttgtggtgagaacgttaaaagtctgttcttcaatggctttgaaatagataataccttattattaaatgtggtcatcagtaatagatcactaaaacttatttctagtgtcatgaaaactttgtaccctttgatcaacatcttccctttccctatccttgctccttcccctagcctcttcctataattttaatttgtgctatcttgttatattttttatggcctaatagtcttgtataaatttttggggagaccatagagggatattatatgtatgtgtgtttgtgtgtgtatagatgcatgtatacatgtttgtgtatatatgtgtttatttgattatatttgtcacattaatctacaaataaagccaaaattttcccagtatttttctggtaagaagtctcagttatatgatttattgatagtgcatatattatagaaggtgtgttaagatttcctgaaagattttatttatttagacatattcttggtcttatttcatcagagattgaaagttttttagaatgtggtttattttttttctctcagaatacatccttttaaattaagatgaaattaaattattttcttgcctgttcaaaatgattgtaggaacactctgtgaagaaaaagaagaaaaaagacaagcattcaaaaaaagcaaagaaagaaaagaaaaaaaagagcaagaaacagaaatatgaaaaaaacaatgagtcatctgatagctcatcagtaagtatgtactaaaattaatcaaagcagctatttgagaacattttatttgaatgtgtaacttatgggaagttaaaatacaagaaaacgtaaaaaatatattactagttatgatatgaaaatatctgggatacatctacttagagatgtccagaaaatattggaaatgttgatcttgaatttcagagaaaggctaagaggatagggatatgatttgggaattattgctaagcacagcactggatcttgcccaaggcctgctgtaacaattacctggctacagctggtgttcactcaaggccctggggctctgcaatcagcaggtgatgaagccagccaggcctgcgtctttcccttcagggtggcaagttcccccaggcctgagggtgggtccagaggtgccatcagggacccaggtactggcgtcaaaaaccttagacttgtacctggtgttctattgaactgtggctgagctggcattcaacctatgaatggcagtccttcccactcttcccttttcacaggcagaggggcctcaccctgtagccaccaccatagacccacaggtagtactggcaggctaccactgat

SEQ ID NO: 67030 - DNA, 1018 bp, Homo sapiens
cgtgctcctccttcctcgggtccggaagtcccggtttgtttgttaaattacgaccgtcgtaaactagaattttcttgcggcttcttagctttacgatggcaacaagtatggcggctgctagtggtagatttgaaagtgcgaagagtatcgaagagcggaaagaacagacccggaatgccagggccgaggtgttgcgccaggtacctctgttttggggcttttgtagttatttattgttgtgggagttgagggttcccgtaagctagcccactcaccccttcccttacctcgtcagtactgaatctcaccttaatttgggtgagttctccctttgcaatgccggtaaacccttttgtagctaccgattttttagatgttctggcaggtgccagttgctaattctcttttcaggcagatctgtcgctttttctccaagtttctttaccttttaagttacccattctttacatttctatcactcggactgcacactttgtaggtcccctgcggcttgtaaggactctgccagcatgtctcgcagcctcagtcattgctactgctgtatctgaaatgagattttcctttttcggaaacacattcaagtcacacttgaatagactcagtttgacatttcctcctcctgtctctattggtatcaattccagacttactgtaagctcttaccaatccaaacaaaagttaacaccaatctcagtatatttagcctgtcacaaaagatcgcgaaacattgtatttctcactaaacttcagatacatagaggtaacatacaaagaatggagaaagtaagcttctgaattatctgacaatctattcaatatgtaagaagtgtggcaatgaaagagaaaagttgcagttggagagcaacagagaattcagtgagggtttttgtttttatttaagttggaagagttttaaacaagtttaaatgcaaatgagaaggagccagcagagaagagggagaggagactctaaagggaaaatgacatagtttcaaaa

SEQ ID NO: 67031 - DNA, 1026 bp, Homo sapiens
tggtccgtttttacagagtgctgattggtgcatttacaaacctttagctagacacagagtgctgattggtgtgtttaaaatcttttagctagacagaaaagttctccaagtccccacccgacccagaagcccaaccatcttcacctctcactttggctgtaataaaccgcagacaggagcgtgaatatatgctgagtcctgtgggtcctcctggtgaatcattgaacctagagatggtcttgggaacttgcatcacgctaaagttgtacgtgggagaaatttgtaacagtaaatgcctgtattagaaaagaagaaagttctcaaatctaagggcctcaacttcttttcaaataaactagaaaaagaaaagcaaatgaaatgcatagtaagccgaagaaaggaaacaaagctcagagcaggaatcaatgaaacagaaaacagaaaagcaatagagaaaaccattgaaacgaaaagcatactcttggagaattctgataaaatcaataaacttctagcctcactgagttgaccagggagggaattttatactttttatagctgatgaattcaatcaagaaagcataatttagattcgtatgtacccacttttcaaaactattatttggttgaaaaggtttttcaactaacacattttttgggggaaaaatatttgcagtaggattactttatatgacaattcattttaagtacacgagatttctctaatacatctattgaataaaataagacactatttatatattaaagaaataagggccaggtgaggtggcttacacctgtaatcccaacaatttgggaggctgaggaggaaggattgcttgaggccaggagttcaagatcagtctgggcaacatagtgagacccccatgtctacaaaaaattaaaacgttagctgggagtggtggtgcacgcctgtactcccagctacttgggaggctgaggcaggagggtcacttgagccctggagtttgaggctgcagtgagcaacgtttgcactactgcatt

SEQ ID NO: 67032 - DNA, 2015 bp, Homo sapiens
gaaattgttcgactcctgagaccaggtgggaaggcactcatttatgtctgggcaatggaacaagaatataataagcagaagtccaagtatcttagaggaaacagaaatagccaaggaaagaaagaggagatgaacagtgatacctcagtgcagaggtcacttgtggagcaaatgcgtgacatgggcagtcgagactcggcatcttctgtcccccgcattaatgactctcaggaaggaggatgtaattcaaggcaagtttctaattccaagctgcctgttcatgttaacaggacttctttttattctcaagatgtactggttccctggcaccttaagggaaatcctgataaaggcaaacctgttgagccatttggtcccataggatcccaggacccaagtcctgtgtttcatcgttactaccatgtgttccgtgagggagaactggaaggtgcctgcaggactgtgagtgatgtcagaattctgcaaagctactacgatcaaggaaactggtgtgtgattcttcaaaaggcctgattatttacctgaacacatcatatataaagaagaaatgctcacttaaaaaaaaagagagaataaattaattacccttttaattaaagagaaaacttgtgggaaagtaccaaaggaaagctgagaaaaatttggaagtagggattcattaggagacattcaaatgtctcctgttggctgacatcacagatgtggtgttggctcctcctacttccctaggagaggtggtttctaaaagtgattgaagcagtttgtgcagtgtttgtaattcttgggtaagagcccaggattttgaagataatagttttttagtaaagtgctactaaatgtagtaaatcatgtaggattttagggatgtaattatatgttaatacagaaaatagtcctggtcaatagaaaattgtctgaagttttacctatgatttttagctctgtaaaatcatagacaataaccattctatttccatgcctgactagcccagggctggacgtatagcgggtgtccaataacgtttagtcaatcagataatacccagaacttagtaggagtttcattcaaaaactattttttgaacccaaccatgtaccagttactattttaagtactgataatgaagcagtgaataagaaagagcaaagctcttgcccttatggtgcttacattctagacggggagacagacagcaggcaaatcaataaatagatactatgtgccagatagtgataaatgccatgaaaaacataaaatgagagacgattcaccttggagcaaaagattacttttaagtgactgaaataactactaatcctgactaatttattatcaagagttaattggtattccaaattcattgagcagggtgctaaaaacaacccaaatgtgctcctttaactcctttgtttaaatgacaaaagttagaatgtggtcactcagacctaactgtgcccttagagccaaagctgtggtgtcattattggttatttctagttgattcatagtttgtcccaatccaggttcaatcgggttatttttaagatctgtacaatattgcataatagtaacccagttaacttaccacttaggttagatttcctggaggaacaaaggtagaaattcaaccataggtcaaattatcacatagaaggaaaaggctttttttcaaagaaaaaattttttgaacactttactcccagtatgcattacttttgtagtagtaatgcttaagactgttttaaagaaaaattgctttctgtttaattaatgtttactgttattaatgctagtgatacttaatcttgaagcatcaagttttcagaaacctatagtgatcaataatgggtctcagatgagaggatgattatttttttcatggaatttcagtccaacatcctggtgtactggtccctctgggatgaatttataaggctcatgatataggaaaaggaatatagggctaaaaatagttttatttctgatataaatt

SEQ ID NO: 67033 - DNA, 1106 bp, Homo sapiens
atgtgtataagaatgttcacagaagctttatttgtaatagtcccaaactgtggacttgtaattaccatgtagttatttttaatttttaaaaatccagtccagtaatctttgttctttaattggagtttttaatacttttacgtttaatatattactgataatgaatttaaatttaccatctatttgtttcctcttggcatcatctgttcttttttgttttttttagaattggtgttaattaaatatttattttattttcccatggaataatttgttgtacattcttttaatattattgtcatgaagataatttccttaaatacctttatttctttgtttttccacaatgtctaacaattcagggaatccaatagatatttgtaataaattcttctagattttctctattcacttaacatttttaaaggcctgaaatatttttattaatacaatgttaagtaaatttttttgactattgtttttagaatcacgtgcagaaaatttgatactgttcaagcatctgagagtcttaaaagtggaattatcaccagtgatgttggagacttaactttaagcaagaggggactacgaacatcatttacatttaggaaagtgaggcaaacaccttgtaactgtagtaagtatatactcttatctcgtctgtaaaatggagtcagtttaatataaaagtcctttaaggtcctgtcaacacctaggagagctttttctgaatctctctaatggcatttcctgtattttgccttgtattgcactttcatgcacttttcttaacgaccctcattagagtttacattctttgaaggcaagggtctgcatcttctcatctttattttttccaaacttagtacttgagttgggtgcccaataaatgttttacttattgaagtaacagttaagagtgctacaattgaagggcaataaaatattacttgtttaaaaacgggtattgttgggaatggtttgtcaagtttctaaattatatcttattaatccaacagggaagttggagatgacaaattgttctatagtacataactctagggagataagcgacagtttatgttttagtcaatttgaaaactcag

SEQ ID NO: 67034 - DNA, 1167 bp, Homo sapiens
ataaaaaggaacaaaataatgacattcgcagcaacctggatggaactggagactattattctaagtgaaataactcaggaatggaaaaccaaacattgtatgttctcactcataagtgggagctaagctatgaggatgcaaaggcataagaatgatacattggactttggggactttggggaaaagttgcgggggtgaggggtaaaggactacacattgggtacagtgtacactgctcgggtgatgggtgcaccaaaaatctcagaaatcaccactaaagaacttatccatataaccaaacaccacctgttccccaaaaacctattgagaaaaaaaaaaaagatgaggaatggtcaatttgatacagaaaaagaaaaacatttagcttatttggttgtatatttttcctccttgaaacttggcttgtatatgccaggacaggtgtttcaaaattaactaatatcatgttcatatatctcttgtgagttctaatcacttgtttaagctgaaattttcctatttgaaaatcactactgtccgttgatgggagggaataagtttgaatttcacaaatacgtatgtattgtgcctttgtaaaacatgttcaatattagccaaaaagtgtaacttctaggtggatatagagcttgtctctcttcactcttgtagcctttgatatctcaccaaacgattaataaaatttgtctaacaaattagagtctagtcttctagaatattttcccatcatgacagttttcatctggatatctgggcatggatttcctttaagccacagataattgtctctaataataaatatgctcattattctttcgaggtgtgggccttggcttctattaacaaaactgaaacctatataaattggtttaaaaagaggccactgtggttttcccatttccccccaacaatttattatgaatttatttatttatttatttattttttggtgagacggtgtctcgctctgtttcccaggctggagtgtagtggcgtgaactcagctccctgcaacctccgcctcctgggttcaagtaattcccctgcctcagcctcctgagtagctgagattacaggtgcccaccactatgcccggctaatgttttgtatttgtagtagagacagggtttctccatgttggccaggctg

SEQ ID NO: 67035 - DNA, 1128 bp, Homo sapiens
taaggcttttgtaccttcgaaatatgtatgatatgtgtataagtgaggatgatttagctgcaattaacagcagaaaacccaaataaaaatgattacaaggcaaaacaagttaatatctcatataacaagatatctcaaggaaggctggttccaaaagttttaacttgttggctcaggtcggtaatttcatcaaggaaccaaccaatttctttccatctcaaatactcagtgctcccctaactgaggatgagcttagggaaatatccaaggagtaggctgcatcgggttatatgacaataacatatacctgtgaagtctactaggcttttgtttttaggtaatccttcactgatgaatttgtcctgccgtaaattgcagcctgcctttgctggccaggcatgttttgagagatgcccttgctataaccttttatgataataaactagtaatgttgttgggcagataactcagttcatcaagtaccgtaagagttggtcagctgataatgaaaataactatttaatgtgcatctccctaaaaccaatacctaacttctattataaataaggaagaaaacttttgattaggacttatctgggaaaacgaaactaaaatttatgaagatgatttttaaagaaaaattttatttaacaatttttaggttatattacaactatgtactaattttttagaacaaagaatgagtcacgtgaactttgtttttggtcttgtttttctgataaaatatggtagcatgataaaaattcctttatttgacttttatagcttgattataaagagtgcgttgttgtgttatttgctttatttttctcttcgttgtgaaagtcctgactctgccagattttcagatgtttaatggatttgcatgtgatttaaatggtcctctgacatcccttttatcaatttcgggaagtccatcttttgtgagaattgcaatttcaattagttttgggtttgcattgcactggctagtatttatataatcaacattcactgaaagactgaccaaagggattaccataatgggcagagatagctgctgatattgaagagagagagagctatttgggcaagtactaattttatggaagtccgttcatcagtaaa

SEQ ID NO: 67036 - DNA, 1056 bp, Homo sapiens
atgaaattgggctgatattacccaaataaattcaatatgttgtgaagattatgttaatgaggattgagtagataaaagcttatagaacagtcttgccaaaaagcaagtgttatgtaactgtcctttctcctctccacctctttcattatgttaaatttatatttctgaataatagtcatgttttaatttgcatttatggtcatttagaaatgaatattttgtgaaattggctatttaaacaacacaatttacaatataggagtcctttttattccccaaatttttagtaaattggtttacatactttgtatgaaattagcaaaccaaacaaccactacaaggaaatgctttttttttcttaattacatcttttttaaaaaaaatcttattttaaaacaaatgggttggtatcagttgctcatgttactttctttttgtttgtttgtttgttttttaagagcctggttgttgccaatggtggtttgggtaatggtgtgagtcggaaccagctgctcccggttttagagaaatgtggactggtggatgctctcttaatgccacctaacaagccgtactcatttgcaagatacagaactacagaagaatctaagagagcctatgttaccctcaatggaaaagaagtagtggatgatttaggacaaaagatcactctgtatttgaattttgtggaaaaaggtattatcatacaattatcttttaaaaaatgattcttctgggtgttttcttttcatagacttaagttgggaggttcagttattgtgaaacaaaatgaggaagcaggttagcagctccttttactttaacaaacattctttaagcacctatttgtgccaggcatgggacaagtagttgacagtacagaggtgaataagatacaacctgcctttacaaagctagtcccaccagtcaacaatatatttattaggcacatggcttattttggaaccctcctgcctaattgtgtttttcaaaatttaataatgagggtttgcattactagtttatttcacatatctacccaggagctttgaatta

SEQ ID NO: 67037 - DNA, 1050 bp, Homo sapiens
cctcaacaccaatgaaacctttgctcttccatagatttaggaatatgggaatgtttttgcaactatggccacatataaccaagttattttggtattttaattaataaacctcattaagtgaggtccagggcaagccatctgagactccattttactccatatcatatagtattgtattagtgggcttgtttattatgtatgtatatgcttgcatgcatacaaagtactggctgtcccatgacaaaacagttttactttccttattgtccaatttcataataattcttttatatccttttcaaacaaagttctaggtattcttattttgtgtaataaaccaatacacaatgtactatcactgagcttagtataaattaagggttggcaaactactgtccttagactaaatcagggttgtgaccaaaataatgagttttacattcttaaagtgttaaaaaataatactaagactatctgacagaaacttttatggcctgccaagcctaaaatatttactatctacctcttctcagaaaaacgtcatcaacacctggtataaatgaagaaattgatgagagtaggccatccatggctttcttttgttatattgaaatgtttttagaagtcatagaacataaattaaaaatctttacattgtatagaatggttaagtatagagactatatgggtgctagaccatgaacatcagaataaaaataagagactcctctttcatccctgcaaaatttccttgaataaagtttagtgcaggactatgcaaacagcaggaagtaatcgtgaaacttacaaaggaaaaagttttcattgtgaactgactgaattacttagtctgaatttccttagaggaaaattttttcctaattatgttcaatagaagctataattggtttttctttgaggtaatagtacctttacttttaatttttagtaaacattgtataatggttatattaaaagtgcggatcctggaaacggacagaaataggtttaaacccacccctaatcaccaccttaacctaatttgtcaga

SEQ ID NO: 67038 - DNA, 1373 bp, Homo sapiens
gttagacatgtccattcacttatccccttcctgtcttaatgacgactgactcctaaacctttttaacctcagttcctttcctaggagccactttattttgtcacttgccagccagacattgcaactctgtatctcacaataccttaaacattattctatcctaaatatgactcattacctcctatactgagcagctcttcctgaacctcctcctgactttccagttttgaagtggtagcactcatctcttagtcactcagcctctaactggttaacaagtaatctttgattcctgtctccctcatatctgggtagtcatcgaggcctcttgattccgcctgaacttttcactcacccttcctctttctcctctccccctatttcgcttctttctgttgcccccagcctagatcaggccagcatttctaattaacaagctggattattattattattttttttacctctcatctctctgctatgctgccagccagcctgcctgcctcactggccttacatcctagtatgtaccccctgtgctaggaagctggactgctggcattttaagagacttggcatttgtcttctatactaaagattagtaattagaattttgactgtttatgatttcatgtgaaataagataaataagattttatttaacccccaaatttgtatatttggttgactttgaagactttaaagtccgcagagagtgggaccggtctaaaaaaattatgcctgtgtcttggtgtcttggccaaacatgtccattttggttttagcttctgctctttactgcctcactgaatactttcctttttatttgattctatagtgttcttatccttcagtacatggcacaaatctcctgttttgaggccttcccaacttttccagtttacatactttttttttttttttgagatggaatttcactctgttgccaggctggagtgtagtagcatgatcttggctcactgcaacctctgcctcccgggttcaagcgattctcgtgcctcagcctcccaagtagttgggactacaggtgcccaccaccacacgtggctaattttttgtacttttagtagagacagagtttcaccatgttgaccaggctggtcttgaactcctgacctcaagtgatctgcctgccttggcctcctaaagattacaggtgtgagtcactgctcccagcccacatccatcttatttttgtctctaatttgtgtcatacctaaagactgtaccatcagcattaaattatataaagatgtgtcatagtcttattgtttagtgtttgttttccacaactaagttacaaacttgttgaaagcataaactatgtactttattatggttgcatgctgcag

SEQ ID NO: 67039 - DNA, 1632 bp, Homo sapiens
atgagcctttccaaaggaggcaatcagatatgcatttatctcagtgagcagagggatgactcagagggatgactttgaatagaatgggaggcaggtttgcccaagcagttcctagcttgacttttccctttagcttagtgattttgtggcaccaagatttattttcctttctcacctctaataagattcaggaggaaatatgcacgaagaatagaaggtgccaggggacattgctgaaagaccaaagggcccaaacctgtttgaccttgtccatttggagagcaacagataaaaatatagctgcactaccaattattactactccccccaaaaagacaactgaattttcagtgtaacagacagcactttacaaagacacttggtcgaaaaagggtcactcccgggctctgggaggcgaagaggactgtgggagcgctgttcgttgtcccgcgggctcatgggaaatgtagtgcagttttctccaacatggccgcgcccaggggagatggcgtgcaagtatccgctgcggtgttctggtgctagagtggagaggctggcaaagaagaaggcacacgcatggtgagaatccggcctgagccgaagcggaggtgtgtggcacttcttactggcgggcatacgggcagcaaatcaccgcttcctcttttcagcctcttccggtcttctctatccgccttgccagctagggctgagaacctagggaaaggggatggatcccagaggcgcccttggtgcagtgtgggcagtagggtgtctgcgttgggtggttctctcagtgtttagggtgcatgtgtttgtgtttggttcgggcgctcacgtggtgcctgtgtcaatcttctgttttctttggggttggagaggacggttgcaacatggggcgtgttagtgtggcgcttctggggcttttctgaccggtgacaatcggtctgattgcatcgatgcaaaggcagtgctgatgatctgatcccttgcgcagctgagtcttcctgtgctcttatttgagcaatccctgcgactcctggacctctggtagcgtcagcctgttattttgatagatttcattgaatatttattgtcagttgtatgtcaggcaccaagtctgtgcccttaaatagatgacagttttctggccgaagcccaacacaaacaggcaattataataccatgtgagaactctagagatagaggtccatgctaggtgttaatgaaaacgttgaagaaggccaccaaactcagaattctggaggaggggaggtttaggaggtaagacagcaaagtcgatttaggtttattcgacaaatggttattgagtggctgctaggtgctaaatcctgtttaagtgctgggtgctacagggtgaacaatagagacaaaatctctacttcatggagtgagtgttctttattcagttatggggaaagacagaataaacaaattaatgagagtgtaagaaaatatgtagtaagtgttattcaaagagttaaaacggggtgccgtgacaagtgatggggtgaatttttttctaaaaattttaaatctttattttctttttaaatagatgatgcagtttaaatagctactaacttcaaaagtcatgaaagaagaaagctccct

SEQ ID NO: 67040 - DNA, 1034 bp, Homo sapiens
tatggggatgtgtttttgaaagcatccagtagtgcagaagcagaattgcaatggggagatttcctgtgtgtcctcttatactcatgtagcttgcaatgtctggtggatttgacctctccagcttgcacttgcctcctcatttttactattaagttttggtctcaccctttctttcctagactattgcaatgcttgcctatctgcctcttctgttctttcatgtttgtaacctattctccacacaaatcattccgccactcaacagcactcttttttcactgccacttttcctggtcagccagctattttattgttagtccactgtggtgcactgcagataggggccattgtatcaacaacatgggaaggtgattcctcttcccctacacctttccctccctgcactcacatagctcataaaccaatgcaggtagaaggattatggtacatttatataacaaataacagagcaggaacaactgctaatcatcaccctctcctttgtcttttacttatgatctgttaccagctcttttttctttccctctgccactactgggcttgttaatatttcgttacttttcacttcatcagtcatcttctagtctctcctcccacttgccacaagaagctctggtcatatcatttcatttctctaaccttcctccctgcaactcccactctgcaggcctacagaattctgtcttgcttccttcaccattcttccacacatctttctattactctgtggtactcaccattcccctggcacattcatgcatattcacttccttccctcccgcccatgcaatgccatctttcagaccccaggatcctctcccatatctctgtgaaccctgaatatctgagacaggtctcagacaatttaggaaatttattttgccaaagttaaggacgcccgcccgtgacacagcctcaggaggtcctgatgatatgtgtccagggtggtcggggcacagcttggttttatacattttagggagacatgaggcatcaatcaatatatgtaagat

SEQ ID NO: 67041 - DNA, 1035 bp, Homo sapiens
tgcctgctgaggggacacttggggaaatagcagactcagaatggacactctacaaccctgggttggatccagtggttaggttttagaaaggaacactgaacaaagttcaaaagtagaaataccaaaatagagcagaaaccaagctaagagtgtgtttctgtgtttgaggaccaatatctgttcgtgttgaggagatgaggtgcagactccacactggggtcttagaggcaccagtgggaaagcaggactggggagagatccaggactgagccagcctcaggccagggcgggaaagcaggctgtccaggctgggcttggtggtcaggaacaggggcagctcacggtggctctggagtacgtttcctctgtcagatgcttcaaggtttttttttttttttttttttgctgaggcagttattgtccacaggcctttgggtacagatgaggccttggggctgactgcatgtggcagaaaacgggtgggtcagcccttgaaaagtcttgagatataagtgtgagtactatacaagcattaaactggagtgcagtaaacctaggaaccttcccacaattgtttttttgtttgtttgagatgcagagtctagagtgcagtggtgcaagctcagcttactgtaacctctgcctcctggattcaagtgttagtagctgggattacaaaagcatgtggccccacgcccagctaagttttgtatttttagtagacatggggtttcaccatgttgcccaggctggtcttgacctcccgacctcaagtgatctgcctgccccgacctcccaaagtgctgggattacaggcttgagccaccgtgccaggcctgttttgtttgtttttgtagagagatggggtttcgccatgttgcccaggctaatctcaaattcctgagctaaagcgatctgcccacctcggcctccgaaagtgctaggattacagatgtgaaccactgtgcctggcctgtttgtttgtttgtttaaaacatttctccatcactcattccaggtcccagagcaaactct

SEQ ID NO: 67042 - DNA, 1056 bp, Homo sapiens
aggtcaggagttcgagaccagcctggccaacatggtgaaacctcggtctctaccaaaaatacaaaaattaggccaggcacagtcgctcgcacctgtaatcccagtactttgggaggccaaggtgagcggatcacttgaggtcaggagttcaagaccagtacaaatgcaaaaattagccaggcatgatggagggtgcctgtaatcccagccagttgggaggctgaggcaggagaatcacttgaacccggaggtgtaggttgcagtgagctgagattgcgccactgcactccagcctgagcaacagagcaagactgtctcaaacacacacatacacacacacacatacacacacacacactctcacacataaacttctagtaaccagtttcttcttctttagtgtcatttaaatgaacacgagtcagatgaccgcctggaggcacgctgtggaggttcatctgttgacagtgttttgctttctgtggcttgtcttcctgcagggagtgatgtattgattggtgacatcttggtccttcttggggcttccctctatgccatttcaaatgtttgtgaggaatacatcgtgaagaagctgagcagacaggagtttttaggaatggtgggcctgtttggaacaattatcagtggtatacagctgtaagattctacaatttttttctaaagacaaaataagcaaatatattatagatgataactactaatattcattgtttatttggcccaaattcacatttggaattagtattaggtggatgcaagagtaattgtggttttgccattacctaataacttgctgagtgtctactagaggattgttaaaacatcaagaattacttcctattttcttaaacatgtgtgttgcttaggattcctgattaccatgtggtagaggcatttgccagtaaggagtttttttagttatttccagaaaatattaacacattaacttcctaagcttattcaaaaacaaagcataatatcatattttcctcctatacttgactattatttcagagcacctgtaagggagtcaaa

SEQ ID NO: 67043 - DNA, 1025 bp, Homo sapiens
gctgatatcgaactcctggactcaagcagtctgcccgccacagcctcccaaagtgctaagattacaggcgtgagccaccgtgcccagctgtcatcccatttttaactatgtgtttttggcaactcatttcacctctctgtatcttcattttctcatgtataaaattggattgtaatttcagtctcatggaattgtgaggattaaatgagtgaatccaggtaaagctcttagtacagggctggcaataataaatgctcaataaatactgactcctattataaatactgactcctattatttcttaattacccatcttttagctaatgagagatatgttttaaactgttgattctctttccatgcagcttttggattgctttgggattcctgtgttgatggctctgtcatggtttattcttcatgcaagatacagagtgatccacttcatcgccgtggctgtctgtctgttgggtgtaggaaccatggttggtgcagacatactagcagggagggaagacaattcaggtgagacggtgtcacatgtttgtgcttcaatcacagcaaatttgtttatgttttcacttttatatcaacaaagaaacttgtttactggagtatttctttttaagtcactgtgtaggtgagaacactttgccacactttgtgttgaattcagttgatagtataaaatctaattgaggtctatgaattcatccaatcttcaagtgagttaaacgtctccttggattgagagagaaaattacagttgatactataaaatctaattaaggtccatgaattcacccagtctacaagtgagttaagtgtctctttggattgagagagaaaattatagttgatagtataaaatctaattaaggtctgtgaattcacccagtctacaagtgagttaagtgtctctttggattgagagggaaaattactttgaaagcaggttcccatttttcaaattgacctaccccttcaatgaactccattaatttgtcatgtcatggaatcatttt

SEQ ID NO: 67044 - DNA, 1050 bp, Homo sapiens
ttctggtagcctggcccccagtgtgaagctgccttggggaaatttgtcttggagttggatcatatcctgccattgaagttcattttagtggaggttccgttagtaaaaccgggacaggatatatcccaaggtcagatgcatgtttcttctggcagctttgcttaaacaggaacaggttttgttatggtatagagggttcctctgttcagaattcacatgaaccaggaccttgtacaaatttatacaaacatgaaagtggagctataagtaacaaaaattgttttgaggccttcagtgtctataagtttgagtgttcttgtcttctttcttcctttgctcaatttcctaccccctccccgccagcttttctctctcactcttgctctcctactcctctattatagatgaggtcattatgatttggagccaagagaagtgcattcctgtaactttaaatctccatactcaatttgtgactctcctttttttagaagatagttttactttatagttggaggacagcttgcttaattgtgctattttagaatgcagatatgagcttactgtaggaattctgtcaatttgtgaagagggcttaatgcttccacactttttattctcacttatttcagatttataattgctttcaagtccattatgagatgtgaaaaatgctctcaatttgattaggttatcagccacttggttagggtttctgtgcctggtactttggacatccaactcccccatgatgtacagggaagcagtgtgactactgggaggagagagatcaggccaggttccttctttcctgacagcaaggcgaggtacagggatgctttgaagaagggtgttttgttttgttttgagacagagtcttgctctgttgcccaggctggagtgcagtagcgccatctcagctcactgaaacctctgcctcccaggttcaagcaattctcctgtctcagcctcccaagtagctgggattacaggcgcctgccactatgcccagctaatttttgtatttttagtagagacgggatttcacta

SEQ ID NO: 67045 - DNA, 1052 bp, Homo sapiens
ctgggactacaggcacccgtcaccacgcccggctaatttttgtatttttagtagagacggggtttcaccatatttcccagtctggtctcgaactcctgacctcaggtgatccacccgtctcggcctcccaaagcgttgggattacaggtgtgagccaacgcgccctgccagccttcagttattttaatgaagcgattttgtacaaatcagccagagggagggagagtgggagggaagaggaggggtcagccagtccttccagttaggagagtcccggctcactcactgcttctaactcactgctcactcaccgcttcttagcttaggaatcacctacaataacctcgtgtcactgtatcttgtgatttcaaacaaggaaccctaaaaacctgaaggcacactgggtgccgctcaacaataaggctcggctgccaagacgaaaaaaaaattgccctttctcctcctgccaccctggaggtgccaggttgtaatctgcaaatgtattgtctggcccttagggcttgacagttaatgattggtcgctgaaggagccgagcggaggagcgagagggacgcgagcaagcgagcgagggagggagcgcagggccagagcggagccccagccggccgcacaggcaccgcctcccgtcttccgggacccggcacttcgggggttttgggcgccggagacgcgcaagggcgccgatggaggcagactcgccagcgggccccggcgccccagagcccctcgcggagggagcggcggccgagttctccagcctgctgcgcaggataaaaggcaaactcttcacctggtgagtggaaggggcgtgctgcagctccgctggggcgtgggggcggctgcgggccctgcgcgcacgtggacaaggagcacactctctgaggcccccagcagggaggcagaggtggcggccgcacggacttcggttcggggctcaacacgcacaccaggtatggtgcgcttcacctggcgtcgggaagcacttggtgcgtctccctcggctcccgtttcgaaatcgtggcgatgtatt

SEQ ID NO: 67046 - DNA, 1328 bp, Homo sapiens
actttgaggtctatgtcctctgtgtgctgtagtgaatcccaaagtacctcctgaggagggggtaggccctgcccaagggtgctccctttgcctgcctttatgcccttctatgccaactttcaaatgaggttgtcaatcctctctccagcccagcttactgttaaaatttaggaccctgccagtcgcagtggctcccgcctgtaatcccaacactttgggaagccaaggagggtggatcacttgaggttgggagtttgagaccagcctggccaacatggagaaaccccatctctactaaaaagacaaaaattagctgggtgtggtggtgggcgcctgtaatcccagctacttgggaggctgaagcatgagaatcgcttgagcctaggaggtggaggttgtagtgagccaagattgtgccactgcactccagcctgggtgatgagagtgagactccttctcaaaaataaataaatagcttttcctccctgatgcaaacgaggtcgcacgcatgaggcttctccgccgccgccgccgcagacgccgcggcgatgcgctacgtcgcctcctacctgctggctgccctcgggggtaactcctcccccagcgccaaggacatcaagaagatcttggacagcgtgggcatcgaggaggattacgaccggctcaacaaggttatcagtgagctgaatggagaaaacaatgaagacgtcattgcctagagtattggcaagcttgccagtgtacctgccggtgtggctgtggccatctctgttgccccaggctctgcagcccctgctgctggttccgcccctgctgcagcagaggagaagaaagatgagaaggaggagtctgaggagtcggacgatgacatgggatttggcctctttgattaaattcctgctcccctgcaaataaagcctttttacacatcaaaaaaataaaaataaaaataaatacataaatacataaaaataaaaatttaggaccctacctttaaaaattaaaatttaggaccctacctttttgagtgctggggttatactccaggtgcctggcattgagaataacattgaactcacaatccttgtccaaagtaagacaaatagtatttatggaagtttgactgagtggtctatacccctagcatatgtcaagatctatccctaggaaagaccaaaccagaagagagctagctaggccccagcctcttatcatctcttcttgctgaattatgctcagacatgacgccattgatctacactgaagggcatttacatgaaactataaaactcactgacctctcagttccttgatgtcctcatcttcat

SEQ ID NO: 67047 - DNA, 1041 bp, Homo sapiens
cagcaaggagcgctccaacccaggttcctgcatgagctcactgggcatggttcacagagaggtggatgcggtaatggtttgggcacctcacagcactgaatgtggtcatcagaaatactgggtcatgacccgtgggaatgggtcttgtaggttaactagatgcaacatcagggacactggcacagctgagggtgtgtgtgtgtgtgtgtgtgtatgtgaagggttgagttgtctttagaagtttgtcatgtttggtgggaaaaagacatatattgagattcgccaggaactttaattttgcttatgatcagtacttaacgttccagggtgataatatttctaaagacagaaggagggatccaaatgaatagtctcctcctaaatatccgctggggacatgaagggtttcacaaaggcgacttgtgtaaataaaaagtaaatgaaattatatgcatttcctgaatatttgagatggaagcaggtttaaagcaaattttaaatgtctaggattcaaaggcacttcgttttagaggaagatggtgaaactgatgtattgtactgttctgtttcttaaagactgcattatccattggaactcatttaaggaagcattttgcgttagtcagcaagtactctgcttgtgaaatgcagtgttccatgaggggacttcccaaacatggcttcccctcgcccccagccagcatcactgcgaatgagatcagcctacatctgtgagaatggtccaacattcaaagttttggcttccgttcctagcaatgatgctgattcatagagataatgagtgaactgcttagcttgcttataccttagttttcgtgtgtgtgaagtggaaagatggtaaggccagcgcttcagagaggtgttaaaagattattgattggatttgtacaacacgtagaattccatgaaaaatgtttttccttttcaagaagcctccttttattaaaataatttttcaaatgtttgattcctcatctgtaaaatgaaagtcgtcgtgatctctaacattccttccagttt

SEQ ID NO: 67048 - DNA, 1028 bp, Homo sapiens
tgcaacaaaaccagcttgagaaccttattcaaaaaagagagttagtagaagaatggttgaggtgcagagacttgatgggaaagtggaggccaggcttggaatgaatcaaaagatcctgggagtctgggcagtaggaactgcaggaagccagtgtggtccccatgatactgttgccccctttctgcctgctcaccccctgccataagaagctccaaatggctagtcggcagcttcagctgctaattcagtagaagcatcacggggttttctagtgaaagcatttctcccttgaatactaaaacgtttatatcagcaaagttcagagtcacagggattagatgcaacaaaaaattttagtgactcattaagtggaattgtgagaggcaccatcaccctattttcaccctttgcttcccacaccacagcttctgtttatggggaaaaaataccacctactatcttgctcactaatttagaatgtagacatcctgaaggattatgctaaaatcttacaaggtgtcatctcctggaaatgggcacacctacctcttaataacccatttcacagttttatagggccagacgcctctagatgatagtggtgtgatatgatcaatgaatcccatggcatcattccatttccctatctccaccactgttaagtgaattacttgatctgtggcaatgtgtaggataccatgactatgtataaggcagtctgcatgttcatggatggtggtactagcatggcctaaatccagattaaatatattacaatgaggacatatctgtgtcccctcaatgatggtcccccagagtaaggtacaatattcaggatgtcggtagctactggaaaactggtagtaagcaataacagttcaggccaacctaggtaagattaagtctattgagcccaggtacagcttccatctccctaccatgagttcaaagtgggataaaaatactgtttgataattacaggacaggacattttgttccattgattattaaaattttttcatggcggg

SEQ ID NO: 67049 - DNA, 1013 bp, Homo sapiens
tcatgggcatactattatatttacaatgggtgagaattttgttttctcatgatttttcctttcgttcctatgcagagggagtagaaaaagatgtgtgtcttcatggacccgtaggaattcttgattgatgcatatcctctgcttattttttttggcgggggtggggggcgagggggccgaggtcttgttctgttgaccagggtggagcgcagtggcatgatcacagctcactgcatcctggacctcccagtctcaagcgagcctcccactttagccttctgctagctgggaccacaggtgcacgccaccacgcctggctaattttttattttctatagagaaggggtctccctatgttgcccagggtataggtctcatacgccagggcacaagtctcatatgccagggcacaagcaatccttctgcctcggagtcccaaagtcctggaattacaggcatgagcccctgcgcccgcttcctctgctttttttaccctgagctattgttcctgcaaagtggaaataatagagagggacgttcctgcagacttaacccaatcaaaagtcacgtttgtgctttttgtgcatctttgaagtaaatatttaattgtattttcaaatacttgtacattttctgggttcatgtatttttaattgtgcttatggagagattataaattataactatataaggtatgactatttatattgtcagcattttcttgatatcattaggttaatttcacatgagttcaaaccgtaattaaccaaatgagaaaatacttgtcccccaaaatgtgaagtagtccattttactgttacagttttcaatattatatgacaatttcccatcagtccaaaatggcataaaccccaacactgaaaatttagcagttgaaagtacagtcacctgtgcctacttctaaagttaaatagctaaaacataaaatatgatttaaatttcagtggacaccctttataatactaatgtcaggagagactaatatttgggct

SEQ ID NO: 67050 - DNA, 1030 bp, Homo sapiens
gttcaaacccctgacctcaggtggtctgcccacctcagcatcccaaagtgctgggattataggcaggagtcaccacagtcagccacaaatggatattttaaccaacccgatgggctgaccaacttgcaccctgtggatttgcttagggccggtttatcttccactgtattagctagtgttgttgatggatgtaactgggactagatgcaggtcttccaaattgtgatccaaggcttttcctgcctgaaggatggtttcagagaataaaatcaaagaaaacagcgaccaaaatgctcagggcatgcttctcttgtcctgtgaggtggacccttcacttctgaaccttcacttcacctttcctgtggctgcctccgaccctggttcctctgtgcccctgtctacaactgtggactcgctcccacaatgtaccctgactcttcacatggggcaggtggttaacctgagatggttctaggttttctgatgtttttactggatgtgttttcttatcctctagacctgtttgctccagtgactaagtcaagctcacccctctcctttcctctgtcagtaaatagattttccagccgctggaaactctccttggaaagaatgcaagtctgaggttttcaactccaggctccttaacctcccactttggtgccccctcagtggccacggttgggtttgcagcagctgggatgggtggtgttcaaaactctatttcaacagctacccccagtggaatatcagttaactacactggcaagagctacctgagatcaggttgacttggcttaaggagaatttcagacagaccctcaaagaaacacacgtacacaacacacatataccaacacttctgatacttgtttcattatccataactgttcactttttaaataccagaaaagacaaacaatttatcttgtctaagtggcactaagtagaagaaacaaaaatgagcagccgttggagaattatgacactttttattaatgctatcatttgggagacttcatctaactag

SEQ ID NO: 67051 - DNA, 1098 bp, Homo sapiens
ccacgaattctcgcgtcgtctcgcgagagtccaagttaaagaacatggcgacgtctaatctgttaaaggtaagaccctcactccagcttgggttttactgtgtggccgccgggttcggctctttgggaaaggcacggctcaggttcagctgcgaagtgtgggagtgttcaggggttgtccactggcagggaagccgcggtggcagccggcgagtaccggaacgcgggtctgtggccttggggtcgacaggctctggtggtcgctcccgccgactggccgctgggagaaaagcctggctgagcgctggcgaggagcgatgctttcaagggaccagctctggccgggagcgggagatgaatggtcgtgcggtgtcctgaccagctgggccgttagtactgttaggtctcagtttcttgtaaagcaatgtctaagacgcatcaaaggaaaaaccaagaaaatgctgcctaacaggtttcagtgactcgaccccccacttcttccatttctgttctcgttctgtctgcacgaaattccgagtcagaccagcagtgcctcccactccaccccccttcctcccttttctgcgtgttacaccttccctcctaattctcccattcttgagttcatctttttccttaggaaactgctttctaacccccacccagttacaggacacaaccagatgacaactgatgaagcgataccatcgttttagggcgcaggaaagttaccttgtcaaagacagtatttaaagttagttttatatagcaagggagatctaggcccacaggggcagattctccaccagttaaaaagtttggagaagaatgaggaagacttagaactagtctgttctgtgtatgtgtctgtagtagttaatcatttgccttaaaagtacggacagaaatgggggtagtgaatagctcagggaacataatattaatggcaaaaaccgcagtcacttttgcaccagcctaatacaaaggatgaaccacttcttcctgaggcctctcatgccttcaggcaatgtggatgaatactagaaaataatagaaaatatacaggaacctaaccatcatgtcttctttagaccactga

SEQ ID NO: 67052 - DNA, 1348 bp, Homo sapiens
ttcagtttcccttttttctcctatgcctataagaaagttcatatgtcgcgtcatataaacttttcttttttttggagatggagtttcgctcttgttgcccaggctggagtgcagtggtgtggatctccactcactgcaacctccgcctcccaggttcaagcaattctcctgcctcaacctcctgagtagctgggattacaggcacacgccaccacacccagcttatttttgtatttttagtagagacgggattttaccatattggccaggatggtctcaaactcctgacctcaagcgatccgcctacctcggccacccaaagtgttgggattacaggcgtgagccactgcactctgcctcctcatacaaacttgtactctgcctctgcctcaaacttctgtttctcactgtcacagttcttggaaaagcagcccccatttgctgcctttataattctttgccctttaacttaatgatatggcttactcttctctcccacccaattgtatagaacctgtcagtcataaaagtattagcaacctcctgattatcaaatgagattcttctctgataatatttatcctcttttctggtattattgctcatttcctctgcttctcttttggtttttatgacattccctccttggtcttctctctctcaaatcacgtttgtttttcactgacttccctcccctgtccccaatagaattatttctcaggattttatcttcagcccttttctatctttgtatatttttttctgggacagtcttaactcccatgatttcactatttttatctcttagctctgatctgagctctagatcaaaatgcagttctcaccatatcactttcctgttcagatacctttgatgattcaaattatttgagatctttccagctgggtcttctcctgataactagtattctctctctctgtctcttgtctctctctctcatacatgtgtgcgtacacactcctacttagctggttacttgttggctcactagcatgccagaggtcgtcatctccctaataactaactcttaactttcattctctctccttctgattggatctagtgagatggaggcacaagaaggcagtagtatataaccgaaccacaagataaatcaaactttaaactgaaatatgattcatactacttttctcagtggacttttttttatcctttaagaggaaagaaaatggaaatgtaaagcagtgattcagagtgtctatagaggccgggcatggtggctcatgcctgtaatcccagcactttgggaggatgaggtgagaggattacctgaggccgacctgggcaatgtagcaagaccctgtc

SEQ ID NO: 67053 - DNA, 1046 bp, Homo sapiens
caaaaccactctcaggtttgataattcattagaaaggctcatagcatttagtgaaagctgttgtacccatagttatgatttgttatagggaaaggattcagataaaatcagccaaaggaagagactcatagggctaagtttaggagagttccaaatgcgagcttatcttgccctctccccatgtggtcaggacacatttctctcccggcatcaatgtatgacagtatgcacgagtaccatcaaatagggaagctcacccaacctttactgttgagttttgatggagcttattcacataggtgtgattgattacttgctcacagggatttcagtctccgtgttgagtgaccccctgtgaccccaaacccgtatctcaagttgtattgttcgtcttcccagttggtgagcctctacataggattatataggtgtggacagtcccctccctgaattgcattattagccaatccagtatgacccaaggcctcccaaagacatactttttagacgtaactttctaagtgtccagagattatctactagaagccaagaagaaagaccagactgtctccttggacaaggccaaattcttcactaaacacatttgtacaatttttctcttttatgattgtcttcctgtgattcctcaataacggattaagcctgtagggattccattatggaaaactggttcatttaaatttgagcccttcatttctctagctgtctcataaaaattacaggatactttttatttaactgcatttaaattaaactcccttttatctttttttttttcaagaataaaggttctcttcagtttgaagacaaatgggattttatgcgcccgattgttttgaagcttttacgccaggaatctgttacaaaacagcagtggtttgatctgttttcgtaagtaccccactaattctgtttgctagcataaaggaaattttagtgatgtctttccatacccaaatggaatgtgtaactctaagtttatctgtttacctattaaaaagtattactagttacattgagggtct

SEQ ID NO: 67054 - DNA, 1032 bp, Homo sapiens
aaaatttaaaaaaaaattaggcgtggtggcatgctcctatagtaccagctcttagaaggctgaggagggaggatcgcctcaacccaggaggtcaaggctgcagtgagccgtgattgtgccagtgcacactagcctgggcaacatagtgagaccctgtctctaaaaaataaaaataaaaaaatttttaaaaataattaaaaaggacaaaatagtatacatctattgtgttaaagaattaaaaggatttgtagttgtttttgcacaggaaaatattaatagcagttaactttgggcagtgacattgggagatggagacatgctttcataactaaattttatgtggtaagtagcagagaattaaagaggaaaacaatggctaaagaaaataaaaatagaaacaaatgtgtatgtgaggcaattacaagcgtacttggtttatatgagtgaattcagacaccatttacttggttctaatatggcccatggaaactgtactgaaatagaatttaagatgttttgttcagttcttgtttcattattaatgtttgtttacctactttatattcacagggatgtgcatgcagtctgtctttgggatgataaaggcccagcaaaaattcatcaggctttaaaagaagatattcttgagtttattaagcaagcacaggcagtaagttctacatgcttattttagacttgttttaaaactactcagataatatcatattttattattttgaaagtagaacttcttgaagtaatttcaaaatattgcattgacttttgacacatttgttaaataaatttattaatgaaatgatcgtcattagttggattatttttttcccacagtgatacttctgtcaagagagtacatattatatttaattaaaagatgctatagcgaattcagttttttatattttttgggagtccccaccaccattattttttggctacacatcagtccacacagatctttttttttctctcatgactaatacctcttctcaagttgacagtaatttcttc

SEQ ID NO: 67055 - DNA, 1200 bp, Homo sapiens
aatttcttattttttagttggatcattccattaatgtcttgtacaacattagtaaaagttgtttgttaaatcgtgttattaaatactaaaaggtgcttagcagttgaaaattaaaactgagttttttctatgtatgacttaagatattgaaatcaagtatatgattggcatatattttaattttgctagtagccactaccatgatggagtaagactaatctattggatattacttaagaaattaagtgttttattgatagtttcttgacaaattttttaaattgtagttttataggaagttatcttttaatgaaaatctgttttcaagcacttagaaaattaaatgtttcagtatcaatttaaaactattttcttagaactaatttagagatacagtttctacttgcattgggaaatgtaccacgttttctttttatgacttgataaagataaattatgtttatttcagatagatagagctttattcttcagtttctggaaataaacttatgaagaattaccttggatgttcttaacagatgttaaaaaatatgctgaacactggcaaaaaaaagtaggggagggtttcacggtaacatgactgaataaagtctggaaatgtagacctcagcaagaacccaagaatgggatttagcaccactaattctgagcagttaataggagtagcaatgccagacatgggtcttaaaaagacccatcttaaaaagatttttaaacgcttaagaaatttttttttttttttcatgaatcattttacttaggcaatcttcagttgaacataccttgttaggaaggaccaaatctcccagatggttgaaaggcaatatgcattgaaatgtttataacattttttaaagaacaaaaaaaaaagtaaaaataataaacataggtggagtcttttttgtttaacctagattaacacaactgttttatttgttcacaattctgtggcttagcaatttgggctggtctcagatgaatttgcctaagcttattaatgcagcagcagtgggctgttggacatggtggtctaagagagcattaaaactcatatatggtttttgatgtggctttcttttcactgtgtggtttgtcattctcaaggagaccagcctttgagatgaaagtggaatctacaatacctattcatggatagactgagaaatctttcactgttac

SEQ ID NO: 67056 - DNA, 1054 bp, Homo sapiens
cccatatattgtttatccgtatttcagctaatggatatttgggttgtttctattttttatctattttgaataatgctgctgtgaacattcgtgtacaagtttttttgtgaacatgttttaatttcttttggatataagagcttgtacaataatttaaaaattatgtacaatttaaattttggcatgaatatgttcttaatttttcaaagcaactgcatttatttcaaattggtacacctctttttttcagcgagtactgagccatcaagatgatacggctttgctaaaagcatatattgttgaatggcgaaagttctttacacaatgtgatattttaccaaaacctttttgtcaactagagattactttaatgggtaaacagggcagcaataaaaaatcaaatgtggaagacagtattgttcgaaaggtaagactatttttctccttgttttcctaatattcttcagaaagagggtaatttggaagcatttgaaagtaatttgaacttttaagtgggtttttctacttcacatgtcaattgcttttcagctcttaactagattttattgaataatattcttttttgtctttagcttcaatcttctttcatctttttatgtggtcttaagctatagatctgcatcttcaaccattatctcctttacttttcctttttactttctccttctcctggtattcagtattttatttctctattctttctttgtactctttttttttttttaaactggagtgtcactctgtcgcctaggctggagtgtgcagtggcgcagtctgctcactgcaacctccgcctcctgtgttcaagcaattctcctgcctcagcctcctgagtagctgggactacaggcacgtgctaccacacccggctattttattgtatttttagtggagaccaggtttcaccatgttggccaggctcgtctcgaactcctgacctcaggtgatctgcctgcctcagcctccgaaactgttggaattacaggcgtgagccactgcacccaacctatacccttactagaaattaaattac

SEQ ID NO: 67057 - DNA, 1023 bp, Homo sapiens
agtttactttaattatgttgtcaatttagctctccttttaatcctcgttgtaacccaccataagaaatacattttatattgtggcttagaatatactgtttatttgtacatatctgaaacaaaagtcttatgaaataatattcattgttacaatatgtgatacactctgatattttttgttctgtcctatgtacattttttttttttttaaacctggtcacagccattaaaactgatttcacaacatacagtctgaaacacactggtctggatttttagaatctgcaaaatttcaactaccactgaacaggataatgttcaagtgaaagttttcaatgaaatagaaaacacagagcttagagtttattaggattccactttgtctttgttctctattagttatatattgttagatttacctatgctcaatctggtttcactgcttaaggtggaagtgtttagttgggcctattccagtgatgttatagaataagattactcagcagttggggcagagatttccaccttgcaaggaaagagtttcttaaccattttatatgtgtagtcttttctttatttttcttttttttttccttttttgagacggagttttgctcttgttgcccaggctggagtgcaatggcacgatctcggctcactgcaatctctgcctcccaggtttaagcaattctcctgcctcagcctcccgagtagctgggattacaggcacccaccatgcccggctaatttttagtagagatggggtttctctgtgttggtcaggctggtcttgaactcctgacctcaggtgatccgcccgccttagcctcccaaagtgctgggattataggctatgagccaccacgcccagccatgtgtattattttcttaggacagaaatatacatggatatatgcatttaaaagtcatcagcatcattcttgtagaggagcctgaaaaaacctttttttttgttttgttttgttttgttttgtgacagtcttgctctgtcgcccagactac

SEQ ID NO: 67058 - DNA, 1053 bp, Homo sapiens
gccacttaactgagttatatttagttagcagtgtaggtttactgccctcctcactctcaattagacagtgatctcttcgagagcaggaattatatcttattcttgtctcttaaatacttccttagtgcctgcacgtagtaggcatccaataatggtttgttgaatgaatgtattcacacttctagaattttataacctaattttaaaacaggttctctccagacaggaagagttaatcaaagtttggttttgtatatttttctctcccctccttgaggacttttgttaaaatttctaaagagagtctagttctatagtttttttccttaggggaaaatacactttggtaaactagtatagcatatccatcttcaataatcctatagttaaggtaagtgaaatctactttcagtataattttttttttgttgaacaatattgttttattttgtgagttagaatagatttgtgctatacagcttatagtagccttgactaatttttgatatatttcagctcatggaatgctgtgtaaatgccctggtgacatcatttaaagagactatcttagctgagtgccaaggcatgatcaagagaaatgaaactgaaagtaggtaaaacatcacataaagttatcataatcttctaagagggtatctttgaaacaaatcacttactaagttgctcttagttaattcttttccacataggtatatgtggaactgttagagtgaactatacttaaggaaatagataaaatatttaacacagaggcactgctaagagtatataaacttaaattttaagcattttccctcttagctatcaacatctgtgtatgtgtatggtgaatttctacttttttctcaaaagcaagacactgcttttaaaggccagtttaaactggaaacatatgttatagattagaaccaggtatttgacttttgtgtggaaccttgtgatgaatctttttagaatgtaataaaacactccctgttaatagtcatctctgtcccccaaaatactttataagatttctaaaggattttttta

SEQ ID NO: 67059 - DNA, 1041 bp, Homo sapiens
gtggcgggcgcctatagtcccagctacttgggagggtgaggcaggagaatggcgtgaacccaggaagtggagcttgcagtgagccgagaaggtgccactgcactccagcctgggcgacagatcgagactccgtctcaaaaaaaaaaaaaggaagaaagaaaaaagaagtggcaaaacagtaatattggaacaccttttagttttatttttaagaaaaaatatccccagttttaaatgagttttattaaaattatgtttattttctcatttttttgtgttattctttttcttttaaaaacttaatgtaaaaccttttgtttctaggactctgagaaatacgttgagcagttacttacactatttaatagatttagtaaactcgtcaaagaagcttttcaagatgatccacgatttcttactgcaagagataaggtatatattcctatatatataaaaaacacttttaaaagttttattctcataatttacttctaataatcaatttgcattatttttctattaattataaacttaaaaacctagcaactgttatttttcatcagtggagaacaactatattcgttttgtcttggctgtaagcatttgttaaacattagatagccttgtgaattagaatttagttagaaagttgcttttttctcatttttccaagaatgtttttctgtttttgaatattactgatctattgaattcctattcatccttccattaagacccagctcaaagaatacttcccctggagcttccttgatgtcctgcctccctccacagctcatcaccagcagagttgattcctccatcctccgtcctttcatgggactccttcgggagttatgttatacttatccttgtttcccagggaagcatttgtattgcataccatctttttccatcctcactagtataggataatgataataaaacaccatactgtccttagcattgtatcttttttagtgtaataaacctataacaagaaattgctgttagttttttctcttctttgactacctttcgtta

SEQ ID NO: 67060 - DNA, 1031 bp, Homo sapiens
cctgcttcagcctcccaaagtgctaggattacacaccatgccaactaatagattttgaaagaagtattgtggttagtcattgttacttttgtcatgatttgtggatcaaagagctagaaataaagtttttacttcatgcagttaaatttattatatagtgtcaactgaaagttgagctttgttcttggggaattggtattatttaactgtactgtggtaactgaaattcatacatactaaaaatgcgcaaagcagggaccccttgtaataccgtattttgtttctaagtagcaaatttcataggtattagacaataaaattctaataaatgagaaaaattttgtattaaaacatttaagacttagtttttctattaaaatttttcccagtaatatatcagattatgtatttattacctcttccttctttggtttatatttataggaagttggtatgccagcggattatgtaaacaagcttgctagaatgtttcaggacataaaagtatctgaagatttgaaccaagcttttaaggaaatgcacaaaaataataaattggcattaccaggtattattttataattacatgtatatattttttaaacttagaagaatatctttgttttccagtaaattaaaaataaacctcagcagtaatagatcgaaagatgttatgaagtccatttccgtggagacagctatcaaagcagtgtgttagatttacagatctttatttcaaaacaaaaggacacttttaacaaaatctttatagtcttattgatttttcacccaaagttaccctgtatttattttgaattttatccattgttaatttactttatattcctgatattcttctctatagctgattcagttaatataaaaattctgaatgctggcgcctggtcaagaagttctgagaaagtctttgtctcacttcctactgaactggaggacttgataccggaagtagaagaattctacaaaaaaaatcatagtggtagaaaattacattggcatcatctcatgtc

SEQ ID NO: 67061 - DNA, 1047 bp, Homo sapiens
ttctggttataccatcatacttaagatactgccgttgtctacagaattcaacatgatcccaactatctcagtattcctggcaacagaaagcaaaaggtgagggtagcttacacctttcattagggacaacttctagaagtttcctctgtcattttccatttgcatccgccagtactcagtcacttggccacattttgttacatggaaagctgggagatgagcgtgtattctgggcagtcattaacgtcttctaaaatgtttattactgtgaaagagtggatactggaagacagcaacctttttcatatataaattcatgtcatagatattaagagagaatcatcatgagattctttattaaaaatctgttttatctattatagataacatttaagaatgaagttggtcaatatgatttggaggtaaccacgtttcagctcgctgtattgtttgcatggaaccaaagacccagagagaaaatcagctttgaaaatcttaagcttgcaactgaactccctgatgctgaacttaggaggactttatgggttggtttatgtttttttgtttttaagactgtatcctctcatgtagcaggaaatatatgattggcttgtaatatattagtaaattcataacagtttcagaatgtcttatcaagaaaaatagaggccgggcacagtggatcacgcctgtaatcccagcactttggaaggccgaggtgggcagatcacttgaggtcaggagttcgagaccagcctagccaacatagtgaaaccccatctctactaaaaatacaaaaattagctgggcgtggtggtgggcgcctgtaatcccagctacttgggaggctgaggcaggagaatcgcttgaattcaggaggtagaggttgcagtgagccaagattgcgccactacactccagcccaggcaacagagtgagaactccgtctgaaaaaaaaaaaaaattatgcacacacacacacacacgagatatttatggaaaaaataaattgcaaataggcaagttaccaaggcagagaaaagtgct

SEQ ID NO: 67062 - DNA, 2409 bp, Homo sapiens
tccttatttttcaaaatctctatagtcagattttttttaaatacatactttaagttctgggatacatatgcagaatgtgcaggtttgttacatgggtatacacgtgtcatggtcatttgctgcacccatcaacccgtcatctacatgaggtgtttctcctaatgcttatccctcccctatccccccaccccaataagcagattctcttttatggggcatgagaaaacaaaagatgtttttatttgttaagtaaaagatactagtctcaacattaatcccctagtgattattattcatttgggtagatgttggatagaggatgaatatgcataaaaagtcatttttcagtttgttgtacttaaaataatttcgtatattaatgcgcttttatttttattttttcttttaggaagctatcatacaaataatgaaaatgagaaagaaaattagtaatgctcagctgcagactgaattagtagaaattttgaaaaacatgttcttgccacaaaagaaaatgataaaagagcaaatagagtggctaatagagcacaaatacatcagaagagatgaatctgatatcaacactttcatatatatggcataattttgaatatcatggacaatatttagaacccaaattttggagtgcttgggcagaaagttgtaaagtttgtgctggagaaaggtttatttggactttgattacataaatattaaaatctctgccttaccttacaaaaacaactatattttgccaatcacattagttagcatgatggcattcccttcatgttgcacactctttgacagcatgctgttttgtggagaaacttgcattcatgaagagcccattatcaacttttaaaagtgaatttgatttgtacccaccaggagaaatacagttgggaagggtgagggtggggttcttgttgcttttttctcttttttcctctcttaaaaaatgtacttgcacaaggaaggatcttcagatattcatgcactgaaaaatgctgttatcttttgtttttaaaaaatgcaattaaaactagaaatagcactcttggtttcttttgatgaaaagagtgagctggtcaatgcaacattgggaaacggcagatgtaggtgagaagttaagtatttaatagtatcaaattgttcaaacattgctcagtataataactggattttaatggtgacctaaaaatggtattaaatattttcaactttcaaatgttggttttctttaagcaggagactgctattttagttgttgttaaatgatgaggagtttttttttttttaaatatggctggaaagcttgttttgaaaaatgaagcttatattaattgttgcttcaatagtttaaaaaatttatggagataggtaggtcattatgattgcagagccaaaatagcaaaacaaacatattaagtgtgtttactaaacatattgtgtgtttactaacacacttaatgtttatatacctaatatttattatgccatatctgaatttattaaaaacaacacagaaatctcctgctctgatatagttatgtaactgatctcttaatctgtagcatagaagtattttggtattttaaggtctcatgattagggatttgtagcctcaggtttgaatcagtcacctaggggtaagagaaaaaccacaacataagacctgaaaaacagaagcaaaattgttgcactcttaatacgagcagtaaacttgccaaatatatgtacatatatatttatatattttaaaaataaacattttttaaatcgtcagaaggcaacatttaccatgttcctttcagtctatccaaagtagcaacttaactagttgctggcaactgaatacccagagtagtggaaattttaggacttgaggacgtgaacaacttgaaagagaaaattgattccccttgaggaaagaatggctcaacgtggatttttattcattgtggtgcacgtttcaaattttcttgcaaattattttatatcttatttgatgttaagtaatatttttaaagtatggtttttgaagatagtaggaaatggagtacagaaaggcatacagtattatgttacagtggagtgctttcaagagcatttcgtaggatctgtccccatccgaagaggctttgtgaactgcctgctgaatggaaggaaagcaactttaaaacatttagagttttgctgagtatagccaaatgcctgttctgaaacttataggaaattggaattttgtttaaaattttacactttaaggtagcaaatgtcaattattagaccgagcatattgtgaagaattaaactaaaattaatacgtacagttttctctaattaggtgactgttcataatgggtatatttggaatttagaagaaataattttgtagtaattgtg

SEQ ID NO: 67063 - DNA, 1046 bp, Homo sapiens
aagcataagaaaaaattgagccagtataccatatctagttcttagaattgcctaaggattttgaaaaattctagaaaacatctagatgttatttaacattttcagtatatcaggctcatgtaaaattgttttggtagtttataccttcaatatataaatcccagggaagatatgtataacatgactatagaattcagtttttcatatgtagcagtctatgatagggtcttcattggcattgaaaaaaacagatttattgatataatttatataccataataacattcttctatttaaagtggtttggtagtttttaacattcatttatatttatctccaggtgattctagataagaataaatatctgatttgaaaaatatgtagtgagtacctgctatatattgaataaggaaagttagaccctggagacaaaaatattaactggtccctatgtttcaagagttgtagacgagcatttatccagtgccatcatgcatgtttgtgatgtttgagaaaactgttttatgtacacaaaaaggcattcttacattgtcttgcagttagctgtgtacatgtttcctgagggcaggaattgtctccacccatatttgtaatttctttaaacatttagcagcccaggcaataggtatttgttgaattgaaccaaatacatttattgtgaaggaatgttttgacttcaacctcatttttgctttcaggcacagtaacagctgccaatgccagtacactgaatgatggagcagctgctctggttctcatgacggcagatgcagcgaagaggctcaatgttacaccactggcaagaatagtaggtaaggccaggcgaggtggctcacacctgtaatcccagcactttcggaggttgaggtgggaggattgcttgagccccggagttcgaaatcagcctgggcaatatagtgagacttcgtctctacaaaaagttaaaaaattagctgagcatggtggcatgtgcctgtactaccatctactcgggaagctgaggtgggaggatgccttgagcccag

SEQ ID NO: 67064 - DNA, 1074 bp, Homo sapiens
ttttctgtctctagttttactatttactctgaagacctgctgccagctgttccctttcagaatggagtcctctcctggggagtgactagttgctttccattctagatctggaaccatcagccagcattccctccgctttgtggttaccacaccaggtgtgtgagttctgtatgatacttacaagtaattcagatgtgtagttttacctgttctactgaagatgtagtttgtgagctgttctttatttttttttttttgtttgttatccttgttgctcttactcttttcaggagaagacatgggaagatttgaaaccaagctatctctctgctttggcagataacatttaaaatcttaaaaactgcaaccttggtataagcaaaccagaagctagcataatggagtatcgcccctcactttgttctcaccatagatgcagcatatacaggagcaattggaaaatcaataggttctacagcagcgtcagcaaatgctgtttaaaaaaaggggggggggggttgttaaaatctttttttttttactgtatagaatatgcacaagccaagtttagcccattaaatgcacatttcctagcccctttaatatatgtaaatatatgtcttccttttctaggattctacactttataaaattactccagtaatctaagacactgattttcattgggggggagtttgggggtatttgcctctaggaacattggcaccacctagagatgtttttggttgtcagaatagttcagatgccactgggtaaagactaaggattctgctaaacatctacaatgcatagaacagtccctacaacaaagaattacttagtgcaaaagtcaatagtgctgaggttaagaaaccatgatctaagctaagaaaaaaaatgaagttataaggctttttataaagtaacaaaatagcatctgttaagtccttaggaagaaggcaagacagatttctgcagctaaaaatcggcttaaggacattgagaacttgcccaaggccacagagttaataaatactaaaacaccacacatgtaaattttgtatttctggactc

SEQ ID NO: 67065 - DNA, 1081 bp, Homo sapiens
tagtctttacccagtggcatctgaactattctgacaaccaaaaacatctctaggtggtgccaatgttcctagaggcaaatacccccaaactcccccccaatgaaaatcagtgtcttagattactggagtaattttataaagtgtagaatcctagaaaaggaagacatatatttacatatattaaaggggctaggaaatgtgcatttaatgggctaaacttggcttgtgcatattctatacagtaaaaaaaaaaagattttaacaacccccccccccctttttttaaacagcatttgctgacgctgctgtagaacctattgattttccaattgctcctgtatatgctgcatctatggtgagaacaaagtgaggggcgatactccattatgctagcttctggtttgcttataccaaggttgcagtttttaagattttaaatgttatctgccaaagcagagagatagcttggtttcaaatcttcccatgtcttctcctgaaaagagtaagagcaacaaggataacaaacaaaaaaaaaaaaataaagaacagctcacaaactacatcttcagtagaacaggtaaaactacacatctgaattacttgtaagtatcatacagaactcacacacctggtgtggtaaccacaaagcggagggaatgctggctgatggttccagatctagaatggaaagcaactagtcactccccaggagaggactccattctgaaagggaacagctggcagcaggtcttcagagtaaatagtaaaactagagacagaaaacctacatattccaaattgtcagtaagggctatccaagtctcagtgggaaattgctaagcagtcacaggaaaagaaagttttaggggttcagggttcttagaaatcttaagtaaatatttccttttgagagggcctcaccctgacagtaaacttctgtaagcacccagataaaaaaaattgcagaattttagtaaaatcagattctccccactgcccccaacccccgcaatgaaaaaaaaaactgcagaatcagtaggaaacaagaatagagaagatcagaaacaaggggccagtggag

SEQ ID NO: 67066 - DNA, 1129 bp, Homo sapiens
acaggcatgtgagccacctcatccagctgctgcttttacttccaataatataaagctttttcctttttttagctattacaaacaaaaacagcagtgagcatttttataaacatttgtttatgttaactatttccttagaaattttagagagtagaattaccaaatcaagaagttagtgtacctttttttaaggatctcagtacattttgccatatgctgctattaaacttgcgtcaatttacatttctaccagcaaattgtcatttttttgcatagcatatgcttatccatttccagaggcatattcacctatatcatcacctgtttctaggtttgtgtttcctgatttggtaaaattaggagttagctcctaatccatttgttacttgttttggtacctgatatgaaaaaagggtcaatgtacattttttccctaaatatttaactgcttgacaatttgttcacttgacaatttaaccactgcacagtttgttcagataagctttcctttcccctgctcatttatttaagatgtctgtcttatcctacactgattaacaatctcttattcacaattctaaaacccaaaaggttccggcaaccaatttttttcccctagatttaacatcagaactcattctgtggcaaacctgacctgaaatgacacgaggctacttaacagtctttatctcatttatagtaatgttgattagtctgctgttccagactcaactggggggcatatggtgcatacatttgagttattttttagaaatccaaaatattctgatttatgaaccccagctaaccccaaaggtgtgtatgatcaaagattttggacttgtattaaatgtacacacatatatacacactatatggtatgtgtatcgtctattctgtgccactgattaaatcattataacttttgtgtccactgttactgtttttgttttttcaagtattcacccttttatgcttcctggtgaactttagaatcacttgaattatttcaggttaaatttctattggaatatttgaactacattaatgtcataagctaattcataaagaagcaaagggtaacgatcatatggtatgtatcaaagtgttatagttatccctatcagaa

SEQ ID NO: 67067 - DNA, 1050 bp, Homo sapiens
aaagaattgcactaattcatagaactctttacattgtagtgaccaatgcacatataatttaaatcttgtgttctatgtgagagtttatgtggaggattatcttctggtgttgtgtccatcataagatgtaaaaagagaaatcatagttttatattttagtttctcctacaatgggtatgttaaataactatatctatacttagatatagtgcattgtctgtgtcccttaaagtgttacaaagagtttctctcaaaaggtccttaaggagagtgagagatgagagaggtgccttctctgtattagactcacacacatcagtccagttgaagaattggtttaaacttttaaatgagaacagaaattataattagtacctgaccaattgtgcctagatattaaagtatgttctctttagtactttccgttcaattaaatatcagtatattagggatttttttctacaggtgtatattttgttgaagagtcactttcctcaaccatttttttgtactgggcctttaaaaaaataaatccatccaactttaacacaacatttctcagtgtagaaatcatgtcttcttaattgctgaaccttactgcaaaaacttgtgatgtaagaaatttgtatggtgtggcagtggtctattcctaaggaactaaatatcatatagttaatgtttatttaactcagcttgagactgtactacagttaggtttgaataaatattttcattaacttcaaaagtttgaattactttacattggcagtcttgtttagaaactgattaaattcctttgcaagtcagttctttttgggagtttgtacaatgctgaaaatcacagttttcttcttattcaattcatagttgtatgtactaagcactgaaaattcatatacaaataaaataagtttactttcttcaagattcatagttaactaaccaggaactgctaagtaaagttgaaagataacttgtacttggagcttttatgttcaagagcaaaatcatatccccattttaccttaaaagtccacaggtcctgaactt

SEQ ID NO: 67068 - DNA, 1025 bp, Homo sapiens
cacctaacatagaaagcatgttctatcttgtctcattcaacattcagacactctggatttgtatcatgtcttttgccataaactaacattcaggtgccattgaagtatatttaagtaactttgggtttataaaacttgtctctacttctctatagaagtaaaattctaatagactaaaaaagtttgacaattttagtagtatgtgaaagaacccaatatactgttttaggtgacttactaagaaagcattttggccttgttttgagtttattttttctttctctttttcaacagaaaaagaagcttcccagttcatttccagcaggaatggatgtagacaaatttttgttatcattgcattatgatgagtaaacattctggacacataagaacagtaggtgttaaaaactcatatcccttaaactgagtgtagggaatgggatattgacagaatctgaaagcatgacctgcactttcattgtactgaaacttcactttatatctaaatcatgctgtttctgaaacagcttcctagtttgtaaatagacttacttggtatatttttattttgggaaaaacgtttgcagaaatgtaagtaaagccaatctgcaaaactgtatagctttgacaattccatattgtaaatactgtgtaaatcttgttgaaatagaggttaaatcaacctaatgttcttacactgtgttttttgacttcttatgatccctaattctgagacttactcatctggaatagtttctcacttgttttggaggaaaatgatgcttattcttataaattaccttcagtaactattcaataagacatttaaatacacaatcactaagtactacaaaataataaccacctcaactgatagcaaaatatctaattagaaatcaacagtttgatgagtttttttcctagagtgaatactacccctttcttataattgctgtaagtattatatttctggaatttcacactttacctactctgatcactctgttctctttgttttaaagaga

SEQ ID NO: 67069 - DNA, 1039 bp, Homo sapiens
tgctagaaatagttttgttttgttttgttttagaactgaagtttctgacaaaagtattgccacagatcttgggaaaaaatcagaagaaaccacagttcccttcccagaagagagtatagttccagctgctaaaccatgccacagacgtgtactctgtttcgacagcactactgctcctgtggcaaatacgcaggggccaaaccataagatggtgtcccaaaacaaagaaaggaatgcagtctcttttcctaatcttgactcacccaatgtgtcctccaccttaaaacccccttctaataatgctatcaaaagagagaaagagaagcctcctctgcctaagattttatctaaatcggaaagtgccattagccggcataccaccataagagaaactcaatcagaaaagaaagtttcaccaacagaaattgtgcttgaatctttccataaagcaacagctaataaggagaatgaattatgcagcgatgtagaaagacagaaaaatccagaaaattcaaaactatctattgggcagcaaaatgggggtttgcgaagtgagaaatctatagcttcactgcaagaaatgaccaaaaaacaaggcacatcttcaaacaataaaaatgtactttcagtaggtacagctgtgaaggatctaaaacaagaacaaactaaatccgccagttctttgattaccacagaaatgttacaggatatacagaggcacagctcagtaagtaggcttgctgatagtagtgatttacctgtgccccggacacctggctcaggggcaggggaaaaacataaagaagaacctatagatattatcaaggccccctctagtaggcgtttcagtgaagacagtagtacatcaaaagtaatggtccctcctgtcaccccagacttgcctgcctgcagccctgccagtgaaacaggaagtgaaaacagtgtaaatatggctgcccacacattaatgattctctccagggcagccatttctaggactacttcagcaactcctctgaaagataacacacaacagttt

SEQ ID NO: 67070 - DNA, 1048 bp, Homo sapiens
atatttggattgactttttcttaatttgttagccttgctgtttttcctaaaactgtttcagtttcgttttttttgttttgttttgttttgtttttggagagtggatcgtaaggaagagggattgttcatagaatttatttcaaagcagtaattaatttgtgccaaacatttgtttgttttgtgccaaaacatttcagagaaaatctttttttaacaagaattgtttttttaggatctgccataataattgcctctccagtccagcctgtactccaaggaatggtagggatgatcccagtatctgtggttggacagaatggaaataacttttctactcctcctcggcaggtaagatttatgaactgaaaatggtgtggtgatgcttttcaagcttagtgtaattaatggctttttctcttccaggttcttcatatgcctttgacagcacctgtatgcaatagaagtatccctcaattccccgtccctccaaaatctcagaaggctcagggactaagaaacaagccttgtataggtaccatttttaatttcattaatgttaactttatgtttgtatgttcatttgtttgcagcaacacctaaatgttttctttctgaatacctaaaccattttaaaacaagtgatcaccctacatttgctagtaacagatgtcataatgcagccaactgttactgaacagctttggttctgagaaaattgtctcctttgttgaatctgttagcttttgcccagtagtccttggtttgttctttgcagcttccctaaattaagtatagtccctatttttcccaacagctttcaagtgtttaatgaatgcctcgtataattgtatgagactttagagcagttcttcttgtagtttagtgtgtatatgaactatttggggattttgttaaatgcaggtactgaattgataggtctggtacagcacctgaaattcctcatttctaacagcttctaagcaatgccagtgctgctggtactggaccacacttgaagcaaggctttaaagtttgcaaattaccttcc

SEQ ID NO: 67071 - DNA, 2000 bp, Homo sapiens
ccatatctgtctacctgcctgatactttgcagatggtcagtctggtcagcccgctttttgtacatcctatcagaatgatgacccattaaatgctttgaagaatagcaacaaccatgatgtgcttagacaagaagaccaggaaaatttttcccaaataagtaccagcatacagaaaaaggcctttaaaacagctgtacccactgaacagaagtgtgacattgacattacctttgagtccgtgcctaatttgaatgactttaaccaaagagggaattctaatgctgaatgtaatccacattgtgctgaattatacaccaatcagatgtccactgaaactgaaatggctatagggattgaaaagaactctttgtcttcaaatgtaccgagtgaatctcagttacagcctgatcagcctgatataccaataacttcatttgtttcacttggttgtgaagctaacaatgaaaacttaattctctctgggaagagttctcaacttttatcccaagatacttcattaactggaaagccatctaaaaaaagtcaattttgtgaaaattctaatgatacagtaaaacttaaaattaattttcatggttccaagtcatcagattctagtgaagttcacaagagtaaaatagaaattaatgtgttagaaccagttatgtcacagctatcaaattgccaagataattcttgtcttcaaagtgaaatactacctgtgtctgttgaaagttcacatttaaatgtatctggacaagtagaaattcatcttggagattcgctgtcttctactaaacaaccatctaatgattcagcatctgttgagttaaatcatacagaaaatgaagctcaggcatccaagtctgagaattcacaggagccttcatcttctgtaaaagaagagaatactatttttctctctttaggtggaaatgctaactgtgagaaagttgcactgacgcctccagaaggcactcctgtagaaaacagtcactctcttcctccagaatctgtgtgttcttcagtgggagattctcaccctgagtcccaaaatactgatgataaaccttctagcaacaactcagcagagatagatgcatcaaatatcgtctctctcaaagttatcattagtgatgatccatttgtttcctcagatactgaacttaccagtgctgtttctagtattaatggagaaaacctgccaactataatcttgtcttctcctactaaatcacctactaaaaatgcagaactagttaaatgcctatcttcagaagaaactgtaggtgctgttgtatatgccgaagtaggggattcagcctcaatggaacagagtcttttaacattcaaatctgaagactctgcagtaaacaatactcagaatgaagatggcattgctttttcagctaatgttacaccatgtgtttccaaggatggaggatatatacagttgatgccagccacaagcacagcttttggcaattcaaataacattctgatagctacctgtgtgactgatccaacagcgttaggaacatctgtaagtcagtctaatgtagtggtgttgcctggaaattctgcacctatgactgctcaacctctaccacctcagttacagacaccaccaaggtcaaacagtgtatttgctgtcaaccaagctgtgtcaccaaacttttcacaaggtaactttaataacataattgaaatttgtttctctgggttgggatctaatttcttttgtatgtgatgttattgactgcgaagtaataactaatgagtagatggtatgagaaaagattctgaaatttgtgattacgctgcttctttatgctagctaattcaaaccttttttatttttcttaatctgctagtaagctatgggctttagtggtttttcttttttcttttcacaaatacttctcaatctatgtgctagtaagttacaataaacagaaaagacagactaattcatcacatagttgtataaaacccaatgt

SEQ ID NO: 67072 - DNA, 1112 bp, Homo sapiens
tctctgtgggaaggcatctctataattgtgaaagataataaaaaatgtatactttgtatattcttactcaaaaatgttaatatgtagagtttctaaagttaaattatcttctgttcatttttttaagaggtagggtctcactctgttacccaagctggaatgcggtggtgtgatcatagctcttgtagccttgaacgcctgagctcaaaagtttctcccacctcagcctcccaagtacctaggactactggcacatgccacctggctaatttttatttcattttatagagacagagtcttgctatgttgctcaggctgttcatgaactctcggcctcaagtgatcctctcacctcagccccccagggtgctgggattgcaggcatgaaccaccatacccagcccagattgcattcttaacgtaatgtcaaggcactctaatgcattattacattggatagaaacttcttaatgaaaattatgtgtgttgtgagtgtgtctacatgccactatttttctcctaaagcaaatcacagttgcttgcccaaaaaatgtgtgtgtttgtcttttttgtctgagagagattttttgccttttacctcataactaacttgaggtctgactgtaactaaatcatagtggatgtcagcaacaaacattttttgatggataactactttgttttctttgttaggagcatgcaaagttccccaaggtttgctggcagtcagagaggttggtatccaactttaaacaatgttcacaattacttcaaacttaaactatcagatgaacattttaattcattgtacacatgtgctaagtatatattttccttaaactactgtttttctttctttttttttttttttttttttttttgagacagtgtctcgctctgtcgcccaggctgaagtgcagtggcacgatctcagctcactgcaacctccacctcccgggttcaagcgattctcctgcctcagactcccaagtagctgggactacaggcgtgtgccaccacacccagctaattttttttgtatttttagtagagatggggttttgccatgttagccagaatggtctcaatctcctgaccccatggtccgcctg

SEQ ID NO: 67073 - DNA, 1051 bp, Homo sapiens
tgaagagttgatactctgattggatgatgatttccttaactactgggagcaaattaatatcccattgtttgccaagggggtctgtgtgtgctttggggcatgctttagttcagccaagcagttgacccactctgccttagccttccttcactagttaaggttgatgttcttgttggaattgataatgctttgattcccaaagggcataaattaagaattaagggagttcctgtctcaactttcatgcagagtaggtcttctgttcattctttttataaatcatttggcaaataaatgaagtatacaaatacatagcagtgttgtgagaacatagttttctgataacgcagtaagtgaatttataccatcaactgacttggtctttatggaagttatgcagtagagggacatagttatttatcattaatttattggttctcctgtaagtactgtgaagtaattatactttgttaaacactttattttactagtttagctagaattgtttcttgtgaaagggccacctgttctatgaactgtactttgtattgcagcacaacctggtgtttctgttcaaggctgccaaacactagagcattccacctaaggtttcaattgtgacatcagtacatgctacagcattttcaatagcagttttaaccaaaagtacagaatttagtataagtacctaaacttttattttttatttaggttacttacagcaagaaaacctcatttctacctgccagacttttattttggaaagttcagatttaaaagaatatgcagaacattgtacagatgaagggtttattccagcctgcttactggtgagttatttgttccttaagggaaatatttcatcaacacaagagactaaaaacatagtcataaaatcagcttatcagaaaaaaaaaattgaaattggcagaaatttggtggtttatattcatgcatgactggtaagacccaaagaagaccagcttttctttttacaaatttatgccaaaactattaaatgaattacaactttgactccgagagttagttt

SEQ ID NO: 67074 - DNA, 1023 bp, Homo sapiens
cttctaatattaaacattgaaatacatgtaagctatatatacatttaagatggattaataaaaacaagataattacttacccagttagtccagttcaaggttgcaggtagctagagcctatcccagcagcttagggtgcaaggcaggaactaaccctgggcaggatgtcattctgttgaagggagcactcacacgcccacgtacactcactcatgctcacactgtaataatttagacacaccagttaacaacgtgcacatctttggagtttgggaagaaacgtgtacctggagaaaacccatgcaggcatggggaaaatgtgtaaactccacacatacagtgtcctcagccagaaattgatttttttctctcatcagcagtataacaaaaacattgaacaaaatgatggtattcgaggacttgctatataatgatcagtgaacatgagagtagtcaactatttactacattattttggaacttttgggacaaaagtaaaccagaatacatcaaatctaatctaaaatgagaactcaagattgccaaagttggggcatgttgttaagagcagaagataatgtatcctagatattactattttgagatacattataacttaaacacttattatagaggtaatctagcttttaacagccccatctcatgtgtgtgctatacagaggtataatgttttatgaaatgccatgaattatctgtaatgattccaggttatgctagcacaaatgacaatatttttctgaaaaaggtttactgtgtatcactgtattctgtctggggcattgtttctcaacctttatttcattacacaactttaaggaatcttcttaggctttttttttttccctgaccctcctctcctccccacacgaaagtttaatgttttagtgtcatgaatatattgtatatgtttatatatcatgtgtatctgtgatttatgcataaaaagagggagattttcttcattcctccctgccccagaaccaattttcagcctcttagggc

SEQ ID NO: 67075 - DNA, 1050 bp, Homo sapiens
gggagtccccaaaactatcatctgtgaaggttttcttgaatagatttgttaccttctgtatgagacagcatgcagtaaaaaaagtagaaaccattctgagtatttaacatggaaagatttaatgagagaattcgtttacactggtgagagaaaagctaagacgcccagcagcttacaactaaggcatctcagtggttagcaacagtaggaagccactatgctaatgagaaggataaggagagaggaagcaatcaagaggctggtttgactgcggaacgtggaagacttgtctgatgagggagtggtagtcttagaggagactctactgaggcagaaagggaatgggggaaaaatatggctgcttcctcctgccctccagcctcccaccagtgcttcctatttactgagcccagccagtagcaggccgacagaagagcttggggaacattgcctatatagagtcaagctttatgtcatacagtagagagcgacagaagggtcaagaacgtgtttgaggtcaaacaggaccaaaactgacacacccctaacaggtcaagagctgctggttctattcacctttatatcaccaaaacatagatatttaataaaacatttgcaaaagtatggctctgattatgacactcctttgtttatttaataatatatgtactcattgctgtctaaaacttttcatgatccttacccattttgtcttttctgttgtatctccaactgttacccttcataaaccttgtgctgcatccaaactggacatgttccccaaatatgattgcatatatactttctgtcagcttctttgggattcccaaccatccttcagtactcatctgcaccttcaaacatcacataatttccaagcttagtagtggtttctccagcccctcccttcccatgaagtgagtcagctctattttcttaccatttttgctttgcattacagttatttgtgtatatatcttctatctccaagtaaattgtaactttatagacagaaaccttgtccctgttatttgtggatctagtaatata

SEQ ID NO: 67076 - DNA, 1043 bp, Homo sapiens
ggtgtggtggtgaccacctgtagtcccagctacttaggaggcttagggaggaagattgcttgagcccagggggcagtggttgcagtgagccacgatcatgctattgcactccagtctgggtgacagagtgagatcctgtgtccaaaaaaaaaaaaaaaaaaaaagtctctgcaggcaacttagttgtacttttaagaaagatttgatcccagaagtttgagaccaacctgggcaacatagggagaccccatctttaaaaaaactaaaaaaattagctgagtgtagtggtgcttgcctgtagtcctagctacctgggaggctgacatgggtagatcccttaagtccaggaggtcaaggctgcagtgagtcataatggggccactgcactccagcttgggtgacagagcgagatattctgtctcaaaaacaagcaaaactatgaaaaaaaagtcaacatttcttgaaatacttctcatatttggtagaggagggagatatattgggataaaggacataggaagataggattttattataatattaatttctgtagttattcaacacaaattaatttttattgagcatttgctattagggcagtcactgggcttttacgtcagaatatagagattaattcctttccttaaggatctaatcatacaatggatgttttagattagaaaaatgttacaaggactataagagaaatgcacagggtactagaaaaaaggatcacatggttgtgcatttcataactggacaatgcctaaaattatgaagtgagccataagtgaagatgattttgcagttatatcagtgtatatttgtttaccatagcctgtgaatataactagtttcatcataggaaaaccctaatccagaatatattcatatttacatgagttgtgttctgctcatagttatggcaataaatatattcaattttaagattgtcagtatggaaaaatggcatttctgctgtgacgtaaatataatttactgaaaatgataattaaattatttttaaatgtaattttgttacc

SEQ ID NO: 67077 - DNA, 1050 bp, Homo sapiens
ccatacattatcaaaagtcatccaatataaaatagataatttgactagtcccataactattaggagaataaattgaatccataatttaaagcctttcataagacaaattgggaacaagataaggatgtgcactctcaccactccttttcaacattatgttggaggttctagccagggtagttagacaagaaaaataaaaggcatacagattggaaaggaagaaataacactcccctttgtagatgacatgattgtctatatataaagtcccaatatacacaagtataacattgtgaataatgttatttggggactgggcacagtggcttacacctgtcatctcagcactttcggaggctgaggcaggtggatcatctaaggtcagatgatggcttcctctaaaacaggacagatttacttgtagcctattgattataaaaagcttgaggtttctctgttataactcagtccactgttttcgcagtgtcaagtgtcccatttcaccttgcctttggtactggggaactgatgcaaaaatgaaggtagtctggctaccatcattactgggagaaataaactgtcctttttctcttatcaggaatctcaggtttcctgctagcacccaggaaactgtcatgctaatttgttaggttacaagtagataaaatctcagccaggcacagtggcttatgcgtgtaatcctagcactttgggaggccaaagcaggtggatcacttgagcccaggagttcaagaccagcctgggcaacatggtgaaatcctgtctctacctaaaataccaatcagttgggtgtggtggtgtgggcctctagacccagctacttgggaggctaaggtgggaggattacctgagtctgctgagattgaagctacagtgagccgtgatcttaccaccacacaccagtttgggtgacagagtaagactctacctcaaataaataagaaacaaaccaagcagagtaaaatttcatacccttcataggtctcaacacattttttgcatattattaatcaaacagtattattattt

SEQ ID NO: 67078 - DNA, 1086 bp, Homo sapiens
ttaaaatcctttttctgtatgggattatggaatatttaagttaaattgtaacatttaatacattttgatttttaaaaaatcatgactaataatttttttttttttttaagaattgttctctgtgtacttcaggctctatctgaaaccttcacaagatgttcatagagttttagtggctagaataattcatgctgttaccaaaggatgctgttctcagactgacggattaaattccaaatttttggactttttttccaaggctattcagtgtgcgaggtaatctaatctctttttcttttgttttgtattgaaatacttttgatcttgcaagaccatgttttagactcagtaactaaaaattctaccttaaaataaaacattgatccatcataacagaactagtggattcctaaagagacaaccaagtccaacactttctgaatatccaatatgcagaacactacgtgaagttttcaagggggagatgtgtcttgctgatgttctgttgaccaggaaagttaaatatcctctaagtcattgcatttcccccattttgaggatggttttaatataccgagaataaaataaaataggaaaatattttggaagtattactgttgtacattagtatggcagtactcaatgtataatgtgaaacattttataaatggtgttacaaatcagttttgtttatttttatacaatgttttagcaggagggagagctaacagaagtggtctcttaacaccaaataagaactaattttttgtcagtgtgaagtaatgctgtgatttttttttttaatgaatagttttgaaattaagactactgtttgaaaattagggttttgtttttttttctttcagcataccacttcataactgttcagtttgtacagtttgttccccctgttatacccagttgagcttgtttgtttcttcacagacaagaaaagagctcttcaggtctaaatcatatcttagcagctcttactatcttcctcaagactttggctgtcaactttcgaattcgagtgtgtgaattaggagatgaaattcttcccactttgctttatatttggactca

SEQ ID NO: 67079 - DNA, 1081 bp, Homo sapiens
ctcctattcttaagtatcacacattctagagaatacacagcaaatgtttattggattaactgaattaatgtaaaggaaaaacagttttttgggtttctttgttttcctgttttagaggaatcgtttggtgactaaagagcaaggatgtacaagataactcagaaataaaatattgctaaatatatatatatatatatatatattttctgagacggaggctcactctgtcacccaggctggagtgcagtggcacaatcttggctcactacaacctccacctcccaggttcaagcagttatcctgcctcagcgtcctgagtagctgggattccaggcatgtgccaccatgcccggctaatttttgtatttttagtagagactgggtttcaccatgttggccaggctggtctcaaactcctaacctcgtgatctgcctgccttggcctcccaaagtgctgggaaaccacctggcccaaatattgctaatttaatatcctttaaaatatttgtttaagggaaacttaacagcttacccagctagccaaacgttgacaattttcctgccaatttaggaagtaggacatagtaactattaacagccagtttatttttagagtactatggaaatgatggtgattctctaattaggatattgtaagagtaccatgtctatatatttccttttagtttgttaatgtgatggaatagttttcaaattatcctttttttttttttttaggctacagattgcaacccaattaatatcaaagtatcctgcaagtttacctaactgtgagctgtctccattactgatgatactatctcagcttctaccccaacagcgacatggggaacgtacaccatatgtgttacgatgccttacggaagttgcattgtgtcaagacaagaggtcaaacctagaaagctcacaaaagtcagatttattaaaactctggaataaaatttggtgtattacctttcgtggtataagttctgagcaaatacaagctgaaaactttggcttacttggagccataattcagggtagtttagttgaggttgacagagaattctggaagtta

SEQ ID NO: 67080 - DNA, 1075 bp, Homo sapiens
atgaaggtctgcaggctgacccagtaaataacttccagaattctctgtcaacctcaactaaactaccctgaattatggctccaagtaagccaaagttttcagcttgtatttgctcagaacttataccacgaaaggtaatacaccaaattttattccagagttttaataaatctgacttttgtgagctttctaggtttgacctcttgtcttgacacaatgcaacttccgtaaggcatcgtaacacatatggtgtacgttccccatgtcgctgttggggtagaagctgagatagtatcatcagtaatggagacagctcacagttaggtaaacttgcaggatactttgatattaattgggttgcaatctgtagcctaaaaaaaaaaaaaaaggataatttgaaaactattccatcacattaacaaactaaaaggaaatatatagacatggtactcttacaatatcctaattagagaatcaccatcatttccatagtactctaaaaataaactggctgttaatagttactatgtcctacttcctaaattggcaggaaaattgtcaacgtttggctagctgggtaagctgttaagtttcccttaaacaaatattttaaaggatattaaattagcaatatttgggccaggtggtttcccagcactttgggaggccaaggcaggcagatcacgaggttaggagtttgagaccagcctggccaacatggtgaaacccagtctctactaaaaatacaaaaattagccgggcatggtggcacatgcctggaatcccagctactcaggacgctgaggcaggataactgcttgaacctgggaggtggaggttgtagtgagccaagattgtgccactgcactccagcctgggtgacagagtgagcctccgtctcagaaaatatatatatatatatatatatatttagcaatattttatttctgagttatcttgtacatccttgctctttagtcaccaaacgattcctctaaaacaggaaaacaaagaaacccaaaaaactgtttttcctttacattaattcagttaatccaataaacatttgctgtgt

SEQ ID NO: 67081 - DNA, 1042 bp, Homo sapiens
gacaaggtttcaccacgttagccaggttggtctcgaactcctgacctcaggtgatctgcccgcctcggcctcccaaagtgttggggttgtaggcgtgagccaccatgcccggccagctgtcaaaacttgtatctactagaaaaaatgttttatgctattctgtggagtctaaaaagctgaataagtcaaggttcctattcttcagaagcttaaaatgtcattttaatgtctctttatatgactgtaatttctacttgtgttctaagacttacagtcatttatttgcctgtgaagctttttttcttttctttcatccctacctcaaatatttaagggcctatgtgtacagtacaccctccaccctaagatgatatatcctgcttggccatcaggagatacttaggctatttttcttgagaatcctggttataattctacagtgatctcctagttgtttttagagctatccaggatatgccacctttaactcagttaactgaacttttgttttttaatatgtatgtagaatttgttcttacaaaagatagagtatactaaattatttatgaaatatatatatttttatttgtggtttactttaagattacaaattcagaaactcttgtccggtgttcacgtcttttggtgggtgtccttggctgctactgttacatgggtgtaatagctgaagaggaagcatataagtcagaattattccagaaagccaaggtaggagaatttatactaataaagtttcggataaatttgaatgaaatgtattcctgtgaaaattattacatttgtttggaagacattaaattttatgcaggttaaccctttctcttttatttatgtaatgtgagaagaaattatactatgtattttttaaattgttttaattgtttaatttttaattattattatactttaagttctggggtacatgatgtagagcatgcaggtttgttacatagatatacagtgccatggtggtttgctgcacccatcaactcgtcatctgcattaggtacttctcctaatg

SEQ ID NO: 67082 - DNA, 1050 bp, Homo sapiens
taattataagtatttttccaggtagttgcttttcttgatagtcatactttttaatggcttcaccatttttctgtcataaataccataatttacttgacattttttattgtcagaaatttagattcttttctattttcctacaataaacattattgcaatgatcatttgtctaagggtttttttttctcatattttaaattatttcttgacaacagaatcttggataatttttcaaaaagacttttgaagctttcagtatataattaatttcactataattttgcttttcatatacttttttttgtgaagaggaggaaatttgagttaatatgactatatatggctgttgtgcccttctcttagtgttaatgagtgctttttatttttaggtgccattaatcctttagctgaagaatatctgtcaaagcaagatctacttttcttagacatgctcaagttcttgtgtttgtgtgtaactactgctcagaccaatactgtgtcctttagggcagctgatattcggaggaaattgttaatgttaattgattctagcacgctagaacctaccaaatccctccacctgcatatggtgagttacgttaaatgaagaagctcttggattttatctgatgttgctgactaaatgtaatgagttgacatgtaagaatcacatggtgtctttgaagaattgaaattgctttcttgagaaatgaacctgagactagttggaaaataacacttttaacgtgctgtgagcaaatttaagtggatgctgaaatattaaaacttagatgggttttggatagatttattctctttaggtttaattgttataaattattttaattaggctaagaaacatagaccctgaatgtaaaaatattacataacattgtgtttgaagttggaaccttgcctttgaccttagtttatatattttcagttttttggatttgatttcaaaatgatagtgaagttacaagaatactacagttaacgttttaccatatttgcttaatcattccctctctccacacacacactcatacg

SEQ ID NO: 67083 - DNA, 1253 bp, Homo sapiens
ggctgtggtactgggatttgaattttctgtttgacttcaaagccttttgtttttactatacacctcttaaatatttacagctgtgtgtgtgtgtgtatgtgtgtgcatgtatgaatttatgtttatatacttaaaaaaaatttttttttgagacggaatctcgctctgttgcccgggctggagtgcagtggcgcgatctcggctcactgcaaccttcgcctcccaggttcaagcgattctcctgcctcagcctcctgagtagctgggattataggcgcctgccaccacccctggctaatttttgtgtttttagtagagatggagtttcaccatattggccaggctgttctcaaactcctgaccttgtgatctgcctgcttcagcctcccaaagtgctgggattacaggtgtgagccactgcacccggcctatgtttatatactttttaaagtaaatgatttgtggataaacctgatttttttccctcctaccatcttagtatctaatgcttttaaaggagcttcctggagaagagtaccccttgccaatggaagatgttcttgaacttctgaaaccactatcgtaagaaattaaaaccttatgttatgttcactttaaagttataaaataactgatgtgttctgttaagcttataaagttgaactttttttttttttttaccacagcaatgtgtgttctttgtatcgtcgtgaccaagatgtttgtaaaactattttaaaccatgtccttcatgtagtgaaaaacctaggtcaaagcaatatggactctgagaacacaagggatgctcaaggacagtttcttacagtaattggagcattttggtaggtacagtctattttgtggtcctatttttcttttgctatctgtggatacgaatgcaagttttgtatccacatcagtgatttcttctgatcttcctacatagctaatacatcttttaagaatagcagaatgtaatttgtgtttccctcagtcgcttgaagaactacattgctttttgtttaaggcttggctttctaaaccgtttaactcatttctctgcaaattttgaatcacttaataatttgacatgtatagtgaataaaggataacaagccaaaatcagttgaattgttcatgttccctaagtgaacaaattggccttgtccttatctggttattttatgcatattgtcacattccaagataacaccctgatacttacagaggagcacatacatataatttagaac

SEQ ID NO: 67084 - DNA, 1020 bp, Homo sapiens
cactccatcacccaggctgcaggctggagtgcagtggtgctatatctgctcactgcaacctccgcctagtaggttcaagcaattgtcctgcctcagcctcctgagcagctatgattacaggctcccaccacaatgcctggctaatttttttgtatttttagtagagatggggtttcaacacgttggccaggctggtcccaaactcctgacctcaagtgatctgcccaccttggcctcccaaagtgttgggattacaggtgtgagccagtgcacccagcctgaatgtggttttgaaatcttcaatataccaaacaaagaaatcttcaatataccaaacaaagaaatttctttctaaagtaagtttactgtaatgtagtttagccattctatggtagcccccaaaaaaggacataatggtataaaacaaataatatacgctaaaatgaattcttttacactaatttcttttagcttgaatttttggcaaggtgagtatgttggcatattccacataatgacaaataagtttagcacagaaagacatattggaagtaacttacaataacctttcagtgagttttctgagtgcttttatcagaatgattatttaactttggaaaacttacttgatttcaggcatctaacaaaggagaggaaatatatattctctgtaagaatggccctagtaaattgccttaaaactttgcttgaggtgagtttttgcatttttttagtaagatctccattgaaaattttaaagcagtctttgtttgttaatgagtaatttttctctatttcatatttaaccacagttcttttcccgtaggctgatccttattcaaaatgggccattcttaatgtaatgggaaaagactttcctgtaaatgaagtatttacacaatttcttgctgacaatcatcaccaagttcgcatgttggctgcagagtcaatcaataggtaatgggtcaaatattcatgaagtatttggaatgctgcagatggcagtagaatgtcttacat

SEQ ID NO: 67085 - DNA, 1137 bp, Homo sapiens
aatgttagagcaggttgacattggaatctgtggactcaactaattggtgttcggccagagaacagtttatcttttctggctagtttgagttcagtgctgttcaaatttgagcaatagttaaaatatattttgagaccctcttcagttctaggagaaaatagattttgtattcaagaccttaatactaagctgctggtctgaacctctttaaataaactcaggttttgttagtctttaagaaagagctagtatgttattatgtctcacagagtgatttatttttgttctggaatatgctttggaaagtagggtttgaaattagaaaattatttcactttttgtttgtttgtttgcttgcttgttttaagattgttccaggacacgaagggagattcttccaggttactgaaagcacttcctttgaagcttcagcaaacagcttttgaaaatgcatacttgaaagctcaggaaggaatgagagaaatggtaattttaagtaacatgtatttgctgttatcatatgcttgctatgaatatcccataaattacttcaccaagtttggtataagagagtttataatccagtagtttacagtataaagctgctctaaaacaactgtatgaattgattgaaactgcattctttctgggtcacaatgggtcaaatcatagcaatttcttttggtttagcatttttatggagaaacccaaaatttaactgagtttttatgggagtataaatggctcccttttttattttaaaaatccttttatatgtgatctgattaaaagctaattaagggaacaggtgacaatgggaagaaatggattgaggagaagaatctcacacaaaatcaaatcattgtggtgtttacagtgaaacttgtgatatttcacgtttctgtagaataatatattttttatggtaatgattatcttagagttcaaattttttcatttatttatgccctggtttgtttcttacaagtatttaaggtagttaaataactgtcaagtctgtgatagcaggaaattgaaaggaacaattgaaagaatgtgagtttagaaaagaatttcaatagattagaaagataagtgtaaataacataaaatctaatgagataatgtatattatac

SEQ ID NO: 67086 - DNA, 1168 bp, Homo sapiens
gtaaaattcagatagaggagcagttatacatcagtgggaaatttggttggcagaaaaattaccaggtcatacaacttaatgatagacctgaagtcttatttaaaatgattctctaaaattgaagaattggattaagggggccttgtttggctgattttcatactttttcctcttagtctacaggttggctgcatagaagaaaaaggtagagttatttataatcttgtaaatcttggactttgagtcatctattttcttttacagtcatcgaatacttttggaaataaggtaatatatgccttttgagctgtcttgacgttcacagatataaaatattaaatatattttaattttgtgcccttgcagattgatcacttattcattagtaatttaccagagattgtggtggagttattgatgacgttacatgagccagcaaattctagtgccagtcagagcactgacctctgtgacttttcagggtatgtacattttaaacttagagaactagctctaacttcacaagtttttaaagaagtttattggttgacaccttcaatgtctatttcaatttatagacatcactctttttaaaaaattttctttaaaaatagccacctttgaattgaggtaattacctatcctcttttaccatagtctccccacagtaattactctttctaaattgaccacttggttggccaacccaataaccttttcttagtctttctgtaatatttgaacattgtgccatctgttggcccttgaaatttttttcttcatacacattattcctagttctcttctctttatctaggtcttgcctttctagatcaccttttctttttttttttgagatggagtctcactctgttgccctggctggagtgcagtggcataatctcggctcactgcaacctctgtcttccaggctcaagctatccttccttccacctcagcctctcgagtagctgggacgacagatgcacatcactgcgcctggctaattttttatatttttggtagagacggggtttcactgtgttgcccaggctggtcttgaacttctggcctcgaatgattcccccgtgttggccaaccaaagtgctgggtctacaggcatgagccgccgtacccagcctcaccttttctttattgtgcgttatta

SEQ ID NO: 67087 - DNA, 1043 bp, Homo sapiens
atctacttagctccatgaactaccatgagccagtgtctcacaccgaggatataggccactgcttttgtgattgttgccacgctggggtaggggtgggcaaggacaagtaaagttaccacaaagctttcctgctgtttttcagttggatttttcttgattcaatattttcctgattactgtaaacctttgactattttacagaattctaacaaaattagttctgacaattttgcctgtttttcaatgtttctattaaaggatggaagcttagagctgcctattctgcattttgctgatgtgacttctctttttggcttataagccattaaaatatttatgtcaaggcatataagaattagagatgctgaacaaaaggacttctgaatgaatttatttcagagtaattttccagaacttactggttgttgttgtttttttttctccctatattaggccttcttgtatcatggatgtgtcattacgtagcttctccctttgttgtgacttattaagtcaggtttgccagacagccgtgacttactgtaaggatgctctagaaaaccatcttcatgttattgttggtacacttataccccttgtgtatgagcaggtggaggttcagaaacaggtaattttctgactcatcttcaaaatggtatttaaaatatataaagtattgttagaaggatttgagtgttttatgtttatttggtataattggtgattttattgagaatattttttgtaaaatgattggaaaaatattcttaatgaattaacctttgtaatcaattacagagcacttggtacttttgatagttttatctactgtgctgaagtagagaggtagtcaaaactagggatagcagttcgcaacgttatggtggtatttgagttactacttatataaactgtttcattaatattggcattttttttaacctcagtacccatcttgtagtagtaccttacatagttattgaattatttgaaaacacagaaactaaaagctgggtatcttagacgtaattagaacatttaat

SEQ ID NO: 67088 - DNA, 1070 bp, Homo sapiens
ctgggtgcagtggctcacgcctgtaatcccagtgctttggaaggctaaggcgggcagatcatctgaggtcaggagttcgagaccagcctggccaacatggcaaaaccccatctctactaaaaatacaaaattagctgggcgtggtggcacattcctgtaaatgccaccttttcaggaggctgagacattagaatcacttgaaccggggaggcggaggtagcagtgagccttgatagcgccactgcactctagccttggtgacagagcgagactctgtctaaaaaagagtattaaaacattgtagggtttgcagtggaagaaatcatttatttcttccttgattagtagtaatagagacatgagtcagtgtctataaatggcacttaactaatttttttcttttattaagttttatttcacaggcttaaccaatacgtgttaaaagcaagttacattttctcttttaggaaattaaccattttctctcagtaagtgtttatgatgcacttccattgacaagacttgaaggactaaaggatcttcgaagacaactggaactacataaagatcagatggtggacattatgagagcttctcagggtgctaattttaaatgacatgggctatttctacctgtttctttttgaaagaatattttgcaaagtcttgctcttggtttcattgtcacagacttagttcagactctcatcatttagttcagaccctcatttctcatctaactgtaaaactggtcctaactggtcttctcaccctgaactcttcctgttttattcatcctctgccagatgatttctctaaacccaaatatgatcatgtttttctactgcctaaattttttttttaagagacagagtttttttttttttttaagagtctcactctgtcacctaggctggagtgtagtggcaccatcataacttactatgaccttgaattcctgggtacaaggaattctcctgtctcagccttctgaatagctggaacaacaggcacacaccactacacctagctactttatttattttttttattttttgtagggacagggg

SEQ ID NO: 67089 - DNA, 1033 bp, Homo sapiens
aaatgtttcattcatttcatagtaattcgaaattggtttttctgaaacagatgcacagaaatattagtgtgacttcaacttaagaatactaggaagcaggtacaagttttttgtatttttctttaacagggaaaaactttagatcttcaagggactttagcatatgaagatgtggacaaaaggattcccagaatttttattacttatatgtattagaacatattattttcaagtatttcttgagtctttttaatttatagtagtcacaattaaactgtattgaatgaagggaattgcagttgcagtgattagtaattcaagtttactgaatgactagtgaaagtcctttgatacttttatttgatattggagaattttgtaaatgtaaagtttcctaatacaaattttaaattttagttttgaaattttttcagtggaggttaacattcatcaagattaataactggtgtacttgataggcatttgaattgtttttttcagtgtcaaagttcgatcagcagctgttacctgtttgaaaaacattttagccacaaagactggacatagtttctgggagatttataagatgacaacagatccaatgctggcctatctacagccttttagaacatcaagaaaaaaggtctcttaagtaataaatgtttattgaatacccagcatatctaaaacagttctgtttgctgtgggtcatgactgttaaattgcttgaaatagtattgtactaactattaacctttcctataagtaatttaagccatatttcataaatccagggaatgtgttatttttaatttattatggcagtgtggaaaagctcagataggtaacctgaggaaatagtagttgatttttgggggaggggaaattcttaaagacagaccttgtttttttagaaatagaaagcgctactttgctcccatgaaagctgttagctctgggtatggtttatagttattgtgatccacaagtgtttatttccatgtcaagttaacatatcacaatcccctggtga

SEQ ID NO: 67090 - DNA, 1081 bp, Homo sapiens
ttgtagttcttcactgaggttagaaaatgcataaaaatcagatttccaacttttgtcttaaacttttgatacctttttccctcttctatcatatcagaaaactccttctgttactaacgcttttcaactctgaaattgtatttaaagtggtgatataatttcatttgtaagcaatattctgtttcattatggtaatggcctagactggaaataaacagttacagtgtcactaacatatatatttgatattgatatactagcctagtgtggttttttaaacaccacctaatacatgttttttgtttgtttttttagcagtatgttgagtttatggcagattaatctatcatcttttagaaatttaatatgtcaacggggcatgaaaattttaagtaaaatgtattaattttactcatttttactcaaactattgggtggatttgtttgtatattctaggtgaaaactgacttttgtcagactgtacttccatacttgattcatgatattttactccaagatacaaatgaatcatggagaaatctgctttctacacatgttcagggatttttcaccagctgtcttcgacacttctcgcaaacgagccgatccacaacccctgcaaacttggattcaggtattctattaaatttttaacattaatactgtaaactcagttctagagaaagatggatttaagatggaatcccactaaaagcactttacaggattaaatctataacctctaaatttgtttcttcatctatggaatggagataaaagttgccaacagttgcaacaagttttcaatgaaataatgtgtgtaaagtgcctaggatagtacttgatgtatagtattccctcagtacattttggctattgataatgggtcaactaattgagctttcaatatgtgtcaggcactgtgcttgcactggcaatattaatgtgaaaaagaaacacccacattctagcaatggaaaaaacaaacacaatcagatattttaggtactgtggtgcagatacgatagaattttcatattttcagagctctggccaactcaatttaaaaagcagcctttg

SEQ ID NO: 67091 - DNA, 1031 bp, Homo sapiens
atgtatttatgtcacaaccattggaaggtaaagtaactgttttattttatctgtatacagtgccaatatttttattaccttaagtgaaaatttaaacttcacatataaaattctgttattgaaaaggaaatacatatttttgtaaaatttaaatggtgtatcttttctgatggctataagcctcattgccttcactaaacgtcccatgtgcatctcaaactcagctgtccaaaagcaaacgtgtcatcttcttcatcccttcccccagcctacttttttaaatgtgtacctttttgacaaatggcactcagttgcttactctagaaacctctctcacgtatttcatctgattaccaaatcttgccaattccatattatgaataacttagtccatttgtttctctctgcccttagcatccttactgctttctagctccatgatttagcacagttgaaattctttcattaaattttccaagttatttcttgcttccagccatctcagatattattattattgcctgtagcactatcctttcctgctctgatgactattactcttctttcagatatcactttttcttttttcttttttttttttctttttttctcttgagacagagtctcgctgtgtcacccaggctggagtgcagtggtgcaatctcggctcactgcaacctctgcccctcaggatcaagcaattcccgtgcctcagcctcctgaatagctgggattacagatgtgtgccagcatgccctgctaatttttgtgtttttaatagagatagggtttcaccatgttggccaggctggtctcaaacttggcctcaagtgatccgtccgcatcagcctcccaaagtgctgggattacaggcatgagccattgcacttggccagtatcactttttctatgaaacttttcttgtctaggtgaggttccctctgctaagcttctgtagcattttaaactttcctattataacacttatcatattgtgttgtaatgtcccaggctagtcagtgagttctgtg

SEQ ID NO: 67092 - DNA, 1048 bp, Homo sapiens
ctgtaaacccagcatacacactggataaagtagaggcattggtgtccccaaggtttgtctacagtggtgtcccacagacatgtacctgcttagtgaatatcagctcactgtgctttattatttatttatttatttattttttgagacggagtcttgctctgtcacccaggctggagtgcagtggtacgacatcggctcaccgcaacctccacctccctggttcaagcaattcccctgcctcagcctcccttgtagctgggattacaggcacatgccaccatgcccagctaatttttttgtatttttagtagagatggggtttcaccatgttggcaagactggtctcgaactcctgagctcaggcaatctacccgccttgtcctctgaaagtgctgggattacaggcgtgagccaccacgcccggcctttactgtactttttgatgttgggcactcattgtatagcatcttctgttattagagaaatcattataccaaagcactgagtgccaatatgatatgtgtaaatattgcttaatagtattggccctgaagtatgtgctgtctggagttacccaacttccttgtacctcagttttctaatctgcaaattggggtaataatagtacttatttaataggattcttgtgagaattaaatgagttaatatatataaagcctttacaaagtgtctgacatatataagtactcaataaatgtgacttgctccaataatggcaataataataataaacagaggatgatcatttcctacatgggattattaaaatagttgtatggcaaaagcagatgaggaaaaactttttttttcccacccaccaaggaaaaacatttttaacctgcttttttccccgtacatgaagggcagttgggtacagtcatggtaatgcattatattttaagattttgcctttcttatacagaacaatcccagcctaaaacttacatacacagaatgtctgagggtttgtggcaactggttagcagaaacgtgcttagaaaatcctgcggtcatcatgcagacctat

SEQ ID NO: 67093 - DNA, 1047 bp, Homo sapiens
cctgtagtcccagctactcgggaggctgaggcaggagaatcacttgaactcgggaggcggaggttgcagtgagccaaggttgcgccattgcactccagcctgggcaacaagagcgaaactctgtctcaaattaattaattaattaattaattaaaattggttcaaaattccttaatatttgtcaaagcataggagataccagtagtagtttacttttttcctcaaagcagttggcaaagtgaaacaatagattttgaaaggcacctaagtcattgacgagagtatgtatctttgatgtatttcatttatgactgttttgtttgtatctgaggaattataatcattccattgtctagatttgtgcataaattctgtttttctctttgtttttctaactctgagaagtttaaatgttgggtagttccttatgtaatgttttttgttttttattaataggatcgaacagaggctgcaaatagaataatatgtactatcagaagtaggagacctcagatggtcagaagtgttgaggcactttgtgatgcttatattatattagcaaacttagatgccactcagtggaagactcagagaagtatgttttttttaaagaagaaacgttactttcttgctgtgttactctctgtagagatatattagttatagagcctaataagtaaatctgcttaaaatcacaaacgtaatccaaaagcttaatttatatctgatggcttcagcattccctggttactttttcacttaatatctcttaatagaactggtaataggtgactacactaaattaattatttgatttcttctgataatcttctggcatacatacttattacagagaattgcataatagaggcaagtctattaaaataattgaataactgaacatttctagcctcaaaagtttttttaaacgatgtggttactaaaactgccctgggacttaaaaacaaaaaaaggctttaccatttcttccataggtgctaaaatgccattatttaattattattcttgctgtgtcagttcaaataa

SEQ ID NO: 67094 - DNA, 1051 bp, Homo sapiens
actttaataattgtatttttttctattcagaatcatatcttcaagtttaaattcttattacttgaaaacgaatgggacttcacatattgtttctctaagcaaacaaaaagtattgacatgtcttttagttgcatttaatggtaatgtgacaggagtatgttatctatgtactatgcaaactattacgtaattattttaagatgtttagtctggttcctcaggtggaatctggtctagttacccttgtcaggtaacctgcaaatttacttgaagctacattaaccactgttgagctttgactctgagctgcatagtggccaaagcccagagtcttcatttctcaatcagagcctgaaccacagattagcaacaagttggggccagtggtatctgctgactattcctgcttgaccttcaatgctgttcctcagtttgtcactaaaatctcttcatttttaaatacagaaggcataaatattccagcagaccagccaattactaaacttaagaatttagaagatgttgttgtccctactatggaaattaaggtaatttgcaattaactcttgattttttttaaactaaattttttttattagattgaaccatttgaaatagtatttttatgtaggtcaaaattggttaaatattggcaaatttcatatgtttcaacctataatttctcagtattatatttcctttgcccaagccctaaaatactcaaaagcttctcctgctttcttttccattgccttctgttctacacctcccatctttcttatgaaggtctatagactgttactttcattggccagaaggagagtttccgtgtgcttatgccaagattaatttttgacttggcaaggaaggttccaattgtcatatattgtttttaaaaattctatgtgcagtaaaatgtattggctgtgatatatcacagtattaagtaatatagtatgtattattataatattaagctgacttcatatgcatgatacacttagctctgttctaatattcttttattgcaagaaataatggaagtaatttc

SEQ ID NO: 67095 - DNA, 1084 bp, Homo sapiens
cttacaaatgaggaagatttgtagagtagaaatgcattattttctagaaccaggcttttctccattttttttgtgtctctgaaagacaatcattattatatggttgattcaagtaaaagaataccattaacatgtacagacatgtacagtgaggttgcttcttatgaaaaaaaatactttggtgtctgtctcttatttccttgaatagtgcaagttgacgtcctttgcatcagtataccgggtctcgtactgtgccaagtgctatttaatgtaccaaaaagggagagcattcttcccttaccatttgctgacgagctctttgggtcctactggggagtggtggaaagacacagtgctgttttactcaggtgtttgcagtatgccttcctaggggggacttccagttaatctaattacagaagtagcgaggggaaactttctaaatcagtgtaaatgttgtagcttattctaaatgaaagaatggcagtaggtatttaattatttgggagactgtcaagaggtgcacagatgctcagattggtttgagtgccctttgctattctcagatgactctgtgtttttataataaaataaactgtacttgtttattcatgcttaattattctgaagggccgtgatgacctgagacaagatgctgtcatgcaacaggtcttccagatgtgtaatacattactgcagagaaacacggaaactaggaagaggaaattaactatctgtacttataaggtaactatttgtacttctgttagttcaccaaaaacatataaaagatgccatttggttgggtgaagtggctcatgcccatattcataatgctttgggaggccaaggtgggaggattgcttgaggccaggagttcgagaccagcctcagcaacatagtgagaccccatcttgacaaaaagttaaaaaaaaaaaaaaagccagagatgatggcatgtgcttgtagtcccttagctacatgggaggctgaggtgggaggatcacttgagtccaggagtttgaggctgcagtgagctcaaactctgcagtgagccccagtccagcctgagcaacacagcaag

SEQ ID NO: 67096 - DNA, 1020 bp, Homo sapiens
aacaaaatctacttataaaatggccatgtactacaaatgtgtatagcagctttattcataatagccaagaaccggaaaaatccagatgttctacagtgggcaaatgcttaaacaaactgtgttacatccatgccctgaaatactactcagcaatgaaaagaaacagaactattgatatacataacaatttggatgaatctccagagaattaggctgagtgtaaaaagctattcccaaaaggttacatactgtatgattattccacttccatttatataacatacttgaaatgacaaaattataaaaatggagaacagattagtggctgctagaaaaatagggggtcagagggctgggtgataggctatgggagggaaataggtgcagccgtaaagggcagtatgaaggatccttatgataggaatattatatatcttgactgcatcgatgtcagtagtagtatagttttgcaggacattacagttggggtgaaatggggaaaaggcataagggatgatcttttctgtatgatttcttacaactcgaagtgaacatataattatctcataaaatgtcattaattttttttttttgatggagtttcactcttgtcgcccaggctggagtgcaatggcacgatctcagctccatgtatccttcacctcccaggttcaagtgattctcctgtctcagcctcccgagtaactgggattataggcacctgctaccacacccagctaatttttgtatttttagtggagacaaggtttcaccatgttggccaggctggtctcttaactcctgacctcaggtgtcaggcctcctcagcctcaaggtgctgggattacaggcgggagccaccacacccagcctaaaaattttttaaatataaatatatcatctccattttaaattataccagtagttacttcatttttaaaaatcaccctttaacctagatttctctagttgggttaagaagtagttaggttatttggatttgaggtggatctcacagac

SEQ ID NO: 67097 - DNA, 1074 bp, Homo sapiens
gtgatatgaagtaaaggagggaaataatttttgatgtcaaaattacatgggctgggcatggttctttgcacctgtaatcccagctgctcaagaggctgaagtgggaggattgtttgagcccaggagtttgagtccagcctaggcaatacagcaagaccctgtatctaaaaaaatacacacacacaaacacacacacacacacacacacacacacacacacacgggttagagatttgtatagattatagaatttagtgctagaatcgtattccagtgccttatcaatactaaggaaaagaccctgggtaaaagcaataatagttcctcttccttccacccacctgggacctaagcccatgtaacatacatactgttattccaaacctcctctggaagcatcccacctttacttttaacacctctatcctggctgactccttcttaatgatccaaactactattgggtgctcatcactgtgcatatagaagagactacatttttatttataggagcttgtgttctagtataacattgtgctactaaaaaagctttgcagttccttgtagttttcccagcataggtctgtgtactcaacttggattggggcagattgcagtcagtgtaaactaataattgccacaataatcaaagactgagagctgagcccagtggtgcatgcctgtaatcaatagtgttgtgttattcttgtaaatgccaagcttgtgaaatagtcaaatacatatttgtattcatttcaaacgtctaatgaaagcccactctgccaagtattatgctattttgagatacagatatgtagattattaagcataggctcagcatactacacatgagagtatacagataaagatacgttgacaacattggtgtgtaacaaaatccgtatttataatgtgtttgactctagatgctgtgagaaaaccatggaagtgatgagaaactctcaggaaactctgttaaccattgtagaggtaaagtattttataaggaagactttattttttttcttaccaggtagactgtgtatctcatcaggaagtcactgatgtgaagag

SEQ ID NO: 67098 - DNA, 1053 bp, Homo sapiens
ccctaaccatggaggaagaatgaattcagaatgaaatgagaagcttggagcattatgctaggatagtttcctcaaggaaacatgaagtgtgcatgatgtttgttcccctcccccatcaactaccatgtgactggcttatttgtatgatactggttctactgtttctaagtatgtgattaaaatgtacattgttcttttaatacatatgttctctctgtttaggtccttctatatgatccactctttgactggaccatgaatcctttgaaagctttgtatttacagcagaggccggaagatgaaactgagcttcaccctactctgaatgcagatgaccaagaatgcaaacgaaatctcaggtgagcagtattttaagaaggtcctgttgtcagtttttcagattttcttattcccaaggcctttaaactgttcacctcactgaaacctttgtgtttttgtccttagtgatattgaccagagtttcaacaaagtagctgaacgtgtcttaatgagactacaagagaaactgaaaggagtggaagaaggcactgtgctcagtgttggtggacaagtgaatttgctcatacagcaggccatagaccccaaaaatctcagccgacttttcccaggatggaaagcttgggtgtgatcttcagtatatgaattaccctttcattcagcctttagaaattatattttagcctttatttttaacctgccaacatactttaagtagggattaatatttaagtgaactattgtgggtttttttgaatgttggttttaatacttgatttaatcaccactcaaaaatgttttgatggtcttaaggaacatctctgctttcactctttagaaataatggtcattcgggctgggcgcagcggctcacgcctgtaatcccagcactttgggaggccgaggtgagcggatcacaaggtcaggagttcgagaccagcctggccaagagaccagcctggccagtatggtgaaaccctgtctctactaaaaatacaaaaattagccgagcatggtggcgggcacctgtaatcc

SEQ ID NO: 67099 - DNA, 1192 bp, Homo sapiens
tttcccctttcttgtaagttctgctatgtatttaaaagaatgttttctacattttatccagcatttctctgtgttctgttggaagggaagggcttaggtatctagtttgatacataggtagaagtggaacatttctctgtcccccagctgtcatcatataagataaacatcagataaaaagccacctgaaagtaaaactactgactcgtgtattagtgagtataatctcttctccatccttaggaaaatgttcatcccagctgcggagattaacaaatgggtgattgagctttctcctcgtatttggaccttgaaggttatataaatttttttcttatgaagagttggcatttctttttattgccaatggcaggcactcattcatatttgatctcctcaccttcccctcccctaaaaccaatctccagaactttttggactataaatttcttggtttgacttctggagaactgttcagaatattactttgcatttcaaattacaaacttaccttggtgtatctttttcttacaagctgcctaaatgaatatttggtatatattggtagttttattactatagtaaatcaaggaaatgcagtaaacttaaaatgtctttaagaaagccctgaaatcttcatgggtgaaattagaaattatcaactagataatagtatagataaatgaatttgtagctaattcttgctagttgttgcatccagagagctttgaataacatcattaatctactctttagccttgcatggtatgctatgaggctcctgttctgttcaagtattctaatcaatggctttgaaaagtttatcaaatttacatacagatcacaagcctaggagaaataactaattcacagatgacagaattaagattataaaagattttttttttgtaattttagtagagacagggttgccattgtattccagccttggcgacagagcaagactctgcctcaaaaaaaaaaaaaaaaaggttttggcaagctggaactctttctgcaaatgactaagatagaaaactgccaaggacaaatgaggagtagttagattttgaaaatattaatcatagaatagttgttgtatgctaagtcactgacccatattatgtacagcatttctgatctttactttgcaagattagtgatactatcccaatacactgctggagaaatc

SEQ ID NO: 67100 - DNA, 1037 bp, Homo sapiens
gcatgcgcctctgtgcgtttgtcccatgctggttccgtgagtctggccttaggtgtctcgtgtctggggttgatccgagctgtcgccgccgccgccgcaatgggcaaaacggccaactctccgggttcgggagcccgacccgacccggtgcggagcttcaatcgctggaagaaaaaacacagccataggcagaacaaaaagaagcagttgaggaagcaactgaagaaacccgaatggcaggtcgagcgcgagagtatcagccgcctcatgcagaactatgaaaaggtgaggccggcgctggggagggggctcgggccggccagcagcggggcagcgtctcactgcggcgaggagttgcagagtggaggcggcggatctgtcaccgggacccggccgggaatgagaggtcacgccgggtgccacagctcaaacctctgcaccgttctggccactcttctgcttgccacactgttcctaaaaaaataatagaaatgcggccgtacctaagggtagggagactaatgctgtaatagctacagtcatattcatattaataatactgatgacaatagtggtaataatgacacctacatttttaagcactcaccatgtgcttacagtaattgtttgacttgatctgaggtatggatattaataatcctatttaacagatgagataattgaggttctaagaggaatgaaacttgtccgaatctttcacgcttagtaggtggtgtggaattggaagctagatccatgtctttctaatcccaaagcctttgcttttaaccatgaagccagactgcatccctcaacatcatctatgctccttcctgtggccacctcattttctccacaggcttcatgtccccatccaagaattggcctagaaaagctggaccgctggtctgtttctgtcacctatcatccccacattgtagctggtgttcccagatgagtatacctgtaatgatcactttgacctcctgacttcttcccccaacctccagactccacaggtctgtcaattcctcttt

SEQ ID NO: 67101 - DNA, 1026 bp, Homo sapiens
taggttgatttcatatcttggcttctgtgaataatgctgcaatgaacatgtgagcacaaatacttttcaaagtagtggttttattaataaaccctttggattatacccaggagtggagtaggtggatcacagaataacttgtctctcttcacatggttttccctctgtgcatgtggacccttggtgtctctttgttcaagtttcttctcataaagacaccgtttgtgttggatcagagtccacccctatggggctctaacttaatcaacctctttaaaggccctgtctccaagtatagttatgttctgaggtacgaggcattagggcttcaacataggaattttgggggacacaactcacttagcctataataccatcctacagggatcttctaaagtataattcttccctccatgttgccaggtttgcaagaagctcagtaccgtttggtgactgagatacagaagcagaccattggattggctttgcaaggtaaagatgtacttggagcggccaaaactggatctggcaagactctggcttttcttgttccagtaagtacattgtcattgggtcagactgtctgttatacaattttataacattctgtgcccagatgcagattatataaagagatgttttcatgttagatttcatgatagattggctagaatgcgagcttcatcaaacaggagccacatgtgtgtcttgttctcaccattttccccaggttctagcacagtgccttgcatgtggcaggcactcaataacttactgaatgaatgaactattgtgccttgacaagtcattacattcttgatggaagtggagtgctccagtatggcaggttaaagtggttctgtgctgcagtaggactggtgggagacagtttctgctctcacccttgtgagcctgccagtggcatttatacttgccaccttgtttaggataaagctgaaatatgctcagtttaaggagctttaggcatttgttgagaattttctgggacattgctatcggtctttt

SEQ ID NO: 67102 - DNA, 1911 bp, Homo sapiens
agatttgccacatacctgctgtccccatgcagcctctgccattatcaacactcttgctagaatggtggtgcatttgctacaatggatggacctatgtttttgcatccttatcacccaaagtctgttactttagggttcactcttggtgtggtacagcccattgatttggacaaatttatgataacatatgtctactgttatagtatttcacagtatattcactgccctgaaagtcctctgtgctctgcctattcatttattcatctcccctggcagccgctgatctttttactgtctccatagtgtcatcttttcagaatgttgtatagttggaaccatacagtatggtagccttttcgtattggttgctttcacttaatattacgcatttaagattgctccatgtcttttcatggagtgatatgatagctcatttcattttagcactgaataatattccattgtctggatgtaccacagtttatttatccattcacttactgaaggacatcttgattgccttcaagttttggcaattatgaataaagctgcaataaacatccttttgcagatctttgtgtggacgtatgttttcaactctttttggtaaataccaaggaacgtgatagttgggtcaggtactaaaagtatgtttttttgagacagagtcttgctctgtcgcccaggctggagtgcagtggcataatctcccttcactgcaagctctgcccctcgggttcatgccattctcctgcctcagcctcccaagtagctgggactacaggtgcccgccaccacgcccggctactttttttgtacttttagtagagatggggtctcactgtgtttgccaggatggtctcgatctcctgacctcgtgatctgcctgcctcagcctcccaaagtgctgggattacaggcatgagtcactgcgcccggcctcaagtatgtttggttttaagagactgctatactgtcttccaaaatggcagtatcattttgcatttctgccagcagtgaaggatagttcctgtggctccacatccttgccagcgtttggtgtcgtcactgttctggattttggccatctaataagtgtgaagtgacatatcgttattttaattaacttttgcctgttgacatatgatatggatcatctttaaattgttttttatttttttgagacaaggtcttactctgtcacccaggctagagtgcagtgtagcatgatcatggctcactgcagcctcgaactccctagcctgaattgatgctcctgcttcagcctcccaggtagctgggactataggcacatgccaccatgcccagctaacttttgtatttttttgtagagatggggtttcaccatgttgcccaggctggtgtagcatcttttcatatggttattttttttatctacatatcctctttggagaggtgtctgttaagatttttggcctccttcccccttttaaaattgggtgtttctgttcttattgttgaattttaagagttgtttgtatattttggagaacagtcctttatcagatgttttttgcaaatatttttctccattccgtggcttatcttctaattcttttgatagtgtgtttcacagatcagaaacatttaattttaatgaagtccagcttatcaattcttccctttgtggatcataacttagtcatatctaaaaccagttgacttgtagtttttggtttgtctgtccctcctccttttttctttcactgtaaacacagacacacatgggtgggcatgtatatggatatataatgtatagccccctgataaatagtaccaaactatctgtactattctgccccttacctctttccttaacagtgtgtcctagacatcactcctcagcaatatatggatagaatcttcatt

SEQ ID NO: 67103 - DNA, 1046 bp, Homo sapiens
tttcttaggtattatgttaagtgctaacaatactggaaatgtagtcctcaataaatattagtagaatgaataattgttatccaagctaagcagaggtctttataatctgatacctcccttaccctccaagaatatgggaatgaatataccatttatttccatgccgtatatctttgtttatgctgatctgtctggaatgccctccctgcatctcttcatctaaatctggggaaatacttactttgaggctaagttcaaatgttatgcctgaaagtccctttctgacactccctttttaaagaatcagttgttccctcccctaaccttctgaagtgttttgtttatatcttagttaataaacacttcttgaacactagccctgtgctaggaataaagaataaggatttcagagatgtctaagagaactttgtctcctctcttaaggagaagggactacggtctttgtgcatgtgtgcgtgcgtgtgcctcttctcctgtactatatttcagattcccaatgacttaatagggaatgtagtagatcaattctagatttacagcttttgcaataactttccatgataaatatgtagatgggtttctctctagcttatgggaagttaagtggtgatctgatgctgttgtctactgaaccttattttaccatgtaaagaatgacttcagccttggtgcggtggctcacgcctgtaatcccagcactttaagaggctgaggtaggaggattgcttgagtctagaagtttaagaccagcttgggcaagatggcgacaccctgtctttaaaaaaaaaaaaaagacttcagtttttcaaggaccgattttagattttcaaagcttccagtctcctgggagcattcctcaaggcaacttggaagtgtatcctgagcagtagccaacaacaaaacaataaacttcacatctcctaaagaagagttagttggttttggcatctaggtgctaggaaatgattctgaaagttctatttaaagttctgtttaaagtttctactctttagagtaggagatgg

SEQ ID NO: 67104 - DNA, 1043 bp, Homo sapiens
agatggactatttattcagttttacatttttgctctgttttctttctcatcaaaactggatgattgggtatttatcatatggattccaggattggtctaactggaccaatggttgcttccaatttcatgccacaaactcttctcaaaactttcccagggatgtgaggatctttaggcccgagcacagactgtcctgtttggcaggcttgctttaccacctgccctgtgtccacttcagcaagtggccccaagtatgaaagtgtacgctatcccttgcttacctaggaagtccccttggcgtttagttcttttagatttctatacatttatattttttgggtagctttgaagaaaatttttttgtttttgtttttatgtggtcactttttgtttcagctgaagtgaaggtttttatgtctttttatagcctagcaagaaatagatcttcttaaaattctatttaattttcataagatgtttgaatgtatgagtgtttaagtgttttttttttttgttttttttgattgattcatgtttatcctgtgggccatctttaaacgtggtttataataaaaatgcactcaaattaaatgtgcttcttttgaccagcatgaaagaagggagagaacagtataataatgaaagactatttaaaaataggatttatgaattagtgggttcaaaaataagtcttttaattgcaattaatgatgtagttttaaacaagcaatgcagttaggattaggttttgtatatgatactgtacatttagacaaacttgtttttagaactttctttcttcttggaactaactaaaatgggacatgggtagaatagttgcctgttctccatttttatgagggggtagatggtgcctcattggtctttaatgtattgagtacatggtttttgttttgttctgttttgttttttttgagacagagtgtcgctctgtcacccaggctggagtgcagtggcacaatctcagctcactgcaacctccgcctcccgggttcaagtgattctcctgcctcagcctccca

SEQ ID NO: 67105 - DNA, 1033 bp, Homo sapiens
cctaattctgtattaattaattttacctttctaaattccttttgatctatagcagttgagaaatttccctgtattttccttaaccagcacaccccttttaacaaaatgatctcctttagagataagtgaggccaggtatatgaatatagttttataatgctctatcctgtgatacattctgtcactttaaaaagcaattctctttagggcttatagttcttttggtacaaaaccaagctcttccagtttttataaaaatgtccagttgaaagtagaaaatatttgggaatggaaaatagacatcagatattctcaactttaaaaaatgtttttatttggggagggtaggggagggttgtgggtagaagatgggcatttatatataactatttttttcccccagaatagtagaagataaaataatttcagcaatattctaatttagccttatgtgcctggctacattttgtggcgctcagaaattctgtaacataaggagcagaatgtgattccactaggggacagcagaggccaaaccttagcattgcacactcactggcagcagcttagatcttagaaaagaggaagatggccactagttaaaatctgtaataacttctgaagagttcatggctggttgtgggagaatactggtactttatggaatagctaatgagaattttttaatagtgtctttaattggtttgtgaattgaaataataaaagtaaaaagacagttttcatgagcattaactttccaaggcttaccatgtgtaccttagatataagataggagcaatctttgttagtgaaaatgatttctttaattcctttagcttacatttgtgaaggtctgcagtctgctcctcgtagatagtggctgatgcttctttacgtgacctgcttttgttggtatctatgatttaaaggttgcataaaaggtcacagcaaatttattttgcatcttgaagcaatgaggagctgggggagagtatagccagtatggctgtaggagtagataaggagggctgat

SEQ ID NO: 67106 - DNA, 1050 bp, Homo sapiens
ggtgagggaagagaagtaacatggattggaggcaagcattttacttgaacagttctatttctttcttttttttttgagacggaatcttgctctgttgcccaggctggagtgcagtggcatgatctcagctcactgcaacctccatctcctgggttgaagcaattctcctacctcagcctccctagtagctgagattacaggcacctgccaccatgcccagctaatttttgcatttttagtagagacagggtttcaccacgttggccacactgatctcaaactcctgacctcgggttattcacccgcctcggcctcccaaagtgctggaattacatgcatgagccaccgcacccggccgaacagatctatttcttataactaatgcttcagaacaattttacttccaaggtgtaaataaaatccccaggaagaggaattgatttttttttaaaaaaagtatatattgggtgctgtatttattcaaagattaactttattatgatcctctagtggcttgagtgagaaattgtctccttgttatatgggtagagagctatttaagaaaatctctttaattgatttctttcttagaatttagatcatcatctgtggaacagcctaaaagtcactgggaatgataactagtgatgaaaatgatatgaggtgttcagagccctagttttctgttatcagagattaaaagccagtctctgacatttatggttagacaaaaatggtttccatgtttacctatgcatcactctgttaaaatgtaaaatgcagattgcattgatgtgttaaagattttgtttctttttgtttaggtacaaagaggatggtgaagctttgctaattttgctaccctcagaaaaagctatggtgcagcagcttcttcagaagaaagtacctgtgaaggaaatcaagtaagagctacttgttgtctttatgtttttaggaaaatgagggcatgaaattgtttgcttaattatgtgcacctaatttgccccttcccctaatttattcaactgcctggtttgacttttataaaaa

SEQ ID NO: 67107 - DNA, 1012 bp, Homo sapiens
acttggttgagctcctggagtaaaactcatgagtgtggggctgccttatgaatgggtcctcctggagtttttatttctcagacttgtccacattgaggctccagcaggttttatcaattacagttgagggtctctcacccaggcactgcctcccccagttgtttctgctcatgactcagctcaagtaagctgtgatccctgtactcacctctctctttcctgtgttgggactgtggtttgtcctgtgttgtccatctttatcatggataaaagaagagttttaaatttttttttccaatctgttcagctttttacttattgttatgatggagtgatgacttacaagctccatccatagggaactggatatcagaagtctgactcttttttttttttttttaaagtcttaaacggccttttctgaagactattagtggagaacatgagatggagaacttgttaacttcaggaagcactgatgattgaaagaatgaaatctcttggatggaattacttttggggttgtctatccatttcagagagttgtgatctcctgtcactaaggatgtgtacattcagcatcagtgggatccatcagaatcttacttgtattggcgctgttgaaacaccctggcttgatttgcctaaaaataatttggagagtggttagatttggggaggagagttgaggatgtagaagagacaaaactggctgtgacttggtaattgttgaggctgagtgaaagtctctaacttttcttttgtatattttgaaattttttataataaaaataagtaaaaacaatctcacctaccaccacctatcaccattctggctttgcagaaacaacgtggttcagcctaaaatcagagaaacaatgaggtctcttttgtgaagcctagacctctttaaaattttttttttctttccctgtagcttatctgggcagagttagatatcatctctgttatagtatgcctaatttctaaataaggaaatcactacaatctt

SEQ ID NO: 67108 - DNA, 1034 bp, Homo sapiens
tactgtgttatatcaggagaaattaattccaaaatatgagagcatcaaatggtaagctataccaagttggacttctataagctcactttacctgagaaccttttcattaaaggatctttgaacaaatggttaatattcatttttcttaaaaatgaataggcatgcaaacatgtacattttttttctagcaaacatccttcaaacttgcagttgaaacctaggagctttggaagtagtacacacatttaaaaatattagattaattttggtatgtcatgacttactgcatgcctaagaggtcattcagttatctatcagaaaatatgaaacattggaaagatgttttttcactggtttgtgcatacaacggatgagccttccagaacactgattatagaaaagtgtgttgaaataaatgatgtgatttattggttgtcacgcatggtttagcagaatggccaactgtgttgccagcagcagcaagctatctagtttcatagaagtgattttctaggttttgattataatctggatagaacaaaagtgataagcaactgaggtgattgcttgtggatgattgtaggggaaaaaattatttttaaactggtgccattcattgttttttatgcctatggagacagaaaatggtttggagattagttgggtagaaaggattagtgtaaagctagataaaacatgaagtttaggaagtatgcaaacaggaactaaatatactttacaaaagtcaacttaaaaaattacctagatgagttttgttatctgtgtatttgacaaactgataaaggatcaggaccctgtttatattctggtttgtgtaactctagtatgaagatagttttttttttttttttttttaacagaaacaaaatattccaagttaatgatgaattacttgaaatcataaaaaagaaaagctttagcaataaagtttttcctgaaatggttttattaaatctcaatatgtaaaattttatttaattgaaaaccttatcttttgatacaataatacaaaa

SEQ ID NO: 67109 - DNA, 1576 bp, Homo sapiens
ctcagtttctttgaaccatgtcagataggaaaagagcagtgggtccatgttatgatgttactgtttattcagagcaatccttgataaaatctaagattttatttcccttcgatcattgagaacttaatgaagctattagctttgatccaagctgggaaagacatgataataaattgaatattgatcattgatggagaaaacaatattttttaatttctttttttggtgtttggtttataaaatccatttttatagcaatgattgtgccatattctcttttaggaagggagatggggaccacattccagttctttctctgtagagaactgttttgtcctttcatggtcatgtcttctctggtttatttagtacttaacattttatgaggtactctcatgtagttagttaattggatccttacagcaactgtgagttaggcctggcaggtactgttatccccatgttataaggaagctgaagctgagagggttgaattggaaattggcaggtctagtacttgaactgttatcttgtttctggtccagtgctctttatcttattccatgttaccctcttaaagaaaaaatagtgtctaaaatgttttctgacaggtgttgagtgtattttgccttactttttggatcaactaacctgttagtattgagttgtatctcacaggaacattttctttaaaaaagctctaggaatctctgctcttgagaaactcttctatgacacctataaacatatcatcagtgttgagatgactgttttcacgtttttccatatttaaggtctcttggtcttgctgtggcaccacgcgtaagatttcttcagaaaatgcagaaacaacccaccaaagaattggtaaggagccaagccgataaagtaattgagccaagggctccctccctcaccaatgacgaagtggaagaatttagagcctacttcaatgagaaaatgtccatccttcaaaaaggtggaaaaagactcgaagggacagagcacagacaggataatgatactggtaatgaagaacaggaagaagaagaagacgatgaagaagaaatggaagagaaactggcaaaagcaaaaggatctcaagccccatctcttcctaacaccagtgaggcacagaagatcaaggaagttcctacacagttcttggacagagatgaggaggaagaagatgctgatttcttgaaggtgaagcggcataatgtgtttggattggaccttaaagacgagaaaacattacaggtaagtttactcccagtggagggtcttctattacattgtcttactatgtgcttattgttgccttttggggactgagagaaagtgaaaactaagaaacttagactgggtttctttgcaatgaactcttcctcctttcccccatacttaaacacagaataagtgccaatgaattttcatatttttcataactttgggagctctaagaggttaacaactttaatcttatttactggttttctgatgctgtgttttaaaagttgccaaagtcctgattaagtctcaaaggaaggcaatgaagttttttggtttatggcat

SEQ ID NO: 67110 - DNA, 1134 bp, Homo sapiens
attaagtatttaatgatcatttaaagcgtgcagaattttaactagctgtttattttgatttaagtagaattatttgcaaacattattaaaatggccatttatcgtcttgttgcaaagcttttaagaaacttaggtaaaacaagtgtttatagctgtattttactgaaattttacatgtaattttttggcacttctagtatgatgagcaatactataagtactctgtaaaaatgatttttgtcttgggcttgtaatttccttttctaaggaagaaaatgattagaatcaagtatgatcaaagctaaaattaaattgcaaaatctgtataaagtacagctgttgctttgaatgttgtggttgtcctttgagctggtgctgcaaggaaaaaaatgaatgttacagttaatggaaatgagaagccattttaagattctgttataaaagatttcatttgagaaactggttgttggagagtgtcattgttttcttctttgggaaacaatcaggaaagctaacctcaaaggttttttattttagtatgtttagcagttagtgatgctatagtacccactaccagcttatttagtactaaataggcaggtgtgatttaaactgaaagacagttatatagttgacttaaactgaagattcacttgccaaatgtcataataggaagataatgggaaatatgaatcttaagttatcttctaactagttattaggttattgaactactcacacaattatgctgtaaatcaatttcccttttgtacagaagttcccccaactctctttcactctcaccctcttcctcttgtcacagacccccttcagcagtctgataatgtctatggggcccttcttagagtaatgtttctaatgtgtaatatatacattggattagttggtaccacatttatagacttctcccacctgactttaatatattaactgcagattaagaggttttgttatggtacgaattgaattagatagacttttcttatatatatgaatttcatatatattttatatctatattgtatatttaacttttttctttttttttgagacagggtctcactgttacctaggctagagtacagtggcacagttatagctcactgaagcctc

SEQ ID NO: 67111 - DNA, 1033 bp, Homo sapiens
tggcttctttcagaagtccccttcattgcagcctcactaaagcaaataaggtagtgttctcatgtttcagaatatctgtctgtgttccttgatggttcatgatgcccattaggcttttggctagtcctatggtgaataaaatacagttcttacgttttagtaaattacagtcaacatcgagtcatgtcttgttatcacatacttttggtcttaattgaaggctaatacattatgaagttatttgggtagaattatctcttttataattcctcagacatcctgacacacaatctttcctgacctgggaaagatctgaaaaacaaatgcagtaaacccagaacagatgattgtagtctgagtctgtgttaaacttttcactttaataggttctccctgtggagaggacaggggaaggcgctgctgaggaaggcgctgtaaagtctcccttctctccccacaaataattcctcaaaccaaatcatcaacctgtctgcagtctccttcacctctgtcttcttccttatttcctctctctctgcaagaaatgtttgttctcttttccaagattcacgttgcatttcaaagtttccgacttacaaaaactgttaccaacttttgtgtatctgtctgtgtaacataagctacacctgttaattataattttatgtaattatccagctaaaaatatttactgttaaccatatttttctagttttggagactatttatgggatttggaaacagttgtgtgcacatgtcacacttctatttattatgataatttccatacttatcaaggttcctaggttgcaatagctagaagcactgtggccaggagtgctcccaagggatttcctgtaaaagcacagttaacttccttggtgtcaaccttaaaaattaagccaccttaataatcaagcttttttccatagtcttgtgattacgcttagatgtgactagacccttcgactacatttttccagaaccacttgttggttgtcctcttgaaaacttttttccctctgaccctaat

SEQ ID NO: 67112 - DNA, 1154 bp, Homo sapiens
aatgaaaataattttcgagttctcatcacttctgcttttattatggagtgtgttataatctccaaggacctggttagttttctgccttttcttttcctaatggcaacagtacaagcatccatcaaaaatgagaaccagggcatgagcggatctttttcaactcagttgattactcaaagcagggaagttgtaaaggaagcctgcctctgttttaaatgttagaaaaatgttaatattacttgtgtttttccttttggagaacagtagtagtctagaggcagcgcctctaaattttttttgtgtggcctatgagttcgttttgtgtggcagtaactatttgtggtcctctttgattcaggactctctaaatggcttttaaagactttaaacttcaaatcttttctattacaacattcccttggtttcgtatgcagttacttctggcttggtgagacagttttcctatcattgtgttgtcctcagtgattattgattagaactcctttgttagctgggcagctcagaaaaacatgtggggatcactgtattacagagacaaggattgtagaaaaagggtcaattataaatttgaatttgttttccttgtaagacatttagtatccctaatgatggtgtttctactccaacttacatatcttttggcctctgccatttgggtcaccagagaaagtatcttgtaagaagtaaaactaactggtagcatggagagctgtactgtatactcaatttcctgtagtgtacattatgtggaagaccatacgttactgccatgggagatgtattaagaatggaaaataaggtgtagttgtaataaatcattaagtaaatttatataatattttctacactaatataaatatgaaaaatcaaagtttgagttactgccctcattaaaaatgagtacagttgacatttattgtttagaccttgatcaaattgctatttaagcttctaaacttttaatttctattgtgatctaatagctgacaggaggaggttgaactagatctcttaactcccttccttgctctaaaattctgatgccttggggtatttttattctttatggtttgatatgattcccttgttattgaatgcagtgctcaaatacagcattgacaaaacaggcatct

SEQ ID NO: 67113 - DNA, 1007 bp, Homo sapiens
ttggatagaatatttatttttctatttactgagtggtagatatgatagtctgctgaaagggttaggtcttggcttttgtgatctcaaccatccaaagaagttctttaggagaactctgatcacttcacatctacaaagtgttctcctttttcctaaatgtgaattccgaagtccttagcatgctttatgatctgattcaaaactaaatttcttattctccctttcaccagattctggttcactcgtcactcactttcacccctccctgcatccccatcaaatgactgagaattttccagatgtggcatttatattttggccttgtcctaacataacaaacaatctctcttcctgtgataccatattcttgtttctttgtatcgagtggaatttcactagttgattgcagcctttgtctgccagggttcttcatctgaacctcactcagacaatgattatttgagtgactgttttcttagttttcccaaggttggtacatgaatgttaacattctagatgtggaagaagttaattcatgaccttcaatggttgctttagggcattaagtgttcattttcttgcagacttcccattgagaaaggtctagtctgagtttgtttccttcttttgaccttgcgcagatttcatcctcctctggaatgtttgttttattgttattacttgtttgtattatcagcttttccaccagactgggcatctggagaactttgtcttatttattcttacatcccaggattcagcaccatgcctgaaacagagttgatgttcagtaaatcttagtggaatagattatgttgacttcctaaaactagttcagcatgacatagttctagttgttcatttccctttttttgttgttgttaagagatggagtctgtctctctctgttacccaggctgaagcgcagtggcaccatcatagctcactgcagcctccaaagctcactatagcctccaattcctgggcttaagtgattctcccacttc

SEQ ID NO: 67114 - DNA, 1034 bp, Homo sapiens
acatgcctgtaatcccagctactccggaggctcaggcaggagaattgcttgaacccaggaggcagaggttgcggtgagctgagatcacaccattgccctctagcctgggcaacaagagcgaaaaaaaaaaaaaaaaaaaagaaaaaaatctttgtttttcctgatctttgctgtttttcttcattatatctctgagacatacatatgtaaatctaattaatctattgaattcatgtgaaatatacttaaagtgtaattttatgtcctttttttagataagtaaatttcagatactacttttagcagaacacattttttaatgtgttggttataaagtgatctgtaggtaaaggaatctgaaaaagcaaatgctcatgtgttagaaatgagtacctttagttgcctctggactgttttctttttgctatcctatgagggttacatgaaacaatcccattcctttgacatttcctcacttttgggttctctcatcccttttagagtaaggcactgctgattaggcctgtttccagggcaatttcttgctgctctcttatttttagttttgcttgttttgttatcataggtttgaaatgtaagtaagcggctcagaatgacctggttcttgtagctaattcagtaagcatttattgagggcattgtacatcagtccaacaaagaaagaacacatcaaactagagagcagttccaagtcaacttactggtaacctgttgtataaaaagttactacaaggccaggcatgttggctggtgcctgtaatactagcactttgagaggccgaggagggaggattgcttgagcgtaggggcttgcagtcagcctggtcaacatattgaaaccccatctgtacaaaacaataaaaaaaatttgccaggtatgatggtgtgtgtgtgtggtcccacttagtttgggaggctgaggtgagatgatctcttgagcttgggaggttgaggctgcattgagccgattgcacaactgcattccagcctgggtgacagagtgagaccctgtc

SEQ ID NO: 67115 - DNA, 1089 bp, Homo sapiens
cagtgctgagaaactgatgtaagtgaaaggttgaccttctgtatacacaggttttatatcctgcagattccgtatgatttggtttgaaacaatctgtgtataagtggaccctcaaaagtcaaaaccatattgttcaagggtcaactgtgtacttgtataatgtcataattaagagcttaaatttaatgctatcatgtgtcccatttgtataaatggatatataacattctattcagagaacccttattaaaatgctttggatttcttttgattttttttctaataaacacagtgataagaattctttataatccttaaatttctggaaaatgtaaaaattgatgactagatattcattctagtattttaaagtaacccattatatagctaaattttagactcaataacactagattgaaatctggaccttcatcatgaaagtcagaggatgaggaagagaattccttgaatgagtaacttaaacagttttcactgcctcaccttaagttttcttttgaatctattcaggtcaggtttttgtccctgccaatctgttgaaacttttcttgctatggtctggaacagttcccattttgctaaactcaaggatgaacatcttaacactcctagcaactttttttttttttggaattgccctcttcccttagcttttggcatgccatactattcctggatttgttccagctttcactggttgttctttcttggttgtctttgctggttcctcctccttttcccatctttaaatgatgggggaatacccccaaggctttgccttatattctaatctccatctacgtatgctccctaggcaaatttagtaagaccttttctttaaaactcatatgctaatgaatccaaatatatgtcctgagcctgttctactattgtaaacttcttttaactagttgtttaatatctcttggatatttaataccatttattcagtcacttcggactcagaccaagaacccgtgagttttctctaaatcttttatctcccagatctacccctttaaggagtcttgtgtacttcaaaatatatccagactctaccacattgttcac

SEQ ID NO: 67116 - DNA, 1035 bp, Homo sapiens
cactgcaacctctgcctgccaggttcaagcgattctcctgcctcagcctccccagtagctgggattgcaggtgctcaccaccacgcatggctaatttttgtgtctttagtagagatggggtttcactatgttggccaggctcatctcgaactcgtgacctcaagcgatccacctaccttggcctcgcaaagtggcatgagccaccgcacctgtcctgggacttttaacttagctcattatcaccttgttgcctcccctatgtgatcagtttcccttaaccctgttagccaaatgaccatgtgacacaagttatctttacttttaatgttactgctttttattttttatttttatttttttgctatgtagcatataaaatttctgagttctagaagaattccaaaagctgtagagatgagaaattgatatagccaatttggacacaagttaaaaatgaaatcaatactgtcatttttttggaaatctaaaaagagagggaaaaatgtatcaggcaccgtttctctaaattgcttccagctgcttgcttcctaatatagaaatatttattaaaagtagcaggttaaaaattggattcctacagcaaaatatgagtggtttcataattttgttaaacagcaggaaataactgagatttttgtcactatagtggctttgtttttttcgagggtcatggtgtagagcaaatacatatttcccagccaggcgaacagaacagtaaatggcctgaacaatttaaacaaaccaaggaaaatgtcctaaggtagtaaatagggaattatgggattttcccttaactattgtaacactataaatgttcaaagaggtagaaggaaccatttaagacaataaataaatgaacatgatcataaaacttagttgggaatgaggcttaagtaaggaaaatggcatgaaaagaaagtcagataggggttgggtgaagaacagaaatttacatgttatctagactaattgcaggcacagtgaaagatttaaataattattaggccaaaatgc

SEQ ID NO: 67117 - DNA, 1031 bp, Homo sapiens
cactgggtaccatggaagcccaaaggaggtacagcctgtgtcctactcagcccgactcctactgtgtgcagataattttgagctgagttgtgtggagaataggatactaagaatgctgtttggaaagatgctggagcatctctattttgtgactgccttctcttccaaattatttggtgaaattttcttttaatcctgttctcattgggtatggcagtgttactttactctgactagggcagtctcttctatggcttgaagttgattagaagattaaataatacagattagattgtaaggcagaaaatgggtatctgcaccttttcagaatcatcagacaaaatgaagtgtctttctggggtattccctacttcctgttgacactgaccttttttttacctgtagttggttcagcagtggccacaaatgcagaaatctgccatcaaggatgctgaggaagatgatgacacaggtggtatcaacttacataaagcaaaggaaagacttcaggaagaggacaaatttgacaaagaagaatataggaaaaaaattaaggcaaagcatcgggtaagctttccatcttgaattcatactgagtaaaatttagtgtcccgaagtatatctaaatattcattagctattcattaataagtgtattattttcttcattgttttctctgacacttctttttctgtggctactcttttttctgtttatttgttcctttgctgggggagtctgtatattgactcgtttctgagaatgccacttaaatctgtctttggtctgaggtgatctaaataatattagtggatttgttgttattattacagtttttattttgagataattgtggtttcacttgtagttgatagagatatcccaagctctccatttcaataattttgtcattactggaatgttttatataaaactatgcagtatgtagctttttggaattggcttttttcactcagcattattctatggagacagagccaagttgtgtgcatcagtgctttgttccttt

SEQ ID NO: 67118 - DNA, 1583 bp, Homo sapiens
tgcatagccagagtaagtgatatagaactgggatttgattccagatctgtctgacacattcttaatgattcatgaatacttgtgccaatcccatagtagtagtcagtaaatatttgttgaaaaatgaatgtcatatattagttagctttaggaaataaaactgtaatgaatgtgtagtctgttttatacctaattatatgctgctaatttttctcctcttccttgtctccaggagaaaagactgaaagaaagggaagccagaagagaagccaacaagagacaagcaaaggtaagggtttatatacatttatttttccaagctctattaaggtagaatggacaaaagcattttatattttggcaagaacaatgcttataatgttaaaatggaatttaaatcctcttcttttcaacatggattttatatattatttgtatatcatgatattccaattggattcaagcccatgtggccttctattcactttcttgtattcctctggtgcaggacgaaaaatccctaagataatttgttactgggcttggccccatttactccaccacttttttccatatattttgcatctattaaatacaaaaggcagttgactctgtgggccaggcctgataggattttcatctgtatcatcttcaggtagacagcctgtgtgaacccaacctcataacaggtaactctgaaagcatcagttcagctcttagaatctaggagaaaagcattctgtatctcccacttttactatattctgtaacagatacttttcagcaaatacatatgtacagttttcctcaagtatgtatgtacaattataaacactgtccatgtgcagccatgatttttatctaatgtgtttgtcactgagaagtgttcagcttctgcattctgagaacatttagtagaaatgatttcctagaactagggcccaataacatatgtcatttctcatgctgtatctcattgtgctgtttctgactagccatgatttcttcttggcagttagcaaagctccaactcccttgaggaagcctataatattcttcgtcattttttttccatgctggccatagcacttaagagagcaagtcagagatgataactcatgctatagttctgaagtgggaagcaattatttaatactgaatataagcagaaaagactgcttatattaaatataagcagtattaaatatcactctgtcttcaaaggtgcccaaaaacgagagctccagtgtgtgcagcctgactgctaaataaggtggaggcttctgcatatgctttaacgtgcaggcgtgaaacaccatggcagaaccaccactagatctcagaggctgtagtgggaaagatttaaatttaacaagaaaatcttaaatctaataaaagcatttgatatttatgaatattgcatgttcagcataaaataagcccattttatttcactaagaagctctcatttctgcatatataaatgtaaaatgaaagatataatctagagccaaagaaagccctgttactgtatttcctttgtgtttattcatgcatatttgtatatatattactaaatatgg

SEQ ID NO: 67119 - DNA, 1944 bp, Homo sapiens
ttagtcagattccaggtagagcttccctttgatccctgaacctacaagctatccagaagatattttaatggtcaaagaaggtggtacttgcagacttaatttaccaggaaatgtagtcatagctgtttatagctattttaagcaatcactgcatagaaactgaaagtgtaagaaagggaggactcacgtagctgtctttctaccttgttttgtgtttcatgcagcaaacatcattttattatacaaggaaggatataaaggacacagtattttttttttaattttggggaaagtgcttgaatgaagtttcatggaattatctttatttcccagaaaagagaaaacttaatgataatgtgaattttcaattttagaaatgaatcttctctggcatattgaaagtacttctaagaaaaattgctttaaagtgtgagtaggataaactaaagttggaatggacctctcaggaatctgatatgactttttgttaaaagatagatctaagttctgcctagttatattatgtgcagaattgggaatggaagataaatacgaagctgaaactgttacgaaggtttgctgggtacctaatagtggtttgggaaatataggtcttttgggtatcaaaactttctttagcagagaagtacttgaattgcacaatagaattgtttttactttagctaacaagatgtcgtatattcttatgacctacagattttaaactaagatctagaaaaatacttgtagcaatgatcaatagaccacattgctttttgagttcaggtaggttacataatcctggaatacagctttacctcattatctagctaaatttccttttgctttgagggtcacaagtgctagtaggaatccctggtcgctggaatgattttgtataaatgtaaggaaaaggaacaacagtgctgaaacttgaggaaatagatcctcagcaatatctcactactgtgctgcttttgaaaagaaagtgtgatttttatttatttatttattttttaagatggagtctcgctctgtcaccgaggctggagtgcagtgacgcgatcttggcccactgcaacctccgcctcccaggttcaagcgattctcctgcctcagcctcccgagtagctgggactacacgcatgtgccaccacgcccagctaattttttgtatttttagtagagacagagtttcactgcattagccaggatggtcttgatctcctgaccccgtgatccaccctcctcggcctcccaaagtgctgggattatggatgtgagccactgcaactggccaaaagtatgatttattaaacaaaagtctgaggctgatgaaattgaacactgactatgaaggaacaaagagtaggaaagagctcaaacacttaaaatagttaaaagttgctttgactatattaaaaatgatgattatagttcgtatttttaaggtgtggggaaaatatgtcatacattttgaggttgaagttttatagatgtacattttcacttgtttttattttttggtttgtactgtgtttttatttatacttaacaaatagtggttttaggtaatagtttcttgaatacctaaggtaatctctgtacaacagaaaagtagtgttgaagttagagctctcagaataggaggtctgaagaagtagtagttaattaattttaaaactctaggccgggcatggtggctcatgcgtgtaatcccagcactttgggaggccgagatgggtggatcacctgcggtgaggggttcaagaccagcctggccaacatggcaaaaccctgtctctactaaaaatacagaaattagccaggcatggtggtacccgtctataatcccagcatactcgggagggtgaggcagaagaatcactttaacctgggaggtggaggctgcagtgagccgagattacgccactgcagtccagc

SEQ ID NO: 67120 - DNA, 1069 bp, Homo sapiens
acactcctgctatccctatcatccaagtcaccataatctgtaacatgaattactaattgtaacagtcttctaactagtctgctagtcttctttctcttatcctcccactcttctatccccagtttattctgaattatagtggccagaatgagcctttaaaagtaagtcgcatattataattctgttcagacccccatcctttaagagtttccctgtctactttgtcacaaaagctacaaagttcacatgtgatctagcttccagctccttctctggtcttatttcccactgttctgtcactaactctcttaactttagactgtctaattactcctcaaatgcactaagcagattctggccttcgctcttggtatcaccacatagctatgtgatttgtttccttactgtctccagatttctgctaaaacataactttactagagaagcattcactgatttcctgatgcaaaatagcaacctcctcttatcctgtattctcttaccttgatatatttttctccatagtacttctctctaccaggcaatatataaatacatactagtttgttgttgcttgtttttactgtcactagaatgggaaactcagaacagggactttgttctgttcactgctgaatcaccagtgcctagaccgatacgaacaaacagtaggtactgagtatttatcgagtgaaagaagcagtaactctttaatacagtttcttgttttcactgtgacacttccaaaatagtgtcaaaattgaagaattatagcatattgtttattgaaaggcataataactctagggatgtttcagaatcctttcagaggcagaacagtaaaacaaaataaagagggggagggctagaaagcaatgttactggacccagatagatattagcacacatggacaatctctaattatacactttgtgtccaagttcatatgtaaactggagcattttttttttctccatagaaaagatgttctatactgtggttgatttccattatcacttaggctgcccatgtaccatacaagcatgacacttaggtgagtgaaagggg

SEQ ID NO: 67121 - DNA, 1044 bp, Homo sapiens
attcacttccatttggcctaagcagtcctcagcacagtctctgtcaatcaattggaactggtacggaaggtaaaacctatttgccattcctggactagcaggcaggatttggagtaaattataagtagtagcctacatctgtaatttctatttatactttaatttccatttttctcccttttctgtggtttatttgcctcaatggcaatgaatcaagatgtatgtaaactaaaaccaaaattgttttagataaagaaaatgtatttggaagattgtatatactagaattttgacagtggtaattgctgttgctgctagcatttgcatagtagcgccagtaaagtttttctgtattcttccagtttggctacacactggaagcatacagcttccatctgcttatgcttctcataagctgtatgattacgtgctaagatcttatgatgtcagctttagtgagtcctcttgacatgttcacaggttttacttgctgtgctgtctctagccctctactcagtaattgaggcaatggctagtactccagcctcttggacatcatcacatctctcagtaggttattctctggctatacacttagcattttcagagacgaattcactcttatgggactagatagaccaattggaaagtagctattagtcctggccgggcgtggtggctcacacctgtaatcctagcacttcaggaggccgagatgagtggatcacgaggtcacgagatcgagaccatctggctaacacagtgaaaccccgtctgtactaaaaatacaaaaaattagctgggcatagtggtgggcgcctgtagtcccagctgctggggaggctgaggcaggagaatggtgtgaacctgggaggcggagcttgcagtgagccgagatcgtgccactgcactccagcctgtgcgacagagcaagactcccagagagagagagccgagcacagtggctcacgcctgtaatcccagcactttgggaggccgaggtgggcggatcacaaggtcaagagattgagaccatactggcca

SEQ ID NO: 67122 - DNA, 1096 bp, Homo sapiens
acaacttaatgcaacagatattagaagcagtacctggtgtccagatagctgttagcttgcacactgctacctaaagataacctgactttcagtagaggtagtttggtgtggcaggacaagcacacactggagcgagacatacctgtggtgcatctcagtgtcctcaaattgtggatgatacagctgtaacttcctagaatgattgtgaagattggatgacccagtgtgaacaaagtaccttgcatgtgcctggtgcgtggtaggacctagctactgatgggaaggtacttactaattatacagatatcttgatgttgccatggtttccttcattcttgaataatatcactttaccaactctctgttaattttgtcctattttaaatgtttgatttcatactgagtctaaagtaaatctttggatttcttctcaccagtgataccaagaagaagcaggggatgaagaagaggagcaacagtgaagtggaagacgtgggaccaacaagtcataacagaaagaaggccaggtgggacactttagagcctttggataccggcctgtctttagcagaggatgaagagctggtgttacatctgctaagaagtcaaagctaaatacttcctgcgcctgccttctccttgaaaccttggttatgactgcgtaggcaagaagttgaaaaacagttgatttgggggcacttaggtaccatatgccccattcccaaagggcacatttctggatagaagcgatcgtatctccaagtccctctcacaggacatgctttgtgccatcactgagcatactcagatcgagggtggatgataccatttcctgaccccgttttccagcatgtgttctgttagatttttatccatgggttcctacgccttgtcattggaaacactgcctttgtcttactggcaagttctggagctcttgtgtcattgttagaaatccctgtcttgcttactgtacagaagtttctgttgctgttaaaattgctcatgatttcgacgtatttaatattttcaaagagactatgatggaccagccctgagaaagaatgagtatttttgaattgagatgatcaataat

SEQ ID NO: 67123 - DNA, 1048 bp, Homo sapiens
tgccctttgttgggtggctatggtcaacagagccctctccccttctgatctgtagcccactgacctctggctgtgactggatttaaagatccttgttaaaccattatcaaatgcaacatattaaactacagtaagctctctgagaaagacgttttgctgaagacttttgggccactctcttgtaacttatggctccttagagacagaaataaaaggtgtgaacaggcacctcttgaaggctgaaggctgggagatcacataggtggttgagattcacattaagtccctcttcaccttcactccccaacacagggcagcccaaagagaaatctcttggatcctcttgatagaggttgtatcctaaacactgaagatttccttcccccaagctcattagaatatatggaagattagaaaatccaattaaaacaagatcccaaatggcattgtcttaatgtgtctgagcttgatatcaggtaggcctgaggagatgggatctaaattctattctgtttgcattcttatgtgaacattgctactttatttcacagaccaaaatatcttttatagatttccagcatggaaaacagtgtactgtgaaaatggatgcagtttctagtttatcttctcttcactgtggccatagaggagaaaatgtacacacacagatatacacagacacacacacacacacacacacacacacagagcgagagagagagagagagagagagagaattaattgatatccatgtaaatatctattttaaaccacacagatttccaaacccacccctcatccttggttctgattctggagcagaattgttagtttgggggtgtttatgccatgtgattagctcatgctgaagggtgacacatcctggcggcaatcagataagtatccaaagcctccaatgtgctgtgcagaggaagataccaaagaggccggaggtaaggttggtccctgcccttatagttgagtttgctgacaggattcactgactggaaataatgagagagctgcaggatgctacctgtgtgatcc

SEQ ID NO: 67124 - DNA, 1104 bp, Homo sapiens
gagatgggaattagaaggggagaagggatgtagaggggagagatgggagatggtggggagagtgggagatagagggagagatacgagatagagggggaggtgggagatagagggataggtgggaaatagatggggaggtgggagataggggtagagacaggagatagagggggaggtggaagataggggtagagataggagatagaggggagagatgggagatgggggaaggtgggagatagagggagaggtgggagataggggtagaaataggagatagagggggaggtgggaaatagaggaggacgtgggagataggggtaaagataggagatagaggggagagatgggagatgggaggaggtgggagatagagggagaggttggagataggggtagaaatatgagatagacggggaggtgggagatagaggggagaggagatgggactgggcataaaaatgagatgctggaggagataagagtgaatgggatcaagagcagttagaagtattagtcttggcagaaaagcaggacacttctcagatatgacagtgaaagaagttctggagatattttaatgagagctaggaaagctgagggaatttgcattaaattgtgtaagcttcatagtgaaagtaaaattacctatagaaagtgaggtggcacattggaattaagtgataaggaaacaggagtggctgctatgggcagtgccattcacagacactgccaagagagctgaatgaaagagttctagcgagagggagggccctgctaggattagtatttgatcttaatagtttgtgtttgatcttacattgaaaggagctcagggttattttatcattctatttccatattttaggatacttagattttctggagaaagtcttgggaaagagatagcattgcttagctgtggaagggtcacatttgggtggcaaatgaggttctaggatggcaatgagtgcattattaaagtgagatgtgggcaaatggtccctgagagggggtgatggactgggaagttaactcagatgaggaaatggagatcacaagaggctagagaggtggagtaaaagtccgggaatggagacactg

SEQ ID NO: 67125 - DNA, 1051 bp, Homo sapiens
tcacccacgacatcaggcatcctgggaagaagcagagctgtttctacagtgctcatttttcagagagcgcagtgccacctgccatcttcctgtatttccaatttcgcattgtccttgtctgtttgaagatggggtatgtgaattccagatgagcttgtgctggcttttaaaattcacatggtttgaggagaaggagcagtgacagctgattgatgtagaaatggcttaggaagccaggctgaatcagaaatcctgattccaatgaaatccccctcttggctgagtgctggcttgtcaccactgagacagtatttcaaagtgatttcacaggtgttagttcattgactcctcccaccatctcatgaaagaggcaggggaggaaagagtaagtccacaggacagaagaggaagctgagagtttgaatgtttttgtgacttagacttggcccaaggcaagttagcagtgaaactggcataagaacctaattctttttccactgtacctggagggtctaaggcctagggaaacattttttaaagtctctaaaaagctccttaggtggcatagtatcaaggaacttggaagggatcagaaaattaacctcaaattatctggattttaaagcatcaatcaatgtacctttttattaagttcctagcattgtatttggcctacagtaggtacttagagatgagagcttattcattatttcttttttattttattttattttattattattatactttaagttttagggtacatgtgcacaatgtgcaggttaattacatatgtatacatgtgccatgctggtgtgctgcacccagtaacttgtcatttaacattaggtatatctcctaatgctatccctccctcctcccccaaccccacaacaggccccagagtgtgatattccccttcctgtgtccatgtgttctcatcgttcaatacccacctatgagcgagaacatgtggtgtttggttttttgtccttgcgatagtttactgagaatgatgatttccagtttcatccatgtccctacaaaggac

SEQ ID NO: 67126 - DNA, 1099 bp, Homo sapiens
ttttaggctcatctgccttcatctggctattcaaaatttctcaagactcaaatctgggtttttaaaatcattcactagacttatgctcacagctttaatttccatgtatatgctgatatctctcaaatggacatcatctgccccagagtttctcaaccttgacacttggagctagatgattctttgttttggggggctatcccatgcattgtaggatgtttagcaacatccctggcctctacctactagacacaagtaacaactgctccctcctccagttgagattaccaaaatgtctccaaacattgtcagttgtcctctggggggcaaaatcattccaattgagaatcacagtgcttccctgacctctttatttttcaactacctaatcaacatttccacttggatgtttcaaatacacctccaatttacccatcaatccttgtccttttctgagaatcccttcatctaatgtcttaagacagaaaactaaaagttaagcttcacagcttcctctccttctccctcaccaccccagtatctattatcgagttcagtctatttagtctgctaaatatctctcttgaatttgttcaccttcttcctctcatcttttaactctttccaaatgatcttgtttttattaatgtcatcactattctttccttccaagctcgaaattcttggaaatcattagaaattaaaaaactcttggctctttcctttctatgttcccctctaactgctctgtgcaagttttattatttttctccttaaaaaaaaatcttccaaattttcactttcttggtactgacccttgccacttcaaacttgaatatcaatagccttctcactactttccctggctccagtctctcccctccccttctaatacagctataaaccccaagatatcttgctgaaattctctccattattttaaagttccatgttcttattcattcctctactcaataaccaaagcatggatcctgaatttttctttgtttagattcttcagcttgattttttatagttgttcctaatttgatacctccctatcagaacctattactaacccccacccaaatatgtcctc

SEQ ID NO: 67127 - DNA, 1047 bp, Homo sapiens
agagacaagtttcagaataccagtaagccagatctctggaaatagtagtccctttataggaacaagtggtccagtctagcctagcttcctttggcactggccagttggtttgccattgagagcaagttctgaatggaataccataccacttttaaatcaacaaaatagtggtggctaattggtggcaaagcaaataggtttaaagaaagtgacaagccattcttatgattattgatgtaaaaattcttagtgaaatatcagcatatgtaatcctcctcaaagtaatcatatttctctattggctaatctattagtataattcacaatataagttaaaaatttgtgattgtctaatagatcattttaatgtaatccacatttctaaattttttctctaaatcttttatgtaggagaaaaatgtatttctgtaaatgatttttcaaaggctgtatgtagtgtggtatgtatatgtatagatgtatataaagttataattacatatagctaacatatgaatgcttgctatatgccttgcactgttctgagagttttatatttattagctcattaaatttcaaacaaccatattttatccttttttcaacaattgaggaaactaaggcatggggaggttaatttgtcccacatgagatatatatatatatacacacacacacacatatatatatattatatatatacacacacacatatatattatatatatacacacacacatatatatatacacacacatatatatattatatatacacacacacatatatatacacacacacatatatatattatatatacacacatatatatacacacacacatataatatatatatacacacacacatatatataatatatatacacacacatatatatattatatatatacacacacacatatatattatatatatacacacacacatatatatattatatatacacacacatatatacacacacatatatattatatatatacacacatatatattatatatatacacacacacatatatatta

SEQ ID NO: 67128 - DNA, 1055 bp, Homo sapiens
aatgagaactttcagaaaatttggtcactcgatggaggaatttcagtgtgtgcaataaatttctagtgaatagccattatgttgtaaacctgcattcagctagtacaaagtttctttttgataattaaaagaattagctacacttcatcatcatctacaaaattagcatgaacatttagttctttttcaacaaataatattatttaattttcaacttgccttctagcaagaaaaattgagtttccaatacagtatctggaaggaatttatagatttataattatagaaatcttcacaaatcactatatatttgcccagttccttttgtgttcaagaatatagtgtctttaggtcaattacagtggagccctgataatacagtttaaaaattagctgcatttcttggagttttttgataactatgggagtaaaaactgacctactttgtgaaacttggactatgctgcttcatgaaatgagcaaaattacccttatcagttaatatttcattgattaatttaagatggtttatatgagtttacgttttagtaaatgcaaacttaaaagtctaataattttttaagaaatgaaaagtattttctactttacatgtaataatacattttgtgttgttaatggtcttttccgttcttttaaaagttatattaatcatttttaaagaactgaacgaaaataaagattatataccattctttcttcttaagtttctcatagtaatttcttgtaagttttacatatttcattatattaacaaatactgcagcctatttaaataccttgtttttaaatctttatcatgtagcttttcattgaatgatttcaagatattgccaaattctgggttgtttttaggtgccctattaagtaagggcaatcgtttgctaattacaagtgggtgaggaagcattctagagatcaaagttttaaaaaccaaatctttaccatttggatcaatacaaatcaggttatttcaaatttgtagtatgtttataggcatagaaattgaactcatttgtccctatttgtactgtttc

SEQ ID NO: 67129 - DNA, 1050 bp, Homo sapiens
ttcgccaaattttacatttatttaaatgagatcttaggtgagatgtgtgtgacactttgaatttgaccttcttgtgttattagctgactatttgtcattgcctcatggattttaaattatgggaaaatagtgtagccagctgccacctctactgaagtgagtagctctgaactacccacactaaatccttcagtgtaattaattatgagtttaaaaatagcagttttcttatgtgaagaggacagtttgtcccctttttttgaagcaccgatgttgcgttcagagctgtagaatgagataattggcagactttaggtacagcaaattcttacttatctaaagcaataagtcaaaggagtccatcattaaattaaatccatagctgatcacaagccttcattttagccaaaactttctctctaaccaaatcttttaccagacttgctaataaataaccagagagatgtgttaataagtgaagttgccagaaatggtcaactgatcggaaaaaaaaggattcagactggagtattttgcccctgaataattgacagttgactgtgctttacacagtaactagccagtctgttgtctctgtgtcttagtccagagggaatagtacccaattggccaaatactggcccttagtatctcctcctttcttgcatgggatacagacgttttcagtcttgtttttatgatctctctctatatcctgataagagtttgtcattgacttacacatttggaagaaatgcacaccagtgtaatatatttgatactggtggaaacttgaactttgtgtttttatgaaaattcatttatgagaatatgtaatataactgaagagtattttatgtatatctatatacacaaatatgtatttgttatgaggtattaaaaacaggggttggggggagtgcttctgatggctaacttttctctaattaaactatgtttctttgagttgtgaacgaccgagtctggggtctggacggccaatgataagatttagaaccacttggatggaaagcagttcttcactggttt

SEQ ID NO: 67130 - DNA, 1588 bp, Homo sapiens
gaagagagaatacgtatatggttagtctctagactgtagaaatgaaagtaaatagatagaaaatgtgagccagtgtgcattgactgtaggatgataaagctggagtggtttgggcccaggaatttatggagccttgaatcctatgtttagatgttttaatttgatttgaggacaactggtagctttgggaaggcacagctacagaagggaacaataactaaaccttgcttgaaaaagaaaactcatgttgtgatgtaaagtatactagaaagtgcagaggagatatcataatagaagagctatgtctactgtagttagcctaagaaaggccgtggccatggaatgaatttaaaggaaattctgataaaggaaatgtctaagtgtaatttgctctcatgtttgctatattgttcatgtttgtggtaatgtattttcttctgaacttattttccagccgacctcttttgagacacttaaaagctcagtttcttttcttttatccatgactttttgggaatgggttctttagtggcacaatagaagtagaaattaaagacatgcaagaacaaatggatttggttctgggttctaattccaagtcttatgctctcgtactctagcttttataactgattttatagttctgaatcagattgtcctttttcagagcatttctctggattcagattatggacacttccattctagatccattatcttcacaaaaatgtatgcctaaccgaggcttaatatctgtgtatgtttgaattattaatactggtttatagttgaaaactattaacctcagaataatgcttataacaatagtttatcagacttctttttgctctcagatgaccgtcataatgtactggcttttagaagaaattcgaagggttttgtttttttgttttttttttttaatatatatatataaacagtttggggttagaaaaataactctttcagctcattatgacaggattatgttcaccaaaacataactcagagattatctcagaatatacaggcacaattatttcctggctgtgacaactctaaacaactcactttggaaatttctttagatttctttcttttctttttttttgttttttgagatggagtttcactcttgttgcccaggctggagtgcaatggcgctatctcggctcaccacaacctcggcctcctgggttcaagcaattctcatgcctggctgatttttctattagtagagatggggtttctccattctccatgttggtcaggctggtctcaaattcctgacctcaggtgatctgcccacctcggcctccgaaagtgctgggattacaggcgtgagccactgctcccagcctagattttttaaaagtcaaaaactgtagttgattatgctcatcaatttagattttgctagaggtacccaaatgacatcttagatttttttttctttcttacttttgattgtttctctcagacaattcctaatacaatctagttctcaatttttaggccataaaggttttcaaatacaggtagataaaatcttttgatagaatctaagttacaggtagatggtttcttc

SEQ ID NO: 67131 - DNA, 3770 bp, Homo sapiens
gtttttgatcagtaatatgtacattgagggccaggcgcagtggctcacacctgtaatcccagcactctgggaggccgaggcaggtggactgcctgaggccaggagttcaagaccagcctggccaacatggtgaaactctgcctctaccaaaaatacaaaaattagccgggtatggtggtatgagcctgtaatcccagttacttgggaggctgaggtattgcttgaacctgggaggtggaggttgcagtgagccgagatcatgccactgcacttcagcctggacaatagtaagtgactctgtctcaaaaaaataaaataaaataaaatgtacattggaaagaatgatagttaatatactatgtttaagacattacataatcttaattatttgttgagattttatattggcaaaaggtcagtatattacatggacataactaggtcaaagtagaggattttaatattatgagctttcttttttcccaataagttatctaatattttaattgttaaaatctttaaatattaaaagaaaatgaggtgatagttacaataaatgtattaagacttttggagaaggcttcccttgaggtatagattttaaatctcatagtaatattagtctgtaatggctacattgaactttttagccatttcaagtattagattagaaagttaaggaaatttagaataatgtacaaaataccatggttgataaatgtggaaaggccatgtgtattcctcccttaccactgccaccactattactaaaacaaacttatacctaaagaaaaaggtttcacagtggaaatgatttggtatatgtatttttgcatcttaaagccattttcataaatttttttaaatctaagaaaaaaataatagttgtactttttattttttaaataggcattaagttcagaattagcccaagccagagatgaaaccaagaaaacacaaaatgatgttcttcatgctgagaatgttaaagcaggccgtgataagtacaagactctgcgacagattcgacaaggcaatacaaagcagcgtatcgatgagtttgaagcaatgtgagagctgttattttgcatatatgttcttcataagctgaaccaccaacagagaaaagcaggcctttgcagatatgatggaatgcatcccaccttgccaaagcacttacaccagtttgactgtgctagctaaaagacaaatttaaggggagctcttcaacattaaggcagtatgatatcatgcttggttttcttttttcttttggtccagggaatggagaatggtgttccattgcctcttttcacattttttttctttttcttttttttttctgttgaagattaacactaattatcacgtctgacaaatgtgtatgtgtggtttcagttctgtgtacattttaaaggataatggtgaacattttaatgggtttcccttgccctttccatatttaacctatttccacattctctctcactcacattttctcagtgtgcccttctcttatctgccatgtccatagccataattccaccatcatacagatcaggcagtgtttaaaatgatggtaggtagcacagtggacagtctttgatcatcatgtagaatatggctatgaatcaggaaagagattagaacatttaataatgtatgtacagctggtgcttagtttttttttaatctaaatttaattaccttattggatatttgatatttggttatttaatcacagtcatctttaacagcttacactgattggtgttttatctcctgtgatcctttgatggctttttttgcctaccatttcacagaggtttagacagcagtagtagctccctaggagagtttactgatgaaacagcctctgcaagattttaaaagttttgttcttttatagactgatttagaaaaacaaatgattagttaaaaaaagaaaatatacatttgttggtaactaatgttattttttaaaacctggaccttttctggaagggcagcatataaaaacatcagtcccgaggaggggacaacaatactacctcactactacatctgtgatgactggttgttcaaacacaatggagtgtgtaaggtatatgttttataattcataaccatagcctcgatcatcaagaaatactttcgaaatttcattttccttcagaatatcttaagagtgctaaatttttaactgcctttttgtcgagtcaaactgtgggattctgatttgtattaaaattgtaagctcctcactggtatactatcatcctggaggggtgttgtatggctgagcaagagagagagagaatgagagagagactgtgtgtgtgtgtgtgtgtgtgtgtgtgtgtactctgtgtgtgtatgagagagagaaatgctaaccttgtagcatgtgaagaatgtctgtaccttgatacgatagttacataatcagtatatttggtttctagatcactgtgcttattttgtttcaatctctgactaaaaatacttaaatttggtttgttaattcttattttagaaattataattttagtttatattaatttcggttatagcttactgaagaaatctttccagttagaaggaggttctaatattcacatgttctaatactttgtttattgtaaaacagctaaatttggagatacgtaaagccttgttttctctgtgtggttcagctactttccatttggtattacacagtcaaatttacatttatctattaaaattgccattttattaaacattttcatgcacagtagattcaagttgtgtctgaaaatatctcttgtgcttttttgattttgctgactttaaaaggattaatctgggcagacattatgtaaaagaaaggttgcgtttaatatattttttgaactttgtaggacaaaacatagctggttaaccttgaagtgactgttgtaccatggttgtgcacatgcttcagaatcctatggaagagaatattcctacttgcagtacatcaaaggaatggatggtggaccctactattcatgttttgagacataaatgttcactttaaagcaattgcataatagataaaaacctgaactttcattggatttttgttaattttcctcattttgaattatgtgcactaccatagctacatcagtttgatacagtattgaaaaattatcagttatattttgctgtttatgatctatttgtagattaggattaaaatggatttaatccatttttaaggctgtgtgaatttttctaaacaagaaccatttgcaatatggatttcttagagattaaaccaattataacttattagcagtcgcgagcacatgttcatatagtcaatgtaaaaatacactaatgagtatttggtaaatcccagtaggcttttaccattagcataattttgtgttgtacaattaagttacaattacatctctaattttggataatattcattggttaacaataaagtgacaaaagctcatgccttcaaggtccactgttgttatttaacatggattttttgtatgtttcttgaaaattacaatctttatcacagccatgaatcaccacaacttaaaagtaagaagtagataggaaataattttaaatcctcatagatctactctttccccgatacctctttggtatggaagtaatagtgattaattctgtggaaaagttaaattattaaattaaattgactttgttgacaacaaaacgtaatttagggtttccagtcattgcctttattgtatagt

SEQ ID NO: 67132 - DNA, 1156 bp, Homo sapiens
caagtctgtgaattatagaaaattagaaaatgcacacaaaagacaattgtattcccataaactaggggaaatactgcaaaaccttagtacatattcttccaggatacttcctgtttatatattcaacatgaaatcttactgtatgtactatttcattttagtcaattttcatctcagaatattagactatattaagaatttcccaaaaagtctcatagctaatttgccagacaagtgttcagaggactttgcattgtctgtatttgctgtaagtctcttttaatggagggcagtttctctttttattattttgatttattgaagggacctacagaatgtctcacctcctatatttgtttagttacttccttgtgtcattgaccttatcctttaactccagtatttcctttgaaccagaagttagatctagaacctggggaattcaaattaaatgttttgactacagtgcatcaaaggtgagacttccatataattgaacatctaaactggagtacttttgagaaaaagggggtattgttcataattacaccaggacaacagtgtaacaggacttttccaggtaaaccaagataatatgatcacccaaataattggtgatgttagatatttcaggttgtatcatatcagaagacacttaatatctagttaactcaccattagtattttttagtgatcattggatttgagtaacgacagtctcattcctccgttattcggttacattttccccttgtggctcaaataaaatctattgggtgtgagattcttaggcattatatgaatatctatttctcatcaactatttgcacaacagttttagcaaacaattgataatccttgccagaattaatagttctttttttgcatgtatgcttgtttttcttttaatctgtcactttgaagctcacagagtaattctaatagggtttgcataataatgtttttgattttctcttttacctgttgacattcttttatgaaaatagaggtttcataaatagggcctattttcattaccttgaaatacagtttctattaaaaagggagtataacttgattgttttgattattaatttttgaagtaagttgctcataaacgtatttttaatgttcaggcttttgcagcccaggaaga

SEQ ID NO: 67133 - DNA, 1083 bp, Homo sapiens
ggatttacttattagtttagataagtaaaaccttaatggaagttttgaaatgtattatagatttctgaaacatggcaatttgtttactgaggtcaaaacttcagatggagagattattttttaaaaataaaatagttacgtgcttgtagcctttttacataacttgaattgcagaagattttcatttctctttaaaaattattaggcttttgccaagttggaaacgaggtatagcgcctgtagtcctagctacttgggaggctgaggcgggaggattgctcgagcccatgagttcgaggctgcagtgagcttctgcacttcagcctgggcaacagagcgagaccctgtctcaagaaaacaaagaggtatatatgtatttacatgtgtgctaacttttagaaattgaacagatttgatttcttgctactattttagcttcttttgataatgagaatgattggaattaatcactgttggggggaatacacatatttcatagaactagaagaacagactcgaaaagctctagaactggatcaagaacgaaaacgagcaaaagaagaagcagaacgacttgaaaaggagcgtcgagctgctgaagaggcaaagtctgccatagcaaaacaagctgccgaccagatgaagaatcaggagcagctagtaaggaactgtcttcttagagaaaaaagtttaaataaaagcatagagtgaaccctctaaaaaagaaaaaaagaaaagcaaccattttgtgctttctggagagcaagccaaagataacatgtaacttaataacaaaatgtagacaaaaacctagaaaatttatttctgcctaaacaaaaacctaaaaatacaaaagaataaggcatttttctatagattatttgtaaatggagtctactgtcagcaaaaggttctgattcactttgacattggacaggttcggtaataagtcagttggcgtcttttgctttagataaattaatatgttatagttatataatatagatatatgttatagttatataatatattatagatatataatatgttatagttcctatgaggccataattggttgggttt

SEQ ID NO: 67134 - DNA, 1698 bp, Homo sapiens
aaccctgttaaaatatttatgttgtcatttcttcttagttgattcagttcttaggtttcacatgaatactatttccaattattattattttatttcagtagtttttggaatataggtggtttttgtttacatgaatgggttctatcattgtgtattctgagattttagtgcacctgtcactcgagcaatgtacactatacccaatatgtggtcttttgtccctcaccccattcccaaccattgcttctcaagtcaccaaagtcgattatattactctgtctttgcatcctcatagcttagctcccacttataagtgagaacatatggcatttgtatgttctgagttacttcacttagaatcatggcctccagcttcatccaagttgctgcaaaagacattattttgttactttttatggcagagtagtattccatcacatgaataatatttttgtgtattaatttgtaacagcaattgcaattccttttaagggcacaattagagaatgaaaagaagaaaagagaaatagcagaaaaggaaaaggaaagaatagaacgtgaaaaggaagagctaatggaacgtctaaaacaaattgaagagcagacaattaaagctcagaaaggtaaaagtttcttttttgaaaatggattaaaaattattattgctctgttgtcagatagtggtattttttttagtactcttaaaccttatttgttatataggacaattgtatatttaattggcaaattaatacttagtggaatcacatcataaacatgtttcactaaggcacattcatttatacagtgctgatgtttctcttaaacatgcagatatttttctttttttagttttttgttttaaacatgcaaatatttttcatatgtattcttaaataattgtaaatgtatatatgggctttataaacaaaaaacacatatgcaatacattatggcatttaaagaaaagtatgcaatgctttatggctgtataagtaaggcatttaagtaattaaagtaatttaagctattctgactatatgaacttttttggaactcaattcctaaaaatattttactttattctactagaaaatacacaacacatagacgtgttataacgttttttgtttgtttttggtaatgtgtttggaagaacttacttcttaggcaatatataaccaaagtgctactgtatatagaaaggatatactagatttataatatgtggtttatattaagtaactttaggatataccactttcactcagcgaatagtggagaaagcaagaaaaaaaaagtattgcatcaataaaatgtttttctcctctctaagcagcaggctctcaggggtaacatgaagtctacactctttataaaagctctatttaataatctgctttcttacaattggtaaaacaagctattcagttctgttggaaatagccaacacaggttgaatatcccttgttgaaaatgcttgggaacagaaatattccgattttgggatgtttgcattgtcctattgagcatttcaaatctgaaaatccaaaatcggagctttttttttttttttgagacacagtcttactttgtcatctgtgctggagtacagtggcatgatctcagctcaagctattctcctgcctgagcctcccaagtagctgggattacaggcgtactccaccaggcccagct

SEQ ID NO: 67135 - DNA, 1057 bp, Homo sapiens
gccaccatgcccagcctctctagattattaaatggtggaaggattcattaaaccagcagcaaggtgtggtgacccgttatgttttagcttagtgcatgcactaggaggtcaccatcagtgtttgacctcttgctgacttgtgacacctctacctgtttgccccaaaggtaagctctctttctgttttaggggcaaatgggtatctaggagctgcaggaattttaaaatgtaggtttataaataagggcgaaatttttgatagcaaaacttttctgataagtttatcagagactgcaagttgagaaactacagggttttgtgcttgaaattcagaattgacagtaggtggcagtgctctttttgtggaacattaaagcatactcagataaatttcagagatgaaatcataactgatttttaagttattaaagtagtgatttgaatattgattcaacttaagtaaacaatattgtctgataataagagtttccccatgtgacttttattcctctttatatttttgcccctaacatagattctgacccatggtaggctcttggtagatgtttggtgaatgaatttggcagtatttaaaagaaacactctcatcaggcccatggcaggtgcagctaaatgatcaaggcattttttcccactgagctctgatgatattttttaagatcattagccacctactgtcattctaatggaattgtgaagggaggtgaaattgatttgttgtcttgtatctaggcataaatgggtactacccaagaaattaaacttggattaattcatttttaatgattgaaaattgttgccctcccttttatttaagatacatgcctttgtttgctcccttcagtcctttattatttccccagtggaggtctccggttaatctaaagaagatattttcttggggcatggcaactgtgtggttaactcttttggtgctgacatttaatttgttgtcagagttcatcccgtatgcaaatggtaaatctgatttttcccccattaaagtgtgccttataagcatgttctatatgcagga

SEQ ID NO: 67136 - DNA, 1040 bp, Homo sapiens
acaaggaataatagtttattaatgtgatttatgtccttgaaatagaacaactgcattgaaatgagtgttttcaaacccaaactccaaataaaaatatctgcatctattgttacagtaatcacaaaagacttcatgaggaaagtgggactgaagcttgaaggttagagagagcaagagatacgttcagaagaagaagccaacatagatgaatatgtagagataaaaatatgtgtggtgtgcctatgggccagtgaggtcctctaaaatgaacagcatttaggggagcagcaagatctggtttcataaaggagacaagacaggcctacaaaaactagatatcactgagtaatgtaaagggctgaaggcatttgtattatttgaatgaagtgttggctggagatggctattgtcagggtaggattcttataaaatgtgagatacgagcctcacagagtacagtaaactacaacatgttttaaatattataatcagtttaaatatctgctgtatacttattccatttttcagtaggaagaccattccccaccccctcccaacttgcatatggccagattatcttgattctttttttctgcttccatatctccttcacctccatccctgaagaacaaatgaaacatcaatagggaaaagctaaataaaaccagcacatccatctgcagaaagggccatatatgccagagctgggtctgaaaggctcttagttggtggaatatgatggtagacttctggttgagatctggtttgcagtgtaagtcctcgagaattgtcttgggaccttgggaaaggagggagggaggtagttggcttgggaactgtggcagaactggatgtgattgcatagaggctggggagtgattgggtagtctaatcaacatcctagggtggcagacaacctggcatggacaagaatagcttttggccttactagcaattacttgaaaagtactgtgcttttgcttcttttgctttcacacaaagcgtgatgtttcagctatctaaagaacacagaaaggtca

SEQ ID NO: 67137 - DNA, 1050 bp, Homo sapiens
gtatttttagtatattcgtgaatatccagacattttcaaattaaacacaggaaggaagtactgtttttttatttgcagtaacttgcccgtaattcacatgagaagttataaaggcctttttttttcttcccacttcttacacatatttaaactgtagttgtagcttgaatccaaacaataaaaactgaacagctagttcaaaccccaggaggctcagttctacacttgggtcaccaggtagtttttttagataattttaggaaaatacactgcttttaaggttcatgacacatttatgaaatctttggacagttgtttgttttatatgatttatcagttttccccttaaaagataaggtcaactgtagttatgaataagttaatacattttgaaaatctggaactcttaagattggtcattcagtcagtttaggtcctaaacaggaattttattcattgtttcctgcctttaattaaggagatgctttcattttttaaggttaacacctaaaattggttttccctggagtgaaatcagaaatatttcatttaatgacaaaaaatttgttataaagccaatcgacaaaaaggcacctgtaagtaatttctttaatattttgtgtattaactgtttaatatctgctagtttcccatgatatcacttgaagaataacagtgttcatttattaaattgcttctgaggaccattctctttccataggtcagctttcccagtgatgaaataatatgttaataaaaatccaaagatttaattttttaaagtaagatgtaaatattagaattttattttatttgagattcagttataaatagataatatttattaggaggctaatgaaaacaccattcctaagaagcaattttaaagtgtttcttcattggtggctagaatgtagtagaggtagccctattctaaattaacttcgtttatacagttttgctttatgaactttgtatttttgtaacttgaagccttgaacttaagaaatctttttatttaaatagatttttaaagttcctctaatgtca

SEQ ID NO: 67138 - DNA, 1073 bp, Homo sapiens
gtaatttagttctatgcaatttcatcatgtgtattaattgtctgacaactaccacagtcaagttactgaaaggattctttacttttaaagtgtatgcttttgaatcttaaagtcattataatttttttttttttttggtcctcttagtgtattggaacaacacaaactaacaaaagaacagtgggaagaaagaatacagaactggcatgaagaacatagaggaatgttaaggtatttgggtagctattttctatgttttcttttttccttcaaagtattttcatgtcgtaacatttattattacattatttccaaaagattgtttgacttatgtaaagtactaatttttaattccaggtattttgcaactttagtttgatatgctcctacttaaatatattacatttagttttatttcaacagggaggattctatgatggaatacctgaagattgcacaagatctagaaatgtatggagtcaactattttgaaataaaaaataaaaaaggaactgaattgtggctaggtgttgatgctttgggtctgaatatttatgagcatgacgacaagtaagtaaattagttgcatagtgaactagtcattgttcagtggtctaaatgacgttaatcttatgtcctgtttttcaaagtagtttcttgtcttgattacccttactattttcaaactaaaagatgaattaatgacacatagacttgtagatattttacctccattttcttatcaccttgcagtttcagagttctacttttcagtgtatttatcaaatgagatgattgacttttatttgaattgtgctgcttttagctcttgtgagttatgtctagtaacttaattaaaatttgctccctcgataggtgagaaataattctttaaaatgctattatgcttgacaaatagattgaaattgaacatacataagaaatcaggagcaatgagagaatggatttaataaatatgtctatcacatcttagaggatttttttgaacatttatatataggaattgttttaaatatgtttggacattaatacaatagaatatccctgtatta

SEQ ID NO: 67139 - DNA, 1070 bp, Homo sapiens
atcctagctacttgggagcccaaggcaggaggatcacttgaacctgggaggtttaggctgcagtgagctgtggtgttaccactgtactccagcctgaatgtcagaatgagacccatctttaaaaaaataaaaaaaaaaaattagtttcttccatttttttgtagattacattaatcagaatttccttttgtttttggcagtacagaaaaaaaacattgaataagtattcttaagctcttcagagtctgaatccatctgtcttcacttttattgttcctttctctaacatcctggatacagagatgaacctgactcagagagcaagcttttgggctctaagcagtgatgtttccttgttctttgttgtctgtaattaaaacttctggttagatcagtgtgtttataacatgttatttgagatgtgtggtatttttaatcttcagatttcagtcttcttagggaatgtgcaatgctagtagaagatattgaaaatgagaatgaaatcactccttgttactttaaatccaccttttcaaatattttaatttatatcttacacaaattatagttaaaatagaaaccttatataaaaagataatagattatgcttttttttttttaacagaaagtgataacagaattcattgaagtggagaatttttaaagaaggtaacaaaaagagaaagaaaatgccgaaaccagtaagtgtattttattacatttgacagtgtctcaataataagatatcattaaattcgttttggaacaagacaaagaatgttggtagagttgttggaagaaaaaggcactgatactactgttatttctctttagattaatgtggccaaattaattagaaacacagtgttgctctgttgcccaggctggagcgcagtgggaccatgtcggctcactgcaacctctcctttctgggttcaagtgattctcctgcctcagcctcctgagtagctgggattacaggcacctgccatcatgcccggctaatttttgtatttctggtatagatggggtttcaccatgttggccagaccataatactatggtattat

SEQ ID NO: 67140 - DNA, 1035 bp, Homo sapiens
aaatgtgagatgaagcaatttttctgaaccaataggttataggtcattttttgtttgtttgttttttgagatggggtcttgctctgtcacccaggctggagtgcattggtgatctcagctcacttcaacctgcacttcccaggctcaagcattccttccatcaccatgcctggctcgttttttttttgtttgtttggttttttttttttttttttttgatagagatggggttttgccatgttgcctaggctggtctcaaactcctgggctcaagtgatcctcccacttctcaaattgctggaattacacacgtgagctatcgcgcctggcctggaggctgttttaatcaagacctgagatgataagacctgaactaaggcagtaatagtagttgggatgaaaagagggtatagaatttaaaaattggactgaaatacatttaggttcatgaaggtaggtgagtgtagatgggaataagctaggaaatgataagaattaagaaatgaggggtttatacctccagcagaatttcattgcctaatggttcatgcctgtaatcccagcacttcgggaggccaaggccggcggatcacttgagctcaggagtttgagaccagcctggccaacatgatgaaaccctttctctactaaaaatacaaatattagctgggtgtggtggtggacgcttgtaattccagctatggaggctgaagcaggagaatcgcttgaacccaggaggcagaggttgcagtgagctaagattgcaccactgcgagcactgcactccagcctgggcgacagagtgagactccatctcaaaaaaaaaaaaaaaatctcaggaggaaatttcctctgaagaggtttattggtaatcagttacttgtgattgactagaatttagggaaatggccttacctaaatttcatttttattacaacttagagaatttctcttttattagttatggcatcttttctttttttgttttttagaaacacagtgttgctctgttgcccaggctggagcacagtggga

SEQ ID NO: 67141 - DNA, 1060 bp, Homo sapiens
gtgcctggccaacaactaattttttaaaaagcctttttgtagatacggggtatccctatgttgcccaggctggtctcaaatgatcatcctgcctcagacttcctgccttggactttctgcctcggcctcctgaagtgctgggaggattacaggtgtgagccaccatgcctggccaaaatttaatgtcttgcatactaaaagtccagaggctcaagaatggttcaataatgacatcaaggactccttctctttccaactctcttccctgtgattttccctattaacttcatactaagacagcccttacccatctcaatttggctgctgcaaaggagccaggagcggtggtgtggacctgtagtcccagctactcagaatgctgaggttggggtatcacttgagcctgggaggtcaagcctgcagttagccccttgtcccagtttggctgctgcatcccatccagacagggcagtatccaaaggaataagaggaactgtttccagaaacccccaagcagatgtctttcgagcctcattggccaggattggggcacattctatacctaaccagtcaactggcaagggtaatggaattgccctttcttccaactctgttcccaatagatacttcttttttctttttccttcctccctccgtccctccctttttccctgtctccctccttctctctgtcactgtcacctctctgctgctggagtacagtggcatgatcatagctccatgccacgaactccagggctttgaactccggggctcaggcagtcctcccacctcagcctctggagtagctaagactacatgtgcacaccaccatgcttggctgattttaattttttttagagatacagtttcactatgttgcccaggctagtctcaaacttctggcctcaagtgatcctcctgcctcagcctcctaaagtgcaggcaactgcacccagccctgttattttcattattcatctatattacatgtcttcggtcctttttttacccccacccaaagtcatatccaaaattgatccattacagatagtcatat

SEQ ID NO: 67142 - DNA, 1007 bp, Homo sapiens
tgggttgctatggactctacccttaaaagattattttaagtctcatggcattactgatccagctgaagactgttctggtaacttccttgattgctgcagccagggtgtgcgtactgctttgatgatagaggtgtccaatctggccccagagagttcctcaatttctagcctattttagagaaatcctgcctttcctactttaagttcctggtgtatatctttatattgaatgtatagcttaagccatttaaaaaaaactataaaagtgatatattttatggcaaagtttaaaaactcagaaaaatgtcaaggaaaaggtcaaagtcctccttactccctggaacaccccagcccctttcccagtcctgttttccataggtagctgctgtcggcaattccttgtttatagaaaatgccagtaggtatgcagggataaacatatactttatatcccttatttgtgattttaaagtcttgttaaaatagggttatattgtaacagacattgaaaggatgcttattaacttgtgttaaacattgagtaaatcatatttctcatgttttcatcatttgaataaaagcacacaatagaattccctacgctaattctcaagtgtgtgtatgtgcaaatttgtttgtgtacagattttcttgattaatgattgaagatgaagtttactttttgttttctagcatatggcatatagttgacaatgagaaatggtgtcttttaaaaaaggaggtttataatttggtgtgggaaatagccacatcttgctctttacaaaaaaagtttgccaactccttagaaaaaacatcctgttgaaaggatattttagatacagtattgaagaaacaggtacttcattgtttattttctctaagattatagaatttataaagctattagtaattgagataatggactgttttcttctgagttgtagataatctctatggctttcaggaccttaaatgttttttttttttaatttatttgtgaaaag

SEQ ID NO: 67143 - DNA, 1076 bp, Homo sapiens
ccgcggttcccggccgcagctctacctgctgctgttgcagctctcggagccctgtaactttctcgggcccttgaggccgctcagttttagtgtctcagaccccaccagacaagttcagtacatgatatccctcttttcctttaaaggattctaaactcaattcccggactaactttgaaagggggcagtgcatttttgtttttttttttttttcagtttaaacagactacatcacttcctagacagatgtcatgtttcttcagacattcccaatatttggtggtttttttttttccttaaagagtagttactaggttggaaatgtgttaaaagtcaacttcataaaaatatattttaaaatacatttgagattttggtggaagacacgttgctgaggaactcgatggcattcttgtggcactaagactggcaggatgtaaatataaaagtctaagataataagggtttatttgataaacgagtactttgacatagacattgtaatctattgtttaaggagcatacttctttttttttttttttttttagaacactaaatactcttttatatgactgatggagctaagaaggaacaattaccccgttcatgttgctggataaataatggcttgatccatttgccaaaacagcatcactggatttgagaaaggagactaatattcaggattgcagttttttattttcagaatttctttgctttccccagtgtgctttatcttccagagattaataatactttccttcaaatacagcaacatgtaaaacactccttttgaagttaatcgtatgctgtaaagacgattgcagtgactttctttgcttaatcgcttttttatatatgatggaatttaataaacagttggtatattattagcaaggaatgaatagacattggcattctttacagttttatttaaatgagacagaatttgattgtggcattgaaaaaacgttgagttcttgaccttaggaatcacatacaatgttttgttcactcctgtatccccacacatggaagagtatgtaggagagtctcagaagtagctgtagaatag

SEQ ID NO: 67144 - DNA, 1371 bp, Homo sapiens
aaacaaaacaaaaaacaaaaaaaccccacaaaaattagccaagcatggtggcatgtgcctgtagttccagccacatgggaggctgaggtgggaggttcacctgagctcaggagtttgaggctgcagtgagccaaattcacaccatcacactcccgcctggacagcatcacactccaggcttgtctctaaaataaaaacataaataaataaataaagagtaaaaagcgtagcagttgccgtgggaccagagagaccagaaacattccaaagcaatttcagaaatataattaataggaatgatgcctgcatagccaaaagtcatgaattctagttagttgaggcaaagaaggtacagataaaaaaattcaaatgttaagatccagtctttaaatattgtgaaaatttgggatagtacaataattactttcatggattattttaaacattgtttaaaatgcattgtagttattgtccatgacaactttgtaagatatcctttagaattacctccattttaaccaggtgcggtggctcacacctgtaatcccagcactttgggaggccgaggcatgaagattgcttgagctcaggagttcgagattggcctgggaaactttgcaagacctgtctctactgaaaacgaaaaaacaaaaaaaacagccaggcatgctagcacatgcctgtagtcccagctacttgggaggctgaggtgggaggatcgcttgagcctgggagattgaggccacattgaactgtcatcaccaccactgcactccaacctgggtgacagagtgggatcctgtctcaaacaagcaaacaaaaaataagaattacctccattttaacaaccctgagagtgatttacccagggtcacatagcagcttggaggcatggctgtgtaaaagaagttggggcttttaatctctgtattagttaggattctcgagaggaacaaaactaataagatagatagataaacagatgatagatgattgattgatagatagatagatagatagatagatagatagatagatagatgataggagatgtattatgggaataggcttacagaattatggaggctgagaagcctcacaatatgtcatctgcaagctggagaaccagggaagctagtgatttaattcagtgagtctgaaggcctgagaaccaggagctcctatgtcttacagcatcaggagatggttggctcaactcaagcagacagtgaattcacctttcctctgcctttttgttctatctgtgccctcaacagactggatgaaaatagatcttctttactcagtctactaattcaaatgctgatttcctccagaaatgccctcacagacacacccagaaataatgtt

SEQ ID NO: 67145 - DNA, 1173 bp, Homo sapiens
ctagcacgtaatgagggctcagtagatgccacttggtagcagcagcagcagcagcagcagcagcagcagcagcttcttaggttcacaatgttaagagagttttgtattaaatattgaaagaaatgtgacaatttatcccaaatgtgttgaagttttaggttcttgggcatatttgtttttcaaagacactccttagatatactagagatacaatttacacataatttttaccaacatggtggcgatttatataatgcagatctctcgacagctctttgaccgcatgatgtagggtagcaggaatcgagaactagagggagagtgtgttggatttgtacgctgctttgtctagtttctttttgaggtctctgagagcagggtctaagactttcagtcatcttttccccactaatcccgttatctagtgggtgctccatacatttttgttgtgtgaactttgggggaaatcagggagaaggcaagccagatttatttgttcctgtttcctctgcacttccccccctgtctttgaccagtgtgggtaccttgctttctgttatacaatggatgagttttggacaactgaatcaattgggacagatattgaacatgcttgtgtaactggtataagggaacatgaatgtttttgtagtaattgggagttatctttctcagatttgttttttggatttggatatgtcaggttgttttaaaggggagcacgtctatttcctcataatcctgctgccctctttattggcacaatttctattcatggtcttatcattcctcttacagactttggagctacaactggattttccagttcttactgtgttaatgagacttgtgctgtaactaccgtaactactaatcacatgtggctattgaagtttaacataattaaaggtaaataaaattaaagattcaatctcgtagttacactagccacatttcgagttctcagtagccacatgtggctagtggctactgtattggacattgcaagtatgtgtagaacatctttgttatggcacaaagttcttatagacagacagagcagttctagaaactgtagttctgtctttgaagtttaacaactcgataagctatcagtaattgagagtcagaaaaactccttttactctaaaataccgtgacacaagggggttt

SEQ ID NO: 67146 - DNA, 1048 bp, Homo sapiens
tttgagaaaaaatatgctcttataattgatgacttaagtctatgtatttattccagatttcttcttttaaaggctttaaaaagtgtagctttcttttatagtctgtgtggttttaattatctaggaattgattaatcattttcttggccttgctaataacctcagttctccaccattgtgccttctgattgtttccttgcttgtcagctctttgaccaaaaagtagtggtctggtgaaacagttaatagataataggaaccaaaggctaaaatgaagctttggtacaccaagtttattgtattcatatttaccttttgttattctctagttgatagggttggttatatctgttttgacataaaggaaatttaaaaggttaataagttccctgactgctttgggtaagaaaatataaagactatcttaaacaactgcattgccttgtgaatatatatacgtaatactaaaccataccttcccccttttccatacagatcacggttgggctgccaaatctgtttgacaaaatctatggacaatatgactgttcgagtgcctgaaacagtggctgatgccagacaatccattgatgtgggcaagacctcctgaactagaacaaataggaatattttcatggaattttacctatttttataattattatttcttaaagtgattaaatgagaacatggatgagtggacttcatattatgactagctttactattttaattcaccttgcataactactgaattttgtcattcttgaaagtatgcaatttttattttggttatattacaaaaatgtcaatcaaatattaaaaaatagttaatgtgatagaaaaaccttacatatttttttcttatgtttgtttagcgactttagcaaaatgttttcatataatctcatctgtttacctagaagataggttaaggaaatatattattattcctgtttgatgtgggtgaaggcagagatctaacctggcttgtttagggccataccactaattagaaaatctgtgctagaacctgtgtcttattcct

SEQ ID NO: 67147 - DNA, 1032 bp, Homo sapiens
caagatgagttttggaggggacattcaaaccatagcagtgctataattttaaagtacttcaaagccaatttattctcttaattagcttcattattcttgtctttgtgtgtggattacctaaactctccttccagagctactttaatgattatattcaaccaaagcactctaaaatttagagtataaattgtcttatatttcaaattagaaaagttcaaatgaagtttaattgtgttattttataaaaccttctaaaattattaaatggaggatataatctataattggtttgtataaaggtgatttttcagtttgaaaaaatccttctgtatttgatatatgtgtgttgtaggtaaatgtgttggtttatctattgctgcaaaacaaattaccccaaaacttagtagcttaaaacaagaatcttgtattatttcagacagttcctgtgagtcaagaatttagagtacggagcagggatagcttgtctctgctccacaatgtattaggtcttaagctagatgactcaaaggccaggttctggaatcatcttcaggcatattcttcatatgactggtgtctgctgttggcatcagctggggggtctaggagaagatactggctggaacacccacacgtggcttctctgtgtggcctggacttcctcacaacctggcgcctgggttccaagggcaggcatcctcagaagagcatgcatgccaggcagaactggatcctctttatgagctagttgtggaagtgacacagtatcactcccaactattcttttcattagaagtgaagcactaagtctggcccatcatcagaagggaggggtttccaagtatttggagatatcagagtaactgttaacttattggccccttatctcctgtgaatattggccttttaactaacagtgttctaaacttaagaggagctagctttttctcttacatttgaaagattcttgtgtctgctttattatgatggctcacttgttttattctataactcccaacattttgcttcttg

SEQ ID NO: 67148 - DNA, 2278 bp, Homo sapiens
aatcataagcaggatgtctgttttggtatacgtgtgttttttgattttttaaacttacaatttttattttttacatggagtggcagaagtaaagatgagattagtgtaggataaaaatttaaaaagcatatctgatatgtcatatcatcagtggtagcttttaaagtccaatgttgactttgtgaaatgtttttataacactttttagtgttaaaaattatgttaataaatctattatgggtctttgcaaatagaaataatgttcataatgaaaaagtaaaacaccctctttctctagagctacaccatggggtggataaagggatgactcttcttacctttaagacagatgctatcacaaaaatagattcacagtctaggtgtacttcgactccagaattcaatttctcttttagttctctgcaggatttcacattggctgattgcctgaagatacctttggtgagaggtcctttttgattaagaaagaaaagcatatcctatggggaagcaaaggaaaataaacaaaatgacacttccacacacacaagggaatgtacacttgccctctttggatgccagaggctagggtgcgctagggtaaaagcactgaaggattggagctaaataaatggccggaaaaattaaagtcacctttttggagagtggaagggtggttaccaggggctgggggtggtggtgagcaggttggggagatgttggtcaaaggatacaaaatttcagttaggaggaataaggtcacatgatctattatataacattatgattatagttaataatgcattatattcctaaaaattgctcagagagtgaattttaagtgttctctaattttcctttctatcactacgtcctgcttacagtgtaagaagagaatgggttttgaagacaagcaatccatgggatccaaaacctagttatgccacttggttactgtgtaacattgagtgcagtactgaggctttaaaacaatttgtaaacggatgagatgatgacatgataacaactatcccctaaatttgttgtgaagaataaataaagtggctagacaagtgtcttgcatttatagatgcataatatagtataaaatgccatatatgtagtatagtgcttgaaggatactagagactcaatactgcttagcagtgattatttaaaatatcaactggagataatataaacccagtggctttcatctgacccactctatatacaaaagataaataaatgccagggaatgtatctttatgcgtgagcacttgaaatataaataaaacggatttaaaaacctaagtgtaggatcgagtagtttctgttgctacaatgatcaaagaagactttgagaacaatgtgacgttcaagaaaggatttgtgaggaataatgtgaattctgtctgcagggcaaattctgctttatctgagaaagcttacgtggctctttcctaggttatttcttcccattatgtcttccttctgatttcacagtagctaaatcagattttgttatttggaggaataatagtgaagattcttagccaaagacagtggtgtctataatttttccatttggggacagatttacctcgcagagctctcctttcccaaacaccctttcccatcagtttacagaccaaaatgagccttaccaagacaggtttgggcagattgtcattctcacaaatatttggcagagaaattccaaagagctgtcctggcataggtgatgttggcgatgagggcaagttgtccaggtgagtgctagaacctcgccagaaggcccagtttatgatagatcttctccttttaaatgtcttatgacctgaatctaaggaagaagtgagcttattagaaaaatgagtttcattcacttaatcttatttctataacttccattttatggtatgtttgttgctatggctcaaagagaaaaagatgctaatagatggcttttgtcattgacaattcaacctataaaatttcatttcgtctttcatcttataaatgaaagatgaatcaatgaaggaagaatcaaatgtttgggttcttctcccatccagtttttggacatcactggtctgtttacttgaattttggcactacattttcaaaggtgaaagactcccttattgaactgtaacacctaaaagcaaaaagcgtttcatacaaacccatttattttcccattttaaagatgagactaagcatacaaaaagtttaaataagactatagttaaatactgagaaaaaagaaagtgtg

SEQ ID NO: 67149 - DNA, 1087 bp, Homo sapiens
caaatcccaacaagtgacatgtacaaaaacactcacgtcactttcttccgagcacatagcaagttctcagactcagtagtttttctcacctacccccagaagacatacactttagtcattgggttgatcaagaaatgtaaactccttttaatagatgcctaatcaaaatttaattaggaagccgttctgccaaataaaaatacggtaatatatttcagtgtcatacgtaaatgacttttgcattgtttgcatcagtgtatcctttagtgtgaataaaagagaatggttgtatcttcacagtttaacactggttatctagaaacctcaagggacagtatttttttttaggggaggtggatagaggaaacagaattaatcagtatagatgtctttaattctctactatagatgtaaaaataaatttattgtttattttttaactaagtttttaacaaatacacagttttgggtaaaattttttactggaagcttgtgagtatgaagtgtactaaggtttttcacttaaaagtagtccttatagaagctttagccttagatcaggaaccagcagtcatcttcccccaatctactccagggtgagaatctgcaataagtatacatgcaggtactgaaagttcatgcagaccagtggttcacattgggggcggggggaggagggggtgttactaacctctagggaacactttggaattttggggaacatttatgtttggtcagtgatttagtggcagcagccagggatactaggcatcatggaaagcacagaatatcctgcgtagagaagaatggtgggttcctgcatagcttttgaaagtcccctatataacatatgcacgaagggggaaaatatctttatataattatctatgcctgtaacctattttatatataagcacaaagtatttttatacatttcaatgaatactaaatttttcagaaatgtagctaccttgtacgtcaagagataattgtactttgtattgtttggaaccatttctaaaaattactgggcttcatttttctgtgcttgttacatgaaatttcttatctgacttctcttaaattt

SEQ ID NO: 67150 - DNA, 1049 bp, Homo sapiens
taatgcaattaattaattgagtatttttgcctaaatgtatagtttatcgtttctttaaaacattaccttttaaaaatattctatttcagagtggtatccactatttatgaagtcatctagttataaacatcaagtacaacagaaaatatatactatatactgtttgaagtttaccttgttttctgtgaagcaaataattatagttatccctgtcacagaacaactgtgaaatttgtttgtgctaagataagcataacgtaagcctgtcctgataagtttgtactattatacacctgtaaaagaatcaatagtttcattctattttgatgtatttcacatagttgtaaacaagaaaatctaagttttcattgcctgagaacagattctttaagagatcagtgaatttgttttgaagttattagtggccctttgtttggttacacttttaagcaaaagaaagagataagtgtattttgaatgaattaatatctaaatctattaagcccctggttatattggctgcttgtaagaccttttgttacttatttagaatgaatcctgtgaatcctaaatgtatggttcatgtaatgtttattttcttgcatatccacggtgaatctttggtggacacttaatgtgggactatcagaaataaagggacctaagtgactatgtagtccaaactgtctcattttgtgagtaaggaaatggaggcccagagaagtggctgaattgccttgggttgcacatctcattaatgatagagtaagtctgagtacgaacaatggaacctgaaataaaaacaaactacctgctggtagtttgattgcattctcttcaatataaatcaagctggatgaagtggctacactcagcatttgacccattatacatctgacaattttaaaactcagaaaatacattctattcactattatacaaatgatcttctacagtagatttccatgaaaaacacccatttcaaaagcaccttttcagaacaaaatttgtcacccttctttgattatccattctcatgtttaacagct

SEQ ID NO: 67151 - DNA, 1037 bp, Homo sapiens
gtgattaagagagtgatcttacttgctttactgtctgtacgtggaagattttaaaacaacttgaagggtgaaattgcattattcacctcccgtgcactcacacgtcacccagcaaaaatgctctcatgaatgtatgccctcactctgaaaatgtttgtggactgagtgaaggaatgaatagtgagccatatgaaaaatgactgctgcaaagtattctggtaaacatctgaaactaaaccacttaattcaaactgaaagagccaaattccttttaactgacttttcttttaattcagtacacaagtatagagtgctataaaatagctacactaggtggcatcaacaatttctgtatatggtcaggatcgtgtgccactattttattttattttattttatttttagtactgaaagctcttctcagttacctttttattctccatcatcatggtatatggagaagatgtctagtattcccatttacaacaggaaaactaaggcccaatttaagatttgactccctttaaagaccaatttgagatgaattagtaagattccaatgtaaaatctatttcagttaattgtaacttccttgtaggattattataaggattaaggcagttaatacttgcagaataagtatatactaagcacttgaatgttacctattattgggattattttattagttatttcctttgaatcttaaagtagaatttagttcaaaaaattacaggcatattttccagctgcctactctgcctactcagttggttcttgatttcctttcctgactctctgttttgtactttaacaggatttgggaattgtgactctaaagctggggtgtctgtctatcccaagggtttttaatcttttttgtgccctgcagcagtctggtgaggcctatggactccttccagaacaatattttattttatttattattttatttaaaaaaatatatatatatatatatatttgagacagagtctttctctgtcgcccaggctggagtgcaatggcgcaatctcggc

SEQ ID NO: 67152 - DNA, 1001 bp, Homo sapiens
aagtagctgggattacaggcgctcaccaccatgcccggctaatttgtgtgtttttagtagagacggggtttcacagtgttggccaggctggtttcgaactcctgacctcaagtgatccacacgccttggccccacaaagtgctgggattacaggcgtgagccaccgcgcctggcccaattgtttcttaaagtattccatgggagtaacaattccattgttaatgatgttttttacagcagttatttatccttattcgttcattcactggataaatgtttgtgtgtttttgataaatacaactaccttaaaaactataagatgtttaattaaaacttttgttttaaattcagttttcatggcagaacatactacagtagttatagtggaacaatgaatatggtataaaaataatatcagcaaaatatcacaattatacttattgacgataaaagtttctttatatactatgctttaacatcgatacaagtttgtgtgttttaaaacttagaggtcttttttcccaagtttgactctgaggcaaattttagggcttaatcatctatgtaatgagcaattaggacccttttatttttaactggttcttctctgtctcttgttctatatcactcacaaatgatgtatttctacagaacttgggagattcaagtctgtttcccttttaggaaaaaaatagtggacaaaagagatcttcgttttggtcgaatctatcaaacagtttaacattgtttatgaaatataattacatcatcatctgaagtggtattgtgttagatctcgatgtgaattttgcatccaaaggggaagacaggtggtggtagaatccagcttcctaatacgctttgcaaaggctttgtagtattagtttgtggtttatgaattagagatgctaattttataaaattagcataatgggaaaagaataatagcatgtcagctgttaaactttgaggcaatagtggttgcttgtttgctattcagt

SEQ ID NO: 67153 - DNA, 1034 bp, Homo sapiens
tagggaaccattttcggctggatttcagcacagaagtgactgcatctaatgtatcattttaaaagcatcactctggctgctgtgttgagaatgggaaagggtggagacagggaaaccaggtaggaagctgttggagtagttccagtgaggggtgttgacagcccagaccggggagtagcagtacaggtagtcctaagtggtcaaactcagaatatattttgaagtacaatcagtaggacttctcgacaggtggagactacctaagtaataggtataattatggaagaggccaagatctgatccctgaggcatttaaacattaaaagatttagaaaagaggagaaactagcagaagagacagaggaggaagaaaaccaagagaatgtggtatcctagaaaccaagtgaccaaagtattctcagaaggatcaagtgaacatctgtgacaaatgatgccgatagatcaaaaatgatgaggaatgacagttgaccattgtatactgcagtttggtaagagcagttttggtggagtgactgggccaaaagctagattgaaggggcttacagagcaaatgagagaagaaaaatggagagagcaaaatagacaaccctttcaaggagttctgctgcaaaaagggaaaaaagaaatgaggtagtaggtagaggcaatgagtcaagagaaggatttttaagcctttgcccattggaacatttttaaagctttggactgtagttttacaagtaaagtagaaatagctgttacatgttaggcatcatttctatgaaaataggatagtctaaattgttctttcttgctaagatctttgaaacaaatttggattacattgttttatacacattgagacataatttggggatttttaaatgtataaggtttatatttaaagtaaaatctctagggtaaatggtcaattggagttctggaaagaagaatctgatgtccacagaaaagttggacagtgaatgctattatcttattttccactcttgggtacagttaatttcttgaccatt

SEQ ID NO: 67154 - DNA, 1034 bp, Homo sapiens
gcagggaaccaagaagctaattggaaactgagccagtagaagggattttttcactgctagggtgatctgactgtgttcttatattggggatttccaatgtttgtatctttacacttgagttgatggattaccaagagaagattctttgtcttctacccataaggtaaagcctggttgccatagttttggccttatggatgaggaatgctaacgcatgtcagtatccggtatgcatgtttacttaagctttctgttttcaactgcacctagggttcttaggtctggagacccttcattttagtctctccttgagaggataagcctctagatttctactggggtagaaatcagggcactcacccagtccataaaatgaagggaggagatttggggattgaattattttttaaaccatcttcacctgatcatccttattttagcttcattttacaccaacttccagtttcttgtgccatcagttcctgagtctttggggcattctactatgtaaattatattgattcaaggcattttccattgctgaggcttcaagtttctcaagtcagttgagctggtatttcaacagtgagattttttttgtttccaagttctttagtttgttctttttcctgtttcctgttctattctgtaaaatatatgtgatatagtctcttatctctgggaagatagtaaacatatatatttatctctagatgttccttttttcttatgtttttctttaaatacttgaacatagttgtaataactattttaacatcatcttataattccataatctataaattctaggtctatttctgttgtccttctcctgcttataggtaatattttcctgcttcttggtatgtttaattttttgttgttgttgtttttttgttttgttttgttttggatgctagtcattgtgagctttacattgccaagtttctggattttgttatcttcctgaaacagtgttgagctttagtgggcagcagttaagttacttatagtttggcttgatcttttcaagt

SEQ ID NO: 67155 - DNA, 1126 bp, Homo sapiens
ggctgaggcaggtagatcacgaggtcaggagatcgagaccatcctggctaacacggtgaaaccccatctctactaaaaatacaaaacattattagccgggcgtggtggcaggcacctgtagtcccagctacttgggaggctgaggcaggagaatggcatgaacctgggaggcggagcttgcagtgagctgagattgtgccactgcactccagcctgggtgacagtgcgagactctgtctcaaaaaaaaagaaaaagaaaaacctccttttttgtcatgaagatggtttttttactttttttctatttatagatgaaaataagtctgcagtctcaaaaatggagtattccatttttatcatatagtaaatgaaatttctctttctaaatcaaatgcagctggaaaaagaattacccttggaattagggaatctgtaatgttaaaaaataagttgtttaaggatgagcttgcagtcaaaaaaagaaaaaataaagaaaaaataaaaataagtaattaagagattttaaaacatagttgtagaatactatgcatggtatgatttcatttgggtttttaaatatattattactatttactatttaaagcagtttattttaatgccttagttctcttgagctgctataacaaaataccttaaactgggtaacataagcaacagaaatttatttctcgcagttctggaggcttggaaatcctagatcaaggtgccaatggtgtctggtaaggacccactttctcagatggcaccttctcactgcatcctcacacggtgaggggacaagttagctctcttgggtctcttttaatgggcactaatcctgaacagtgccctcatgacctaatcatctcccaaaggccacacctcctaatatatcacatcagggattagatttcaacgtattaattttggggaaacacaaacaagaccatagcatataatatgggctcctattgatatatactgtaaatatatttatacatgaaatatatatatttcatgtatatatatatattttcacagactggtgaaaaagtttagaaaatatgaatcaagctgtacagtggttgtatctatggagttgggattatggggaactttcatttgt

SEQ ID NO: 67156 - DNA, 1324 bp, Homo sapiens
tgttctcggaaccatagattgagaaaaacaacgttgtatcctttctcctaagctcagaaatgctcagtaacttgaccttcagctttggcaccaacttccctttccttgcaccagaagaattcttccaacagaaggcaagaaaagagaagatccaagaagatggacagtgagaaagggaattggcattttcgtaggaaagaggactacttcagagagaggttcctaaaattgaggtgtaatgaaggcttgtcttcctcacagggtggagatcagattggatacagatatgaacgtgcatattgccttgcaaagaagctttctaaggacattaaacagtgagaaatggtcagttgtggcaccaggacggagatttatgccaaagaatcttatcggaagtagattccatccattttcagtgccagcaccaaaatgttccacccataattttaggattgccctggggcaagctgggaggtgtctgtggtgtaaattagctttttcccttctcagatctgtcttcctttcccttccatgttatctacatttcataagttatctatacagtttaaacacctcttttgttttactttgctttgttctattttattgaccattctttgacacttgccatgtgtgttttgaattccaaagtcaatttcaagatggtttccattgttaagaatttgaagcaaaagactgtgaggaaagcaaatatagaaatttcttagggaaaacatgattgtaataaagtatatgttagtaaatatttttctgctctatagcagtggtcttactattccttcctaagggaatttctttattgttttttcaatttttaatacaaaataagtgcatctgaaggggaggaagaactcttaaaagctccaatgattgggtgaatccttatggaaaaatcataaaaagaaaaaacccggctgtcagagttagagtatctaatttccttttctctgccagatattttatttgcctgttgaaatctctgattgttatattatctcctatgctgtagatttttaatctttggaatgtagactacttcaagatctgagttattattattcagtaatgacaagagtatttggccattgtcagatcatttggccaaaagagatcctgtttgcctaattctttttcttatttcttgactcagttgtgtaatattgtcacttgtaccctgtttatagttctatctgtgtaaaaaccaaattatgagttacttaaaggtaagttctttaatattatgctttgtttaatcagtataaaacaacttttcaaagtgttgttctacagttctgagataagc

SEQ ID NO: 67157 - DNA, 1067 bp, Homo sapiens
ttaatggccagtttgtgtgatactgattacatgatcattttttcatttttatttactttcataatcttctttattaagttttactatcattggagctattctttagtctcttatctgttattgtcggtgccttttaattttgcaattttactgttattggagacattttttgtctctcatctgttattgttggccccttttaatttgcaatattagtctgatttgacttttgccttttcatctacctcccatgttctagacatggcttgttaagtaggagaacacacacgcaacccaactcttgtgaagggaaatacagtgtaaggttacaaagatgtctcatggtaattcaaggataggaagtgcagcttaggcaggcatcgtgggaaccagaaagctaaaagataccttttttcttaaaagagtagtgttgttctttttattggcctctctgcttcttgagacacatctgtctatgcctcctcactgtcccagctggcttcctccgtcgcttattccttttacaatggctcaaacgcattctccattttttaaagctctttcagctcagttccacacagctcactggcagcttccgtctttgtctctcattttcccaagaaagggaatctgattcacccacctcacttttcaatccaagtcacagaatccttcctgagccattagcctttcagctaaaagtaataaaaacctgattcaaattggctaagaaatgaggaaatgtattatctcctgtaacaggaaatccaaaggaggggcaacttttagagttgattggagacgcaaccgtgtcaaggagacacaggttctttgcatctcctcactctgccagcctcagctttatctttagtaaaatggctacagcaatttcaggtgtcacatccagatattcagaaaaccgaatggccatttcttcctgtggctttttcttaggcgtgagaaaacattttcctaaaatctgccctgaaaatgaacctcatgtttcattggctggatttgcagttagagacctgtttggattaataagctctgttggtgagaaagag

SEQ ID NO: 67158 - DNA, 1057 bp, Homo sapiens
ttgagtacacaccttaggtctgagctatgaccagtcacacttcattatattttataatttttgagtcctcatctattttgatcaaattaaagatgtcttcagtttccgatcatatgggagcttattgtgccatggtaacaactttggcttgtagtccgagtgacgtgggaagccattggaggattattggcagaggactgatagaactgtttctaaagattgctctggctactctgtcaagaatggaagacagagatgcaaagataaaaggaaaaccagttaagaaactattctaatagttcaggcaagggataatcgtgacttgcactagaggaggattgatgcagttcaagaaaaatggtgggattctggacatgtcatagttaagagttgaaaggatttgttgatggattggatgtggagagagggcagggtgtggagattagctctaagattagagtggcatcatagatatccatgtggagttggtgaatagacaactgatagttgaggctacacatcagggtgcccaatactttattaatgaatgaatagctgatagataattcaagaaggaaatgtataaaatgaaagttttaaagagaacaagaattacagttaactcctttactatgactcacatggtccttttctctatgcttccaagcagatctcattttgactagaatacaactaaactggttaagagtttggacagggtgagagagagagtgtgtgtgagcatgctagaggaaatacatttgtatgtgtatatttatttctctcagaatctaagtgtctgtctctcagaatctaagacttgacgtcagaaaaattgttgctactaatctatgtagagatattacaactttatggaattgtgtttaattaaaattattatttttaaaacttcttcattttaacttccatataaaattagaaatgttttcccaaaatcaggcatggtggtgcatgcctgtagtcccagctactctggaggctaaggcaggagaatcgcttgagcccaggagttctaatccagcctgggcaacataat

SEQ ID NO: 67159 - DNA, 1055 bp, Homo sapiens
attttttgttttaatttctgcttaatgggactgtacagattattaacctgagtttacagtttcacattatttttcagtgctttttacaaatgtaaattagatcaagtctctcatctacttaaagtccttaagtggctatcaatattttaagatacagacccccttgttaggcctagaaatcctcgcttagtttgactttgacttcttcagtttcatcgtacgccttcctccttccctgttctttatgtgttagcctcattggtctcctttcagttttgtgaacgtgctgcacctttttttagaatgcttttctcccagttgaaatagtatcttcaaaaagaagcctttcatgatcaccctgtctacagtggcctcacccagatactttccagttgatcatccctgtacctctaacatttattgccccctgaaattgtaatgtttgtctccttattcattgtctttttctccactcaaatagaagtttcatgaggccaaagtgccaagcatcgtgagagacacaaataagtcactcaaatatttgtcaaatggagtttattcttcaaactcaagtagtgtaactttctttcttaatttgattccatgagggagaaagcactgtgctttgagattgacctgaaaaaaagtcaggacagttgagggccgtgagttctgtgctactgtgctcatcactcttatgtaactgattttattctcattgactgagatatttagggtgctttttaagatctttacatatgtatgaaaactggcaaaaaaaattatgattttctgtacatgtttatcagccttgatttgccctattaaatatttcacagttagaattataaatttcttgctaatgtacattttatgttgtaagtactaggctcttatttgatgctgcagacagcatgatattcttacgtgacaggaaaaaaaaattgctatgtgtgggcagaagccagtaggatagatgtggaataaaaccccctttaagggttctttgccatgaagtgccagttcatgtgcagagcaatttaaggtatgactct

SEQ ID NO: 67160 - DNA, 1055 bp, Homo sapiens
ttgttttcttccctagagtatgggagttgttctttatgtccttgtctgtggagctctgccctttgatggaccgactcttccaattttgaggcagagggttctggaaggaagattccggattccgtatttcatgtcagaaggtaatcaacttttcatcttattaatggtgttttacagtgttagtgctccaagtgaaatgcctaggtaaaagcttctttttttctaagagtttgggtgccaaataaagtgactgagctgtaggttaaaagctatagaaagaagcaacctcctttatgtaggcgagacaggttccagccttctacttgtaactaaacacacagcatttcccagattaagagcagcatgtcttctcattcattctgggtctataaatgtcccaggtttattttagatttaacgaagccctttgtagatacagattcacaaccattttactccaatatgaaatgaactttataaaattaaaatttttttaattaaataaaaagccaaactggcaaaactctgctaaattcagatgatatgccataatccctgcctgtcgtgtattgagctgttacctagatagcagttaagtttaccccttagtttcattttggttatcattcttaactctgttctttctactaagagtagaaataataactcttcatagttaagagcatggactgtgaaggcagactaccagactgcctggttttaatcctgagtccactggttactggccatatgactttcacaagttttgtctcctctctatctgcttcaatttccccatctataaaatggaaataacaatagcacctaccgcacgggtgttgtaaggtttaattaaattaatctgtcagtcaggtgcagtggtttatacctgtaagtccagtggtctgggaggctgaggcgggaggatctcttaaggccaggagttggagaccagcctgcacaatattgcaagaccctgtctctacaaaaaagttttttttcaattagccgggtgtggtggcatgcacctgtagtcctagctactcaggaagctg

SEQ ID NO: 67161 - DNA, 1062 bp, Homo sapiens
caaatcaaggagcataaatggatgctcatagaagttcctgtccagagacctgttctctatccacaagagcaagaaaatgagccatccatcggggagtttaatgagcaggttctgcgactgatgcacagccttggaatagatcagcagaaaaccattgaggtaaagtgatcagagatttcggggttctactgcacttagctacttgaaatttcatgctcacacctgtcatcctggtcttttagcacatgtatctccagcgcctaggcgtactgttcagtgttccctatagatgacatcagactctatttatatttgcttttattcagcatcttaaattcctttctttgcccccatctgccaaaacattcaagaggaggcatttataaaagactcagaaaaggcaaagatggaagcttaacaaatacaaggtagaaagtttcttccaagatgaagcatgaagttttacataggtatttaactagtttgtatggaatgtaaatgtgcagataggcaaagggccaagcaggaaacaagaagggtaggtatcaggtttaagaaagccaggggatttagattgtgaactggagaaactaagaaggcaaaaacaggtgggctcctgatttggaagtattaggggtcatagaactgtgaagggtcatgaacctggaaaattcctcttggcttttatttctgtcctcgaatagttagcatacttataggatatacgtatttctaatacctttacgatagtaaaaaagcaaacagtgctcttcaggaagaaacataacaagaaagaatatcaaatgccgccttgtttgctgtgaaagaccaaggctccgggctgtgctgcctttcccccgccacgtagccataagtgaaaccaaactgattctcctgctttgctcactttgcgcccagtgatgtttttctgtacttgtccatgaagtgcatcctgagcagtagctgggcgtgtgattccactgacctgtgatttttgctgagagtgctctgcatcctggtgccctgcacagcacccatgccgactgtcaggtggaattagaa

SEQ ID NO: 67162 - DNA, 1032 bp, Homo sapiens
atcattgcgtattgacactcttaaagaatatcttgataatatctgcttccttgggatattgaccatctatttatttaatatttgctaatcaactgtgtaatgctgagcatgctgtctgtatatttataccctctcttgttccaaaaagactcctttggtcccctcagtgatcacaagactcctaaaacccaccatatttcctaggaagtgattgtcacaacaaaaagcgttattccttgatcctgtctgttattcctctaaccgagttcacagtcagttgtagtagtccaggtcggatgtgaacactgtcaaggactatgtgctacgcttggtctggcacagcaccgtctggccatttaaagcgtccgagctagtgagagtcagggacggagcagtgtgtcgtagttagggcatgggcatctcatttccatatagcacccccagtcatgcgttgccctaataattcagactaccttcatagagaaggagcagtctaataaagttgggaagtagaaatcaattcttcagttttatcctttgattgaaaagctattgatgggggtaagaagaatgtagcaaatatactttagtgggaagtgtaaattttacatattgactagataaaaattttacatagtagctagataatttaaaagcctgatatttgaaaagaaaaagttgtttaacatcagaagtggcacagaatataagcttgaggaatgacaacacaaggaaagctatttctttatcacactctgaatggtatgcagttgtttacttgtttgtttatttgttttggggcatccataccattctgacactttgctaatgctactttatcttatacagtatagccagtgatattaatattggaatataccaaatataaagtatgttgaaaatatattcagagtatattcaaatataaaatatatttctaacatatccccccatccttgaaaatcatcaatccaagattctaactaggaaccgttagtatttgagaacgagactgcattcattttgcaaact

SEQ ID NO: 67163 - DNA, 1067 bp, Homo sapiens
attaatgctgaaaacaaaaaaattaactttcatgccaaattgggctttatttgattactattgctgctcttctgcataggtacctcaggtacaaaatgatgggccgtcttttgtgatcagttatacatgtgtttttgtccaatttggaaatgtttaaaagttaatgtgctgggccaggcacagtggctcaagcctgtaatcccagcactttgggaggccgaggcgggcagattgcctgagctcaggagttccagaccaccttgggcaacatggtgaaactccatctctactaaaatacaaaaaattagccaggcgtggtggtacacacctgtaatctgagctactcaggaggctgaggcacgagaatgtcttgagcccagggggccgaggtggcagtgagccgagatcacagcaccacactccagcctgggtgacagagtgagactccatctcaaaaaattaataaattaataaaaataaaagttagtatgtggaatgaagttggcatttaggatacagaagatgacagcttctctcattcatagatgtctctttaacttccaatgtgtattatatatacttagcataagcgatgtatagaagatcataataatgggtagtagagtgtcatagaaaacacaggtcttggagcgtgttcaaaatagacctcctcttagtgtgaacttgggccacgtaacaaaactctttgaacctcagttttctcttatataaaaggagaacaccaactttatgagactattatgaggattaattgagataatgtgtgtgaggtttgggacagattatagataataaataatggtttcctgtctttttagcctctttagataataaaaagatgagtgagacatgaactctgcctctccagagtccactatagcctagcagaagaaacattatacatactgaaagacagcgccaggtgctgaataaattgataaaagataaaatatgggccgggcatggtggcttacgcctgtaatcgcagcactttgggaggccaaggcggacagatcatgacgtcaggagttcaagaccagcgtggc

SEQ ID NO: 67164 - DNA, 1022 bp, Homo sapiens
ttccctcaaaagaattaaaatgcagttgactaaaggcttgtctgtgagggcatcaggcctaaaacacagattgggcactgactgctgtattatatagggcaagctatttttaaagcttgtgattgttactgtaaccagaaaacaggcaggaaatgaatgattttgcaaaagatatagacaggagctagatggtatatttgcatttgtaggaagagcagtgccacgctggagctggtcacccacactggcaatgccatgctggcactcagtcaggccatagacatcctccgggcttctttgtggaccgttttatttatgtcagcaaaaacgcttgtccctcttccctccctaagacctctttcttggggcccataaataagtgcacacacacacacagaaaaacttatcagagacacagttccctttttattgagactgcctcatgtgcatttactgtaacacccatttgttgttttctgattgatgcttcattgctgcatgtattgatacttgcatttctcctctcaactggggacaggtattgtgcatctcaaagagacttcagctctccttccctcccagaaatcttcagtgcttaaaattgtcagtaaaatcccttggggagtctgaatggaaactttggtttgcagtttcaaaaaaatattgcctttctgagatagttgcccaactctagataagaatggttggatcaggtgttccaaacaggaactgagatccacagatgacatgggggccatatgggagggcagatgcataaaccttgtagaataaatctacttcaagtatctctttttaataaggaattttatatacatacatatacacgcacacttgagtcatttttagctttttttttttttttttttttttttgagatggagtatcactcttgtcacccaggctggagtgcagtgacacgatctcagctcattgcaacctccgccccccgggttcaagcgattctcctgcctcagactcctgagtagctgggagtacaggcg

SEQ ID NO: 67165 - DNA, 1058 bp, Homo sapiens
ttaagtttagtcaaaaaggaaagtttatctggggaaggaccaaggagagagcaagagttgctggccaggtttcagagttttgctttctgctgccatggggaagattggccagtgtggaaaggaagcatttaccactcttcctcttaaatgaccgctcatcgctttaaaaccctgtaatgcattagccaccttacccgagtgagggctatagcccagaatggattttatggaataaccttcccctccctgcagcaaacaaagatctgagtcaccctagtctccttctccaaataaagggcctcgcagcgccttcagattggctgccataagaggaaagtttcctgtgtgtctggtaaagggaaaccccacaccacctctcacatacatgagcttctcctgcttccaaaggaaacagtagctctacccagtgttttccaggtgaaagtactgcttagaactcagcgtcttatgactggctgttcctgagcagctattcataggagaaaatggattgatttccacgggggaatagttaaggtaatgaggtaaataattacctcctcacaggggcctttaccagccagaacttgcaaccacaacccccatgccagtatgctgttctgcctgccattaggcagtgtgcgtggcaactgcatgggaagggccaatgcttgcggggagctgtgctgcgctcacccctgtgggataggaaccatcgataacgtatatgttgctggaggagacaaaattcagtgcactggggcttattagcctctgctggaattttgggccagtgagccctttgttattctacaatgggaggctttggctgtctgccatttgaatttttttcaatcctttttgtggtatcagtctgtctatatagaattcttactttccattccccaggcatatagaaccaattaaagactaaatcaaatgggcaggtacttaaattttgaacataaaagtctttctaaaaccttccattatgtttatggttgaaaaaatagaagaatcttggtgactacccctttttttttttttttttttagcaa

SEQ ID NO: 67166 - DNA, 1017 bp, Homo sapiens
gactaaattggccagtaaaagggctctgaaaagatgttttgattggaaattaaggacatggtagctgtcaaaactcaagctggttatgctttgtaccctatgttccaaggagatgctattgctgttggttttatctgttctgttttctcttaaagggaaaattttctccatgaatgacagcccctcccttgacagtgtggactctgagtatgatatggggtctgttcagagggacctgaactttctggaagacaacccttcccttaaggacatcatgttagccaatcagccttcaccccgcatgacatctcccttcataagcctgagacctaccaacccagccatgcaggctctgagctcccagaaacgagaggtccacaacaggtctccagtgagcttcagagagggccgcagagcatcagatacctccctcacccagggtgagcacttcctcctctgctttttgaaactcgcgtcgtaggagagcagtttcttgccatgttggtgtggtcacctgtggtcactgaaaggccttgtattttagttaaactgtttggtcttggtgctttctttcaggaattgtagcatttagacaacatcttcagaatctggctagaaccaaaggaattctagagttgaacaaagtgcagttgttgtatgaacaaataggaccggaggcagaccctaacctggcgccggcggctcctcagctccaggaccttgctagcagctgccctcaggtgggtaccttgggcccttccctcaatggctctgtgaggatgaggtgtgagtttgtcctgaagatggtcattttcacttagaggatttcctccagtcctggagcaaacaggctgtttgggaaaacccacagcttctttgccttgttgctgccacctgccactgacgggttcaacccatccacgctgcttccaagtgatcaataccagatggaggcctggacactctcaagctgtttttggctcacagggcagagtacagatgagtgacctcttacag

SEQ ID NO: 67167 - DNA, 1108 bp, Homo sapiens
actgtcatttttgtgatttaataacacacagtgaaaatccaggaagaatgaattaagcttcttctgggagttgtttattcctgctcgtgcttaagattgatgatttcgtgaaataaagaacatcatttcatttaagagatcatttcattaagatctctaatctgttttgagtctttacaaaatagccagttataaaatggggcttgatttgtttagactgaaggaagacgttttcccaaaatatactacagaagtgctacaatatttgcgatattaaaatgcctgcagattgaaaatgggggccactcatttcagaactgcaggaatggtgtagttacagatcgacataaactcctgccccccaacaatgccatgagctgcttagcccaggagacctgggagctatggcaggacggttaggccagccgatgagggactgcagagaggctactggaaggttaaggacccagagagaaatcgagaggtgccctacagcagccaggcctatcaggatccgtcacacacggcagcggcgtggacaccggcctgatgcagagcgtgacccctcctgctgggacctgtgttgtaagctcctatttgcttatcttgtttatttcaagcagaaatcaataaattccataaccctctgtattgactgcaatgtaagctgctgaggagactggttctgttggtcagtcaggtgtttgctcagccctgtctgatcacctgtgctgctctgtccctaactagtgacccatggaagcttccaagcagttttctcttcatcactactaacaaacaaaacactaagaaggcttagtatcgctctttttctgcggggctactctgaagtactgacttgctttccagtctgattcacgttagcagtgtgtacactactgtatcatcatcagcttcatcaccctgtaaaccaggctcctctgaagagactttggtgagatgaacgtgaggtaaaaatttcgttcggcaaaaagtgcaatatgtgtggtactttattttttatgttctttttttaaatctggggtattagtctgtgctttgggagaaatgcactagctctgcaattcccagctgggcaagtgtgtct

SEQ ID NO: 67168 - DNA, 1475 bp, Homo sapiens
agctgtcactcttgtagcttgaggcccatctcctatcacctcccagtccaacagcgaggcccatacagaggacaccagtggggtttggtgaagaattgcttgtaaaaaggggctgttcccactttcctcacataatatagaagtgacttgccataattcctctcagttatttccattcaagataaaaatagttgcaagtttctctgtaacagctcagatgttctacaagccccattggatgccactctgtgtggaaatggtgtgaaaagccccagttcagcagtcagtgggtgccagccactgccccagggccattcattaggagggcgatttgtggcttacagatacattcagaaaaggagagcagcagggcttggctgcctcgtgcggatgccagactgcgtttagttcatggggaaaaatctgacattctcacacccattctagtaggttcgcttagtgaaaattcaatgaagtaacatcaaaaaggctgccttttaagtcacatggcttttcattttatgtgaaccgaaaccatgaaaacgttttttgccttttgttgaggtccagaatcgcagtcactcatcttagaacattcttgccttcctgaggggctgcacacttgtccgtgggcagctccagccgttcctgcagtggccgcacagtgagaggaagggctgggtgaccactgtccagttggattccaggggtggccagcccttggagtccatgtcgtcttcacagaactgggcctcagggaggagagcttggctgaaggagtgggagtgacagttacacattttttaggcctaaaccacagacttctttgggaagaaaggggttacgtcttcctacaaattcagagccagctgctcatgccatgaatgcgtggtatgacccgatctgagtgtggatcattgaggcggccctcccatggctgacctgctcagctctgacagggcccgggctgcctctgctagccgaggagttactgagaataagttgccgttactcgagccttggtcactgcagcaccttgtcaggcacttcaaatctcatgtcatcctcacccaccctaggtggtaggtgctatcattgttttttggtccctcatgaatctcctccaacccctggcatgtctatttgggaatcttttttccaggaaaggaggcccagtggtgctaggcctctgaggcttcagttcatttaactcagaaaaatcccccgccccatgactcagggagccttccatgcatttgtttcacttaaggaaaatgacccgagggtgagatggaaagggaattggctgttgccaggcagagccctgtgtgtcaggggccagcagccaagtgagtgatccaggaagtcatccaattgcaaccagaaattgttcttaacccctcactgtctagggtgcgtagtggacttgccaatctgtccgaatggggtgagcgtgagcgcgctgctgttgagag

SEQ ID NO: 67169 - DNA, 1127 bp, Homo sapiens
gctctgtaaggctggtatttttgtctgttttatcttctactgtatcgccagtgcctggaacagtgtctggtgcacataataggtgctcaataaaaatgtgttcaatggatgaatttctaaaatatcctccaatgtgtgcatggaacaaataatcaaaagaaccagactgtgtcttattctcccactgacagaaagattttcctgctttcaggaaacaagctttatgtggcccttttctggtcccctggcttagactacagttctgtgtggatttgtctgattgcttcagacatgtaatgttgtttttcatccttggcagcttacatcagttgtttgtttgattagaaaaatgaagcagacacacacacacacacacacacacacacacacacacacacacaaacatataacctatgccaataaaaatgtctcagcaacagtggaattcaccttggtgtttctctctgtaatttgtgtggggtttacccctcacaggtttaagagaccaggtcttgtttctctctctgtgctaccaagaagatgtgaacctgaggatgcatcttgtttcataagaaggaaggcaggtgaatatgtggtttctaacgaggtcttgttgaaataacgggctgccctcagctcacagaaataccacagctcagccactgtgatgcagagccccaggggtctttgccagacaacttgtcctgactcaacagagacggcagcctgacctttgagctggcttgtccaggcattcaggttgcttgcgtagacttccagggaagcaagcctgtccttcctgacccggcggttaacctggtgcacttttgttcctttgttaactgttgtgttgtcactaaactgaaaggctggggcttgcccttagacgtcacattggctctgtccctgtggcgatggcagggcagggtggccaaacaggtcaggtgcttgttctgtcctcttgccttttacttaaattcctctgacttttaaaaatggtgacactcttatcgtaaagcttcttatttttctccactgcttggatatgaaactgtagagggagaggccctgttgcccagtgttctcctggtttagcagctgaggtgactgcagtctgatgtgatgta

SEQ ID NO: 67170 - DNA, 1603 bp, Homo sapiens
agactgtctttcacagataatacttttgaatgtcagtgctttacagggagaagtgaagccagtactacagaagttaggtcaagatgaagacatggatgtcaaatactttgcacaggaagctataagtggtatgtatttccttcttttgccttgcagcttatgccttggttaactgggatttatctctattatgtgagaggtgttaagtgggtaggatgataagtattatgggaaacagggagggtagtaagttcctggaatgctggtgtctctctgattagaaccctcttggcccaccattttctcataagtgagcaggctatttttcttagttacatgtaggactgggtaggaaatacgattctcactggtaagaatagtttttcgtttggaatttaaccagtttttaaagtttcacttctgattagcctggctgagtaaagacagtaaccacagtgagaagttgttagtttgatacgtttggatcattgttattgtgcttaatattcacatagatcgttcgtgaactttctgtaccactaacctgattttgtttggaattttccagttcttgcattggcataatgaggagcaggagggaaaaggcctttactagattcttgtcacaaatttctagtcaatgtgttcttaactgggtggagaaagaatggaaaaccttcaagatctcatccaagcaaatggcaacaacttagaagaaatcatttagtgacttaattctttctaaagatgaaatgggattgttttttactcgtcttccttgttaaatcattatttaagccgttcttattgaccaattcctgacacttgattgtctcctaatgctttatccatcaccacctgggctcctgcatcctcactgtggaatcaggcaccagccacataatgttccagacaaagcctggaagggtgtggacccagacgtggagtggagtgattctcttgacgtttacatatatctctgtgtctctccatcattccaaagctaaatgtacatgtttagaataacttattttataaactcttcgggagacatgttgagatttgaccgtaatgaaagccacattttcctgaattatgatggtctgcattagtctcatgtgaaaggggaatgtggaagctcagggttaatgtagtggttgttttggtttttatttgctcaattttgtctgtactcatgtcattcagaaacctgaagtgtggctgcatcttgctgctaatgtgtgatgttgacgcctaactgaatttgaacagctcaccactgtgcctacatttaaaaatacttctctctcttttctaaaaagctttaactgtagtgcctcctaataagcagtatgtttgtttcattgtgagattgcagttctgtatttcgaatgagtctaagaaccacagggataatactgtgcagatttcctgttctttacctggctctgcttccagcagtattgacacctagtccttgctgcattgtacagtagcttttcaaactgcagttttattgctaagtttttagtatgggtgatactggagtcttatcatttgaagtgtttgcttttctacttttacagtaaaacctcattaattc

SEQ ID NO: 67171 - DNA, 2055 bp, Homo sapiens
taattttttgtatttttagtagagacggggtttcactgtggtctcgatctcctgacctcgtgatctgcccgtctcggcctcccaaagtgctgggattacaggtgtgagccaccgcacccggccaattatcccattttacagatgagaaagctgaggcatagagggttaaagtaacttgagcaaggtctttcaacaatgacagatctgaaatttgagtgcatctgatttagttccagagattatgctctttaccatcttacggacttttcttgtagtctttagtattacggacttttaattgaaatttctgattaagatcatttatgttccttgagttatttatgtattcactattatttcttcaagattatccatttttttttcacctgagtcttacctcaccttttatcttaccctgacaggagactgttgggcagagtacttgatttttaaatgtggtcttttggggcttgtgtacttgcagtgtcctgacgttcgtttgaatatcatctccaatttggattgtgtaaatgaagtgattggaatccgtcagctctctcagtctctccttcctgccatagtggagctggcagaagatgccaaatggagggtccgcctggccatcattgagtatatgccgctgctggcaggccagctggtgagtatgtgttgctccatgaactgcagggtagtgtcagatagtgacaatttaccatggcaagtaggaggcctagtagcctgtatgcttatgtttgtttagatgcatgaaagtatggccttgttcttgttacctataggatggtttttatgtttgttagtgcatacgtttcttttcttttaagatggagtttcactgttgttgcccaggctggagtgcaatgatgcaatcttggctcactgcaacctccacctcctgggtttaagcgattctcctgtctcagcctcccaagtagctgggattacaggaatatgccaccacacccagctaattttgtatttttaatagagatggggttttaccatgttggtcaggctggtcttgaattcctgacctcaggtgattcacccgcctcagcctcccaaagtgctgggattccaggcgtgagccactgcatctggcctattagtgcatacatttctaacaaaaaggtataggttgagtatccctcatctaaatacgcttgggaccagcatgtttgggaccagaagtggattttggaatatttgcattataaatatttactggttgagcagcccaaattcaaaaatgcaaagtccagaatgctccaatgagcatttcctttgagcatcatatcagtgctcaaaaagttttggattttggagcatttcacattttggatttttggatttgggatgcttaatctgtattacagaaacatatttcacctcatcaccaccgaaaaacaaagccatagaataatcagtttcttggtatatataatgtaaattttataatatttaatgcctttgtgacttaagaaatgtttaactgagaagaaaagggattatggttttagggtaagtctgctgtgatttttgctcaaggaaacttccctgtttgccttgtattctaagcaaaatgtccctaggtaccacttgccctacattctgattaaagggagttgaggaatcaccatatagaaaagaagtattgaaaggccgggcacagtggctgacacctgtaaacccagcactttgggagccagaggcaggcgaatcacttgaggctaggagttccagaccagcctggccaacatggtgaaaccccatctctactaaaaatacaaaaattagctgggcacggaggtgcacacctgtaataccagctactcgggaggctgaggcaggagaatcgcttgaacccaggaggcgaaggctgcagtgagccaagattgcactactgcactgcagcctgggcaacagagtaaaactttgtgtcaaaaaaaaaaaaacaaaacaaaaacaaaaactgaagcttgtaatgttagtattttggtcaaagtccacattatcacattatctgttactgtttga

SEQ ID NO: 67172 - DNA, 1038 bp, Homo sapiens
ttttttgagttggagttttgctctgtcacccaggctggagtgcagtggcgcgatctcggctcactgcagcctctgcctcctgggttcaagcaattctgctgcctcagccacctgagtagctgggattacaggcacgtgccaccatgcctggctaatttttgtattgttagtagagatggggtttcaccatgttggccaggctggtgttgaactcttgacctcaggtgatccgcctgcctcggcctcccaaagtgctgggattacaggcatgagccactgtgcctggcccctcactgatttgtcttgtatattttccacttgttcaaaggacgtaggtgtcacgttgacattggctgtttacatttggaaagttgagttcattaatcccatacttttctaatttctgtgtttttctagccacagcttcctcaaagttattctgtccttgatcttcgacatttaaatccaactgatttttgtttttgatttctaacttttaattgttctgtgtatttctttccaagtcattatcttatgctgcctacactcctgttactgcgaccctgatctgagttttttgaaaactaagctttctaagtgatttcctttactcttactcttacctttgtcctaatctgttataaataacttgtacaaatattgttttcatttttatccctcaactttctgttatagtaaggctttgaaggcatcattaaaatgttttttttttcttttttacttaattttaaaattttcatttcctttatagaaactctgcattctagccaaggtaattacttggctgtttactcatagtacaaagtcatttctatctttatgactttgacatgccattccaggcaaagggagcagctctttctttttttttttttcctttttgttttttgagacagagtgtcactctgtcgcccagactggagtgcagtggtgcagtctcggctcactgcaagctccgcctgctgggttcacgccattcgcctgcctcagcctcccgagtagctgggactacaggca

SEQ ID NO: 67173 - DNA, 1510 bp, Homo sapiens
ctaccatctctgtactttaccttttttttttgagacaagagcctcactctgtcacccaggctcaagtacagtggcacaatctcggctcactgcaacctctgcctcccgggttcaagtgattctcatgcctcagcctcctgagtaagctgggtttacaggcgtgtgccaccatgtctggctaatttttgtattttttgtagagacagggttccaccatgttggccaggctggtctcgagctcctgacctcaagtgatctgcccacctcggcctcccgacggctgggattacaggtgtgagccaccgtgcctggccagtctctgtagttttcacttgattgttctgtcagaaactcctttctgccctatggctaatggaaagttgctgaatgtgttctgaaaaaagcaattttgcattcagcattttataggttggataaaaggatgggatggagatggtggataagggttgcttgcacctctgggaatggtggaaagatactgaaaaggctgtggactcagtgacctgacaagctgttatcctgtatttgtggtgcctaacattggtcatagttttgtacttactcttgaggaaatatacatgatcctgtctgaatttggctatgtatcttttaaacctagtgattcaactcacagtaatattaatattgtgtcaagtcttttacactgtgtcatttgtagacaccatctgggaattgccatctgggacacgagatcttggcttttctacagaagtcgtgtctttgggttggccgcaccatatgttatcactgtgtgagctgaaagtaaccatttggtatgatgcagctaacattctggttacgtgtaccacctcccttcagtcactttaaaaggtgattatctgtttctaacctgattcaataagttttcttctctggttttcctttttaatccattcagcctcctttggaaaatctggcaactgtggaagagactgttgttcgtgacaaggctgtggagtccctgagacagatctcccaggagcatactcctgttgctctggaagcttattttgtacctctggtgaaacgcttagcaagtggggattggttcacctctcgcacatctgcatgtggtttgttcagcgtttgctatcccagggcatcaaatgctgttaaagcagaaatcagacagtaagccatggtatttttttgccttgttaaagcagaaatcaggtagtaagctatgagttatttgggattactggggacttgtagctgacaatttacatagtaccttgttaccaatgagtggctgatactaggatagtaggatttatgacatctttcttttttttttttaagagataaggtcttgctctgttgtctaggctggagtgcggtggcacaatcatagctcactgcaaccttgaactcttgtgcttaagtgatcctccagcctcagcctccaagtagctaggactaccgacatacactactgcgcctggctaatttttaaaaaaaatttctg

SEQ ID NO: 67174 - DNA, 2413 bp, Homo sapiens
ggaactggctcggcttgttgggtagaaagcgggggtgggatggccgattaatctggacgagtagtgtatccgctctgtgggaacttttctttgaaaccacaggtgttgtattcaaccgtttcacctgcttcaccactgccaaagtgctctctttttaaaattatcttacttcctaggtgttgtattgtctttccttcatttctcttccggtcccttctgagtgtttctcctgggaaatcctccgccggctagtgaggccgagttacacttctttttggaagtccttatgagcttccttaacagtaaaatctaaatgaaaggttatcttcattcttacccctgtgtcataatttcacctgttagcaccttttgtcttttgatctaaattcagccgtttctttacattgttcttctttctactttcttttctgaagctccgactcaacagtattaagaagttatcaacaattgccctagcacttggagtagaaaggacccgaagtgaattgttgccatttcttacaggtatgtgaatctttgtttaaagaaaggtagggacattccattttccagtagctttcaacactgacttttttagagtttattacccacattaaaatgagccaggtgttttttgtgcaaaagaaacagaacagagtatattgttagttgtggctagatatattcaaacatcaaccatttagctattgaaagtaattgatacgggagtatgaatttctaattcgttgtgcaaagcagatacaggaagacggttgagaagaaagaaaatgctgttaggattttgactgggtcaccttcctggtcgcatagtgaatctgttcctagttttgtgtcagtgtccagctgtgggagagctatccatgttgatgagtcctgttgttgtcacttccagatacaatttatgatgaagatgaggtactattagctcttgctgagcagctgggaaatttcactggcctagtgggaggtcctgactttgcccactgtctgctggtgagtatttataagctgcctaccctccttctacaacttttgcagtataaatgatacattgtttggtgatagacacactgcagcattttttatgcagatctttttatgggcagatagtcataatgttagtcattgagagaataagtactgtaggcactttgcactcaactccttttttttttttctgtaaataagagaacttcgtcctccttttctgcgtctgtagacttattagtttagatgtagggagaaaaagggtttgattgtttttatggttcccccgcgcgatggtggaagttttaattctcacctagcagcattttgtctttgtcagtttaacttttgcttctgactttgtgagtttgatgaatttagttcaatttaattgacatttattgagagtctactttatcagacacatcatagtttacaatgttaatgttgaagaagaccaatgtgagggggcttggtggcacaagcctgtagtaccagctactcaggaggctgagactggaggatcacttgagcccaggagtttgaatccagcctgggcaacatagtgagacccccatctcttaaaaaaaaaaaaagaccaccaaaatgaatctaatgaggtcactgcctttatgtgtcagcaaataattaccgtgcagtcgtaaatggaaagatataagtacccacaaaatacccacgtaatagaagggagaaagggattcactccgggtgatcagggaagaccttgggagatgatgtctgaactaggttttaaaggatgaccaggaattcaacagttggacaaggtaggggtgtatgtgtcagagctttgaatactgggtatgtaatactgattcttgtgatttctgtctctagttctgacttttccatggaactcctgaggtagattgattaatagataagtatgaatatatatatatagagagagagagagagagagagttttttttctgtctatgtatataggcctatgcttttttctacttgtatgtcaaacaggtatttcaaacttaacatacccaaaacaaaacttagctttatcccccaaatacacctctcatttagttgttccacttcagtaaatggtatcactatcttcccacttgcacaagccaaaacctagaatgtattcttgaatcctctgtgccttgttccacacatctaatccattagtaattcctatagagtctacgtatatttcaaataagtccactttcttccatccctcctattaccagcctagtccagactgtcatctttcctctagattgctgtagtagcttcctagcaatgctttccactcttgcctctcacccgactcttacagttcacatcacccagcagatggctcactctctgctatagctcttagaaaatccaaatt

SEQ ID NO: 67175 - DNA, 1043 bp, Homo sapiens
atggggaaactgatgcttggagatattattaagtgtcttgcccaagatcacctaggtagaaaatggtagacctgcaattcaaacccaagcagtctgacgcctgagccgctcttttaaccgtgacttatagtccctatttcataacctctttgaagtctacagtcttttttggatgatatgttgggggaacctagacggagtcagtaggcagagatgagaacaggatgtagtcaaagttgtttcactttatgaaaaataagttatttatttatttagagatggggtctcactatgttgcccaggctggcctcaaactcccgggcttaagtgatcctcccgcctcagcctcctgagtagctgggactacaggcacttgtttcagttttttatcaccttcttagtccacttccagtaaccacagcctggagagtgtcctagtagaacagtatgcagctggtacatgaagtgtttgtaggggcttttctagaacactgggggcctccagctaattttaaccacatagctaaatcagagagggagttgatttcctgaaatcctagaagttagtggaaattccagtttctgattacagtcccagctggatttctgccgaaatgtgactttcgtgtccaggggatcttggcactggtcccttcttactcctgtgacttttctcctaccagttctgctgagtagatcagaaaaggaagtggggaagaataccatcttcaggggagaccaagggcaaaagctttcaggggaacaggaatattttaagttggccctgctgttgctaaatcaaacctctgtctagttggatcctgggggcagtgtgcctagctgctgaaatctactatttatgttggccaggtctagtacaagacatgatgataagtggccgggcgtggtggctcatgcctgtaatcccagcactttgagaggctgagtggagaggactgcctgagcccaggagttcaagaccaacctgggcaacatggtgagaccctgtctctttattttttttcttttaaaaaacgacatgg

SEQ ID NO: 67176 - DNA, 1041 bp, Homo sapiens
gaaaattgcagcccatactctttattaccgaattcaagtttggaaatagaccctttgttttaaatcatgatgggtctttatcccaatcatttatctgggtcatttttccaactttggagttctaggaaagaaccttgaaaacctgatatgattctgcagcatgaggtctacggtgaccatttgggcaaagctccagtggcaatcatttattgtgttttgcatttcctgggatttattgaaataagaattcactgtgattatgtagtcttctggctagtatcaggcagctctgcttttaatttggttaattttattttctctgaagagggagaagaggtacaatttaatcttggcctccacaagcatattaaagctcacgtgttaatcagtgcattcttatgctcctacattaaatgccttgggtaaatggataaatggacatgtgcccagctttaattttttttgcaacagaaagatcagacttccgtatggcatcgttggatttcagaggctttctggtgtatctgtaaatctgaatgttgccttctgccagtctgtataaccaggtgattcatgctgcaaatgaaatcaggaagcagtaaagtgttaaagcaagagtattgtccaattcacttgtcttcctgatccttgtactttatttcacgtgtcggtgtttacattacatacttatatttcctgtgaaagaaagagttaaataaattgtagcagtttgattttctttttcttaatgtgacattttctcttttgcttttaaatctttcttggaaattggaaactgaaggagctcaagtcctttctccctgactccagccctattcctcagtgtggagacctgccttctacaggccaaatatcccagaatgtttattctgaaaactttagaagaagactttgggaaacccagtgaggattagttttattttaactatgttaaaaccacgcacagtaggaattaatatatgggccaggcgtagtggctcacgcctgttatcacagcactgtgggatgccgagacgggtg

SEQ ID NO: 67177 - DNA, 1685 bp, Homo sapiens
tattgagatagggtctcgctctgtcacccatgctggagtgcagaggcatgatcttggttcactgcaacttccacctcccgggttcaagcaattctcctgtctcagcctcccaagtagctgggattacaggcatgcaccaccatgcctggctaatttttttgtatttttaatagagacagagtttcaccatgttggtctggctggtctcgaactcctgacctcaaatgatctgcctgcctcggcctccaaaagtgctggaattacaggcgtgagccagtgcacccggccgataatatatttaaaagtataagcacttttcacattcttcagaaattcatgagaaatttaggttttcagttcttatatttcagtaataagtagatatattataatttactagggacatgttgtcacaacatgaacttgtgtgtagactctttccttgacttagacaatactggaacactatgcacaggtacccaggatgtagttttcttgccctttccaggaaaacttagagctggagtccaggtcatttgagtacttggcatctctacagtttcttagatgcagaaaccattttggtgttaagaattcatttcagcaatagaagtcctttgattgacctggaatttttctatggcacattctaatgcaaaatgaagacctagagctattctgaaggatatactgtggcttattagggacaataataaattttcgtttaggtgacaaggtactcggccttgattaagtcttttatcgtgatctagtaccgaaataataggcttttctgtgccacttgaataaaatataatccttactacagattagtttatttattttaatcacatttagtaccattagtaaattctcccaagtgataaaattcttttttttatcccttgtttttcagatcttcaaagctgctgcgggcattctatgtccccttcctgtcagatcagtatacagtgtacgtaaactacaccatcctcaaaccccggaaagcaaagcaaatcaggaagaaaagtggaggttagcaacacacctgtggccccaaaggacaaccatcttgttaactattgattccagtgacctgactccctgcaagtcatcgcctgtaacatttgtaataaaggtcttctgacatgaatactggaatctgggtgctctgggctagtcaaagtctatttcaaagtctaatcaaagtcacatttgctccctgtgtgtgtctctgttctgcatgtaaactttttgcagctaggcagagaaaggccctaaagcacagatagatatattgctccacatctcattgtttttcctctgttcaattatttactagaccggagaagagcagaaccaacttacaggaagaattgaaaatcctggtactggatggctgtgataagctgttctccacactctggcctggcatctgagaactagcaagcctctcttaggccatatgggcttctccaccaaagctgtttggcagctcctagcagaccttcttattgaaatcctcatgctgaaaatgaacacagcctagttgccaacccacatgtccttttcacctccagcaagactaagcttctttaaagcacttcacaggactaggaccctgtcctggagctatctcaggaaaaaggtgaccatttgaggaactgtgacctaattttattata

SEQ ID NO: 67178 - DNA, 1029 bp, Homo sapiens
accatagaggcaccaaatcatgtgctagaactttaaagaaaggagggacctgtggagattagagtacacttagaaggcttccagaaggagggggtgcttgagctgaagaaaagtaggattaaataagtactggtggtaaggagggaagaaccacttatttaattcaagaagcaatcatgagtaaaagtggaaagatataaaatgcctgttggatgaggggcccattagtcagcatcaaaaagttctatttacctctttggctggtttgaatttgcttttatgtaaggtaatctataatgtatcatccacatcagaagtcttttgaaagtaaaaggggtcctgtcctggataaattgaaatatatggtcatcttgctttaatgtgacccgagcaaagagacttgttccaaaaagcaggatgggagaaagaagatacatagatatattttctttgttccatagtccatttactatgtggatttgcccatggtttacttatttgatttaacttgctgacaattcttattattgtggcctagattgggcctcagctgtctgaaagagaagcaatcagggtagtttgaaggcagtaccagcatgtttgtttgtttgtttaaaaaaaaaaaaaaaaaggaatcagccgggcacggtggctcatgcctgtaatcccaggactttgggaggccaaggcgagcggatcataggtgaagagattgagaccatcctggccatagtgaaaccccatctctactaaaaatacaaaaattagctgggcgtggtggtgcatgcctgtagtcccagctactcgggaggctgaagcaggagaatcacttgaacccgggaggtggaggttgcagtgagccgagatcgcaccactgcattccagcctggtgacagagcgagactgtctcaatacaaaaaaaaattatactgtgagttatatgtaattggagtttccacttcagggagttgcaacctaaagatgattgggacaattttgtgattggggcaaatttaggaattccacatg

SEQ ID NO: 67179 - DNA, 1040 bp, Homo sapiens
cttgatgcttctaggtatgtggctttaatcctatgggatattccaggactagtatgggtaaaaattggattctaggattatataacttccagtcctgggttgactctagtagccatcgtgtgtgtgtgtgtgtgtgtgtaatggagtctcactctgttgcccaggctggtgtgatctcaactccccacaacctctgactcctgggttcaagtgattcttctgcctcagcctcccaagtagctgggattacaggcgcacaccaccatgcccggctaatttttgtatttttggtagagacagggttttaccatgttggccaggctggtctcccaactcctgacctcaggtgatccacctgccatggtctcccaaagtgctgggattacaggcatgagtcaccatgcccggcccatcattttctttttatttgggcccagtttcctgagaaatcttaaagatttcttttttgaggcaccagaatgcaaagtatattctggtttcgcccaagtgaaagcatccaagtaaagcagataggtctgctgaagaaagcacaagtgtttgacactgattatttttggcaaccaacttcagctatcttaactgagagcattttgacactgttaggaagattgactatgccctttgaggaactagaagttcatgttcattattttcaggctcaaggctcagccagggctgagataggccttattcagtcttaaatagagagaccaaatggaccagggcttgactcgctcttcagaaaggtctcagaattaatgataagaggggatcaggcattcagataagggagtaatggggaagaggagttggaggggtcaaggtgtctgagggcagaggtccaggtaaacagacagttggagttaaggagatccagggaggcctggtgagcagagcccaggagccaggaggtctggaaggaagcaaaagacagaggacctggtcctgagagtcaggtctggggctcagaaacggactgggcccaggcccaggacaggactccagaaagacgaagtaag

SEQ ID NO: 67180 - DNA, 1039 bp, Homo sapiens
ttctattagccattaacttgacatttatatgtgtcctaaccaaatctagtattgtgcttgttgttagagtttagatctcttgggagagctaaggagtatattcttctctccttttgatgcctttatggcattggagaaagtgtgaatacaagagtagaaacattctatggagtgtcctagggcatactcctaaatttgagatcaagataacactaaaactaaatatgttgttttgttctaatataatgaaagatgggtatttttctgtgtcttgcagttcagaatttaggccacccgtattggcttaccttggctccaatgtatatttggtttataattttcttcatccagcctcacaaagaggagagatttcttttccctgtgtatccacttatatgtctctgtggcgctgtggctctctctgcacttcaggtgagtttcagggagaagtgtatctgcctcattcttttttacttattaaataattgctcacaaacttaagtgcaaattacagaatgcttccacctaagatattttatccataacattaaacctgatatagatcatattattaaaccttcttatattgattgcttagctgtttaccatacttgtatttgctgattacatgtttgcagtgttaatttgtgtgttactttgcctctgttaccaacaggaatccaattgcagaattccattctgtggcagaagtaatggaatgtctgctctttgaactgctagatcataacaaaacttgctcaagagtttgggatcacagcaggcagttcacagtatggggcactttgtaatcctggttgaaaacctgcccaggtcaattctctggcagagctcatcttaactctgtttgaatatctctgtacttacggcttcagtagcctcagaaccctgtattgccctctgctaccatttgcagttggcagaaaaaaaataattaggatgataggtttttttcttaacaggttttttgagatataattcacaaaccatacagtttacctatttaaagggtatgattcag

SEQ ID NO: 67181 - DNA, 1045 bp, Homo sapiens
ggattacaggcatgagccaccacacccagccaccaactaagtttttttatcactctttcctttggtctgcgcgatcttgagagaatagttaaattgaaatggcagttttattattttagccctatgtggctctaaagcgatttaaattatttggtgcttctcaaaagtattagttccattggggcatagcaatttgggctagatatagtggtcagtatagaaaatacagctaactatttgaaacttgatttctccctaaatcctcatgaccaatcccattctcttccatctcgctcttgtgcttcttttgtgtagcttagcatgggaagagtgggctgtgcactctcattcccatgaggcataggatcatcagtgttattccaacaaagaacattatatgtcaagcaccgtaataggtgttaaaggcatccactaatgatttcttacctttatgtctccctcaggtacagaaccctggtatttctatttaattaatggatttctgaatttcaatgtagcctttgctttggctctcctagtcctaccactgacttctcttatggaatacctgctgcagagatttcatggtgagtggcataagagatggtaggtgttttgggaggaaagagcaagtaatggtgtataccaagaactgaaggaaaatcctacttactttattttccacattcttcctatggaaatggttggcttactgaattttcagtctgtgtttgttgatccattgaacccttgtgaagatttggtgaattgtggcaaattaaattgacaggaggaagagctttattattgctttaagtgaggaagtcaatataatttacacaatcacccagggaagtaaaaatatttataaaatctcagaaggaggccgggcgcggtggctgacatctgtaatcccagcactttgggaggccgaggcgggtggatcacctgaggtcaggaattaaaaccagcctggccaacgtggtgaaaccccatctctactaaaaatacaaaaattagccagacatggtggtggatgcctgta

SEQ ID NO: 67182 - DNA, 1093 bp, Homo sapiens
atataaatgtttaccctttctattgttcctggttttcttttttttttttttttttgagatggagttttgctcttgttgcccaggctggagtgcagtggggtgacctcgactccccgcaacctctgcctcctggattcaagcaattctcttgcctcagcctcctgagtagctgggattacaggcatgcaccaccacacccagctaatttttagtagagatggggtttctccatgttggtcaagctggtcacgaactgttcctggttttcaaagggacctttctacactttcctggctaggtagcatgtattagtgagacattctagacttgagctgacacctttcatttgaagctggggaaaataaagggagtacattttgaaagatattaattacaatatcttctgattattgaatgcctactgtgtgtcagaagttattcacataccatcttttttcactcaaaacactctgagacaggccttatttatttgtattcctggatgaagaaactgaggttgagatggtggggaatatgccacatagttaaaaaagtagcaaaagtgggataagagtctagtgttgtctgacttcaaagcccgtgttctttgcactgaaaacaagacccttagcaaaaccctggagtttggctactgagactttaccagagaataagcttactaaagcagagagcatgagttgagggtgggagaagataggatccaatctatagaataggtggaaaattatacctttgaaggtttgtgcattttggtttggaaagtgatcaggagcccctagcgagcttgagtggcagagtgacgtgcacactggcaagttctccttttacatgggagcgctgtaccagacccttttgttgaagaaagaaggagtgtttggataaggtaaagaacatttggcacttagaaaatttagaataggatagactagaattgtgaagtcttaggcaaaatgtctctgtggggtcagagatcaagaggcgaaatttagtgttgcagaaaagaaagtgattggtcttgtcactgattttgcccctcataacatttcaagttctcagatgttgatgctggcaa

SEQ ID NO: 67183 - DNA, 1022 bp, Homo sapiens
agaggccaggtgcggtggttcacgcctgtaatcccggtactttgggaggtcgagacaggcagatcacgaggtcaagagctcgagaccagcctggccaacatggtgaaaccccgtctctactaaaaatacaaaaattagctgggtgtggtggcacgtgcctgtaatcccagctactcggtaggctcagtcaagagaatcgcttgaaccagggaatcaggttgcagtgagctgagatcccaccactgcactccagcctggtgatagagcaagactccgtctaaaaaaaaaaaccaggagtgagaaaaataagagtcattgaacttcatttttttaaaaaagaatatcactttgctgtcctttctaatatagcatttccccaattatgtacctgtttattgacattttataatgtaggtaaatttttaatcagtttttaattgatacctaattaacctcgagctcttgtcctcctgccttttttcacttctttactcttgcagcattccttcctagtagcttctgtatgtacactacgttgatagccatgactggatggtatatggacaagacttccattgctgtgctgggagtagcagctggggctatcttaggctggccattcagtgcagctcttgggtaagaaactaacagttctcctcccatatatcgctgggcatatagtaaatcttaatgttggattagctccatattgtctgcatagaatctgaagttaatcaattgggctttcaaagattctgggaaatggaagaatatttctcttagcacttactattatgattaattctaataagaataatgaccattgagcatctgctatgtgttaggcacagtgaaacccttcgtaaaccttatcttgaaaccttacaacaactctgcaggagaaatacaattattagtactttataaatgagaaagtagactctgagagtttgaataatttacctttaagattatgtttgcttttgaatccaggcctttttgactctatagctgatgttttc

SEQ ID NO: 67184 - DNA, 1091 bp, Homo sapiens
agcctttttttctgacaactaccatttattgagcaactatgtgccaggcactctcctaagcacttttccttgcattgtcctcacagaaaccttacaaagtttgtattattatcattattttatgcttgaggaatcagacagagacattattcaaccagagtagggttccactgctagtaagtggcagagccagaatttgaatgtgtgcccacctgtatctgaggtctattatttttcaccacatcattctattttccacttgatagatataatcttagcatgtaaagaatacattttcttttaggtagggagcttctcttctgtgtcagaaataagaatgtttgggtttcttatgcacagtgaattgctaacaaacctgacaaggtagttttgtgtttgactttagatcttcagtgttatctgtggtacgtgtttttctcctttgatttgaaatgtctattcctaatattctcaatgctgatagtctttgcctttttcctagggctgtgtgcaagaagtttgggttgcacgtgagtcgaatgatgctagccttcttggttctcagcactggcatgttttgctcatcatcaggtaagtaaaagggcagatgagggaattgcaggtcatcaccaggtaagtaaaagggcagatgagggaattgcaggttcaccaatagttcacagttgcatttaaaggaagcatttgtccaaatgtaggttatatttgtagaacatgtcaataatttgcagagcactgttatctacattatcttgattgacctttgtaacaatcctaccatgtaagtaagaaaaacattttctcacttttgcaggtaaggacattgaaacgtagatgaaatgatttactaaaagtcaaaattcataaatggtagagctggtagtctcaccaggatgttttctattccattcttgcatcaaccacccacctcctttcttggccattagtggaaagaaagtaattcttttattttgtttaaagaagttatttgtacataaagacctgttgttgatgattctgttttctactgatgatacattatttgatatgtattctatgtgcatcttctgctg

SEQ ID NO: 67185 - DNA, 1029 bp, Homo sapiens
aggctggagtgcagtggcatgatttcggctcactgcaacctcagcctcccgggttcaagcaattctgccatctcagtctcctgagtagctgggattacaggtgcaaaccaccacgcctggctaattttttgtacctttagtagagatggggtttcaccgtgtcttggtctcctgacttcgtgatctgcccgcctcggcctcccaaagtgctgggattacaggtgtgagccaccaggcccagccgagaatttattttaaattgttctgggttggtagtgcccgtggcatctggcaaaaaatttctctagagaaatggacccttaacccaagtgtctgaaaattaccagagataaagttctagtgaacaagaaattataataaaaataaatcagagcacagagggagcaaaacattatgggtgagaatcagcagaaataacagtcaacagaacgttcacctgaaaaacttcatttattgggaaataggaatataatgtaagtatatttaacattttcaaacaagtaaaagaaccaaaaacatgaacaagaaacaagagatgaccaaataaatttaaaaaattcagaacttataagaatcatataatatgtaatattatataatatgaataatatgtatataatatttatatttaagactcagtagataaacagcagattagacattctgatgagtaaactagtaaattggaagattgatttaaataaattactcaaaatgcagtacagacagaccaaaaaaaaaaggtaatatagaaaaggttaagaaatgtgtaagccacggctgggcacggtgttttatgcctgtaatcccagcacttagggaggccgaggcaggtggatcacttgaggtcaggagttcgaaaccagcctggccaacatggcgaaacctcatctctactaaaaatacaaaaattagccaggtgtggtggcacatgcctatagccccagctacttgggtggtagaggcacgagaatcacttgaactcaagagacggaaattgcagtgagc

SEQ ID NO: 67186 - DNA, 1052 bp, Homo sapiens
tgatcctgtatcttaggaccgaaaatagggttctactaaatcctatcaagtaaagaccagttagatagtttttaacagaattaaaatgaatgatataaggatatggtatttatgacctcaggaaagaaaacgataattagaagtacagtgttcccttcaactgttggtttcaaacgagaagtcacacttcagatttaatatcaggagctacaggtgatgggtgcatcaaaatctcagaaatcaccactaaagaacttatccatgtaaccaaaacccacctgtaccccaaaaactattgaaaaataaaaattaaaaaaagaaaaagaagagaacaataaataaaagcaagaagttttcagtcaggccccgctgacccacgacccaccaacccacgaactggcccggccctcacgtgcaccatgtctggctcctccagcgttgccgctatgaagaaagtggttcaacagccccggctggaggccaggctcaactgcataaaagtttcccaggcagctgcagacttcaaacaattctgtctgcagaatgttcaacatgaccctctgctgactagagtatcttcaagtacaaatcccttcagaccccagaaaatctgttcttttttgtagtaaaatgaatttcaaaagtttcccaaaccacttcttatgatccagtggatattcaaaagagagctaaatttgaagcctgtacaaaagcttatccctgtagcacatgtgctgtaatatacgaacttctagtttcatcagtctttaacatctacctctctgaatttcatgaatttctatttcacaagggtaactgttttatccacactggcagcagcatacaataaaactcagtatgaaaaaaaaagttttctttcccagaaaaaaaaatatgtatatgatatatatatcaggagctaggaggaaagtgttttctacttctttctcttttttttttgagatggagttttgctcttatcgcccaggctggagtgcaatggcacaatctcagctcaccacaacctccacctcccaagttcaagtgactct

SEQ ID NO: 67187 - DNA, 1027 bp, Homo sapiens
cagctttgtggccttcaagtgagtgattagttggcttgggataaatggagtgacataaatgcattgagctaaagtgtatgagttaatttatgccttaaaagcaggaagtggaaggagtgattgagtgattaaagtcaattcttcagaaggctgaggcaggaggattacttgagcctaggagtttaagtccagcctgggcaacatagcaagaccctatctcataaaaattttttcttaaaaatctgaatttttattaattttactgagaaaaaacaactagctattcacctttttaggtgaataacttaagtgctttgatgtcccttgccctttttgtcctttctatctagatttaggtcttctgattagcaggtccttcctgacatgcttttttttttttttttttttttgcttttgaacaggttatctgggaacaaagcaggacaagtctgggcacctgaaggatctactgctttcaagtgtctgctttcagcaaggttatgtgctgctctcctgagcaacatctctgactgtgatgaaacattcaactactgggagccagtaggtgatttctttagttttctctttttgttcttgattttgcagcataggtgttattaccaatcgagagacaaataatatacaagtgtgactcctagtaaaataactgtattttcttaaaaaaaaaaacaaaaaaacaggcctataatcccagcactttgggaggctgaggccggtgaattgcctgaggtcagaaattcgagaccagcctgaccaacatggtgaaaccccgactctactaaaaatacaaaaattagccgggcatggtggtgggcgcctgtagtcccagctactcgggaggctgaggcaggagaaatgcttgatcatgggaggcagagtttacagtgagccgagatcacaccattgcactccagcctgggcaacagagcgagactctgtctcaaaaaacagagatgggggctcattatgtcaccgaggctggtatttaactcctaggctcaagcga

SEQ ID NO: 67188 - DNA, 1046 bp, Homo sapiens
gccactgcactccagcctgggcgacagagcaagactccatctcaaaaaaaaaaaaaaaaaaaaaagtaactaacagcctcataaaattattgtgaactgaaaacagtgctttacatgattataccacaagacatgatactattggaggtgtccgatggggcatagctgtcaataaagttttgacagaggtggtattttaaactagtatttgaatttcaggagggcagtgaaaagaactttctaaatgggaagaaacagcctaagcaatgaatcatatataggaactgtgcagatattgatctttctgtgacatatgcatgaatgacacaaatgcaaagcagaccctggtcagccaatcttatcagtgagtgggttgaacatttaatttatgcttctatttacttccagctactttctttgcattttttgaggtctaatagatttttgcacataggtatgattggattttaattatttcacaggcaaaccatgtgtatgttgccaactcctgtggtaatttctgcttgtttatgataattagttagtgtttcttttctccctattagctgtgcagacgttcttgcagaggaaggagaagtccacgtggcattatgtagaggacaaggtggaactcctgcggataagccccagagagaatggcacaacagttggcaagtggttgccatggcagccctgggggggctcattttaagcgacgtgtatccattcagctgtaaggctgtggcagggtacaagtgcactggatataggtaggtaatagcataggtttaagccttctgcgttttcatctctctcactaatgataacaaaatctcatagacagactcaataggccctgccaattaattgattcggtctctaaaaatacttgcttattttaataatgacagacttcatattggtgtctattttgccaggagtcaagataagtcctttcatgtagaaggtgctttgaaccatatcttcaccaggagcttaccttttgaaggttctcaacccagaatcttcaggatcaaactgggtaa

SEQ ID NO: 67189 - DNA, 1083 bp, Homo sapiens
aagagaagctaacttcagggaaggcatcatttgagctagaaggaaggaaatgatcatttattactcatttattgtgttatctagttactcaactctcacttctttttgttctctttgactgtagcagtgcttttagtccctcaatgcctacatctcaaaattaccttaaaaatttagctaattctccatattgtattgggaatactgaagtttttcctgtctcttcacggggcctggggagcgggggtgtggatttaatccatgtagtcacccactgttgctgattgaaagaatggatcaaagggtcccaggacttagagaagaagaaacagaaccataacatagcctggatcattagtacggtgtgcttgtgttatacctggctatgtaaaacaagggcaggaaaagatgctttttctcttctctggtttatgcaataagcttttctattcttgtcttttcccagagacagaacctcgcctgtttcctcacaaacccacactgtggcagccttgttaatgcagatggccatggtgaagtgtggacagattggaataatatgtccaagtttttccagtatggatggcgatgcaccactaatgagaatacctattcaaaccgtaccctgatgggcaactggaaccaggaaagatatgacctgaggaatatcgtgcagcccaaacccttgccttcccaggtaatctaactttgtcttttttgtttgtttgtttccttctgttggcaaaagaaatgtagtggccatttgaaatgcagggatgtaataacttctggtgcagtgatctctcagttttcagtgaagtggttggggcagaggaacagtccgcagctgaaccacctatgctactttactgtcaagttgaatattttattatctgtaaggtttcaaaaggaagggcagtcctctttttctcttacttctgtttggactttatctcttagtctacagaaatttataatgtcttctgacttagactagcttttcccctggtccttgcctatctagacttgtcatttatctgagtcttgcacttaaatcgctcctaaacaaacaaacgtacaaaa

SEQ ID NO: 67190 - DNA, 1025 bp, Homo sapiens
agacacacttggtgcttgcagtgctgatacctgctctttgccggcctgggtgtgcctccttgtcccccttctatccacccaggccgtttggtgcctcctcctcctccccctcctcctccttctcctcctcctcctcccttacctttccgttctctttcccctcttccgagctgccttctcctcctagctacagtgtggcctccctcccgttccctactcctcctgactcccctcttgctcttcccaatccctcctctccagatttcccatttcgcccctgtgccagcctcatcctccctcatcctgcctcttgccttctctctgccctttaggcctcctgccagaagagatcctgacccccacactctaccatggctactatgtccggcctcgggccgccccagctggggagggcagcagggcaggggcctccgagcttaggctcagtgagggcaagttccaggcatttctggatgtgagccactttaccccagacgaggtgactgtgaggactgtggataacctgctggaggtgtctgcccggcacccccagcgcctggaccgccacggcttcgtgtcccgagagttctgccgcacctatgtcctgcctgctgatgtcgacccctggcgagtccgagctgctctctcccatgatggcatcttaaacctggaagcacctcggggtggccgacatttggacacagaggtcaatgaggtctacatctccctgctccctgcgcctcctgatccagaggaagaggaggaggcagccatagttgagccctgattgccacagacccagcacccagcaaatccctctctacctcccaaggtgatatgggcagctgcccaccactccagaggtagcagcatccttgggggaagggaaaggtgcatggtccacaatgtatggtttggtcccatgggacatgtcatagccttggtttagttttgggtggagctgaataaacccaaatctcagggccttgtttgtactgctccctattctgtggccgggaagctgg

SEQ ID NO: 67191 - DNA, 1047 bp, Homo sapiens
accctttaccccatttgtcttccagtctgccataacgaatgctggaaacacattaaaggctttagtaatttgtaataataactggctgattgatgaactgagacaacaataattagtatgctttttcccctaggatgccttgcagcagagattgactcagcaggacacatctgttcttcagctcaaacaagagctactgagggcaaatatggacaaagatgagctgcacaaccagaatgtgagttaaatgaatgagccttgacctcagtgagccccattagcagaacaggctactgcacgaagaactattagactggccatcctaatctcttatcttgcttctgggatgcctgccttaagtgtctgcagttatttttattccccattagactcatctctgttcctaggtgaaagcccacatcatactgggcaggaaggtccttgatctcctcttcaactttgaggacactgagatacagaggcaaaattgtggttctacagtctaattacttcactaaaaatgtggagagcagctgtgtatttttaccatcataccctctctgtgctgcatactgtaactgccaacattaactggttactaagtagctggtttccttgagggttagcaggcagtacctgcgtgccatgaattctttcttattcttgcaggtggatctgcagaggaagctagatgagaggaaccggctcttgggagaatataaagtaagaatgaatatcagtttggaaatgacttccactgacttttcatgaacagcccgttattgttgctcaaaaagcacttaagtattctattttcatcctttttgatttttttttatccttgctttttagaaggaagcatttttctgtgtcccctgatgcactagctctgaagaatagatggcacagctaggagaaggagtacaggactaggggtctagaaacttcagttctagtcttacctttatctctgactagtatgaatggctcatagtggtcctcctacaaatgccagttcccttcttcattactcttgaagaatccttt

SEQ ID NO: 67192 - DNA, 1024 bp, Homo sapiens
agatcgagctctctgcagacgttgtgcctaagacgaccgagaactttgggtagttctgcactagagaattcagaaaagatggggttccaataggatacaaaggaagcactttccacagggtcataaaggatttcatgatttagggtggagattttgttaatggagatggtactggagtcgccagtatttaccaggagacattcgcagacgaaaattttaaacttagacactcagctccaggcctgctttccacggcaaacagcggtcccagtacaaatggctgtcagttctttatcacctgctctaagtgtgattggctggatgggaagcatgtaatgtttggaaaaatcactgatggacttctagtgatgagaaagattcagaatgttcccacaggccccaacaataagcccaaactactgtggtgatctcaaagtgcggggagatgtagtccagaccaagactgaattaggccttcccttcttggtggtgttcttgagtaagataatctggactggcccctgtgtttgcttccctgcctgctgctgccccatttgatcaagagaccctggaagtactggagattcagaatccaagactgtgtaaataaagtttttttgtatgtggaaaaaaaaaaaaagaaatatgatccccaatgttagagatggggtctggtggcaggtgtctgggtattggaggaggatccctcgtgaatggcttgctgcatgccccatggtaatgagttaaggggaaatctgattgctataaagagcctggttacccactcccctctgtctcttgttccctctctcatgggacacaccacccttcccctttcccttccaacttccaccatgattgtaagcttcctgtggccacaagagaaacagatgctggcgccctgcttcttgtacagcctgcagaaccttgagccaaatgaaccttttttctttataaattacccagccctaggtatttcttcatgccaaagtaaaacagactaacacagcctgctataaactct

SEQ ID NO: 67193 - DNA, 1001 bp, Homo sapiens
gccagtccagattatcttactcaagaacaccaccaagaagggaaggcctaattcagtcttggtctggactacatctccccgcactttgagatcaccacagtagtttgggcttattgttggggcctgtgggaacattctgaatctttctcatcactagaagtccatcagtgatttttccaaacattacatgcttcccatccagccaatcacacttagagcaggtgataaagaactgacagccatttgtactgggaccgctgtttgccgtggaaagcaggcctggagctgagtgtctaagtttaaaattttcgtctgcgaatgtctcctggtaaatactggcgactccagtaccatctccattaacaaaatctccaccctaaatcatgaaatcctttatgaccctgtggaaagtgcttcctttgtatcctattggaaccccatcttttctgaattctctagtgcagaactacccaaagttctcggtcgtcttaggcacaacgtctgcagagagctcgatctttgtgcggccaacttcctgactgccattgctgacatcaaagaacaccatggggttagcagggcttgaagttgccaccaccatggctctgacccggaaacggaagtcgggggatcatatttcagcatgagatttggaggggacagacatccaagctgtatcataggtgtcaagtgctgtctgttgaatgaaagtccccagttggtgttcttttgacatgtggtgatctattttccaagagtgggtgaagtagtccaatagtattaataaatgagaaaactgacaaaagttaagtgtaagatacacatatgtaatagtgttgcatcaaagttgaaggcagtgaatgtaatcactgttgattgtgctaactaaatcagtttctaagaaactaagtcagtttattaggtattagggttatcgtctgtatatttgtgtgctttagatgttaaaagtggataaaaatccagccgtccttttctaaata

SEQ ID NO: 67194 - DNA, 1632 bp, Homo sapiens
gaggacaggatttggcccattgcccacccatactccaggtatctggtctgtttcttcaagctataaatttgagctaaaggtataggagactggaagagtagataggaagtattacctggttgggattatagggtaggagtgagcatttgggtggttactggctgaaatgcagtattttctttcagaatatctaaaatgtctttatctttttctaggtttgatgtggctagcatgatgtctgttacactcagttgtgatcaccgggtggtggatggagcagttggagcccagtggcttgctgagtttagaaagtaccttgaaaaacctatcactatgttgttgtaactaactcaagaatttctaaactctcccaggtcacactgattcattcttaacaagatatttatatgttattaaacaggtggttctttttattttaaccagttatttttattattgagtctgtccagataagttatttataatgggcattactgaatttttaaaatgccgattacacccaaatattgtgcacatttaataatcagacaccagatttttagctctgtactcctaattaagggacatgtatgtggccttgcctagccctttggtgataagtacttcctctaggaaatgtacgataggtagaattgtggttccctaaagacaagtacataaaggtgaccctgatgaaaccttgaagttctgaaatttaactgcctaaaatgttctccttagatgtgagagaaagagaaatcagaaaaattaattctcttgggggaagggcttgaattgaagctttactttagaatttagccctggtttgaaattttccattacatgatcttggtttatcatcgatgggaagggtagaaaacttcaaggaaaataagtgaaattttaaaagtcagcattttcttagacctcttcagctgattgtttatttttctatgaattcctacacatggttattcccccctacttgagataatctaaatataaaccagctacttgatgtaactgagaatttgtgtggatatttatttaaacaaatgtgtaattttgagtacagaattcaacagttacctccaaaaaagaaacattgttaatataatttaacagaagttgtgaaactaaaattttctaagattaactggtagttcattgtaaatgaacataatgaacagaatttatgactccactgtggaaaatgctatcaaataactaaggaatatatatggaataagtgtacatatgtaaaatattgttactagagttagatatgtgccaaagtccatttatcccaaatcctgtctgaaaaggaggggtacattggtaaacattttggagtgcttaaaaatgccaaaaacaaaatggtaatttctactttgataaagtaaaaaagttaaatgtgtgtaaaaaagtgttctgtgtccttctactccagcatcgtctcatgtaaaataagaaagccctaaaatactattggagagaaaaaattaactaggttgctactttatttgcctaaatacttttttctattttgttagattttgcctttcttttggaaggaaggaggcgatattctggattataaaaatgaattgggaacattatcacaattccaga

SEQ ID NO: 67195 - DNA, 3231 bp, Homo sapiens
attggggaagatttccacatatttgagatttactggattggactgttcagccactttctagagaaaccaatttgttttccaggttcctgatcatagcccagtctgtagcccaataattagtcagattgtattttcagttagttgcttttttttttttttctttttttgttgatacagagtctcactccatcgcccaggctggagtgcagtggtgcaatctcggctcactgcaacctctgcctccagggttcaagcgattctcctgcctcagcctcctgagtagctgggattacaggtgcatgctaccacgcccggctaatttttgtatttttattagagacggggtttcaccatgttggtcaggctggtgtcaaactcttgacctcatgatctgcctgctttggcctcccaaagtgctgggattacaggtgtgagccactgtgcccggccagttagttacttttctgtaatgtaaagttatttttagtaacttatttttatttcctttttaaaaattctagattcaggaggaatcagatatgtggaaaataagagaactggaaaaacagatggaagatgcttaccgggggaccaaaaggaaaatgctacccagcagttcaaggtgaagttgcagctctgagaactaaaataattctcatctttttcagaatcatcaacttttgtttaaaaatactttggtatattaaggataaattcagttctgtgagtccttaagccttccttctttcgtaaatctagacccaggcataaagataatggctgtgacgcatatggccctgctctttgtacttatttacaatggagagttaaaaaattctacctgaacaattatgaatgtgtagggttctgtggattctaaccttacctgatagcttttaactgaagattttatactggaatcttgtggtcactaagctgatcagtcattctattctctattaatctttcattctttcaggcttttctttttgtagctggaactgcaggtgcatgccactatgcctagctactttttttttgtagaggtggtgtcttgctgtgttccccaggctggtatagaatcctgggctcacgcagtcctcccacctcaacctcccagtgttgggattataagcatgagccacttgcctggcctcagacttttcttcaccctgtctattcaccctcttcaccagatcaacagccttttcacattaccttaatagcttgagtgtaaatatgaaggattatgcaggcttagttatcttccttgtggagaggcctaggaatgcttgaataattgggaagatccttacacgcttgtaagtgtaagagctacatatataagaaatacttaaactctttaggagcagggcttgtgattttctcatttgctgctatattcctgccagctagaccagtacctggtacataggaggcccttacaatttttttttttttttttttttgagatggagtttcgcttttgttacccaggctggagtgcaatggtgtggtcttggctcactgcaacctccgcctcctggattcagccaattcttctgcctcagcctcccaatcagctgggattacaggcacctgccaccacgcctggctaatttttgtatttttagtagagacagggtttcaccatgttggccaggctggtcttgaactcctgagctcaaagtgatccacccacctcggcctcccaaagtgctgggattacaggcgtgagccactggacctggccccttaaaaatttttgataaccgattagcagcttactggctagttagtagaaatggtaaacagaagctggatcagtggttctcaacttttttcctactccagtattcccatgggttagaccttgttcccactgttattgggacctctctatagtaagttgctggtttgcacagagggaagtgtatttcagaatctctagggtagtttgaagtgtcccttgctatgattatgttctgcttccctctttgcatgccctcctagttgagaatcagcgagtgaactatcacatgacatagtccagagttgatttcatctctctatgctttgcaataggatgggtactaatggtcagatttttttctttttttcttttttttttttcctgagacggagtctcactctgttgcccaggctggagtacaatggcatgatctgggctcactgcaacctctgcctccccgggttcaggcaattttcctgcctcagccttccaagtagctgggactataggcgtgtgccaccacacctaactactttttttgtatttttagcagagacagggtttcaccatgtcccccaggctggtcttgaactcctgaccccaagtgatccactcgccccggcctcccaaagtgctgggattacaggcatgagccactgcacctggcctggtcagatttttttccactggactttacaaatgtacagaggaacagataatcaaagtgctgggattacaggcatgagctactgcactaggcctggtcagatttcttccactggacttcacaaatgtatagagaggagcagataatgtctttgccttttttttttttttttttaaacagtatcatgttgtttccttccccctcagcttgttccatgagttttgtgcatgatgttccataaagtaaactcacagattgcttttacatctaaaagttcttctgctttctcttttagccggatgcgcagtgatggttttgatgaagaaagtcaaagatactattggaggccaaagaatgaaatttctgggacactggaagatgattttcttaaggctaaatcctggaataaaaagttctatgattatgaagcaaacatgccagacaggtttgtgattaattcctgtgagcattaatatttggcctgagaacgtgtacttatcaaaattaattgtccccacaaaaaacttgtgtacaaaagttcataccagcattattaataatggccccaaaaaataatggccaagtaatccaaatgtctgtcaactgatgaatgggtaaacaaaatgcgatatatccatacaatggaatattatttggcagtaaaagaaatgaagtacagatacatgttacaacgtggccttgaaaacatcatgctaagtgagaaggaagaagccaagtcacgaaagaccgcatattgtatgattctatttatgtactatgtccatacataactgtatgattccatttatgt

SEQ ID NO: 67196 - DNA, 2623 bp, Homo sapiens
gaggctgaggcaggagaatcacttgaacccaggaggtggaggttgcagttgagccgagattgcaccactgcactccagcctggcaactgagtgagactctgtctcaagaaaaaaagaaaaaaataataataaggctgggcgcggtggctcatgcttgtaatcccagcactttgggaggccaaagcgggcagatccatgaggtcaggagtttgagaccagcctggccaacataatgaaaccccatctctactaaaaatacaaaaattagccaggcatggtagcatgtgcctgtagtcccagctactcgggaggctaaggcaggagaatcacttgaaatcgggaggcggaggttgcagtgagctgagatcacgccactgcactccagcctgggcaagagtgagactccatctcaaaaaaaaaaaaaaaaattgtccccatgtagacagcatgatattatgaagtgtttttggaaaagtgcttcatagctaaagagcagagtgtaagagttcgttagtgtttcttaaggaaagcaatggcaagttctcttacaaatggacaaaataatcttgtatgtctgaagtgatagtgtacagtacaggaaatgtagctgttactgagctataatgggggcttggttctaccatatctctactttgtgtttatgtttgtgtatgcatgtactccaaagtctttctaatgttgctttaatttccaaaaatgtatgcattgctttaacaatacatgtgatgtgtcatattacagatggggtcacagtggttataaagagttataccctgaagaatttgaaacagacaggtaaggaaaataggcttactgaaagaaactaagatggtacaaaatctgtattataaattgatttcttaacttttacgaagaatatacttgccatcaaaaatgtagctagagaaacaataggtgatttagttaggaggtgatccctgttttcccattctctggttgatgtttggcatgtctgtaagcattttggtttttatatatagtattccatacagtaactcagtatggcagcttagaatttttaccttcattttaaagatgaggaaacaaaaactcaatgagaatattaaagtgttaaagtatacattaaagtgcttatttaaaattcagatgttaacctcaattttttaatctagaatgcaaaatattaaaataatacgctttttttttacataaaagcttctattttttaacttttcttattagtagtgatcagcaagatattaccaacgggaagaaaacatctccccaggtaaagtcatctacccatgaatcccgcaaacacaagaagtcaaagaaatcccacaaaaaaaagcagaaaaaaaggtcacacaaaaaacagaagaaaagcaaaaaggaagccacagatataacagcagattcctcgagtgagttctcagaagaaactggggcttctggtacaaggaaagggaaacaaccacataaacgcaagaaaaaatccaggaaaaagtctctcaaaaaacctgctttattcttagaggcagaaagtaacacttcacattcagatgattcagcatccagcagttctgaggaaagtgaggaaagagacactaagaaaaccaaaaggaaaaagagagagaaaaaagcccatacctctgtagccaacaatgaaatacaggagaggacaaacaaacgcacaaattggaaagtagctacagatgaaaggtctgctgagagctcagaggatgactaaatgggaaacacttttgttttccacatgactgtggatatttacagttcttactccttgtggttttgccagtgactcttgttcagcacggggcctgaggtcagagctgtcttgtgccatctgtatgttctgacagacgtcttgtcttctattttggcgttaagcttgatccccttttcttgttaaaagggaatctggtattttgttatgaaggtttcttgaagagattatttttttttgcaattaattacgtttagtgtagagtgcatatacagcaaattaaaggacccagaaagctggatccaatagtgacctgggtacaccaatcggaatattgaatttggggaagtcaagggctgggatcaagaggtggattggaactaatgccatgtaggatggtatgacaaggcaacactgtattgctctctgtttatatagcaggtgtcacaactaacttgtctttagccttggtgctttgatccttctatattttgaccccacaggtgtggtccggtttacttaatcaggacatgggcctaagaacaaaccttttcccttcatgataacatccatagacaacttattagaagggactagagtttttgcaaatttccctgctggatggggcctatagctatacttagtatatgcctaaacatggtaattggatagtaaatggttttctagttccattgctgtatatttgcctaaatggacttgtgttcaaattatttcttcaattgtcatagataatcctgtaccaaatggggaagaattaggaaataatcatgttgtctaatggtactctggattcagggcagcaactgccatttaaatgttgtcttgttcatttctaaatctgttcatgaagtt

SEQ ID NO: 67197 - DNA, 1055 bp, Homo sapiens
ctttggccatatattttttagcatgcattgtttctgtgccctgaaagtacctgaaaggttttaagcacagactcaggaaaatgtgccagtagaacaggccatctccaggaaattggctctatttgggtcctgaccttcccttcctcccaagttagcaggcttgttctttcgcaaggaatacacatcttgcctttttttttttttttttgccatgttttccttttcttggtcatgtataagcaataaagctgttttttgttcttcatctttcttaaccccaaattttcttctatgccttaggcttcgatggttcttccaacccccttaatatggcttagggtggtttttcaaaacctacaatcccccatttgcactactggccatggaacatttatttctagtgttcctgccaatcagagatctctatattaaattctaaaatgggattaaaagaagagttggagaattcacacttattgagtaactgatgtcatacaacctggaatttctgaattccaaataaataaatttcactctttgaacatttcatcttttactttttagcaccaacagacttgataacagcctgatgctgatctgacaatgggttgatagccttcccccactgacccttaaatctgcttagtaacaagtcctttgcttctgtcattctcctgggggatggcctactgccctcctttctgtacaatctgggcaaaccgactggtgatggcaagagtggtgtcaatgaagcggtctacacagctggagagacaattttcagtgcgagagtctaggcgattccctggcttctccacacatttatcccaacataactccatgaagtgatgcacctaaaaggaaagaaaaatagtaaccattggggtctgcagataggcctaactcttgtttattaacttctcactttttgacacctgacaaaaccattctttaaatcaaccacggagtcactttgggctcttctctttcttcatttcctaattagtcaccaatattgatccagatcctcgtccctacagattgtacattctcag

SEQ ID NO: 67198 - DNA, 1021 bp, Homo sapiens
tcaggactgcgacttccagagggagctctctttctgattattccctcaactcgtcagctcacagcaagtgaaatataccttcgggtaaacatctggacccctagactacagtggtcattgctgtgatttcggtattttcttctcctcaagagatctcccacccggcagatgagtcctcacttccatccccttccctggctggaggctacgctaagcacctcagggtgggaagacccctcacctcggcctcctagggcaccgcaaacggcactcagcctccagagaaccgccatctcgttcctgagggctcaaggtcatccaccaacccggaaccacttaggcgacaattcccacccacgacgacgaaagaaaacagggaagaggaaatgctgggtgaaccggaagtcgagaggcggtgcacacccgtcgcgcatgcgcaaacacagctgtcggaaggtggcgagcctgaggcgaacaatggcggagctgggcgaagccgatgaagcggagttgcagcgcctggtggccgccgagcagcagaaggcgcagtttactgcacaggtgcggggacggggagggtgaagggaaaggaagtttcaccttccttggtggtcctgggcacgctcggaggtctgtacactggcggctcactggtgctcgatcccggctgcatcccattcccctcacgaaagacaaagttatggctctcctgtccctggtgaccggtagtgctcaggtgccaggtatataagcgtagcgtggagaaaagaaaaggtgtaaaacagggaagatttgggcgacgcaagggtacgggagactagttagccggcgacatgactgggctggcattcgaaagatctgggttctcatcctccctctgctccttgcaggccacgtgcccgtagaaaagatactcatccactgtgggttttggtgtcgccgtcaccccactgcctcactggattgtgaggatcatatgcgacaatgtatttgaaaacgactagaacattatcggaggaag

SEQ ID NO: 67199 - DNA, 1083 bp, Homo sapiens
aaggaaataaaaaacaattagccgggcatggaggcatgctcctatagtcccagctacttgggaggctgaggcaggaggatcacttgagctcaggagttcgaggctgtagtgagctatgatcaggccactgcactccagcgtgggcaacagagtaagactttgtctctaaagaaaagtcactagaaatagacttactgacatacacacgcaaaaggctatacagaatcccctaaagaagcaaacagtgacagtggagtggcaaatggagacattgcatttgaacttgacagattgtttttttgcagccaagttatctgtatagtcttctaatttcactgtggttttttattgatgttatgattttttctttttctttaggggccttggacaagttgttactgactatgttcatggggatgccttgcagaaagctgccaaggcagggcttttggcactttcagctttaacctttgctgggctttgctatttcaactatcacgatgtgggcatctgcaaagctgttgccatgctgtggaagctctgacctttttgacttcatactttgaagaattgatgtatgcctctttgcctctgctttgtcatgccattaagctcacaataaggaagaaataacagataagtccattggtggacagccttcttctcttaatcacaagattattttcagaatttaatctttgaggaaaaggtttgagaggaattatatctaagttgtgagactgagttctatattctggtgagttaatggggttgcctcccagcttcttataagactcacagtataactaaacatgatatatcagcttttgcctttcaatttatcaatctcttaaagagaatccaactttattacgattagtatatgatcaaacttccatatttgccttgggaataatggacaaagggaaatactcttaattcatgaataaaaactttgcagaaaattagacagtgtttaattttcgaaaacttccctctctagacagtagataccacctactgatggttacatatactagggaaattttaaaattaggaaatgctgatagctcatattataaa

SEQ ID NO: 67200 - DNA, 1041 bp, Homo sapiens
atttttgtatttttagtagagatggggtttcaccatgttggccaggctgctctcaaactccagacctcaggtgatctgcccgcctcggcctcccgaagtgctgggattacaggcttgagccaccacgcctggccaagatttttcaaatgcttctcacaagcactttttaatttacaaagcattactttagactttgtatacattcatgtgagtaaggggacaagaatttaaggcccagtagtattgcttgttcagaaaggtactgctcagtattggaccagcttgctgtgtagctggacacctgaaagacattttctacttctacaggcagagactgagcagcatcttgatgctccctagtgcattaacataagcagaatttacacccttttcagccttggccgagtgcctctgcttagccaacattcctactaagctcctttgtctcgattgtgtcttgctttggttgctaaaaaaaaaatcttaactaaaataacagatgttttggggtaaatatttaagtatagcttttggggacagatctaataatttatgttgccaacttgtgcttgtatgttgctaacttgtgcttggatgttgatctgttgaaagtcatgctgttttttttgtattttgttttctttccatagttgtggtgacagtacatggagaggtatgtgcagaaaatatttgtgtggtttttgcagattgctgggctctctttcagccagtgtggtggattctgtgttgaaaactgttccagtcagtattgcttcattgttggcccttgtatatgtgtgtgtggtgagctgccgccattccaggcctctcctctaccaaagtgttgtctttaatatgctgtatgtggacaggtagaagggctatacaatgaaaaggatgcttgaagtacatggtgcttccatgctgaggtcaatgattatctctgggatgaaggcaaatgtgcaaatgtgggcacagtctctgcacattgtactgcctttaataatttgccagccgtttaatatggagagcctatcacag

SEQ ID NO: 67201 - DNA, 1007 bp, Homo sapiens
ttctcaccagcacacttctcttctaaagggaagccagggaaacaattgtttctgcctccactgcatcctcctacattcagttccaagctagtgctgggaaccgaatgtgtgtaaatgaaggctttacattctcaaatgtgcaactttgctgccacggcttcagaccaaaacaaagatctggaggcactcattggcaggcttgggtcacatagatgttcatctggatctttcaggacacatattacactttttgaaaatatttagaactggccggaacttagtcacctaggttctccctattggttgaacaggttggcagccaattccacagccaatctcaacttttgttcactgccaaatgattcccctgcaacctctgagtttctgtgggaagaatccttccttactttcaagatgatctcagatttctaaccaaacccattcaggttacaaggaacttctgtgactcatgtgactcaagaaagaaaggagaaaggagaaatagctctgaggctgctggcagcttcccatttgtccacaccagtagattttgaagggcaagagaacaggaacgaaccatgtctgagaagccaatatagaaaaaaactatgttataaaaacatttttgtcacaacaaataaattatactttaaacaagaataatgaatgtgttccattcaaatataagtctctaatgagtaagttaaaacacagagaatgttgtctaattgtattatttgtgtgtgggtattaaagaacgaatcaaatggtgagtgtatgtgtgttttcaagaccagactttggggcaaaactatctcaattttcatttccctcaagtgaaaactggtcatttttcccctaatagtaatttctgttaagaaatgggcaaaatatatgtgtgtgtgtgtgtgtgtgtgtgtgtgtgtgtgtgtgtgtgtatatatacatatatatatacacacacacctatatatacacacacatatatacacacgtatttgtgtata

SEQ ID NO: 67202 - DNA, 2161 bp, Homo sapiens
gactgtcactcattctccgatcagcgcgtgaacgcagctcggctgccgctggcaggaaacaattctgcaaaaataatcatactcagcctggcaattgtctgcccctaggtctgtcgctcagccgccgtccacactcgctgcaggggggggggcacagaatttaccgcggcaagacatccctcccagccagcagattacaatgctgccaaactaaggatttcatttggactttgtttttcctgggaactgcaggtacattttttttttttttaattctcaatctggtttgctaattaccccttcctcctactcctaggaggaacgctattattttgggtggttttacgtggactgctaaggctggtcattttcgtttagctgtgaaaggagcgcgtcgcccttgctgcccagccgaaccccgctccctccagggctgcgctgcacggggctgcctccccgagccgccagcgcccggcgcccctccggcgcgtccgcccttcccactttgtgcgcccgcggcggtgggagcagagccggccggctcctggggactcagcggccgcgctggtgatgggcagcgctccttccccaaaggcgggcggcggggcgggggaggtcgcggctcgggtggtgccgccgcacgggctcggattccgagggggaagtggcttgtcagccccggctccgggaagagtgaacaataaggctagggcagccgccccagatcgttatattcctgggtctaataaagtcaggatcgctgctttgcttcccccgccccagaagaataacggtttgcaaaatggggcaaaatgggcagaatcgcacggccgttgttgttggtgtgaccgttgttgcaccccagtcgacatgacgttagtttttcatttgccaaattgctggttagttgcaaagcctaccctcggccgcgagcactgaaggatgggagggtcgagcgccgcgttttgacaggaggaagtgcggaggggcggagggcgaggagggcgtgattggggctgcctggtgtgtgcgcgcgcgtgtgcgcgcgtgtgtctttacacgcgccgcgtgcccagtgttgcacggggcgggagaagaatggcaggtagccgcccgaaacacctcgccctgtctcctttctttgggcgaggttcccgatcctggcaaagtgtgaacaatagggagctgggaggaagacagtagtgatgctgccgcgggtggcgggggttgcgccgccgcccagagaacctcggcagtgtgcagggaggtgcatttcattttggctatttccatcccggcctccctggaaaattcttctgtgcgtgcccaccctcccctccagctgtcatccccccacctccacccaaggatttgcgctttggctctgatggacgggagggaaggaagaaaagcaggggccgcagagagctgggtgggttgggcggacattctgggcggggggcgtgtgctgggaagcgatcgaggaaagccgggcggaggggctgtgtgtcgcggtcgcagctccaggtaccgttgtacctgccctggacggccgacccccggttggggagcgcacggggcgggccagggagcacccagtgcgccccctccgcgggcggcacaagagcagcgctcggccgccgcctccagccaactcgggtccctcccacggcgaccaatcagtgcgaagctggctgggcgggaagccgcgagaggcttttattgcggcgcgggtggcggccaggagctgccaggacagtctcccggtgcttcagcctaacggtctcgctcactcaccgccaagagaaaccccgccctgcggccggtcccccgcctgcccggcagtttccgaggaaataaaatggagactaggtggtcaccgggagtgctcctggtccggccgcccgtgctcgcccactctcgcctctttcacgccgacttggagcatcccaccgcccccgccagcgctcactctcgcgccgcggaatccgggcctgagcgcgtcgccggggagggcatcctggcaggcacacctacgcgcgtgcgctgaccggccgaccgcgggccgggggctctactgacggcggggcggggccgtggcagggcccggagaggaggggtggggaccaagcctagtccgcctggccctgggtctccgctg

SEQ ID NO: 67203 - DNA, 1014 bp, Homo sapiens
tcattagtgagcaagaaggatatatatggatctggaaaaaataattatttagacatagtgccctctttttagaaggattttaaaaagggtattatgatacacaggactccttcagagattagaactaggcttaaaaaattggtcactaaatatgcctgcaattccatgttggttgtgaatacttcagagaaaaaaatggcctgattataaggttgaaaaccatcagcacaagggtggatctaggtcttgttgggcctgaagggtatataattttgagggccttctttaaggaaaatacaaaactcttcttgcttttgcgaaggttagttgaatacatgaccatgagaacacattgccaagtcccagtcccccagagccttggaaggagtccatgcagttgaggaaccctgaaaacttctggtccttctttagcaactatcctttggtccacttggacccacttgcttgggaatataaactaatcgttccagtttattaaacgtggacctcatagaggttgtatgtgtagtgctttgaagattagaatcatatattgaagtcaaagtcatttttagaaagaagtatttcacttttatttgacagaagatcttaaatgagatctgagctgatttgatatttgtcactgccgatattcttgtaaattactaactagaagaaaataaagcaattgctattattattcaaatgagtgagatgtaagtgcccgattggcagggcaagaagtagttttgccagctaaaggcatatgatattggagaggagactgaagattttgttttagctatctaaaaggagataaactggatatataataccaataattatatcttaatcatcacgttatggtttacaaaacactttgatatgtgcttaatcttcacactaattatttagtaaatattgactgagtacgtgctctgtgctgggtgctgggaatacagcggtgaactaaacgtacatcgtccctgttttcatggagtttccagtctagta

SEQ ID NO: 67204 - DNA, 1880 bp, Homo sapiens
aggagtagccagagataaggagaaaaaaaaattctgcaagtccagattgtaagtctttaaatggaaactgagactgagaaaggttaaatgacttaggcaggtggagctgggactgcaacttacgttcgttgtctgaattttatccttttctaaggcaaggataatttgaatatatatagcatctgaatacatgccaagcaaacaggaattcctgtggcttctggactgagtctgaccaaagtgtgggaggagtgatggggaggaagggcactattcagagctgtggtctgaaggaaccgtcctgccattctgcaagttgctgtcgttctgagcctgtttccccatctgtaaaatggggttaatgacacttcccttgtgggtcttggtgagctgaaataaaaccacatatgtaaagcagatataaagtatgtactcattatgtgctttaaaaaagttccctgtggtcagatattttatttgaaatgtttgtttaaaaaggtgtacagtactctgaatatgatgtgcaaagttctgtgctagaggcttagaggaaaaacaaaataaatttaaggttactatactgaccctttcaggtggttggagaggaagcacttttgcttagttcaagctgcgaagaaatcatgaaagatattatatcagtaagtgcccgaatgaagcaggcaggtaaaaactgggaaaattgagaggcaaaaatcatgtctattagttttaatgtctgggggaaaaaagaggtatagaaaagctagaactgacctggacctccacagatatgaaggtaaatagggagagagggcctgttttcctataggatgaggtggatctggccaaagaattgctattgaagagcagttaaaggctggaacttggggcaagccatatttaaatcttaaatgtcagacaaaggagaggagtcctgctggagatgacagagaaattaaaaatatatatatatgtttaagaggatagttaacaatagcaactgagcgtgtgctgcctcaggctctatgtttgggactagctgggaattagcagagagttaagtaggaacaaattcatatagttcattgcagcactaaaagggaattctggttttatatagcatccactatggtggtcggacaaaatgaagggctaacgaagggatttttattgctgtatgaaacatcaactagatgatactaggagaagggaggctagtgaagtccaatgaaagtatcttgcttaatcagtaggaacacctgtatgcggggaaaggacaccattgggcttagattcgaaagatctgggttcaagaagttgctctgctactaactagccaagtgaatttatatcagttatgtaacctctttgaactgtaacttccgcaatcgaatataagaacaaaataagataatatatgggaaatgcattgtaaatgaaatatttcacagctatacattttattagtagacatgttgctgaaaaataaaaatcaaattttatgtactgctagaggtgcttgtttgattaaagaaacccaactatgatatattttctaaagcaggaaattttggaaagatacacttgtaatgattttggataaggataaagggggcatagctgagatgttagaaataacaaagcaaccaagggtagatgatagatcccaaatggtagatgactgagagggagaaagatctttgaagttacaaactcgaggaaattaaataatcatggtactgtaaatatgatggagaaattaagagacaggttaggttttagaaaaagtttgggcctcctaataccttaacttgtaggtcagtatttttcaaactatggatgatgaaatctgtttaacgggcttccatatatattaagaa

SEQ ID NO: 67205 - DNA, 1017 bp, Homo sapiens
cccaactgtggtatattttttaaagcagataattttggaaagacacacttgtaatgactttggataaggataaaaggggcatagctgagatgttagaaataacaaagcaaccagcaagggtggatgatggatcccaaatggtagacgacggagagagagaaagctctttaaagttataagcttgagggaatgaaataaatatgcagacactggagaattcacacaactttaggtgagagttgaaggagactttgaaggaagaatttatctccgctgagaggaagggttgatgaggtaagtatgtgtgttccctgtttgggaggtgaatggaggaatcccagttaaagagactaggaagactcaaagatggtagtaatctatatttttatatgttcagtggagagaaaaacaccatgagttatggtcagtactttgcggggtttttatcacgcccacaagtatttatgtggcagtgtttatgtagcacacagaatgatatcttgcctataattcagaaggtaatagtgaacaaatgaagagaaccagagcttagtggcacaaaagcctaggttagaaaagtataataaagtgaagtgaaagaaagttggaaacaaataatatatataggtataatcccaatcttgttaaaaaacgtctttcactcaccctgtaatcaagactggaagacggtaaatcactatttatgttgtctgagtttttgataatgagcacatattgctttgcaaaacaaatagtgcagtaaaaacaagggcagcagtactaagggtggttaaaagtataaagtaggtgagaattaagtagaaacttgggatttgtgtcagaggagagtagtgatgtcagagggatttcagttgaatggtgaaattcaagttctttatttagagtcaaagactgaggaagagctgatgtccaggacacttggcaaagaaagaaggaaaggagggctgctagtttgggtgacggcctcatcatgaagcttcctgggcgcattgaact

SEQ ID NO: 67206 - DNA, 1027 bp, Homo sapiens
gcaggcacggtataagtccaactactatttttctctaagctgaataagaaatggattgggggtaattttttcttctgtagtctagacttcatttaattctcctattttcagtagggtgcttctgccctcaacaaagtctggtatatgcaaggacaaagtgcatctggttcaatctctctatttataaaaattgagccttctgctgaggtgaggggagtatgggagaagagacatatggctgccaccctcctgtagcttacagtttgtgtgtgtgtgtgtgtgtgtatgtatgtgtgtgtgtgtttgaattagtggtatcagaggctctattgactttaattttggagcagactcagaacccactgatgacctatctccttcagggtttctaattgctaaagtccaaagcgggcttttaaaatcttttttgaagtcttttatcttgcacgttttagggtaggatcgttgagactgaaagaagcttgcagttcttaaaggaaaagggacatgctctaggggtgcatcaaaggcaaaaacccgaacagaggaatgttcagacaacttcaagggattgacaatttaaagagttttgaggaaacttttctgaactgaagcattctcaagagattccaaggtggcctgagattccacatttctttgatagaaagacgtggacttggcagtgattttgcaaatcagaacaagaacaattttatgaacacattggcaagtggccatgtctcagacttgttgggtagttaaatgtccactagaaacattgacttaatccagtatttatgaaataactcccgtattctatgtagttggtctaggaattggaggtgaaagatgaataccattcagctttgtgaaaaattctagaccacgttcaaaaagttttttgtttatacttgtaatatttatgcctgtggaatgacacaaaagacaatcttgaaatgtcagaaaatgataaataagagttatttgttattttctcagcatttttttccttttgtgtgtgtaagtg

SEQ ID NO: 67207 - DNA, 1021 bp, Homo sapiens
tgctgccctgtgcaatattaagagaatagctttcacaaacaaaccccagttaaagttatttagtcacaataataaaagtacaattggacatattttaagaaaacataaattataaatatgtgcagttattttaacaatttatgaatgtatttctaaatactaaactttttgtttgtgataagtgagtataaaaatatatatacaattatatactcttaacttgctcaacatgagagatttaaaatgatgagttccactgtgagtttaatcttcactttcatctttttatttatttatagactggaacaaataaatcaattttttaattataaatttttagtaattgaaaattattaaatgtacaaaggaggagaacttttagaatttagaagtacaaaggaggaaaacaatttaaacctacagattgatttggtgggattggttgtatgtctgcggctgtctggagaatccaggtgcttaagtgccttggactagctggacactgaaacttcacagggaaacaaaaatgtctggaatgacttgttgatgttcttgaaatgatgctaatatctattctataaaacctgaaggtatgtagatattattgtctgtttcgagtcatgtatcttgggatttgggactgttggagagaagatcggtttgatttagaccatgataggtattgatctatatatatttttgaaatattttggctaaaatgcaatttgatgtggtaagtcttatccatatctaacattttatcttaaaactatatctgtagaagttgttttttaaaaagaacagaaaaatcgagttgcattttggtgtttaatgcattgattttaaaaaattatattcagagcaaaatgtttgagttttcaatgattttttccttaaagcattaggtgcaaacgtcaggtaattctatgattagaattgtgtcgtgatactttgtgggtgaagacagtccaaaaccaaaaatgatgagacaagtgaaatctttattaaggaaggcctaaca

SEQ ID NO: 67208 - DNA, 1005 bp, Homo sapiens
catatttttagcatcttttgaaaaattctgcacagattatggcatttccaagtagatttgaatttcacaagggggaaaatacgccattgtctgtgttcacatattttgacaaaatgattgtgtataatcatggagacaaagcttattgttttaaatgattttgttaaatactagaaagtagttcactgagttaaaaggtttcatacaggtttcctaaaaaccatttggcttagatatatttaactatctgtgaaactacttgttattatcctctttactattgtatgggtttggttggattttgtctgttgaacacagatcctctgattttatttcgattttatttgaattgctttctgtaatattcaactacatggaaattgtgtttaatttgggcttatgtagagtggtccatagactttgagtgtgtgtttgggttgctgttctgaagaacagaagtagccaagaagtagtctgaaaaagtaggaccataaaaaattagactggtagaacaaaaaagaaaaaaaaacaaacaaaaaaaacctgtaatttttaccattcaaaagtccttatataggtttcataataaatttttttccaaaatattactgatgtacttctccaaatgtttattatagacatgtcaaaagacaaaattatgacaaatttagttataaatcaaattgtcttttatttgtgattcataaattggggcagcctccattcaacaaaatagaatgagagctcccactgagcaatggcagaacagtgggtttggaaagtgggaacaaggaaacaactatagaaaaaaagaaactggttaacatcaggttacttccggtgactcttttgcaagttaaagcagaggagacttctttattgcactgactcaggtcgactggaatctcctgttttcaggaaaacccaatctgttttgggatctatctgcttctttaacgtttcagtttgattatatggcatttagcttgagtgactccattttgg

SEQ ID NO: 67209 - DNA, 1037 bp, Homo sapiens
ggcaattgggatgcacttccctataagatgttttatgtggtggttttgtccggattaaccaaaatgcaaatcttcatatcctctatagtgcctagcaaagggtcttgcacataggtgcaagttgtcagagttggctcagtttcactctgagccccttgtagatagcctttattcattcctgcattctacatgtatttatgcctttgactgagaggtaagatctaaaaaaggaatagatatatctgaattcatttgtaaaaagggtgctagctggcaatgtatgcaaaggtttggtggcagtgagtaaacaagaactggggatggccttgctcatcagatggggaagtaaggaggtcattggaagcagcagattctgggaatgacttgatgggagcatgttttgggaagttggatttgttgctcttcttttggaagctgggagagattacagtctggaaaaccagtagtcagggggtaggaggagctactgtagaggctgtgtgaggtgatgggaggtggaattggagttctgattgtgagatgtaaaggaaggcattatgcaagaaatactacagagggaagattgatgaacttagtgactgatttggatatgcaagagaggaaagaatggagattatttagatttcaggtgaggcgcatggtaagagtaaatgtcactagcaacagaattgaggaaggggaaaatagggacttttaattttttaaaaaaggtaatagtttggcttgggaaaggtgaccctgagattaaagtggactgtctaggaagaaaagccaggtataccgctggaaatagaagtctgcagtttttaggagagatcacgttagagacataaatctgtagttatttaagtagtagatggttctcgaaggataagtccatttagagagagaagcagagaggaccaggaacggaacttagccaagcacttatactctgaagatgggcagttttcatatgtaatagttattaaaaagtggtaccaagtcatttaagcaagttactgttttgtatattt

SEQ ID NO: 67210 - DNA, 1955 bp, Homo sapiens
tcatttagttgtctaattgtattgttttgcatctcattgaacttcattaatatgattattttgaattctctttcaagcagttattagatctccatttcttaggagttgattgttggagctttattagtttcctttggtggcgtcataattgcctgattcttttttatccctgtcgtcttgtgttggtgtctgcatttgaaggagcaaacatatcttctagtctttttttggaaagagttttttaaattgtatgttatatattagacaaaattatttaaagccagtaaatttttattcaaggaatttcacatgtgattccttctactgttcatcaaggttaccttaattcctctaaagatgcagtcaagatttatcttcaatgtaacccttttaaaaagaactgagacttaatccacaattgtcctgtcagccctgtcacaattattttattttgccttcttttcttctagttttaatggggttggagctgggtcatgtggctgctactccttttgcagtggggcctgtgggtggccagcctgttaccaggtggtttagtgggcatggatcctgctgtttggtctctggatggactggactgtctccaggactttggtctacaaggctagttctgggatgaaggtcagctttacagtctgtagagagcaggcttgattactaggttcatagacagttgtgtttttctctgggtccctgggacatcttcccactgggtcactggttgggtccttgggcaaacattactgccctggtctatggttgaagaaggctgaaactgagttgcagggttgctttagggcccacagctgggactaagctcagcagtgctacctggaagactcaggaaggcacgtctccatcttgtctcagtgctgctggcatgacttacctctgaccaccgttgagagggactgtagccagtctcagagccatttcagggttttttgtgggactgaggtcagcaaccctgctccggggacttagagagatatatttctctctgggaccctagtagatcagctggactgatctcagaccactgctgagagggactgaagccaagtctcttggccatttctgatccacaggtagagctgaggtctgtaggtttatcatccatggcgcaagtgggtgtgattttttctgggtcccagggtgaatggttttgatagaaggacaatgatcaaacagagctgtagctgagtccacaggagtatggaagccatttttgggtctggagctagggccatggtaggagagtctgtcacctcggtgtagtgctgtcctatcaaaaggttctcctaggccttgtgctccaatattttctccactccattttatgtaaatttataccattacctgatttatcaatttatcacaatctcttacttggctgtttaagcttccataaaggcacttttgctgtagagggctctcaaattattgttactgttgggagctacgtgcatctgttccaccatcttaccggtgttctcttgtgttttctgcacgtgttttgccatcttactggtgttctcttgtgttttcttattcaatttttacattagtattttaggtagaatgccattataggtggcatggattggaactgagaattaatatgatgggtaatagtatcaggattcagtatctcagtaagttcgattaatgagctaaacatgattaaatttaataggaataaaagcaaaattcacacttaggtcctcagtctgctaccccagggcacatcaaatgatcaattaaataaacaaactagaatttagaggcagcactttgaaaaagcctcagtaacttcactcaggttcaacaatgtgatgtggtttataggctattatagttcatctgactttcacaataagtacgtgttaatggctatgaactgattacatccactaagtgattttttgctgtta

SEQ ID NO: 67211 - DNA, 1082 bp, Homo sapiens
ctgtagatgatgtctcttgattcctcattttgtgagatgaggattaatagcatccctgtactcccttcagctctcctttttgtcattcttcttccaattgttaacatttgtttttaaaatttttatattattgatgtcaataacatctacattttgttctttatccataattaagttatcagtgattatagtttaaaaagttgaaaactgtactttttacattatgatgaacaagtaaatattgttcactgaggagccaagtggtatacgattattgtatttcctttcctatgaagaattattacagtttctactagtcttttttgccctttcattgtctgcctatgtgaccttctgaagtttttttagtgtctgcactctctgatacccaaagagagtatcaaatcttgaaatcccttattaaagaggaatccatgattcttctgcctgtctgctactctcttctgggttgattgaccctggatcagctgcacagctgtcaccctgggatgacctttcattgatcttcttgcctgaatccagttttggcaatataatgcctttttctttctgctttgccatctagctttgagcaaaatttcaagttattcccaaaggaagagtgaatgaaaggtaaactttatgcattattagtcaatacatttataataatgtctattcttcccatagatatctgatagtatctttattctgtcctgctgattacagggttaacaaggtgtgacttctagactgagaagaatttccacattgtaactggaaggcattactcatgatcttttagcctctatgattctgatgagaagtctgatgccaatctgatttttcattttttgtagatgactatttttctctctggaaactcataggatcttctcattatccttggtgttctaaacgttttaatgcaatctaagtgtggacctttgaaaattcattttcttgtttatgtggtggctcttttcaatgagaagacttatgcccttcattttgatacatcttcttgtattagcctgagatccagaaacctggtaatttagcccacagtgatgggacaatgg

SEQ ID NO: 67212 - DNA, 1165 bp, Homo sapiens
ctgttcaaaacattatgtttgcttctggttttcatctgtgtgtttgtacactttgcattgttgtaaactgtgtaatatgatgtctaacttttcctacttagcattattttatatatggtttataaaactatgtgcttaacataggcactgtcttctattttgtggtaaggacatttaacatgagctctaccctcaacaacttctttcagtatacaatcacagtactattaagtgtaggtatgactttgtatagcagatctctggatcttaatcatcttgcaaaataaacttcatgtgtactttcttttaacattggtaaggcattcactgatatgacataacgtacttaacctttcactgttataaattggcttgtttctaattgtttattatcataaacagcatgatataggcatcttgatacaaacgattattttgctttgggattattttcctggaattaaacccaaagtgacattatcaggtctaatgttgcatacctcttgtttatgcagtcattttggacttcagaatgacagggcagtgcagttgttttattctgcatttcatcattaaggaggctaggcattttctcctgtaatgatttatcatttgtctttactgatggaatgggagagcccctagtttgctacttttagctgaatctgataattgcatggaaaaagttggaatgcaggataacaatgtcatccaagggaccccgtcccttttctggcctgctcatcatacagtggttttctagggagatttctccagctaaaatgcagacattactggtaagggtaacagaagtcaagttttgagcagcaaaccttgtggtaaggattactttatcagctcaatttccaatgcgaacagctggctaagagcagtgcctcccaacaacaggacacaggactggtagggcagtgggcatgggaagcttgggtaggatagaataatgagggagtgggcacaaggatgcactaggcagggttcactccctttcctgggcttcctcctgtttatgagaaagttaatcaggaaagaaggatacttactgcatgagggagtgggtgttactgaacactgtctgggtcagagacatgattattttgagaaaataacgactcagaattaaaaggctactttatttccaccaaag

SEQ ID NO: 67213 - DNA, 1001 bp, Homo sapiens
tggctgagacttactgaatgatgagcttcgttatagggttatgggtgaccagctagacttctcacatccataggtcttttttgggcggtggtttggttcctcctggaaaagatcttccagtcttctgcctgggaaatggaagctttgctctggtgttctgggactgagtacaaggaaggagattagtggggagaggtctcatcattcagcttgcagacattcacttgatctccctgtatgcatctccatttctgttcatacctttttctgggcctggtgtctcccattcagtttctgttgacactagctgtgtatcttctgttcaggaggagtagtttaactgtagtattgagatggagacctggcaacctatctgctcattttacagactttcagacaatgcatctattttcagcttctgtctccagcctgattttctagtttttgagacttttaagtgtatttactctgcattttgaaaatagaagttaagaatgtctttcaagcacattaaaacatatcctttaagagtgtcattcaacaatgatggcttatttcaatttggttattctgattttttttccccttgaaactgttttcactacgtctccagtgtagaacttcaaccaattttctctaaacatatgaacttttcttctaaagagattctgtaagcagtctcaaaggcagctttgagcactcttcttatttgcttggtggagttttgtatcatattgctcctggctaatacatgtccttttttggtttcaaaaaattctggcagtttctcttttgattttgcatgattggttttataaaatgtcattctaaaatgaatggctgtgtgtacttcttggacatattttcacgcacaagagtcatccatgtgatccttattggcatctgcacataattaaactcatattttaaagacagcctttgcctttttgattgactgctgctattcactagggattcattcattgtggtaaggggaatcc

SEQ ID NO: 67214 - DNA, 1834 bp, Homo sapiens
tcttttgtacctaagcttaaaagtgatatatggtaaaaatatgtgtctgtgtataaaataacttccataataggtggaaaataaaaaaatttgaagtaataaggcaccgtgtcaatttaattgacagcttttatttctttcttagtccataaaataatggtgcatcttacaacacatggagacttagagttcattaattatggtaactaagagttgctgaaagtccctcttcttcatagtcttattccagtatggcctcatctcatggattatgaatataagttatgacactttttgatagaggatcagagaatttagcctcaaagttggactgtttacattatgatactccaatactggctttcagaataatcacagataggggggcaggggtcacatggccatttctatggctttcttccttgcaagctgaggagatctctccagagcacacctcaagaaaagcaaagtggtaatacatggctataatgaatgtagccaagacagtttcagagcaggattaacaatgactcatttcagccgtggaaatattttagtggtccacatgtctaattttatttcctgcaaaactctccccatatattagttgcaaattatccccctaaatgaattgttggttttaagccagttaatattggaggactgcttctcaaaattatggttttgatttcaaactgaagccattcttcttgatactaaatagttccatcgagtcaccaattgtctgtcaaactagtgaaactaaaatcatatcatctggaggttactcatctctcgatttctgtagtgattttaaatcagtaagttaaaagtcagaaagaaagggaaccaaacatctctttgttttacacactgaaatgttttctgatcccctggagatcattcttactgctcttccttaaactctggcatttggtgatagacacaacatcagcagtatctgggctcagtatggcccactgagcctgaatagagctgagtcaagtgcacagaatggaagaccaaggaaaggtcaacacaagctgcaaactgtcctgtgtttttctgaccgatctcccatgggggcctcaggggtgtcacagcgggagagtgcaataacctggtctaagtattttgctattcatggagaatgttagttagcctgagaaactgagccttgaactcagtttctgacggaaactcatagacattatgtttggcacacagtcatctcaattcgtttttttctttttcaaataggacagactcatgtaggaccacgtcggtagaattatcaaaaaattggcaaacaatttacctgcttagtcagactagaccttgaaatctgtggtggcaggaagtctccattgggctgatttaattggaagggttttttcgggtttttttttttttttttttttttttttttattgagatggtctcactctgtcacctaggctggagtgtgatggtgtgatcatggctcactgcagcctcaacgtcctggcctcaggtgatcctcccacctcagtcacccgagtagctgggactacaggtgcccaccacgcctggggaattttttgtattttttgtagagctgggttctcaccctgttgcccaggttggtaattggaaggttttaaacagtctctgtatgtgagagtgagcacatctagccatccagtgaggataggagtctccatgcaaccgaatgtgatttaatgttgttcctctctaggactcatctctaaactccactcacaggtcagaaaacttttccaagaccatgtctccacattttgagtttgaaaaaatgagatcagggtcttacaga

SEQ ID NO: 67215 - DNA, 1054 bp, Homo sapiens
ataggttgtacactagatgccagtatatcagtgttaaatttcctgaacttcataaaggtattgtgattgtgtatccctaggtgttctgtagtaatgcaccacaaaccagggaccttcaaaaaacagaaatacattctcttatagcatctggggccagcagtctgaaatgaaggtgttggtgggaccatgcttcccttgacagctctagggaagtatttcttcgcctcttccccacttccagtagttgttggcaatccttggcattccttggctggcaactgcctcactccagtctttgcctgtgttgtttcctggtgttcttcttgtgtgcctgtgtcttcacatggccttataaggacgccagtcattgagtttagtccccaagcacatgtgacagcatcttaactaattacatctgcaacgatcctatttccaaataaggtaacattctgaggttccaggtgaacatgaatttttgggagaacattattcaaccccatccagattatatatgagactctcctagtttttaggagatagatgctgaagtatttaggggaaaaggataatgatgtctacaacatactttcaaatggttcctcaataataataaaattatggtcatatttatggagagggagacaaaatacaatatggaataatgttaacaattgatgaatttcagtgaagtgtatgtgggttgtataatttttggaaattatctagaggtttgaaatttttcataataaaaacattttttaagaagcaaaagaaggcggggtgcagaggctcacacctgtaataccagcactttgggaggctgaggcgggtggatcacctgaggttaggagttcaagaccagcctggccaacatggtgagaccccatatctacgaaaatatcaaaattatccaggcatgatggcgcgtgcctataatcccagctacccgggaggctgagctgggagaatcccttgaacccaggaggcggagggttgcagtgagctgagattgtgccattgcactcctgcctgggcgacacagcaagactctgtc

SEQ ID NO: 67216 - DNA, 1812 bp, Homo sapiens
cagccactgcataataaacttgaaatatttggctctattattgattgatcatatagataatggccccagattcaatcagccatccgaaatactgctgtggttgtgcttggtttttaatttttttaagtcatttaaaacagacatagtcttaaatgctttctcttgaaaatctgatttaatagagtcattataaaattgctaggtggtttagttttattggacttttatatttggtggagaattttcattacaaaaattacctatttttttttccaatgttggactttttatgagaagaggaaagtgcttatacagatttatataatgaacaaaggtgagagagttaagtttctaattttctggaacagtaaaagatggtttatcccctatctttgctctggtcatagatgagaggatcccttccacgtgaaatgccccaaatgaagtgtgatagtgatactcggtcatggttagggagaggtgatgcttcctgtgtcactatactgacagctgtgtgtcaggacacctctgcgccattcgataggctgtgatccctctggccagcccaccaagagcaaaccttaatccagttgtgttgttaatcacacagatatttagggacttggctttaccttcaacagtcttccaaggagttcttagttctaacatttgcgtgatttcaatagctgatgataaactctctgcaggcatttagggacgtcgctttaccttcaatagccttccgaggagctcgtagtgctaacatttgcctgatttcaatagctgatgataaactctgagcagatgaggtctcttttttgaagacctgccgatttccacatttatctttgtttcctacagatactgtctcctgaataattcatatttttcttagtttcctttcctggctcctttcctctatccatccttaaatgctgctgcatcttggccatcttcttttcttttacactgttcttgggccatctctgccacttctgtggtgtcagataccactaataacatatgtatgtgtgtatacttggaacagataacatcacctgagttctaggtcccacgtattccattgcttcttagatatattacaatttctagtcaccatagacacataagatttcatatgtccaatatagaactcattaactttcccttcgcttccctccctgaaccaaatataccacatgagttctcttgtctgtgttcctgatctctgtgaaagcagaagtctagacgccacctttggctctttcattgccgtttttctgcatctgtgtggtagtctttgttaatgatgttcctgttatttctgaaattgtataataacatagcatggcatctgttgcttcacatttcacttcccattctgtgattataaagaggtcatttttgcaaggatgttcaaggccgtcatcagcttctcaaggatcctccaagtcctttgggagacagccatgcagtcctcatcccagttcactttaaccccttacttgttcgctggtccctcccttgtcaacaatgtttttgtgatttgagcagtttttcagcactccttacattgcctttatgaaatcttatatctttgtaagatttgtgaatattttcattgcatttgctttctatccttgaatacctacctcatttgaccatcaggaagaggctgggtgagggtgctgggttgatgggtggaagaggcccttgcatgaggcagggctgtttcagttggaagtcatttcctcagtacttagctcacccctgagtgttgcattcttaaggcaccattcgcttccccaccca

SEQ ID NO: 67217 - DNA, 2163 bp, Homo sapiens
taacctataaattaagatgctgttctcatagatctgttattctgattggaggagacacatggtgtaaacgtaaaagagtgaatgaatgaatgaatgaatgaataagatgtttcaaatagtaagaattcctatgaagaaaataaaatgctgtatgctccagagagtaagtgagcagagaagggggtgggtgaacaaagaaagtgccctctgattcagcccaggaggcagaggctgcagtgagccaagatcgcaccactgcactccagcctgggtgatagagtgagaccacatctcacaaaaaaaaaaaaaagctctctctgatattggaaatgagattggaacgacacagggagccgagagagagagagagagagagagagagagagagagagagagagagggagagagagaactgtaaacatgtaagcataaagtaagaaaaatcagcgtgggttggctgctttatggaaactttttttgagttattttgtggttgtgcccaccacactatacatcttgatgtagtttgcatatatttttaaagtgggttagcatcatcagctaatgcttattgaactgtcagcaaatatttatggagagcctcctgtgctcaagaacccttattaagtgcagagccctgaattatgagttacaaggattttcagaaggtagaattctagggtttaagggaaatatttcaaaggaattacaaattaatttgaaaaaactccagggccttcttagagaagcactgtacattccagacatagcatctaaagccaaaagattaaaccagatgggcaatcattttctttctcattacccaactaatggggactgtgaagatgggcagggactcatgtctagagcccacctgaagtcacagtggacctagaatgaagttaacgtcgcagttaagattttcaccggctactttgcttccccaggattttatattttttgaggaaacggaatgtctctgtcatacacagagaggtgctgacttccctgcatgccgtgtagacacaggaggagtggtcacagaggggacatgtgccatcagccttcttcttgagctagtggcacccttaaggatgcaggcggggaatatcaatatattattttggaaaaatcagaagcaaacattgtataaagtttaaacagtggcgacagaaggtgctggacactttaaaatgttcttgtgtggataaatattttgtatgggagaaagcacaagctctgaaaacagccagacacatggttagatggatgacttatcatcttggagtctgtgtctactcatctttaagatcgtagtagtaacgatgatagctgtcatttattaagcacctgctaggcatttaacgtacattatagccatgctgagctggacgttttaatctctattttatagctggaaaacaggctcagagtgagtaggcaacttacctcatgccagatatttagtatgtggcagacctggactcagacccagttccctctcttccagggtcttcccacccacactgcagtgtcccttgcaggcttgttcagattagcaaccttgaatgctaagtgctgctaagcaggctcacagagaaggacaacgatgaggcatgttccctcactgctttttcctcctacatcccaggacctgggatcaccttgagattgtctgtgaacaaagaaatcaatatgactcaatataattctctgtacaattacattttaaaattgacagcctctttcactgttgcttcaccaaaaaataaataaataaaacaaaagcctaggaattatgtttatgtgttttccaaatgaagaaaagaaatttgggatcctaaagagtatataaaatatgttgatgtagcatgtaagtggaaatggctaaaaggtaacagaacataaccaatgttgtaggaatttaaaatattagtgtcttgtttaatgacatagataacacacaacaatggtgctttgcatgtgaagtcccattatagtatgatgagtctcagtacaggtatggaagctgctactcaatattaggttaattttggtcttcatcaagacctttaaagatgatttcctggattttagttcttataatcactgttctgccttcagcaaggacttggtaatgataaattgttggtgtagataagt

SEQ ID NO: 67218 - DNA, 1109 bp, Homo sapiens
agaaaagaaaaagaaaaagaaaaaaggacacttgtttatagtatgagagctgaggcaggaaggcagagcatcgcctgttcaacagcagctgggaaggacaacactctgcacatgaccaaggaagtactgcaagtattgatttgggggttacaaataaatttcagagagtaggtgaatttgtaaatgcagaatctgcaaataatgaggaatgactttattactgtattatcatcgttttgtttgtttgtttttgagatggtcttctttggaggggtctcactctgttgcccaggctggagttcagcagtgtgatcacagctccctgcagcctgaccacctgggctcaagtgatcctcctgccttagcctcgtgagtagctgggaccacagatgtgccaccacatccatctaatttttttgtttatttttagagatgaggtctctctatgtaacccaggctggtcttgaactcctgggctgaagtgatcctgccagaattttcaatttcaaataaaaaacttaatttgagtgacttgcctaacttccacgcaggtaatagatggggaaactgatgcctatacttttggactttctttgttcagggtatgccatctactgaaacactcccttccacccagatctcaggggcttaccacaggtcagcagggatgtgggactgcagcaagccctgctccatacagtcattcagggattcaggcacctctatcccccagcccttcccagaatcccctgcatcccgtcggctgactcacaggaaagagggagtggcaaggcctggatgtagtttggggacattgctgtacgtctatccatactgcattgcccccacttacctgcaagggagcctgcagaatttcttttcctatgtgcccaggcagaaaaaggagtggggtttggtgagcatcgtggcgttttcttccttccaggagcacataatgatgttttaatcccattcttatattccttacgccatttttctgtgtccctttgagaagtgttcgagacttacagcttctacctgttgggattcaatttaagaaaagagtggaagtggaggttttgttttctatgcagtaagtttcctgaatt

SEQ ID NO: 67219 - DNA, 1094 bp, Homo sapiens
catctctaaaaaaataataattttaaaataaataaataaaattaattgatgcgatatcttacctttttgctgttgttttactgactctttggaatctggagtgtattttacacccctcaatttgggttagctacaatacattccaagtgtaccctggtcgcaaatgcatggtggctgccatattggacagcacaggtttagactggttgggatgtgattgtctgagaaggaaaacaggtaaaggaacaattgtatcattacccttaaaaaggggacagcaaacattttcagtaatgggcaaattgtaaatatttaggttttatgggctgtgtggtctctgttgctctgctgtcatagcacaaaagtagccatagacaatggctgtgttccaaaactttatgtacaaaaacagaaggcgggtgaatttgacttgcatgctgtagtttgtctaccctgttcttaactttaaaatacattgctctctcatagaaatcaaaataactttggtttggaattgtttgtatttttaataattgtgtatttagaaaccatcaatacagtaaatgatagcctctgtcatttatttcctctcttataaagtgatgggtgattcttactatgttttaagtgttgtttgttggttggtttagaaaatgaaagtgtttttacatcactattgattaccacttttctctttttttccccttctactcttcatcccttctggctggaataacatgtctggatggtttggctactgtattcctactcatattattctgttacaataggtaagacccttttctttccttttgaattattattctgcctaatgttataatattaatatgtatggttttgcttttaataagtgttcaaggaaatagcatggcatagtttccataaatttattctaaattaaattattttcagctacaaggaaatgtcattggtacagagtataagtggagatagattccagtcaactgtggaatatcctcttaaaatattttataaaacatggtttacactcaatacacaataaaaaaatagatatgtgcaggattttactgtcttatttttttcattctcaa

SEQ ID NO: 67220 - DNA, 1053 bp, Homo sapiens
tttggaatgccatcacttttaagaagtcttctgttctctctccagctggtaacaagcattccctcctcagagtctcctcattgccgtgagcatgtccagctttccagcttgtagtacatctccttacgccccagtcatatctccctccccaacctgcagggcccccgcctgacacagcctccagggccatgctccacctagcattgtgtcatgtgctctgcaggtgctctgcaagtgtttgttggaatgtaaatgtgcctagatgtttttgagtagtttcctttttttttttttcgattacacagcagatttattcaggctcactatttttagtgatgttttcattataatatttagcctcggtaatatttgatcaatgtcaataacatctgtttaactaaaggaaataaaactttgctgggtcaatgagaggtctaccaagtttgaatcgtttctccccaggcaaggaggatactctgcctggttccttcctgttcacctgttctttctcatgcctttccatatcaggctattgtctgaacaactttggacccataacttcttctgggcatggcagcataccaggatggatctagtaaccttcatttgacttttgagggaggataagaaagtaattagttttagttatttgtttcattttgctgcactttgctaattccttctgtgtgtgacacacacacacacatacacacatacatgctgtaaaacatgatttgtaggctgggtgtggtggctcatgcctgcaatcccagcactttgggaggctgaggcgggccgatcacttgaggtcaagagttcgagaccagcctggccaacatggcaaaaacccatctctactaaaaatacaaaaattttctgggcatggtggtgcaggcctgtaatcccaggtacttgggaggctgacgtaggagaatcacttgaatctgggaggcggaggttgcaatgagccacgatcgcgtcactgcactccagcctgggcgacagagtgagacctctgtctcaaaaaacacaaacaaaaccatgatttgtaga

SEQ ID NO: 67221 - DNA, 1050 bp, Homo sapiens
gccgtgggatcacgcacgccgtgactacaaaatgtaaagcaatagaacacacagaacacactggagcattaatctgaggttcttaaatgccattatgcattatttatacttcctgatacgataatatatcgcaaatgaatttacatgagagagataatatttctgcttttcccctgatgatggattcagaatggataaattcctttattttatttcaacctgtcttctaaaataggccagcatgttatagaaataggcttttctctttgaggtgagtgaagtggctcaactcaaggaaatttttctttggataaaagagttttttttttttcttaaattggctttctaactgtgttacattatctgctgatcagctttggaaatgttagaaattttgtcatttaaagctctgaggtgagatgaatagagccacaaagctataggtaaatgatgagaaaaagatgaattgtggtatgtttctaaagacttactctgttccctttaacagcatttggggaaaataacatgggagagacagcacagtttgataattatttgtcacaggagtgcccattagcctacactaatttgattgctgtgaaaaaaacagattaaaatactctgtagaaggcagagtcataacattattgagtgtccagtaggtttcttacttatttaattccctggatccagtctcagaagttggcattaatatcaccttgtttcacagtgaaacaaacggaaaagcagagaggtcaggcaactgacttaaaagcacagagctcgtaagagaggagggtgggctttgaacacaggcagtccaatgtcagagcttgaactcttaactataattctataattaccgcctccccatcccaaaacagcactggcctaaggcacacagaatccataacttcccctttatgtttacagacaactctcagttaccttaaattgaaacattacttttacagccatagataaataggagttgactcttttcaacaggagggccaaaggtacctggcatggaagatatcctgtccacaa

SEQ ID NO: 67222 - DNA, 1051 bp, Homo sapiens
tcaaaacccagtacaaaatttaatgtaaaaaaatgtagttcgatattcacttaaatcacccagatgctgttttgcctcctagtgcaggattttttaaacttgggttaatgagcatccagggcagtcactttcatattctttaactccaatcaatggtaataaatatattttatatcattatctagaatacacaagcaaatcatacagttaaatattcttgtgatatattcagatattaaaaataatttctgagacaaaattttcacaaaatattactaacccatcttatacgcatgctgtagtttatattgttcaatttggttcttctttattctatcattttctatcttgtcctccaatttcatgtcacaatgtacagcatacaacacactgctatagggaacccatggactagctttggggtccttttgaacccctgaaccaatgtgctaaatttctactaggtcatgtgcatttttccaggaagagcatttgtggtacttgtcaaatatttcaaaggtagcttcagtgacccagaaaagctgaagaactgctactatagagggtcttttgataagttacaggttattttgataagtttgtaatgcacttaagttccaatttaagatgatattaatgcaaatagtgacttaaattctttccccttttggtgggagagtttcttttttcccccaacatgactttttaagcaacaccatcactctatgtgaaatgaggtgttgggttagattattcttaagtctctcttaattctaactttacccaaatactttattagtatcaaaaagtaatacatatttattgtagaaaatttacaaacacagataaacaaaataggaaaataaaaattgcccattaaactaccacctaaaaaaaataagattaacattttggtgtctatccttcacgtcttttgtttatgtacaaacatatatactttataaactatatttttcatattgtagtataaactattttgtaacattttgctcactatagcatcatttctctgtgtcatcatatattttct

SEQ ID NO: 67223 - DNA, 1011 bp, Homo sapiens
ttggtgagagactgaggcccagagaattgaaatgacccaaccaactagtaagtgaagattgctctgatcctaatgttccatgttctttttaaaattcctgtacttaattggagtccggtgtcagccagtatagtgccagggctggtgtgtttaccaacttataataaaagtcccaccctcagcattttaaagccttacctgaggcattagccaccctctttagaacctggtcctcccctcgaggaaggatatttttccaatggaatcctctgggtgcaattgaatttcattgggtagtccctgaaattctaattgcagataatggctacacctcagaaattacttatagccttaaaagtttactggagaattctctccttattccccgatacagaactaaagagaggcctgagagaggctgttttcactgtgaagactttaacctcctcggctttttgggggccaaattgatccagtctccaagtctttttagacaattgctaatagctgcatgtttttgatggaaagtcagaagtcatttttttttctttttcccttatctacaatgttgcttgaaaggcatttggggccctctccgtgactgcgatgattaattcagagtctgagggagcaagagagccactcaaaggggaagcatagcatttatagagaggattgaagccctttaaaggcaggatatgggaaggttttgagacaaagttataccttaaagtgacccctgtgtcattggccatcttagggcgacctggctggagaatggcaggcccctcacaactttgtcacaggctgctgtttgctgaagacatgatacagcccacaggaacacgtttaaagattgctggcgcatgaagcacattctttatgttttgaaatgttttactatacttccttgacttgccttatttccataaattttgctttctctgaggaaaatttgaacacctttcacttttcaaatttcagtttttatgaggttgacattttccttag

SEQ ID NO: 67224 - DNA, 1704 bp, Homo sapiens
gaagtgtgcgtgtgaacattttactgtgattcatgagacagggtcactggcttggttcttgcccattcattttcataattcatctgtctaatttatcctgtgagtgtaggatgaacatatgaatttattaaagtggagattgagagataagtaatttttgtaaaaggaagtcgtataaagatcccttgaacccatccaactttagaatatggacagttcagtgagaaaaaaaaaatctgtaggcaagaaatgattctctaattttaatctcgtaaatgtccacataaaggtattaagattgtttatgtacagaaatatatttatttttgtaatagttgtattaatagattttaaattagcatttggtcttttctattttgcttcactaattacgtaaggctttgactattaaattaggttaatttatctctattgcatccatccaggattgggtagaaaaggtaaaaaggccaagtgttttcctaggatcactcaggatcaaaaccaggcttcaggcctctcaattcctggtttctgtgctttgcctaccataaagatattggttgaccttcaaatcgcatactcctttaatcatcttttctcttatgactctaattttcattttcccttgtgattttacaaggcagattttattatgaatgtactttgaagtgagaaatgtgaagcccttttcccgtctctttccctctaaaaagaattagattggccaggtgcagtggctcatgcctgtaatcccagcactttgggaggccgaggcgggtggatcacgaggtcaggagatcgagaccatcctggctaacacggtgaaaccccatctctactaaaaatacgaaaaagaaattagccaggcatggtggcgggcgcctgtagtcccagttgctccggaggctgaggcaggagaatggtgtgaacccaggaggcgaagcttgcagtgagccgagatcccgccactgcactccggcctgggtgacagagcgagaacccctctcaaaaaaaaaaaaaaaaaaaaaattagattgccagaacacaatggcatcttcacatttcttgtgatagtgcttaacatagtttgttgttacatctgattgctggtttctttccaccacactacaggagaggctgtgtttcctccttagcgtaagagtttggcatatagtaggtggtcaataaagggaatttcaataaatagcaaagagtgattcagcagaattgccaaatactgtaagttatttgtaacaaagacactttttccttcagccttttactatccggttttccagactcatgtgctttactggaagcccaaggtttcactgggggaatgtgagtgtcctagaagggaagaaagtgtggcaagactggaaaaccacataagcagacacggatatgacctcacaattagaaaaccatggcaccaattaaagagtctgtatacctttgcctctttgacaaattgtctttttgaattggctttgtgattcatgggctcaaatttgaaacattagtgtttaattcaatgaatggaaaatacttttcatttgactcacgaatattgtcaccatcgttatgtcacctggcatttgagattgtgatgcaactagctcactagttctaccacctgtaacgaatactgcaattagctgctttctctttcctagcctcagtgggttcataatcccttta

SEQ ID NO: 67225 - DNA, 1338 bp, Homo sapiens
tcacaaatttatcgctaacgcagtctgcatcatttatttttcttctgcagcatgtggcaagccctgtgctggtgagacatccatagatggttgggttgatcctattctgggaataggctgtgtgtggtagagagatgagggctgaagaactaaggctgaaggtgagcaagccctacggtgaaaagtaaagtcaatgaggccaattggaagaaaaaggacaggaagaggaatcccaatagatgacaggtgttggtatgactggaatagatgaatgaaaaagagcaggaatgttaatgggttgctgttggatataggagtatccaaatttaagattacagagatggaacaattcccagtggcaacaaaatccaggatgtagacatagcaaattattgcttaagtgaagtaaaaactgtttgtcaagtgaataacatgatattccttgaagcttttcacttgagcaacctttccaatttattagtttggaatttgccattgttggttggattttttttttttttttttttttgatacggagtctcgctttatcgcccaggctggagtgcagtggctctatctaggctcactgcaaactccgcctcctgggttcacaccattctcctgcctcagcctcctgagtagctgggactacaggcgcctgccatggcacccggctaattttttgtatttttagtagagacggggtttcaccgtgttagccaggatggtctcaatctcctgacctcgtgatccgcccgcctcagcctcccaaagtgctgggattacaggcgtgggccaccatgcccccagcctgttggttggaattgtactgagaacctgaatctttctatgactggcctagacagaatgctttgttggcggtaggcaaactgcaggactgttttcattggtaactcttgggaacttaaaaagaacctgaagtttgccagttagacaccgtggctcacacctgtaattccagcactttaggaggccgaagcaggtggacgatttgaggtcaggagttcgagaccagtctgggcaatatggcaaaaccccgtctctactaaaaatacaaaaattagccaggtatggtggtgcatgcctgtaatcccagctactcaggaggctgaggcaagaaaatcacttgaacctgaaagatggaggttgcagtgagctgagattgcaccactgcactccagcctgggtgacagagcaagaatacatctcaaaaaaaattattgataattggtcattaataacttgttcctatagttgtgttagctctgttggattttgatttggccaatggttacactaattttgaataagcttatt

SEQ ID NO: 67226 - DNA, 1042 bp, Homo sapiens
gccatatctttgcctgttatcacctaggagctcccaaaacacagtgaatgttgtttttttttttctttttcttgagggaagacaaattccatagggcaaattgttagaccagttatttgtgcttgtttagtttaacaagtctctgctcctggccatgtggtggggtgtgctatatttgttgagcttttcctacgtgccatacactactaaactctttacatcccttctataatttcatccttataacatacactatcatctcctacttttgttatgaagagactcaatttcagaaaatttaataactggcccaaatatacacagttaatatcaggctgtacgtcctggtctttagtcattttaactgtactgcctcccaccagggcttgatcattagatgggaggtgagtatgacactatttacaggaaaaaggtgtaaaagtgctgtttcattgggctgaagtgattggtgtaccacttctacttgggccattgaatttaaatgaattaacatttatttgtctatatggttgcgtgtaatggagatgccctatggaaagcacttgacaggtattaggtgctagtaagtagtcgtttttgtcattggaattgcttttcagtatgtttggcatgattttgcctagtcctgtgtttctcaaagttactgtgcttttcggtcccccaagaatcttgttaaaatgcagattctgcaagtccagagcagagcctgagagtctgtagttctaaactgttctgagccaatgtagtgctggtggccccaggatcactttttgagtagcaagggctttgtctttgagtgcagcaatgaatttcccatgagatggtgtgtagtttttaactgagatacagcaaaatcaccagcccagagcagacgtttgtccctggtctcagtaaaaaagtgaagagccagttgaactaactaggaattaggcattttaatagaaatgagaagaagctggggagggaatagaaatgaaaggaatgctccaagtcaaggaaatacatcttcctaggaaacacg

SEQ ID NO: 67227 - DNA, 1045 bp, Homo sapiens
ttgctctgaagtgtgaacaggttatcatggaaagatcttggtaggaaacctccaaagacaaactgtctcaatcccacattgctttcatcatcaaggcccctactaatgaggcaattaaggttgctaggatacagactttaaggaggcgcccactctcagggcccatcctctgtttgcaccaccctgagagttagtgcttcattaaattttgagccctagagactttattctcctcacccctgttctatctatctaacattgtcaaactggaagtgatcttagtaatcaccgtattcagccctctattttatagatacagaaactgggctccaggttaaatgacttgttcaatgtaagtaagagtgaaatcatatttaatggattccaagatgcacatttctcactgacagttgaactgacatcaggattgtcttatcattgatggcttttgactttagtgtcatagtttgattggcagtgtttcacctttcttcgtggtataaaaataatgatggtgcatcttaccgtggatgggttcttatgtaccatgaaacacagtattagagagtcaggtcctctgcctcctgattcggtgctcctctgctgcacacttggtgacaaggttatcctgatgtctgcatggttactttggtgattttagagacagcttagcattgtggctgagagcatgggatgtagaaccagacttccctcccacataccagccatctaacttctgcccaagcagcttacttctctgtaatcaaaggtggcaaaagtgttaactacccagtagtgtccttgtgagaatgaaatgaattaatccacacaaatcagttggaacagttgctgacacatagtaagcactcaataaacatactgttgttgttgatgacagtctcactgaccaagtcaccctggacccccgatggtgtctgtacaataacttgaaccaaataggtattcctctatgcatgctatatgaatgtaactgtattgagagtcctgttaaaccctggacaagatttctgagtatcagcatatt

SEQ ID NO: 67228 - DNA, 1074 bp, Homo sapiens
cttgcagtgttaaaaattatcaggatataaatcataatctcaatacaagataagaaaaataacaggttttatttttgattatctgaataacttctcttcagttttcatgagtacttataagttgattgtacttaaatcccctttgtaacaatgcaaggtaagtaaataattaaaacatggcaactgtgcagattagttcaagcctacagatatatttttcgactgaggctttagaatcaatttttctaaggcttagacaaatgcaaattttaaccagagagaaagcacatagttatattctagttattctttcgtgaggtggtctttctttgcaaacagataaactaaatgtatagttggtaatgcatatgagaatcacagagaatcatttttcacaggccggaggacttttctttgtattcctttgcaatgacagctgggggcaggtcatgaatgtatctcctatttccctgtcttcccatcttacctcactatgcttacagcattcatgttatgggctaaaaatggaaggaataaaaagcaaaagagcctaaagtacgatccacagatgacctcagctgactttgttttttgtttgttgttttgcttttttgttcaaagtgaacttttacgttcataattctctagcttctcaactcatagttgctacagatcttcagcagtttgccattcagtctcattttgtctgttcctttctgaagttgtccacaccttagtgaccccagaaaaacccttcctgatggcatgcagctaacttaagggtgtcaaacttcctattgataggagctgttgaacttgacagcctcgatagagggtgagtatgaggcatgaataactcaatttgttcttcttgatcacttagggggcttcatagcatagttctctctattagcatcataaaataaatttgcatgaaaatgtctgtgcattgctcttttggccttttcagagaaagcagatttactcctgctttaaggagctcagtctctactttcatttgacttgaggcattatagaggtcagaggacatggtctatccttagcggctaagat

SEQ ID NO: 67229 - DNA, 1023 bp, Homo sapiens
ttcctccatagatgcaatgcctaatgtcacaatgccaccgcatcaccacatcagctgaaaaaacatttggggaaagtcaggtctgcatgtctgacttgtgaattacattaactaagcctaaacctaatagcccaagtatgctagagggaaaggataaaagggagacttaaaattgctttgaattaaaattgggaaaaaatgagaacgtttgtagaaacttaaattatcccaaaaacatgtctaccaaaaagtagcacttctaggcatagtttgatatctatttcatcatgactgtcatttgtttgttcagcaaatgcttactagcacctactgtgagtcagctattgtgttaggcacttgggatatggcagtaaaaggtatgggaaagagtcattctcttgagctcacatcctagtagaagttttgaacaatagacagtaaacataataaatgagcaaatgctatagtatgttagaaagtggtaatagggaaaagaaagtatagaacagaataatagtgacttggagtatgtgtgggatgagctagtgtgtgggcagttgtcacaagtttgatttcctagaagatccaatccatatcatggcatctctcccccgccacacacactttgtagaataaatctattttaagatataagccaactgcttctcaaaaaggttaagtaacttgccctagatcaagcatctggtaagagagaaatctgtttaccctaaaatatttttatcataccctgctgcctcccagctcagtggctccctgctcccctgtttctgctgctttctgccagggatatctttggctcaaagggttatctcaggatggtatgctgcagatgttttatcggacacttgctttttctaggccactcagggttctagtgccagacgtagttcactgctattgttatatccttggaaatagcagcttataataactggaaattagacatgcatgagagggtaagaaggctaggatcgaaatgttaagatgtagaaagtaggttag

SEQ ID NO: 67230 - DNA, 1016 bp, Homo sapiens
cagtgcgttccagtttgagctagtttgttgggcctgaaatgctcatgaaactttcaagaatataggttgggcaggtctatgaccatgggaatcagaagcatgggagaatgatggcataggagttaggactggacagtcctcaggttcctggagataattaaaaccattgaacaggatcattgtttacaagaactattatggaagttgcttcccttctctgacgtatctctcagtgacagtagtaagtcctgtggggaattattgtaaacatattacaaatattaactcatttaaacctcaaaacaaccctagaaggtaggcgctattactttccttccatttttcaggtaaggaagctgaggcacagagatgttcattttcccaagatcacgtttatttagtggtggagattagaggcaaacctaagtagtttggttgaggagtccatgattttaattgttatgtcctgcagcctcatgcattatccatcaagatgggatagataagaccttagagaaatcagagataaagaataaagaaaacatcatgaggagatgggaggggagtttagtacagtgatatattcattgtctgctgggaagtagatagggtacccatgtttgaatttggttctcgtgagtttatcactccacggttgcataactgttgttctctcacattcgccatatgctttcctggaccagtagctagaataaactcattgtttataataacctcttcaactagctaacagaggaatgtgcgttaacaacaaacaaaccagaagcatgaaaggagctgacaaaaatgagcaacagcaaaatcaaatgaccacccaaagccatctttagcaaagaggaagagcactggttccccaggctgcttttgcgaagcttgcttcaagggctttttatgtatttatttttatttattatcatttttgagatggagtctctctctgtcacctaggctggagtgtagtggtgtgatctcagctcactgcgacctccgcctcc

SEQ ID NO: 67231 - DNA, 1051 bp, Homo sapiens
gcttcaattcccctgttagttgttagcaccgctgagcgtgtgaccttgtttttaatagcatggttattttcctttgttactttcatactctatttctttccatatttaactttgctcttctatgatctgttctaaattatggttgcattgtgtattgtgtattgctccttaattataaatcctggtgtcacactttctcctgtttttcccccatttgctttctgattatctaatttctcctctttgactggatttatgctcattgaatgaaccatttattttctactatctctttatgtatcaaagaagtaagattcttcagaaaatgtgatcaaaactttaggaataattttattaagtaagaatagttaacacctgcagtgtttacatggtgctagactctttaataactcatttaatccaaacagtcaggctttgcaatcatcttctccattgggaaactgaggcccagaaagttatataacttaacaaatttggccttgctatttcccaagatgtgcttccccaatgatgtgtattattttatgacataaataagttgattttcaaacatggtatttcttctttgtttgcatacattaggctatttacatgatgttctgttagttttttctacaaattgattaagaatactgttatgtttgtttttattttcccctaagtatgggttaatacctgattaacaaaatgaaagaaaatgtgattgtttactaattctgcaaactcattatttgttcagaagattgtaataaactctacccttgtataatgtcgagaataatcattacattttttagtcatctgaaaaagttctttaggattattatttcatccatatttaagttttcaggaggattttttaatgaaatataagttgtaaatgtgttaaggattgtcttacagaaaaaaatggaggttataatccacaggaggacacacctgtgcacaaatgctttcacacactatgcacatgtactagaagcatggttgaactattacagctacaaaggcagttgaccatttcactcca

SEQ ID NO: 67232 - DNA, 1023 bp, Homo sapiens
gatgaaaatgttctaaaattagtggcgctggttgcccaactctgtgaatatattaaaagccactaatctttaaaaggctgaatcatttgagagatgtgtattctatttcagtaaagctgttataaaatgatgagtttgaaaaatagaaaaattatgttaatatcgttttgtcatcaccaaaaactaattagttttttgtataaccagttacacaatttgtgacatatattttaaaataattcatttatttactttttatttgactaattggtatagtagtcaactaccaaacaaatattatctgaaaaaaaacaagtcctgtcttatggatgaaatattaagtttattattcagcatattgtgatttcagtaatttctaaatattaccaggtctcatttatgtgatgagtacgttgtggtggcaaagtactcaaatgtgaaagaaaatatttggttagagatccgaattctttttttctataacaacaaacatcttaactcagtaaacttctgagttcgtggcattatggttcaaaatatagccaacacagtttgtggtttgtatacattttcctttctggggagtctaacagttgatgacataaaatgggcagtttcgtgagacatcctacatagggtggctcttgtatttgctgaagaagaagataaaaaacagttgagttgtctcccatcttgattttcctttattgtgacagctgaagataaaaagtccattatataccaaatattatcatctggtatatctgcttccactaagacaaaacaaagatcaggtggcctataagatttcttcagccaaaacacaaacggacattgtggtttcagataaactgaaccgtggctcttggaatgggaagaatgctctctaggcccactaagggggttattataggagcagcagcagttgtttgtggcaggagaaattattcagaagattgctatttctgcaattctgggatgctccagctgcataggttggaactgataataccaagtcagtag

SEQ ID NO: 67233 - DNA, 1036 bp, Homo sapiens
actgatctttctctactcatgccataggagcccaaaaatgtcaaatgaatacactggcaccaagattcctaggagagaggcaggaatgtggatttcaagatttcttatgagactgcgcagcattgtgaacatcctgaataaagaagatatgtgttcagtgacaagggtgaacagcctcaattcatcctgcccttgaggttcttttcagcccattgctagttaagtaaataggccagcaatttagcataatgctctggtagcttcaggttttgctgtgttagacactcatttcatgtaggacacacaggcttgccctttttaatgttattatcacgttttttaacagcactaacagcacttatggccctctggatgtacacgtgggtgtctaagggccccctttttggtgataccattaattcaaataagaagatggccacatagaagacaggctttgcccactacatcttccaaatgtcagtgtcttgtgtttgacagtagagatccttataaatttgaagcctcgttcagtattcacattggcgagcaggctctagctattgttggcagagtgtctgcaaacaatatttttaggagcattggaattaacttttttaaaaattaatttctggttttagaagcttgtcatggttttcctttgcttgacagatatttattgtgcatcttctatgtgcctagcactgtgcaagacactggggcacaacactgaacaaaacagagaaaatccctgccttcattaagcttattaaatacattcaatgagtcaattaaacagtatgccacaaagtgatgtatattaatagggaaacaaatcaaacaactagggcaactaggattgggagtgccaaggaacagtggtgttggcaaattaggtgagtttgaaaagaaatttggatacaaataataggctgaattctgcccaatgactgggctgtagatacctttgtgacatcatttgtaccattgtcttgttattttatttgatctttcatgctatgtcctgcttctgttagta

SEQ ID NO: 67234 - DNA, 2282 bp, Homo sapiens
agaaaaaagtaacaaccattctctgatgtttttttaaatgtcatctgtaaaaaagcatcaagaatgtgcttcttaagtggtaatattagcagatttgagagtatgtcctagactggggacttgacacagaaaacagacttgggcaacagggtctgcagagattgagcatgggaagtgcgatgtgttgagcccttgtgaggctccagagcaagataaagatgcgcccactgttcagcttcttaaaatacgccagctgggtggtgtattccctgggtaggcagggaatttgctccttagataggccccctgattcaggatgtttagtgttagtggcagtttaagccttcgagagctgtttgggagctattttgcttaccagtgcttttgtgtacattcctctgtgttctgcgtgggaaatcaaggacgtgctggactatgcaactgccagagccacctgcaatgccatggaggcaaggtgatttaacacccagagttccacttaccgattagactgtttgctgagaaagcgagggccagctatttcttgaagatcagtaatggggagattggataacaggttttctggcatgttatatgggtctagggagtacctctttttgtatgtgccccaaaattagtatcattgataaaatgcaaggaatctcccttgtggtttcatttacttttacattaatttgcaggcacaggtggacactggacacttaacttgctcaggatttttattttagtgcactttaaattgaaattaaaaagtaatactgggcgtggtgacatgtgcctgcagtcccagctacttgggaggctgaggagacaggttcgcctgagcccaggagttcaaggccagcctgggcaacaaaacgagatcctgtctgtaatttttaaaaagtaatacatagcatgagtggcaagaatgggactgctgagaaaggagacagtttgagacatggtagtcttcggaagtccatcactgcaaaacatgcaagtagaaagaaatacacagctgccttgggttttggctagagatgttattcatattgggaattataaatgagttatgggaggggaaaaggaacaggtgtgttgggctgtggggtgggcgagaggcagtgaagggaccctggctgggtccacactctccagagggctctccttcgcatggtgcaggagcaaggccccccagtgagacagggctgggaactaaggagaacttaagcagactgggaaacagaatagttcctgtggggtctgggtcaggaagacgaggaggcatgcgtgaagcgtgtctgagcaccatccatgcttctcaaagttggtggtgtttgaatcagtaataaggcagcttcacaaagatttgtcttctctccgtctcagtgatctgtgacccaggcagaggaatggatagagtggatggtgggaatggtctgaggccaggaattggcttgaggggtttaggaaaatgctagcagtgcaggaggctgggctgtggagagggtggcttccaattccttaatcctgagccttggaatggaaagggaaggccggcaatagacaacagagggataaatggtcccagtgcaagaggaggagctgaatggagtggaatggcgctgtgggcgtggtcagactggggacatggagagaggatgtgtccaggggaaggccaaggctgacactgaccaaacagagggcagctcttgcctcttctgaggaaggtgggaacgtggacagtatgcttagagagagtcacgtttcaattaaatccaagaagggaaggaaagattgaaaaataggtatgggatacagagtagcttaaagtagtcctaaagcagggcatagcaggtagaggttgtagaagggaataaatctttcctttaaaaggaggtgggagcaggcagtggccatggtttctttccccttcaagaccagcaaataaaagaacatgagtaaaatatagaaatcgcttaaataacatgaatattttatgttctccatgttatctggaaacccagctgtttgctgaccattaaaagaagacagttatagacctggtagtaagttatttaaaaggagaactcagaaaatgtatttgttgaaagatgtttcttgacttgaattctccattatgcttttggcctttgcagaaagaaggaaatcacattatgtacaaacgttgttaattactcattaatctgacattttgatggcattaagcaacaaatattaatttgcgactcaacattgtgattgtatctaaaatgtaa

SEQ ID NO: 67235 - DNA, 2871 bp, Homo sapiens
gggtgcctccccagtaacaggcttagtactaggctctttacaaatgttatttcatttgtttctcatggggagcctatgagatgggaatttgattcctgtgttgggaggaaaaagttaggaaactgagacacggaagggtaaatttgggggcagctgtaagtgtcacatgagcaggctttttgacattagagtctgtcattaggaaatgtactagggcatgtccaccacataaatccctagagtgaacgacaagatggtttcaaaggatgcagaaacataagttttaaatcactgtgttctctgagtatgtaacactttacccccttttgaaaattgggacatctgcatgtctgtaatatgctagcctccctcttctctttgccacactgcctaggggacaggtaccagtgtgtttttggttcatatgcatgctcctttaacaacccaggtagaggttgccaggacctggacacaggaacatgtgcaaagtagctgggtgccctcttactctatcctcacctacctttgactgcagtccccctttgctgtgtttatctgtgctggttggagaatcatttgaggaaacagagctgttttctctgccatctgctgctgtcttgccaccttccggaaacagtggctttctgttctctggcgggtgtgtataaaccaagcaatttagagttaggatactaacgtatcatttcaaatgatacgttagttattttcagtttttactgtaaattttcaaacgaattttaaaaatcgaaaaaatagtacagtggatacctatttaccaaccaggtagattcaaattaatgttttccatatttgctctttctatacttctttttctgaaaatttaaagggatgcagacatcatgacacctaactcctgaataatgactgtgtctcagagttgtatctgctaaaaataaggatataatctctaaaataaggtcattcgcctacataactgcaatgccattttcatacataagaaaattaacacgaattctctagtatcgtgtaatacccagtgcaattatccctccgaaatgtattatgtatttttttccccaaactaggattcaattaggtttcatacattgcatttggcttttatatctccaatagttttagaatttaggcttttgttgtgacagaggtgagaataaaagatctggatgattttcaaaaaaatatttaaatcccatctcacatgaaggatgacttttcagattaaatagactattgatctagattattccggtggttttttacttggtagtaaatggcgccggatatgttaaagttgtaaaatatagaaatctctaaagtgtgtacatgaaccacatcttaacagaggcagtccatcaactgtaaatgtacatgggacctgagtactttgatgctgttgtatgtgtgagaccatctcataagcaaataatgcatcaagggttttggctcagcactggtaatggattataatagattgaaattaaatatgatataagtgacaggaaaattctgccaggtaagtaaataattgattaatcatcccccagttaaacctggcaagttaaattgcagggctggaatcgaatgcttggtagaagctcctctccacattttagtcctgataaaaactgtgctgaagaagaaaagaaaaaccagaaactgttcagaggaagggcctgtcccttgctgtgtcttatttgcggcatggcattgtgtgtattcgttgcgctgtggaagtagtgataagaaaatgaagatccaggaaagagctgtcacagaaaacataaacaagtagagatccatggttgcttggaaatcaacaaatttagaaggcaagtgacagcatatctttccttttttcattttgttttgattgtgataagtgggatcaatatgacttagcatagcaaaactggtcccagtgtgtgcgtgttactgtgtagctgccactggacggtcaaatgaccttggctcagtcactagcctgccagtagtctgggtgtctggtttctaatctgtaaataatagacttggatgggagatctctgaggtgccttccagctcttcagatctaagattctaacagccagaaacctctgtaacatagtgctctcctgatttcctcgtgtgattataactggtctttgtcatgatgaccctcggccgttacagtcttccatgtgtctcctgagtcatcaaagaaaaattaaggtgtgcacttagtttatatgaagcatatgattttgttctacttcttaaagattagcagtattcccctaacactttattaacgagaatgctttatgaatcagaatagtccattctgtgaccatgtagaataagagaaattttattgtaattagaaaaagatgtatatattttaaaaaatggaataaccactaatacattaaagttactgcttaaaagcccttaatttacagtaatgcagcaacctaagtgaaaaagagctgaccctactcattacccaaggcaatgttatgttggattttaattataaagatcggttcagcatttgtattttctgggtcagcagaatatgtcctgtatagcctttaacaaactttttagacttttaaagctatgatttctgcactgtaaaatgggaaaaatacagtacatgtgtcaaagagtagtaaaaggatgaaacgaaatcacaaatcgtgtatgtaaagagcctggggcataataggtgttgagaaatgttaatgatcatagccattgtggtatcactgagtccttggcaatttcattcagggtggagagtcctccaaccaatctgcatgaccaggaatcaagactcattatgttatgtcagtcatcttaattggc

SEQ ID NO: 67236 - DNA, 1050 bp, Homo sapiens
ttcactttccttaatggaatctgaggagaagcccgacctagggacctagggacgacagagccctggtcatctggactggggcagttcggacgtgcaggtgtggctcccagcagccgcttccatctctgctttcccgtcccaggattaggatgctcatgtcgccatgataacaggccgctgccctactcccagctggccagatcagtcacctgggccagttctggctgggtcattttttgtttgtttgcggagctttttttttttttccttttttttctttttttctttttaagttaactagatcaaactccatatctcatttggatttttctgtcctcttaatttctgtatattttttgggtctgattgtaaattagtaattctcttagtgaggcagaatgaagcgcagaacaccaaacaagattctgcttgaattccagccccaaggtgaggaagtgggcattcatccaagtgaaaatttttgttaacgttaggtaaggattcaaaggctctgacccaaagctttagtacgtctccttatcttagattgaattgatgcataactgtatgaatgtttttgtcaggcatcaccataggtactttcaaacctgctcactcaattcctgcagtagttttgggtggagggaattattctcccctttgtttacagtgaagactcttccaagtctcaggaaagctgcttggctccaaggcaagggctcctcccctctgctgcgctgcttctctgcacagccatatgaatggggctcttcactcttctcagagaggtcagtgggcagcaagataaggcagaagccaatgagtgactgtctcacctcctcactctcctccttgggctgagagctccagcatctcagctactctctaaaaggatcttgcagtaaccaaagtggaacatcactttctggtcttccaagaccagaccaactagtcggggacttccaaagggaacaaattgcctatacttccttcagaccaagcatcctgaaagtcgtttgaagttgcctggactactttgggtgggagcca

SEQ ID NO: 67237 - DNA, 1169 bp, Homo sapiens
gaaggacaaaagatgactaaaatgttgagacttactaagaggaagacattaacagaaagagagaacatgagaggacagaggcttgggtgtgaggatcaagggagatattgggttctgtgtggggcatgttgagtttcaggtagtagcagcccattgagataagatgtacaaaacatagatgaaaattgaaatggtgacccaaagacagcaaggtgagtactagaaatatatattgggggttaatgaccctaagttagttgtgcgaatgacacactagagcagaggaagataatgccaattgagaactagtaggaagagatgataggagagccaagtagagaaccccagagacagctatattaaaggggtggcatgagaaaggctctcagaaatacagatttgtcatgacgtgggcaagaagcaagtagagatagtgaaaagaaaagagaaagcaataatcttgaggtctagggaagacttagtagaaagacgagaatttttatggctcaggggaaggagaaaataagggagagaatacaagcaaagagctacttgttggattaagctgtaatcaaggaagaccacagctgtgtaccctattcctctgaggtggtagagaaggaggaacatatgggcaaagagggaaatgttgagatggagaaacatggcaggctggtggtcttcaacattcttgttaaaggagaaggtaggcatctccacatggaaggcttggagtagatgctttagggaatggaaaaggtactcgttagacctgtaggtgatggcctgggaagaaattgggtgattggatgtcctgggttgcccaggacagtcatggtttacacatgttgttccagcataattattttaattgtacctcttgtcactcagtttggaatatatattgcaaggtcaccctagagagaagcaatgaagacttaaagacaaaaggtgtttccctgagacacacacacacacacacacacacacacagagtaagaaccctggcatgttctgcttaaaaagctgaggcacacagcatgtcgtttgcactgttgggtccaacagagaaatgaatggctcaaaagtctagagagagcacctaggacatttgaaatttagttcattagaacttcactgttgagcagatgcacacatccaagttgaaa

SEQ ID NO: 67238 - DNA, 1006 bp, Homo sapiens
tcagcatctcctttgatgcaagatgagggtttttagatacagtgtagacctttatagagtagtgatttaatctttctaaattacatactgatgcctgtgagatttccacaagattaatcatctaatatcatcgatagcttgttgcagcttatttgtaaaaggtaacaagataatttaaaaaaaacttacattcatctgttttctcaaatttgatagtcataaatatcgtagttgataattaggagttacattctgtgtttcatatatttaaattgtatatatttcttaagtgagatgtttatgtattctaataattcacttttttgtgtgtaagcacctgttggaaataaaataatactagataattaggcaatatccagaattgcagaaatgtttacagtggcaagtaagtctccattttcagttcacctgtctccctcagaactgccactctgagaatccactgcatagctgggtgaaacttactagatattgtgaagaaaatgaagtctgtggtgtagcccttacagctgagaattaaactatcctttcagactttttctgcatatataaacatgtattagagaattatttctattacatgcattttatttttttttccttttatcgttttctttatagtcaaagcaaaaggggtggttcatctacagtgattctttttttgttttttttattatactttaagttttagggtacatgtgcacaacgtgcaggttagttacatatgtatacgtgtgccatgttggtgtgctgcacctattaactcgtcatttaacattaggtatatctcctaatgctatccctcccccctccccccaccccacaacaggccctggtgtgtgatgttattacacacaccccaaaagtgagaatgtagttgtagcttttagcaatgtgatttgtaacatatcattactcagtgttcattactatatgtattcattactcagtgttcattactgtatgtagctccttccttcccact

SEQ ID NO: 67239 - DNA, 1037 bp, Homo sapiens
ttgtccgacagcttggttttctcttctctccccaaaaagttgatccacatctttacatacctgttctataacttctttggaaactgtatgtatgttagggtgtgactggattctgaagccagaatttcacagtacacatttttccacatctgaaaggaattggaattgaattccgaatagcatttagaattgaatcggacaagtaaggcctcttccgggttaggctggataatcgagttaattcaaatccatttgaaggatgttccttgaaaaatgttgccttgtggaaaggtgctatatacacagtgaatgcgttatctgtctgtattctgagaactaaaatcttgtggtctcggtcctatttgtatttggtgtcttgtttttgtttgtttgttttgtttttgtttttttgcccaattcacttttactgcttttgtgaacacggctttggaattccagctcacatctgttattccaagggagatgctagatggtcgatgtctggtcgtggcagcctccctgctagcttgcacggtcgtgactagctcagttctgaagttcaacacatttccacctaatgtgccttatgacaaaagaagggcagcgtgtgtcctcccagattggtttacaccctgcatcacttaggcatgtgtaattgtagttcgttgcagtgttgatatccattacctagtaattaatgtactatcttccacttctgtttgagatgtgttattaacttctcagatctgtcctgctgctcctggtttaatctgtacacagtaggaagaaattctgtttcttaccaaaaattgcagagcaatttgatccagtttcttttgttgaaacgctgagctaattatatttaaccacggatgatagtaaagttgcactaacagcattttttaatcaatgggaaatgtttagcttgtgtggggttggggagctgggaatccagatgtgggggaggccaggcaaccaattctatagaaaaacgttaactgtgtgattaagcataagctttctaatggagttattac

SEQ ID NO: 67240 - DNA, 1028 bp, Homo sapiens
gctgcttgtttaggtttcatttttatgtctccctggcctagttggttattaaacagtgggcctaaaaaaactaagggcaaaaaggtgtttctctttcatactacatggaatagacattgggagtcatgaattagaattctctttggtggaaaatgaaaaatcattaaggttgtcttccaataccgctaaaagctaattgcattaaaataattatttatgctgtaagtaagggccaggtaatctgagccgatgttggtgttgcattgtatttgtgtttagaaatcttcagtagtataattaaaagtaaaatacagtgacttgatctttaggggtcttgctttctgtgggaagtgcagggttcaagagggagcaggagacagacagagaaagtggattaatgagtgctggtttcctctgtgtgccagaggctgtgaccttatttattcatgttatctcatgtaatcgccactacaaaactctcaggtggatgttattatcttcattttgcaaagatggaaacaggtgttcagagacattaaacaatttgtgccaaagcatacagctcttaagtaagtggcagagccagaatttgaacccagatctctctgatctattcccccatattgtttcccaaaggatagtttggggaggcatgtggcttgaaatgctcatgagaagggataactttcctgggcatggtggctcacacctgtaatcccagcactttgggaggccgacgcgggtagatcaccagagatcaagagttcgagacaagtctggccaagatggcgaaaccccgtttctactaaaaatacaaaaaattagccaggcttggtggcacatgcctgtaatcccagctactcaggaggctgaggcaggcagaattgcttgaacctgggaggcggaggttgtggtgagccgagatcatgccactgcactgcagcctaggcgacagagtgagactttgtctcaataaataaataaataaataaataaataaataaataaagagaagagataacttattg

SEQ ID NO: 67241 - DNA, 1104 bp, Homo sapiens
ctagaagagaagcctgggacagttacctggacagtaccatagtaccttctgagggagcataaccctggggacactttgatcttggatttctaaccttcagagctctgagacaaggaatttctctttaccctgctcagtttagaccagtttgtttcagccagccctagaaaactaacatagtacatctcatctcttattcccattaggtccttagttttgtcccgtcagcccaggctgggtggtggtacttcttccaagctgtctgttcacatacttttagcaggttccaggagctgccatcaaaaccattttgtctcgtgtattgcatgaagctcatcccctctacattccaaatagccgtcctcacctgtattcccagcagtccccctcccctccaactgatcctcattgtgttctggaattattattttctgtgccacagtggattccgtaagtactccttggctggatgtcaggatattatagcttgaggattgatcttggtatgttcttttgtctgggtcttttattttgccttatattgttcattcacagattttagaagattgcacattttgtttaattatgttggagacagactggcattttagctgttacagtctgtgggagaggggttgatagcaaaaattatgtggagtttaaattgtgttcggtaaaggaagtagaaatgaataaagctgttttaccatgaaaagtcggtattttgccttggatcttagaatgggtctttttttattttttttccttcttagctggaaatgttctaagtgctgcattgtctatttcgtttgccttttacaagtctgactgttataaaaaggaaatttgtatctgtatttgcaaatttgagcctggcagctgtgttttgaaggcttaatctgggatcgaactgagatgcaaatgatgtcgaatagtttttcccatgatgttgtcaagttttacttttcaaaaatactgctcgtggcagctccagcctccacacagggtctactgagttttagatttttaagtaataggcaattttatactgatgttccctcagaaaagcaatggcttctcgttgtaccctccctacacaatgcc

SEQ ID NO: 67242 - DNA, 1050 bp, Homo sapiens
aggagacccattatccaaggcttcaaaaacaagctgatcagtagactcagaccagttaggctctggcgcccgaatcctaaatacactaattcccttggttacccgttgtgtgaggcatgtgtgttcctagcttagtgcccagcacacagtatgttctcaacaagtatctcttctcttccatcattagggataggaccatgataacaactagtacaagtggttgttgagttctttccaaatattgtaagaggtgttaagtatataatagttaaatgcagaggccaaagaagggctgcatgtcattccagcagccatactcacccctccctgatgttcaagccttgactgatctgttgttcagtaactcttactgatcagccactgtcagtctggaggggacttattagtcttttcgacttcagtagcttaaaaataatctcttcctctttagtggcaggagatgccaaagataaagacatctcctggttctcccccaatggagaaaagctcaccccaaaccagcagcggatctcagtggtgtggaatgatgattcctcctccaccctcaccatctataacgccaacatcgacgacgccggcatttacaagtgtgtggttacaggcgaggatggcagtgagtcagaggccaccgtcaacgtgaagatctttcgtaagagcctccttcttcttctgcattctctggcctctccttgccaaggagacatgtgggtagtggaaaggtggaaatgatgacagaaggaccagctgagggcctaaccagtcccattctctctccctaagtcttttctgaccttggccaacccagaactcacaaccctggttcacactggtcacagctactcccccacaggcgttcattctcaaaattcaaattacatagttcccagagggctattacgggtttctctatcccttccccaaatgttggctgactgttctgcaatttgggctcctctcccttcttatttccctctcccctgctggtaatggagcccagggctcagtggggtgggggatcattatctgaac

SEQ ID NO: 67243 - DNA, 1043 bp, Homo sapiens
ccagagcccaccatgagctggacaaagtaagaaactggctcataccttttatcatggactagaggagaatggggcatcacaaagtctgctccatgttagtgtctgcgtggaatggatgtgggcttcttaggaatattaaccccaggagaagaatggactcttttctataagattctcttgcttgtgcattgattattccttcaatttcagccttgtgggggcagagtcagagccagagggtgtggtcttgggagcccactttgaaacatttgtgggtacagttgcagcccttggatagtcagaggatggaatagaggaataagaggtgtatgtggacgttcaacttggtgccttaactttttgtgaagactgaggagtctttcccattgactcagtctgcattctatggaacctaattaaaaataaacgtcttatttctgtggtcgaaatcatgctactttgcatttctacatgctctagggatggggaacagatagagcaagaggaagacgatgagaagtacatcttcagcgacgatagttcccagctgaccatcaaaaaggtggataagaacgacgaggctgagtacatctgcattgctgagaacaaggctggcgagcaggatgcgaccatccacctcaaagtctttggtaggggcagtgggggcccaggtcactgctctgccacaattccccttcctctgcacattcagtccatcagtaagaccctggccactgtccctcagaacataacccaatgcaaccatttcttgccagttccaccacctagtccaagccctagtccaagccaccatcatcctcacctgagcagtgggacggtctcatagctggcctccccgactctccctattggtccacttcattcacttctgctcacagtagtcagaatgacctaagtaccactcatctgtttgaaagcctccagtggctccctatggcaaccagaataaaattcagactccctgcaatggcctacaagaccagagatgaactagctcctgccttcttctccagcctcatctt

SEQ ID NO: 67244 - DNA, 1112 bp, Homo sapiens
gtctccagacctcaaaacaactgttgagtttagcgaattcagttgtatggccacattttttttaaattttttattctgtgacttttacaatatagagattcagctcttactttacctttcttttattttattaacctttttgtttttcatgtttattttacctttattttactttgccctctaaaacttccctttcaatggcacttggcacatattccttccaatacgagttgtaatattctcaaaaatcgtacttattaaggaaaacacaatagggaaacctatgaggtttaacctcattcatgtggactccatcaactgaaatctatgaacatttggccagattggattgagatgtgcctatgtgctatccatcaaaaaaggatttgctaaacaggctgtcagtatgcattacctttaggcaaatatttgaactatatggatgattttatgtagaagcaggcatttgtaacaaaagtatatagttctattattgttttctgtttattaaaacagcatcaaagacctcaacatggagaagatatataggcagttgtttatttgcctacttagggttactgtatgaatttgaatataaagcacatgtagtctttcaaaaactagctatcattctcttggggttttttggttcatttgtttgtttccctagcctgaccttttcctatattcatgaaataagtcacatttgtgcagtgttatcttttctcttccacacaaagttcagcaatttcagagcataattgttttaaattgggaaaattcaattttctctaatgttttaacatttaacttagctttggaatgcttgtgttttcttgcattacccaaaacatttggaaaatgaactcatctcaactcatctccttcccatcctgagcccaccccagagcccccatccagttccttgcctgatttcttcatttgagttaatgctaacacccttctcccagtcgttgagactccaagtcacctggactccttcttattgcttcttttggttcttctcacccctccttgccctctgttcagttgccacttattgaaccttcctccagcatctgtctcaaagcttctctttgctgtttcccctc

SEQ ID NO: 67245 - DNA, 1099 bp, Homo sapiens
tcaccttcctgtgcctcatgccacactgttctcttcccagccatctcttcatatgtttttgcttctttgcttttattcagtcagtttcctacacttcaaatgactccatctccaccctagagttccacctcctgaaaatctcatggtccagccccaaagccgtttcctctcgaaggctccatccagggagcgatcttccgccatgtcctgcctcctgcattccttgcccttatcacttttactctataggatatttctgattattatggtttccgtgttgtcacatgcctacatcattgtaagccttggagagtcaggtctgcatctcctaaaacacctagactagggtcttgtacttagcagacagctaacctttgttggataggtgcatgccatcatttaaacccagaaagctcaataattagataaactcagagaaatgttttgtcttttcagcaaaacccaaaatcacatatgtagagaaccagactgccatggaattagaggagcaggtcactcttacctgtgaagcctccggagaccccattccctccatcacctggaggacttctacccggaacatcagcagcgaagaaaaggtatcatgctccccaggagtttcagggccttggaatgcagactcaaagcagattgagtctgctcatgcccagttctctttggggagctgggagatgggttatggtcaccagaggccacagccagatcccggggcctccctccccaaccctgcaggacatggcctgctcatcatccccttgtaatggaataggcacaattccttggataggttggtgggggcgtgatgtatgggcatgctcaagttagatgttctggggaggaggcaatggtgattgtcaatcccagagttatggagctgtgagggaacaaagagaaggcaatatcctggtccaccaggtgacattgtcatcatatcaagggcaccctaggaaagatctcccagaaataaccaggctcaaaatgaacctattaattctttttcttgtgtttgtatactcatgctatatatgcacttatgcacaaatgcctggttgccattgtgtctgcctgtattcttggt

SEQ ID NO: 67246 - DNA, 1143 bp, Homo sapiens
gactgttaagtgcacagcctcactgagaggcttcccgcctgtggcacaggaatcacttagtgctgtcacaggttgggtgctttattgtccaaaagtcatggacccactgggattagggaagagagagaagggttaattatcagccactcttaagcagctacagatctcattctgcttggcctcatacaactttccttgtcattctcatttagagctggttgaggaggagctgagatttatcagggagcattaaggagatgttaagagaattattattgtaagtggaagtaataggtttactcccatgaaagcagacacctcactctgtttttcagaagtgtccttatcatgagtgtcttactttggacgtaattgactttcaagtgaatgctgcccctagggctcagaagttccattctctcctgtttgtctcatttggagatgaagaccataagtccagatgagtgcaaaagaaggctcaggttatggccagtttcattttgtaagttctaaaagcattagcacttttacctggaaggagggagacaaaaacattttgatgagaagaataattatcattaaccttcatatttttggggaaaaaaggagttttcttgccatcaatatcttttcatacttgcccagagctcatctcctccttctgctgcagcctgggtggtcagcatgactttttgtctggatggctggtaggtggcacaccctgaagttgtgcaggagccatagtaaaagcatttcaggggaagatagtctaatgacactggagtctatctgtgtatcctcaaagggagaactgggcatctggcagataattccatcatcaaatctgtagtgagcctactgcaaaataagaattctctttagaaggctggtctgtggacatcattaaacaggagaaatttccacatggagaaatttcctgaaagaaactagataggaattaaaaaaaaaaagtatggctgttcacgcaactgttttctaagcttcccttcaaccatttctagactattctgagtaaagacttggaatatcccctgctttgttgtcgttaaggtcctgttcttgcgtacattcatttctctgcctcttttgttacaacatctcttccttatggaaatgttctct

SEQ ID NO: 67247 - DNA, 1050 bp, Homo sapiens
aaggatttctttaataatttcttatgttgggcacttggaatgtcctgccacaggtacatgcaccatggaactggcaagtgggcagacagaaaggacaggctggcagtgcaggtttcccaggatctcatgaggtagggctgctgctgctgctgctgcaatatctgctggccggaggctttgcttccattttagacatcccaaacaaagtcatcttgggggacctagccccaaaccaatcttggtacttagatcaggctgcctgacataactgagtctcattttctgtttcggatactcccaggttctcatgctgcttcccagtgcctcccccattagatggtacctaaagtaagaaagccattgacacagagaggagagaggaagtgagacgggtcacagacaagtgatggcctagtctcccagcccccatcctgccatagcactgttgcccttcaccctgccttgggctctgacatgctcccttcccccccacccccggcagactctggatgggcacatggtggtgcgtagccatgcccgtgtgtcgtcgctgaccctgaagagcatccagtacactgatgccggagagtacatctgcaccgccagcaacaccatcggccaggactcccagtccatgtaccttgaagtgcaatgtaaggaataaatggggaaggacctgggggagggaggggcaaggcagggtcaggatgagagaggaaaacatcagcaaggacctatgtgcaccctgtgtgttctgcttacgttccctgcagctgaccctgggctatttcagagctctgttcccaagccaccccctacacaccatctccaggcttcttacaagcctgctgtgcccttgagtcttcttcccatgctgtgcacaggaattctagaatggccctgacctctactataccaggcgctggctctgctttggagcacacctgccttcccagtgccaggagacaggatatgggggcttcataatcatggcagtcatcctgacagtcattgttatttattgcagatgccccaaagctacagggccct

SEQ ID NO: 67248 - DNA, 1021 bp, Homo sapiens
actgttgggatgcagatgcacagcaggatctcctaccactggagttgtgctctggttataccccaagccccaaggaagagaaggcacagagtcagcagaggccagtgtgctgcacaggcaggtgttgctgccggactcctgggctgccaggtgtcaggtgagaccagcgcatttggcactgactcatcgcttgaagttcgttgagatgtctcaataatggggttgctttcttggttctttaatagacctttccatgtttagggacatggatatatcagagcagggatgagcagggggagctagtaaaagccacaaacacttaatggactcttgttttcaagctgccagttagtaagcatggcttacctgtttggaggttcctttgtgtgtagttcatgaatgtgcatgaaggtaatgaggaagctgtgaccccagaccaacaaataaaactctaacctgtgagaatgtgcctatttcatgtattttttaagccaaatgtctgcatgccatcaagacactcaggaggaaagctcaaaacctctgtttgccttgagacgggctgcttgtgtcagactccttacaactagctaggaatcttcccctccatgactgagctacccaccttcataatttcattgcccaaacattacctcttaatttgcttctgtaccatgaagcaaaatagattatttctttttgaatatagagattatgaatgagtctctacttttttttttttttttttttttttgagacggagtctcgctctgtcgcccaggctggagtgcagtggcgggatctcggctcactgcaagctccgcctcccgggttcacgccatactcctgagtctctactttttaaaagaggcatcttgagatttttgttttcatatgttgtcccccaggtggcacattgcaagtataactatgcaaacaattcaagctaaacaaagaaaagagagggaaggagacctgaattaaccagaccatccaataatgatgagttatgattctttgttgc

SEQ ID NO: 67249 - DNA, 1059 bp, Homo sapiens
atcttggttccagattttgcctgaagaaggaattaggtgtctctcccctgacatgtctttaatttttaaacatcagacatttctgcccacagacaaaatgcttagttgtgacatccaaagggaagaaagtttgagtcattttattttgaaccacttgactactgacccaaattgtaggtcccagtggatactgagataaaggaaagatgctcacaattgggcagcagcctgagtttagcatgaacatatttctcactagtaagatgaaatgtggcacatgtgaattgcagtggaactaatagcagagtagctatcagcatgtgaatatccatcgatcatcaatccatcagtggggttgaaaatacatatctcccagttttgcttctgtgtgtgtgcgtgtgtgtgtgtgtgtgtgtgtgtgtgtgtgtggacccatttataattatgagggaataaaggtattctaaataaaaccaaaggagcaattgcttagttgtatataatccctgcaaggcccctttggtaggaaggtgcctgaatctgtgtaatgccagacaataagaaagaagcacacattctgtcagctcacggtggcaagggaagaggtagcctggttaaagcatttctctcaggttatttttaaccagcggtgttctttacacagaaaggtgtcttcatctcccttctttgcccttctccctcagcctcaattggcaatggccaaaactttccctggcctcttaaatttaaggtcagaaacccaaaataccttttaacaagtcgagatcactcagtcacaacataggaccaaaaggaatgcttaagaaaagtgttttttttttttcattgtaaatctcaaatttatgacttatcagtgcaaccacgattctaaagatataactttaaccacaacaggttgggtgccgtggctcaagcctataatcccagcactttgggaggctgaggtggaaggatcacttgagcccagcggggccaacagggcgaaacccccatctctacaaaaaatagaaaaattagctgggtatagtagcagacgcc

SEQ ID NO: 67250 - DNA, 1006 bp, Homo sapiens
ggctgaggcagaaagattgcttgagcccgggaggtcaaggctggagtgagctatcttcatgccactgcactgcagcctgggtgatgaaacgagaccgtttcaaaacaaaaaactttaaccacaaatggcccaaacatttgcttaatgtcaaactctcagcacgttgggccaaaggtacagtttctgctgtttagtgtcaacacagccattgtctcaaccatcagaaggaaacccattccctagtctgcactggcctcttcctttatatgggtcttgacttcagggaggctcaccgaggtctcaggaataacatgggtttgtggagaaagaagtgagataagatcctcaaagccaccatctctggcatgcatccacccagcctcattcagcccatactcccctcctccttatgccataggaaacatgaaatgactcttcttaatttaatacaatcttttgttcttctagggcacacagtcttcaccttaagactctcgggacttttccttgatgacccatattctgtttcattgcccttgtttcccaaggatgctgagacatttctggaatctgtggataataacttgcttttttcttttcctttaacagtctcctggattgactttgacatctgggtcctgacagcaacacctccccatttcaaaacaagtttacatgctcctgatgtggtattaatatgtagtgttgcagccgtagctaatgcttattggtgttgttaaccaaatgctctttatgatttattattcttctatttctgggcagtttcactgccctcccaatgtttcctatatatgctgctaatttaatttgatttctccttttatttagtctgtgattttgttgttgatttttctccctgcccattgtttacatcagtttttaatttttttgtattttccatgtgacctcctccactttcctttcaaccaatatcatgtgcgtgcgtatcatgtgactttgtcatgtggcttgcatggtgctgatg

SEQ ID NO: 67251 - DNA, 1057 bp, Homo sapiens
aacaagcttggtcatttctgtgcaatgctataattcggaacgaaacaaagcacaatgttaataaggtagacactaattcattcctctgaagagagatctcttccagacattttaagccagggcaagaaatgtttaaagatgttttctgcagttgccgtagaaacactccttagcagtcatcttggctgttggtaaaaaatgtggccggtaccaaaaaaaaaaaaaaaaaatcgctgacagccttagagaattacaaagctatgattacgccctcctggaaccatgtcctcatccatgacagaccctctcctgccatctgcaagggggcaagctgaagacttattcaggtgagccccgcacgcagcaggaattgtcctttaacaataaaatttaagagaatgaagaggtcagggccaataaaatccatggaggagagcaacaaagcttagttaaggacagttatcacctcctctccctgggtattagcaaagatttaagctgaattgggcctcaatgagaaaagtgagagtaagctggggggtgaggggggagctttctgctgtcagtgggttgtacacccaacaactggtgacatctgatgttccctgtccaccttgtaccccctcaaaaaaagaaaactgcctgggatatgcataacctaagctggatgctccatctaccctgagttcagtgggacagcgtttacagaatccagcagcactgcgtgaagtgtggcgactcagaaggagaagggaggttataacagggattgagccctatcctttatggttacttggctcctgagcctacagggcttggcctgtagaggattgtgacagataagcttagacacctgtcccagaaaagaagaagtgaggatgcaaactttgattctaaggtcatggcatcatgtcactgcagggcttcctccaatgactccacggagccgtggctttgtccaccagctactgaggactctgtgtaaatgggactccccaccagcagcatgtgtgagatgagaagccccctgcacccctctgtccatgtgctgcatgtc

SEQ ID NO: 67252 - DNA, 1038 bp, Homo sapiens
tggtgaccctaagagaaggaagagatgatgcccatttacttacaaaccctatctaccaaaggcctctcaatggaaacagattaaattgaaccacttgtaatagaacaagtggagaaaatagatgctggaaagcaccatcaatgaaagcaatccggtctgctagagactgtgatggcagcagttctcctaggagatacagatctgtctccagggatccaagacctaaccttgctggtctcctttttggccaaatccctcagagaagaaggagctcttcaactgatcactctgcttttccagaccagccaaatgccaaccccaggcaggagaggtgggcatagaacatacagctgcagcctgttggggggccccatagaccctgccatgttcaagtgtggtgggaagacggccttgggcagcccccctcatgcctgccctgtcttcagtgcttgcccggctcttggctcggtggtcatgattcctcctcccaggaggagacaggccagagggctgtggcctgcctatgatgcagggatgtatgtgcaaaaatgggctaggagagcagcaacaaaacgggatcagtgtgtggttcccagtggttgtttgtacatggatgtgtgtgtctgggagacgtgtgctggacctccagtgagttggcaggtgagttttacactgtaggtcagaagcatcaattggtccaccctgcattgacaggaaggctccccagtgcttgctggggtgggtgtttctccacagtcgctggtcagatggtcggtgcagaaggcaaggcacgtgggcaaggctgcaggaaatgtcctcattataccttaacaggatgttcaaatggaggttctccttgcttttcctctgccccttctttctctccattctttggtccattcctttacaatcgacagcttggagtgaatgtccagatctgtctggccttcatgggacacttaggaggtgagatcaggtgaggcttgagtaagccctttgcagcaagacagattccttatggcaattgctccctggggt

SEQ ID NO: 67253 - DNA, 1115 bp, Homo sapiens
cctgcagcaaccttgggaggcaattctgcatcctacacctttgtctcattgcttttctctgcagtgactcttcttttgctctgttaggaacttgaacacaaaaattaaatttgcttaaaagcccagttcctatgaaaaagatcagtgccccctttggaagaacctggcaggaccaccatggccacagctgctgagcaaccattctgtgtggaagagaaggttttgtgattggaaaaagctttacctccagacatgtcaccactcacagatacttttgtgccacttcataaggagtttgccccctttttaatggcagtaaaaagaatttgagagctctttctttaaatgctatttttaaaaaccatcatgctagatttacagagaagtttctgcatatctgctacttgttgcattttgggttcaaacctaaatatgatgtagcagaggaagaattctaagtaccttctaaagcttgtgtcagattgttaaaatcaccacacattcccctcattctaactctgtgctccttgtcctcccttcaataataattggctttgcttgcaattaagcatttaagtgcccatgttaaaagagccagaccgcactgattcacatgagcgttttgctgacatgatgggcaactgaagtcacccctgttgcccatgcactggaaaaaaagttgaatttgttggatattttctggggctgatgaacgttctgggatgtgctttcagtcctcgtattacggccagcaccttacactgtctctgtgaacggggccaagccatgatgtgccaacaagtgtcagctttgaaaggtgtttgtctcccaatcggggtgactcccctgctgcctggcagcatgtcgcagatcagcacagagtggggccgtggttcagcagtgacccacagaatggctttgagcatcagtctacaggacaggttggaagcatccactgtgaaccaggcattagtcccctacctggcctgtgtgtgctcagtagagaaggagagggacaggccactcccagactgcccagcccaggagggttaataaattggggccgagccaacctgtcagtgcttcctgaatgccccagcctctgtattggtgcg

SEQ ID NO: 67254 - DNA, 1037 bp, Homo sapiens
cctatccctgagcacttgaggagccacagccccgcctgaaatcagtgatcactgcctgcctgtgctgcaaagccttttgccctggtccaggggaaacacagcagcgccctccaactgcctcattatccggtgttctcagacaggcggggctcagtctgctcccaggactcacgggaggccagctgaccaggctcacccctgttccccaatctgtgagatgatgttgtcatccctccctctggaaggtatagaaagaccctgttttctcaattctggggcatagaaggtccccaggaaggtgtcactctgggcatgaatgccatgactctgtcctctgggccctccccacccgcaggggcttttgctggcagggtctggaggtctcgcatctcagtctgttaaccaccagccatctctctcccactcaagccaacggcagccccacctcaggcctgagcaccggggccatcgtgggcatcctcatcgtcatcttcgtcctgctcctggtggttgtggacatcacctgctacttcctgaacaagtgtggcctgttcatgtgcattgcggtcaacctgtgtggaaaagccgggcccggggccaagggcaaggacatggaggagggcaaggccgccttctcgtgagtgcagacctgtccaccttgctgaggtttgggctctgctccagcccagggacccagcagctgcaccaccctgcgccatcagctggtgcctttcctttcattgcacgttctccatttggaaccctgatgggggaaaaacattagagaaaagtttctcaaagcatggtctttgggggttacctgtttgaaatgtagactcttgagcccaatcccagatctcttgtattagaatctccccagagtgtgaaaatccctgtgtaggtcaaaatgagggaaattgtcagaactaaacctggggaggagctgccatggggtagggcagcattagagggacacacttaccttgctttcgtacattgtttattcattcattcatccatcactcaacaaatattta

SEQ ID NO: 67255 - DNA, 2651 bp, Homo sapiens
gcccctgaaatcagtgctgggagcccagcccagcccagcaggctgcatttacatccagctgagctgttgccactgcagctggtcagggtgaggaggagctgcctctgctgcccccttccaccaccccaggtaaaaacacagcctctggcatcaacttagggctggaagaggaaaggactcgttcttctgactcagtgcttctcaactatggctgcacattagagtcacttgggtgcttttaaaagtcactgtgtccggaccaattaaatcaggatttccgcgaacacagctcgggcttgggtgatttttagtgctcccaggtgatttgacgggcagaggttggagccgggtgctgtcactggagaacccctcctcctccctgctgtccccaaggcctggatgcaggggcgagatgtctgcagaccgtggtctcagtggttctgttttcctgattctctgcaggaagggccccgtagaagcaaagccagagtgccaggagacagaaacgaagccagcgccagccgaagtcaagacggtccccaatgacgccacacagacaaaggagaacgagagcaaagcatgatgggtgaagagaaccgagcaaagatcaaaataaaaagtgacacagcagcttcaccagagcatttccaacaccacagacacacacacgcacgcacacacacaaacacacatgcacacacacacatctcatttctctagtgtcttttgcctttaaaaaaaactaaacagataaaacatgggaatctcctttttgtaggtttatagaaagggtccctttgttgcacactcacttgtaagaaaatgagacaaaaaggttaaacccacagccaaactaggacactccgttccctgaaaccgttaaaaaatcaaacaaaaggaccccaaattaagaatctaggaagctcagaaacgaaatctaggttcaggaagaccacacttggtgttacccgattggcacagaccagtttcagagaaatactttcaggcactaagactaatcgaatgaacaaagtccacagtttatttttatactttcagtcaagtttgaactctgtaaaacctcataaataagttataatttctgttcactttgtatttgttcagtatgcaaagtgtgtcaccctttctagctgaattcaattcccacgtagactcttattttataggacgaatgccaaattgcagcttctgggggtagatctcaatttgcagtattcagacttctttttctttcttttacattcttttttctttctttctttctgccaactttgttttccagtgtttacaaggtgacaaatgtttgactttggttgtgtttaaatgtccgtgtaaaatagctgccttttattttttaaggtaacaaataccacctagaggtaggtaggatcatcccacgcttgctttagcacaggacaactttacaaaacatgattgtttacagctgctcttcccctcttttctgatctgcagtttttgcctgggtcccactcaggtgaaaatccatctcattctggaatggttttgcttttgaatttttggttatttttgtgtttctttgggggttagaccactttctgattagccgccacctgcctgcatctgtgaaaagggatctgctcccaggcgttctcacccttcttttgaaggactccttaggctttgttgaatgaagcagagaagattgtatagttggggctggtcttggtgaacacacattattaccccacacatcccctttgtgtagaaagccaaataaaatctatacataccatttccttttgagcccagaatctagatttgagcggaagagcatgtgtgcttcagggaattagtgtctttttttggaaatctgttgaagtaaagtaacatcggccttctgttcacttaggcagcatttatagaaacaaaagaagaaagaaacaacctactgtctggagtcataacacaactttcctggattggaaaccaagtgggggaaaaaatacagaaactttaagggggatgggaggggggggagaagggaaaagccagccctttgtatagaaattttgcttttttttccctcattctactttagaactgcaagcttgtgcactgtggatgcgtgaatattttagtgtgaaacgtgtttttgtcatagtattgaaataaaacttcaacatagtttggttgtggaaggtatagcagatagttcagaaaaaatattcaggaaacaaaaatcactcaaacggaatcgaagccttttaacaaagaaaatgaaatacagatgatgatgatgatgatgaagatgatgctaagtaaacagaaatcagtactccgcatgcgctcctctcctaaggtacaaagcagcaagaggttagggtggcaaggctgcctctgggtccattctgtgggccactctccccaacgttctgacacttctgcagtctgatcagtggcgatgctagattataatttcaaactgtgaagaataatggtcttgtcatttgctcaatgtggggttatgttgcattttctcagctcctggggatggaaatggaggatcccagaacacacagccctggcccctttgattctagggcctgcacagatctctggttcaaatgcacaggccctcagaatagagg

SEQ ID NO: 67256 - DNA, 1076 bp, Homo sapiens
tgttcttaactcttcctgcatgtaaaacattcctctccttactaagtgtgacctgcagaaaagtcaccacatttctcagagccccagtttcctctctataaaatgggagcatcaacacctacctctccttctgtggtttggatataatatacatgaagtacctagcataggtgactgacagatagaaagtatttacttaatggcgactctttttgagaacagaaatgaccatgagcccattatctgccccctcccaccctcacggatctgcttatcttccttggtcctccgtctcactgaaggcaagcatgtatttggctctgtttacctttccctctctcctgtgactggtggcaaacatgaagatcccccaagagccagctgccagccagaagcctgccttcttacatgaccccatggcagcagggcctgagagcactggtcttgggtgggatggggttcagagcaactcagggctcagggatagggtagcagcgctccttgtcagggcctggggccaggggtgcatgggcatcaacaggacccagtgtgaagtggaaggtgctaggatcaatgctctaaaatcctctttgcaaacagatactcctctgttacttgcagtttgtcctcagtttataatcaggaaaacctgttgattgcaatgactgtagctccaatcatatattcatcaggatgtcattagttcttttctcctaaagccccagagctgcatccccctaccctccctgatgccctagaaagaggagtgctagcccagcgggacatccagttgcccaccacctcctccagcagctcccggccctgtgggtggccacatgccagccaagcactgggcttctgtgacctgaagctgctggatgacttatttccttttaataagactcctaatttgatctcaatttcaaaaaggcaaaatgatgaaggagttctccctggagacattctgccctgtggtctgattttgccctggggctggatcaggctttcttggctgctctgaggctcagccctggcttaggtaggagggagccttagggtgctggcaaagcagggaa

SEQ ID NO: 67257 - DNA, 1041 bp, Homo sapiens
ggaggaagggcccattttcgcaggtgaagaaaatacccatttttgaaaattcatgtaatttcaggtagcattacttttctcagcaattgagagaatggggaactaagggtagaactgaaataaatgcatcacagggctattacacagaacagcagatttcttcatagaagctattcctgacaggtacagcaatttggaggtaggatctcttgtaactgaaaagcatgcttttcactccttcctcacagtaacacagaaaactgcattgcagctcttcttagcctatgcagatgcagtccctcgggactgtttcacctaatgaatagtttatactaggttggtgcaaaagtaattgcaatttttgccattaaaagtaatgtattatggcacatggagtaggcagaccctatcctcttccctggtcaaggcaattgatagctgatggttaagtgcatgttcattctggttagagatgaatcatctaattgagcatgtggaagttggcatggcaactgttacatgacccttgagggtacctgttctgatggggaacctgagaattccctgggatcttgagggtacctgtcccacctgggaatcaaactttctttttttaggaaaagagtgtagattatgggagaaggggaactgtaaggggcttgactcagtggatctatgggccaagtagaagaaacctccttcctaaagagcaacaagaactatataaatgactttgagagatgaaattcaagaaaggtttcccaaaggaaagtttttattaaaaaggcaagtgtgcaaacagtgtaaatccatgcaattatttgataatggttcctgtttctgtgtggatcccgacttggtgacctgttttatggtcagttttgcaaatgcatttctctctgaaatggagatcctccagatggcactcttacctcagcctgggagcctcacaaggcatctagacctgatctgtggaaatgcaagccagagaaacctgaccgttttaccctgagcttatattctgaccttggtcagctccgg

SEQ ID NO: 67258 - DNA, 1102 bp, Homo sapiens
tcctgagatgcgttgtatagtgtaaagtcatttaatttgcaagtaaactcaataatttgatttagtaaagtgaatgcagtcttgtgcaggttccatttttccaacacactgttgcagtttaaattttacatgtgattcttcaggaaaattgtctggacttggccagctgatgcctctaaatcatagattgactaaatccctatttgtaatcacatcccctgctttgcaacaagctgtgcgacattctattggagaaacaggctctttcatgcaggcaaactaaattactgacaatctgttgaaacatattttgtgtcattcttatatagaagtattgtcagagaactgatgtagtgtctagtaagttgttccaaattggttggaaaacatgttgtagctgacccacctggacagcatgcatcaaagatctgctgccctttccccacttctgagctggcccaattctattctattgtgtttcctctgtgcaaaaccaggacatatctactgaagatggtgataggttatattccttatgcaaaacagtgatggatgaaggaccccaagtatttgcacctttatctgaagaaagcaagaacaagaaatatcaagaagaggttccagtctatgtgccaaaatggatgccattcaaggaattgatgatgatgctacaagccagcttgcaagaaattggggatcggtatgtataacccttctatagaggcatataactctccatagctacaagagagtaatagtgcccttgatagcagggcttttccctgtttcctgatgttagtcatgcaagactttcatattgagtagcagtagctggggccttttcatgatctatcataatgcagatctcattaccactttcccatatttgatagcataaagacttctcatccatattattttggtcttgagtatgtggtttggcatgctgtacaagtgatctggcaactgtaagaattatagccttctgacatctggatggaaattgttgctcactttaaggagcagtggatgcttttttttttttgagacatggtcttactctgtcacccaggttggagtgcagtggctcaatcattcctca

SEQ ID NO: 67259 - DNA, 2620 bp, Homo sapiens
tcttgaactccttggctcaagtgatcctcctgccttggtctctcaaaatgatggtattacagttgtgagccactgcaccggccagactttgggcagtattttagaataacttatggagctttaaaaatatacatatttactctcttcctagggcatttgatttatgtctgatgtaaggcccaggtgtgtttttttctttttttttaagccccacaggtgattctgatgtgtagctggaaaagaggactatcttagttatcttagtttgttggcttctgacttgtatatcctagttttatattgagttagcaaactagaaactgttaattgaatgactgttagtgggtagatagcagaaatataagacaaaatttcttcccaagctgggtagataagactaatacgtgtagaagaattaaagtagtgattttcaatcctggatgaaaattaaaatcacctgggaagattttaaaacatataaatgctgtgatttcactcttagagcttgtgatttaatttgtttggggtaaagtctaaacatctgtggttttttaaaattcccaggtgactctaatctagtcagtttttgaaaactagtgaattagaaaataattgaacacttcattatatgactgaagtaggaatttggagaaaggtgaagtaaacctgtatttccatagatgtatccgtgtaaaatttcaaggacattattatgcatagctctgctaggttttcagtgcaaaaagttgactcaggcaaacatcttgattcccttaatctttctttattgttaatcaccaggatagttttataggataaaatcccattcaggcagaacagcctccctctgggagtgggagtgatgagattgtatcttgttatgtatagcatttagaaactagacagttattaaagcctagaaatacattagagaagttgtgactttcatcaaccccagcttcagtaacaggtggttgctttgtttttctacccctccttctggcctagggagaaccttcaaaaacttccccagttggctgctattcatcacaacaactgtatgtacattgctcaccacttgctgaccctcgggcatcagttcagattgcgtcttgcccccattctttgtgatggcactgctacttttgtggatcttgtacctggcttcaggagacttggtaactgatactttcaatgtaggaaagcatatggattatgcagcttgtcaacatagtatctttatagtttttgaatgagaaaattagaaattaggtggtggtcctgagctgtatcagaaagtgggagggcatttaatttgcaagtgtttccagttatataattttataaggtgagtgtagtctttgtgggagacttttttacttttttgtaacatgatttcatggtacgttagagttccaaactgcagtcctagtgtgcattgaatttgccaggtcaggattcacataataggatttataatgtgacaattttgtttgtattgttggtaagagctcactaatgtcagtgctagttcttttgcaaaaccccaagacagctcccccatcttacatctcccttagttttacttgggattactaaaagtcaaaagaaatgaaatgtggagtaaatcaatatgttgatcatagcagagaatctatgtgtttcacttagcttttcaattcttgatttttccctagttggtatagatacatcagaataataagtagttcctttttctatagtaatttttcttagctgactcgggctctaagcaaactactggaaaatattatctggagggtggggtttgaggaacgggctaatgtattcaaagtgattgtttctagtagctttagggcagctttatgatattatctagcaattatttttatataggcagaacagatacatggtttatgcatctcttgtctatcctggttttgcagtgtgtaattgagcagcttttaaaattttttattctgtttttccatcatagggacagaatgctttttggcccaaatgcgggcacagaaaggtgaacttctggaaagattatcaagtgctaggaacttttcaaatatggacgatgaagagaattattctgcagcaagtaaagcagtccggcaggtaggaggctcttgctagcactgaaatttgtattctatccttagatgcctttttttttgtttgcttttttaaagcagaaaacaatatgtaacaagtattcagttgattccctgcacccccacctttggaaaatctagataccttttacaatcatgtttaagaactttttcttcccctctcccaccaagacaacacgaaactatcttttcattgactcaataattgcaacttgttacctagaaagtctgttgtggcaagtagttgattcctgaacttagatttgggaatttgaaatattggcttttatcttaatgctcccctttcttaagtgatttatcttttttgctgcagttttcctatcctcaggttgatgagtctgcttttcatctaccagggatatcactatggttaaatgttcaagaagcatatgtccttagttactttacctcattttggcataatgccactttcccaatgaactcacaaatgataa

SEQ ID NO: 67260 - DNA, 1039 bp, Homo sapiens
gaaattgataaatagaaaagaggctttgggttgaatgcggctcttcttacaatcattaatgcatccaggtgtttggaattgtagtctggttagtaaatactggttgagactatatttccatctagattaatggtgttttccagcaaccaaggcaggtgttctgtgcaactgtagttttagcttatgactctcactgaagatgcacttagtttaaatttttttcttgtttttagtgtattcttaggcatttctgttaagtctatgttttctttttagtgctgttcaacttttctactcagtgaggaatatcttccatttgttccatgatgttgtaccaacatatcacaagtaagtaccactgtatctcatttctatataataattgtatgtctaagatgtggaagttaagttaaaacaaataattttatattcccactaaagatattttgtttactaacattcacactaaaatgcagtaaatcattttaaaacgcatatttaaaggatttggtcatttattactaaattaattagggtattataatcttgcagtgtagttcatgatgcacattttaaaactcaaaagaactaccttgttttgctgctaagcattttcagaactgcctttacttaactttcagcctctagttcagttttctttatttgaattaaaatgtttagatgtttttcataaatatctttgataacatgtcaacaaagctattccttagccaagaactctgaatttcagagacaaaaatctgccaggcacagtggctcacacttgtaatcccagcaccttggaaggcagaggtgggaggattgtttgaggccagaagtttgagattagtttgagcaacatagtgagaccctcgcctctaattaaaacaaagaaacaaaaaaccaaaaaaaaaaacaaaagctgtttactatttaaagtattttttagttcagatttttgaatattgggatgtttttaactaggctcacctgttgtttttattataaaagcttattgtgaaccttattagttttattt

SEQ ID NO: 67261 - DNA, 1854 bp, Homo sapiens
ctagcagtttatcttggctagaaagtgtaaaggagctctctagccattctctctcttgcttaggaaagaagatggatcagtaggcttgtgggtagaggaggggtcttgctcaatttctttccagtccttggggaaaataatgagctagggagtgctttgcaaggtgaagaaataggattacttctgccctggctttgatttatgctacttggctgtcagcctttctgcctacctctgggtatgagccctctttggtgtgttgtttgccctgagagtaaaacttcagaggctgtatttaaaggacatgctattgtacctggtgtattttccaacactggattttgaaatttagtgtatttcaagagaaactttctccccctgttccctttcctatatccactttggcctacaaattcattatatacatatgtgtgtacatagacacatatgtgcatatgtgtatgtgtgtcaggtatttgaagggagttatcctgaaaattttagattctgttctcaagtagaatattagttaagagaagagggcaggtgtgttgaattatttgttataacacaccctacttgttaaacttgtttggcagaaagaacatagaaaggaaggtctgtgaaactaggacctcatttttctttttttttgaaacagggtctcgctctgtcgcccaggctggagtgcagtagctcaatcatagttcactgcagtctcaaactcccaggctgaagcgatccttctgcctcagccccaactacttctcccaccctgcccccagtagctgtgaccacaggtgcgtgctaccacgcctgaccaatttttaaattttttgttagagacagcgtctcactacgttgcccaggctggtcttgaactcctgggctcaagtgatcctcccgcctcgacctcccaaagtgctgggattacagacatgagcccctgcacctgacctcaaaaagtcatttccttttttaaagtgatgccaaggacatgtatgtcataattcatatttggttgcattaggagtatattgtaatagaactgcattggaaatatcagagaatgagctctgaggaatagaagtgggaacatctcatattggtgagacagctgatatttttcttcctttttcttagataccagcagtttggaatcttacctacaaactgaacttcatttatacactgaacaatcgcacaaagaggagaagacccctatgccacccatcagttctgtcctcttggcattttctgttcttggagaactacacagcaagcttaaatcatttggtaaggcatgctactttgtttcatttacacaaaatctcctgaggcccagtattaaagggaagacagaaaagatgataaaatattctctgcagagtattagtatagggtctggcctcttgattcatcaaagagaattgtcctaaatattatcccttttattaagggattgggttttttttttttcaactgttcctatttttttttttggtttttgaataatttaaataaaaatctgtagaccatctgggaaacttcagtggtaaaacctgcaccgcataatggttggtgtgtaatgtcatggtatatgtattttggttgttaggttcaaagattcatattttttttttgacatgcttactttttagaagtgtttttttttgagatggagttttcgcttttgtcgcccaggctggagtgcaatggcatgatctcagcttactgcaacctctgcctcctgggttcaggcagttctcctgcctcagcctcccgagtagctgggatttacaggtgcctgccaccatgcccagctaatttttgtattttcagtagagacgggat

SEQ ID NO: 67262 - DNA, 1305 bp, Homo sapiens
ctagggaagttgaggctgcagtgagctgagattgcaccactgcgcttcagcctgggcaacagagtgagaccctgtttcaattaaaaaaaagaaattcctaatagaggtgtctgactctagaatgagttatcacttggcagtggggatacctttctagtaatccaggtgggtgagctctctgatgaaagatacctgcttaaattaagaatagatggtgacatgaggatattatgttgagaggaatgggtattcttgcaataggataagggtttggactagttggacctctaaggtatcttcctactacattctgtgatttttattccagtcttaactagcatttaaatttcaacataaattatgttgacctagtaaagcttattgatttgctttaaattttttatttcttaggtatggtatagcttaaaagtacttgtttttgatgtgtgaattaggtccgccgggatcttcacgtatcaaccggtgaatttacagacttaaagcagcagttggaaagagactcagttgtcctaagtttgcttaaacagttgcaggaggtcagtaaactcaacttgaaccttagtgttttggtggtgggaaggtctcattagtcaatggctatctcctgactataatgggtttttttgtcttcatatttttttttctttctttttttttttttagaggggggagggggagggaaagtgggagcatttcttaatgtttaaaagcaaacagacttgaaataataggatgtataaaatattatacttaacttttcagttttccactgctattgaagaatataattgtgcattaacagagaagaagtatgtcactggtgctcagcgtctggaagaggtactaaatgctctccccaaagcatgcgcaataagtgctcttcttgttttcagtaaattttgtattttttatcattatgcaaatatattctaattgccctgagtccagatggaatgtttaacagtgattccatttcgttaccaggcacagaaatgcttgaagttattaaaatccagaaaatgctttgatttaaaaatattgaaatctctcagcatggagctcacaatacagaaacagaacatactttatcaccttggagaagagtggcagaagctgattgtatggaagttcccaccatcaaaaggtgctgctgacctcaggtggactgctttgcttcatctgcctgaaccagtgtagtgtctgaatatattctacatttttgtattagtagatgagggttcattcataatcttccatgtctgtattgagcactcatgttagcaa

SEQ ID NO: 67263 - DNA, 1096 bp, Homo sapiens
agtattaaggactttagacagaagagcattgtgtaacttgactgaagatcatccattaatagttattaggcatttaggtaaaattttctaatacctaaaaattgtcaaaaacagtcaatagggctactgctggcccaaagaccatttaggtccacctcctcttttttgctctttttttttttctgtgacagtttcactgtgtcgcccaggctggcgttcagtggtgcaatctcagctcactgcaaactctgtctcctgggctcaagtgattctcgtgcctcagcctcccgaatagctggaattacgggcatgcaccaccacacctggctaatttttgtatttttaatagagatggggtttcaccatattggccaggctgatctctaactcctggcctcaagtgatctatctgcctccctcagcctcccaaagtctgggattgcagacaagtcatcgtacccggccttcttttttgcccttaaaagtaagggatgtgggtttgtacaaaaaaaaaaaaaaaaaaaaaaaaaccagcatacatatgcaaaactatatatatatgtatatgtagagaaaaatacttcccattgatcatttttaaaaggcttctgattggatattgtgttttaaccaaattttaaagattaatggaatcatgaaagggaaaaaaattgatacaactatgcagattttataaatgtgcaataaaagtatttgttttacctttggtgtgcagtatggtctttatttaaatatatattttccatttgggaaatggacatacttggtatttgtcttgttccaatttttcttctttaaaaccaaaaagcagattagagggttgataaactggatggggactgacgcgccagtgtttgaaataaaaggcaacagtcaattattgagcagcacctagtggtaactgaagctttttaatctcattggctatttgcattgcatgtaagcttatctactttgtcaaatttttgaatgcaaaaacagcaattttcttagaatggagtttcttatgtagtcattcctcagcagacaccggcaattgctgggacccctgcatataccaaaatccatgcatact

SEQ ID NO: 67264 - DNA, 1288 bp, Homo sapiens
ttcagtttttatttagaccaagcttgtccaacctgaagcccaacacaaatttctaaactttcttaaaacattatgaatttttttttaacctcatcagctattgttagtgaggttcatgtgtggcccagggaagccaaaagactgtacacccctgatttaaaaccatgtgtatacactgatatattgtaaacatttgaaagaaaataattaccatcatatctatgctagagtatcatatctacttccttgtattttaagaagacaattggttagaagaccctttcgtaataaagtaattatatagttgttatatagcagtgagctaaagtttggtttatttgcctttgctcctggtttggcctgaaggaataatcatttattagtaactggccagcataatgctttgacctttgaggttaggtaaggggctaatagaaggcttgttcacttttactcagaaatctgtttagctgtatatgtaaccatctgttttccctccacagaaaatctgcagctgtgcctaggggagtttctacccagacttctagatccttctgcagaaatcatcgtcttgaaagagcctccaacaattcgacccaattctccctatgacctatgtagccgatttgcagctgtcatggagtcaattcagggagtttcaactgtgacagtgaaataagctcccacatgttcaaggcccattctggttcctggctgcctgcctcttgcacagaagttcgttgtcatagtgctcaccttgggaaaaggattaggtgggcacataagattccgatcagaccccaaccatgctgcatgtgtaaagaaggattgaaaataaaattgcactttttaggtacaaaatcataaaagctgtttcactagaaaaggcagaaagcagtgtattaaggtgttgaattacgccagaagacctgaaatgccttgtacctacaacaatgcttaggcttttctaagcctcttgccacttttaaaattatccttcaggcataaatatttttgacagcagaatagaagaatgattcatgagaacctgaaccagatgaacagctactagttattttatcaaatacagatgacatttaaaaattcttaactacaagagattagaaatataaaccttgcctggctcttgccaggagataacaaaatgggttgctgatgaactgcacccttttacatgtgggtagaatataagctcacatggcagtgagatgttgaaaagtcaaaagagacctgtctctctcctttcttttctatctttaaaccagaa

SEQ ID NO: 67265 - DNA, 4422 bp, Homo sapiens
ggtatatgcctgtagtcccagctacttgggaggctgaggtgggaggatcacctgagcccaggagttcagggctgcagtgagctgtgatcatgtcactgaactccagcctgggtgacaaagtgatactctgtctcaaaaaaaaaaaaaagtacagtatgtttttggtgccagaatgctaaaagagtttcatcccttatgaaatgcaagaaacttaaaaattccatagttgtttttgtaattcgatatgaattttttagaagtctttttagagtcaagagactgcctagctcctaggcatcaatttctgtgtgcagaagcccacagcacactattttctaaccattgattctgcccttaataggcattccatgaagaatactccaggctctatcagcttgccaaagagacccccacctctcacagtgatcctcgacttcagcatgtccttgtctactttttccaaaatgaagcacccaaaagggtagtagaacgaacccttctggaacagtttgcagataaaaatcttagctatgatgaaaggtgagaagagaatattcaggtgaatcccttggtctgggttgggctagatggactcctctgttggggaagttttgccctgtgccttttcattgctttctgaactttgtcccacacagatcaatcagcattatgaaggtggctcaagcgaaactgaaggaaattggtccagatgacatgaatatggaagagtacaaggtaaagtgttttctttaagtctatagagcaaaaacattaattcctgaggtaaatggtacctgaggcaaaataaacaattttgtgctattacaaactgacttgttcttccactttcccctcaaaatcctggtaaagaatggataaatgatattttcttgccctcagaatagcaggtctctttattttcattcttcatttagagtgagtcaacatttcacttcccttaaatacctattttagccttgtcctaggcagtaaaattcttgaaatcatgcttttggtttgttttaaatgataaagttttaaaaatacgcattaaaatacatagctacacatgttttcaattgcatcccatgtaaaacaatgttatgtaccacccaaggtgtattcaccacacttactgaacttgaacttgctctgtatgactagaaatgtccgtgtccttccatattttcaatatctggatggttttaccagtcctaaagaggtcattcacttaagctagagctgaatatcttttacatagctgttagaaattaggataaaatccgaagctcgtaggaaataagtacttctgttactcaagtgaaaggaacagaacattgaaaattaaggtcagtggtagacttttattttaaatgttgagtaggtttttatctgaaagcttttgtttgttatttttgtggctagccagatgtgctcagtaaatatttgtaatgaatttaaaacttagatgggaaggacactaacaatctattatgatcatgattattaataatcgtcattctttttcagaagtggcatgaagattatagtttgttccgaaaagtgtctgtgtatctcctaacaggcctagaactctatcaaaaaggaaagtatgttggccttttattttaccaagattattagtcaggatgctgttctctgtagatgcctacctgggaatactaagagtcacagccatgcataacctcccttgtcacatacactagtgtgcctcttctcttgcagtgctttggttttgctctaaacatcacacatggtttttcatccttcaaatgattagatgtattagctgcgagataatattgtgccaggctgtctttgtgatcaatgaagatgaactcagaaaatgaatttttgagttgacatagaccctagtgagcatttcttgttttagagatgggaaaacctgaggcctagggaagtttcatatttgctttggatggctaggccaatttgtagaagagatgagactggctacggtctttggtccttcactttttcagaattgcagccaagtaggttcttgaaatggggaaaagtgaggtctaagccctagattttagtaaaagagcactcagctgttgtttatctcccatttttctaaggtaccaagaggcactttcctacctggtatatgcctaccagagcaatgctgccctgctgatgaaggggccccgccggggggtcaaagaatccgtgattgctttataccgaagaaaatgccttctggtttgtactgtttgtaaagccttaaggtttttttgttgtttacctctgctccttgaagccaggaaaatatatggctttcaaaacagactatctccaacaggttgtagatttccccccaaaattctcatgaacagttttacattggaacaggttttttttcagttacttttagtgaatgtcattcttcttcaatgataactgatagaagttaagatgagaatcagtcatccctctgtgtgcccttcatgtatgcctgcattatagattttatcacattgctttcctactaggttgtaaattccttgagctcagatccttttctcactcagccatttcctctgtgcctgtcatgtaggaaccatgtaataaatgtgtgtggaaggaatgcagcattttttccatgttcacatttaagctggtagacttaaagttttagtgacttctgacactccatttttttaaaataaaggtaggaactgtaagaattggtcctgctgttctgataacatcattgtcacatactagtgaagactaactctctcctggcctgatttgcactgtataactacatggaaaggcagacctacatccccttgcctccccaggggtttatgtgatgtgtgtcctttggagaactgtaaaggggtggcctgccttcagagtgtgggcttgtgtgtgttttcaccaatacccagcaaatttgcccttcacagaagtcaggccaatatttctaccactgcctttaccttgttcataccgaatgggtgagattaagtcatgacatatactcaatagctttattttctgatttatactttgacatctgtattagttataggtgtggcagggccactttgaagctgaaaagggatcttgttggtttgatggatctgaattttattagagccatgtttttatattttaaatcaccaaatagattgacattttgaatatcctactcagcttctgaagtaatgcaattatagggatttagactctttccattattgagtcccaacccctagtgtgcatcagaatcatatagggagctttcagacagtcgtgaagctcaggcctctccctagcaattaaaccagaatccctgggaagggccctgggcatcagtgtgtcttctgcaggtgattctgatgctcagaggagatagacaaccagtgaacaggtctttggttgaaacaggtgttaagcatgaccttgacttacaagtttaggccaatgggtcataaactttacagcattagaatcactttgggagctttcataaaatcccagtgtcccggtcatctaaacactaattaaatcagcttatcagaagtgggaaccaggcatcagtagtttttaaagatccctaagtacatccaatgtgcagtaaagtttgggaaccacttgtttagactgttattaaagagatatttatctttttcagactcttccccacctaattctaccttttatctgtaggagctgaatgccaaagcagcttctctttttgaaacaaatgatgatcactccgtaactgagggcattaatgtgatgaatgaactgatcatcccctgcattcaccttatcattaataatgacatttccaaggatgatctggatgccattgaggtcatgagaaaccattggtgctcttaccttgggcaagatattgcaggtatatgctcttggtaataatattctgaggttttgagaattgtagaaatttcagtgttctcacttgatagcactggttgccaaacctttttaaggaattggaaccttctagcatataagtaaattaaaaatggatctgctctattgaaacaagaggagggagcctgggcctctgcccctcttaacctccctttagcttccccatgactgccaaatcacctccatgggcaaccaacaagcctggtttgaaaaaagtcactgctctccaggaatgtcagacttccattactctctcatgtgccaaaagatgaactcttttatagtttaaaaatcaaaatctgactgggtgcagtggctcacacctgtaatcccagcactttcagaggccgaggtgggcagatcacctgaggccaggagttcaagaccaagtctggccaacaaggcgaaaccccatctctactaaaaatacaaaaattagctaggtgtggtcatgggcgc

SEQ ID NO: 67266 - DNA, 1040 bp, Homo sapiens
aggtttacgcctataatcccagccctttgggaggccaaggcgggtggatcacctcgggtcgggagttcaagaccagcctggccaacatggtgaaacccctgtctctactaaaaatacaaaaattagctgggcatggtggcatacacctataatcccagctacttgggaggctgaggcaggagaaccgcttgaacccgggaggcggaggttgcagtgagctgagatcacgccattgcactccagcctgggcgacagagcgagactctgtctcccaaaaaaaaaaaaagtccttgaaaagtttttactttatggagtcatatttgtatagtcgctagtttccagactattttaaatgtactgtttatcctagtaaaactctaaagtatttgtgtgtttaagatatacacccaaagtacagaactaaattggaattctgaccttagacacttcccctctgagaactataatttaacttaattcttcagcagtgccatattgggagatatttttaggcatacatctttctttatcctactgaattagaacatagagcgtaggaatagcttgtcttgggcagggtgttgacattatatagaaggacagaggcagtgggtgcacataggaatgggtgtgtgaaactcagcttgcaatacatgctggccaaagagcacactgctctgctgccctttagcactctgttcagcctgctttcatacagtcttctgctgaacctttcttctctcctttctctctgtgttttgtgcccccttgtggtaggtgatgctgagccctgccatgcaaggggtcatcctggccatagctaaagcccgtcagacctttgaccgagatgggtctgaagcagggctgattaaggtatctctgtttttaaaattctaattcttacaatataggcatcataatattggggaaataattctataagaagggaaaaaatggggttaaggctgggtgtggtggtgtgtgcatgtagtcccagctactcaggaagctgaagtagaggctcacttgagctcaggagt

SEQ ID NO: 67267 - DNA, 2194 bp, Homo sapiens
tgttattcattcacttagcagatgtttaatgagtgcctactaaatgtcaggcactgttatcaattgttgcccttacattgtccatacaggttgagcatcccacatgtgaatatccaaaatcccaaatgctccaaaatccacaaaactttatgagcctttttcattacatgatgctggaagggaatgctcattggagcattttgaatttcagatgttggattttaggatttgggatgctcaactataactaattgtgcagattttctaaaatatgaaaaaaatttgaagtccaaaacagttctagtcccaatcattttggataagagatactcagcctgcatttctgatggattctatgtgcatgtatttttagttaggagtaagataaagatgaaataccctgctttcttcttttctaaaaaggatgttttcgttccttgtgaccttttaactctatctttgcttttcctcagaggcagccccaactgaatcagatcaaatgtcagaagtggaagccctatctgtggaactcaagcattacattcaggaggataactggcggtttgagcaggaagtagaggagtgggaagaagagcagtcttgcaaaatccctcaaatggagtcctccaccaactcctcatcacaggactactctacatcacaaggtatctgagaaggcatttatgccagtgatccagtaacatctcatgctgtactcccctagccagccctatacccttcagctggctaggtgatgccacagtcttcacagtatatttcatatacagttggtatgccaggtacaacctgatggaatgaattgtggcattagaatgtgatttctgatgaacagaagcagtatcagaaagactaactacctgtgaccttcactgtgtatatagttttgcttatttcccaggttatgggagaaactatgatagggttaataggtagactttatgaaaaccattctccaaaggtgatcttcctaaaagatgcttgtttgtagaaagttttcttaatggatagaaatatgacaaagttgggagtgcattaaattttacagaatcatctgtgggttcaaagtttacagactttatcaatagagttcttgctgaagtagccatttcttatagttattaatttctagggaaaatctgcataggcttttgtaaaaagctgtgttaacagggttgtatattaaactgtatacattctgcttgctttttatctgagtgttctagactatttatcattagatgctaagacctttgttcaattctttatcagagccttcagtagcctcttctcatggggttcgctgcttgtcgtctgagcatgctgtgattgtaaaggagcaaactgcccaggctattgcaaacacagcccgtgcctatgagaagagcggtgtagaagcggcactgagtgaggtgagaatgactgggaagcccaagttcaggagagccgggctttcagcagcgatggccagttttctcacatttctattattctgtgtctctgctgcctttaaccaacccctatttatttctcctgttttttcttactctttctccccactctgctgccacagcttaaagaagctgaacccaagaagcccatgccccaggaaacaaaccttgcagagcagtcagaacagcccccaaaggctaatgatgcagagtctactgcccagcctaattctgaggtctctgaagtcgagattcccagtgtgggaaggattctggttagatctgatgcagatggatatgatgaggaggtacagagatgagtgcaggatatagttgtttgttgtcagtcttatatttccttctcttgtgactatattaaggtatctgccaatagctgatattttctcgttgcaaaaaatgattgtcaagaaagcctatttggttttgaccttagttaccattatttaaaagatagccatgtttctattgtatagcgctcccagcatatgtatatctacccaggcttatacttaatggggccactgcagagtctagatggctcagaaaagtaaaattaagttccctttttggtattatggacaaaagattgccttctaatttaaaatagggaatcttttttttggatattagtccattgttttacctccagatataaatttttcagttgtccagtgagctaaacaaatgtggattgaagttatttt

SEQ ID NO: 67268 - DNA, 1097 bp, Homo sapiens
gataagtggtcacttaactctaagaagcatgtggctgaattaaatatgttaacttaaattttgttgccaaataaaataggcatggaacaaaatagctgctaacctttgtaggtcccaaatatgctaagcattttcagcatgagtggtcaaggtgattctatttttagataaacagagttttgaattagaaggatgcatatgtttaggttatgtttggttttagatctgaggagtttagagttgaaagagtcttcagagaggtcatgtagttcagcgatctggttttcaaggttttggaactgagacataattgatcaattccaaggctgtgtttttgtggacttcatcttgaatcaacaagatgttttaatatgaaccccacattaatcacatcataaacagtaatttcttaataacctaaactttatcagattactttgcttcacctgactggggaatgtacattctgacttacaggtgccttatcgcttgcatgcagttcttgttcatgaaggacaagcaaatgctggacactattgggcctatatctataatcaaccccgacagagctggctcaagtacaatgacatctctgttactgaatcttcctgggaagaagttgaaagagattcctatggaggcctgagaaatgttagtgcttactgtctgatgtacattaatgacaaactaccctacttcaatgcaggtaaaagtatcttggcagaatctatagattggggaaaatctgtactgctcagggagaagaacagtcttgtactgctttttaaaaaatttacaacttactattatataataatagatttaaaaaatatagacagtataaaaggaaatgaaaaggaaaaacaagtttgctttactactttcttccttgaccatgggtcccactcccaacaagtacacaatgttaggtttcttatgtagtcttcaagacacattgtatacatatgctagattctatttatctgtatcttcccctcccccttttccccaagtagattatttttccattcaactctgaacctttttcattaatcgagtatttagcaatctctatatttttagtaaaagaatcttaa

SEQ ID NO: 67269 - DNA, 1232 bp, Homo sapiens
ccctttgacctcattgcccatattgctcagactaaccttaccccccttcctgtctccttttgtctagggaacaaaaagatgatggaaaatacagattcttcccagattcctattcagagaaatttagccttaccctttgttctgctttctcatttcagatcctgtctgaggcatacattttacagccaagtgacccattaagatcttttcctaaacagcttactctttaagaaattttggcaattataaaaaataatgttttaaaaccttaatgtaattatattgaactaaaagctttcataacctaaagtactagctgctttaaaactgtatattgcttcgtggttcatagagggaagctgaaatcattaggaccctagcaatattctttgcttagttaaagtagcctgtgtgacatagaatgagatcattttagtgaagcttttgtttttctttttccaaacagatttaaagacttgtattgcaagtactactcagactattgaacagatgtactgcgatcctctccttcgtcaggtagaatgaaaattgatgggaaagtagtcaaggcatgtgctaatggtagatacaaaaatcaaatttgatagttttcttttaaacccaatgggaatccccctaagataaaagaataaacttaagatataaattgatgttgttctgtttctttattttaggctaaagaaagcaatataccttttaccaaaaacaggacctaacacatacttgtttgaattctgccacatggaattttttcatattgtagaaaggtttgctgtcagatactaataaaaattacttacaaaatggtactttaagtagtgcagtgggaaaaactgaactagagaacagttatcctttctttcccaaagttccatgattcttcaagatctttaatttaacaacatgcgttcaagctttatttctgtaataataaattccaaaagagagttaggacagaaattcttaactatccacagaagtgtttgttagaataaattctgggaatggaggggtaaagagcctccaggagtgtctctgaacctattctggttaggggcatggactttcagtggcttctgtatgaatgactggaatgggcagaatggcttggaggaggggagccctgtttctagaatggcattgaggcacagtcccattgcttaacaggaatgcaccatgtaaaacgcaggcttccccattttttcttttgt

SEQ ID NO: 67270 - DNA, 1204 bp, Homo sapiens
ttccaggaaggatagtgtcactttagttggcttcatcttgtaaactctgtagttgattccttgattcttccaggcctagtcttctcttttccattttccttctcttcccatcctcatgggaaggaataatcagtgatcagagaacatgagctaaagactggccgatctggctttggattcattttcattaccttccagcttggtgaacttgggcatgttgcttaatttatttaaaccttaggctcacagttggtaaaatagggatagaaaagtatctacctcacaggccagttgtggtacgtgagatgatagagaaaaaggttggctctgtacctttatagagttaatgctcactgaatacctgtactttttcatatagcatcttgctttccaaagtacataatttaggccaaggtatcttttggaaattatcatatgagcatgatttttgtcttcctcagtacaagtacagaaagctcttctcaggatgttgaaagtaccttttcttctcctgaagattctttacccaagtctaaaccactgacatcttctcggtcttccatggaaatgccttcacagccagctccacgaacagtcacagatgaggagataaattttgttaagacctgtcttcagagatggaggagtgagattgaacaagatatacaaggttggctcttttaaaatttgtcagttactctttgctttttctgttttttgactatttggaggttaagcacctcggtacacttcctgacattactgtacatgctacagaatttcccccccgccgagatggagtctcactctatcacccaggctggagtgcagtggtgcaatctcagctcactgaaacctccgccttccgggttcaggcgattttcatggctcagcctcccaagtagctgggattataggcatgtaccaccacacctggctgattttttttttttttttagtagagatggggtttcaccatgttggtcaggctggtcttaaactcctgaccaaaactgatctgcctgccttggcctcccaaagtgctgggattataggtgtgagccactacgtctggcccatgcttttgaattttgacatggtaattgtgacttcttttgcacttttagtgccctgtaaacttggctcacacacccccattatacagatatggaaagatctccccctcaaaatttctgggaaatga

SEQ ID NO: 67271 - DNA, 3031 bp, Homo sapiens
actacgcataaatgggttaatggtttttagtctggccgggcgcggtggatcacttgaggtcaggagttccagacccgcctgaccaacatggtgaaaccccgtctctactaaaaatacagaattagccgagcgtggtggcgcatgcctgtagtcctagctactcgggaggctgaggcaggagaatcacttgaaccggggaggtggaggttgcagtgagccaagatcacgccattgcaccccagcctgggcaacaagagcaaaactctgtctcataaataaataaataattgtttttagtctttatcttggtaaaccaagcccctaaaaattctaattattcccttgatacatttttataatggaaaaaataaaatgattataaatttcagattttattttttaaggttacacatatctgcttgtatatgtgtgacacagtcctgggaaaatataaaagaaactgttaatggataccattaggtagtagaactgagatggaggtagatgacttttatggtctgttttatacttttttgtatttgaattttcgtaccaggtacatgcattacttttacagtttaagaataaaaatgttggccaggcacagtggctcacacctgtaatcccagcactttgggaggctgaggtgggtggatcagttgagatcaggagttcgagaccagcttggctgacacagcaaaaccccatctctactaaaaatataaaaattagctgggcgtggcatcgcacacctgtagtcccagctactcgggaggctgaggcaggacaattgcttgaacccaggaggcagaggttgcagtaagccgagatcgtgccgctgcactccagcctgggtgacaaaatgagactctgtctcaaaaaaaaaaaaaaagaataaaaatgctcactatttcttcttctgtaagataaccttgatatatttttgaaaattgaatttcttgtgtatagtatagacatcttttttttaaccacttttgctctgattctactaaactgatagaggtgtacattgtatgaagtagttggtcctaaaagttgtataaaggaattcagtagatgaacatgaaaatgattatgtcttgtcttctttgtttttttttttttggtgttttgttttgctttttttgagacagagtctcactctgtcactcaggctggagcacagtggcatgatcttggctcactgtagtctcaacctcccaggctcaagcgatcctcctgcctcagcctcccaaggagctgggactacaggagtgtgccatcatgcctggctaatttttttcattttttgtggagacagggttttgtcatgttgcctaggctggtcttgaactccttggcttcaagccatctacctgccttggcctccccaagtactgggattacaagcatgagtcaccatgcccagctgaaaattgttatgtcataaaattgaagataagtttcttaaagaaaaaaatctcttgggatttagtgtaagtattgtattaaaatgcagcaaacctgggaagaattaaagttgtaaaatgatgacttaaaaattgccaggcgcggtggcccttaatcccagcactttgggaggccaaggcgggtggatcacgaagtcaggagatcgagaccatcctggctaatacagtgaaaccctgtctctactaaaaatacaaaaaattagccaggcgtggtggcgggttcctgtagtcccagctactggggaggctgaggcaggagaatggcgtgaacccaggaggcggagcttgcagtgagccaagatagcgccactgcactccagcctgggcaacagagggagactctgtctcaaaaaaaaaaaaccaaaaaataaaaaataaataaatgaccaaagcctaaatgtaatatgacatcatgagaaagtgtaactggcatgactttgattaggagcctatttgaaatgtttcctgccagatataaaacttcagattgttggcaatttttagttttgtagttagagaatttttaccctatagattgtttgaggaccctattaaatattgtatagcctctaggaataagcctttccattgacttgctgtgataaacagatcttttgtcagcgactcttaaaatacaaaacagccttgggcagtagagtaccactgtctttgtcgcttaggtatgtgaaatatggctcaggcccagctcggttcccgctcccggacatgctgaaatatgttattgaatttgctagtacaaaacctgcctcagaaagctgtccacctgaaagtgacacacatatgacattaccactttcttcagtgcactgctcggtttctgaccagacatccaaggaaaggtaatgaaaacattttttttttaatggtatgtattgtttttctggtataatttaaactatgcaccatctttgtacttgattgacagtcacctataagagcacaggagctgtgagctctttgtcttaaagggaagggttttgctgactgtcacttgggtgggagtgggcccaccagtgcatttgtcttatccgtagaatggttgggttatttcagaggcttctcaaactgttcaggatagtgttcaggctccacccagtgatgccttgttttgaactacaagccagctgccattaaaggcctttctcagaggaaacctcaagccctgctcttccaaaacatctcatgctcacacacttgaagtatgcatgactaagaaacatcaaggaaagagagacttattcttgaatagaaaattagtacttgaaaaagaactggctagaaataagaggacagcttagaggggcttctctagtaaaggcagagggaggcaaagtcacaggagccctctgattttattccatccagtcatgtgcaacaatctttattgcctagaggagccatgaaaggtagctaggacatttgatatgtgttacctggctaataaaaacactaatactcaataaaaagttagacttttttgtcaaaaaatcttaactattctccccaacacatcccccgcc

SEQ ID NO: 67272 - DNA, 2090 bp, Homo sapiens
ttttcggccagacatggtggctcacacctgtaatcccagcactttgggaggctgaggtgggtggatcacctgaggtagggagtttgagaccagcctgaccaacctggtgaaaccccatctctactaaaaaatacaaaaattaatcagacttggtgatgggcacctgtaattccagctacctgggaggctgaggcaggaggattgcttgaacccgggaggcggaggtcacagtgagccgagattgcgccgttgcactccagcctgggtgacgagtgagactccatctcaaaaataataataatattgagtccttcaatccatgaacagtgtatagctccatttattaaataagttaatagagatttaagtccttattaatatctctcaacagtgttttgtaatttttagtgtacaggtcttgcacatgtttgattaaatttatctctaattcctgcttttaatttcatttttcatttgttctttacaagtgtatagaattgcagttgattttttttctttttttaaattgattttgtatcctttgactttactaaactcacttattagttctgatgtatttttttaggttccttaagattttctgcatgcttacatcatgtggaactaaaaggcagctttacttcattctttactatctgcatgcctttcatttgtttttcttactttattgcattggttatatcttcagttaagtatttaatagaagtagcaagagtgggtatccttgttcctgattttagggggaatgcatcagttttaaccttgagtatgctgtcagccgtatgttttttatagatgccctatatctgattgaagaagtttccttgaatctttagtttactgagactttatgtcattaatgttttataatataaattgtgtttgtgggattatttacttaggtacatgtacaggagcaaggagcttattcgaaataagagagagtgtattcgaaagttgaaggaggaaataaaaattctgcagcaaaaattggaaaggtgagttttggacaccttcatgcttagaaatgtaaaagaatattaaaaacagataatttgtttttctttaaaaattaactcaacgtttaaatattaactagaatattttataaaacagctaagaaaattttttgtctaagtgtgaagcagtcttcaggatcagctagtattattcatgggggtaaataatagtcccagactactgaagtgactcagagtcacacagttagttactgcagtgtaccaaggagaaactgagttctgattttatagactttttttctactccccttgccatctttttcacaaacatgagagaagcaagtgtcacgatggtcccgtccacttttggaaaagcagtttctgaagtgtctaagaaagataaaaaacagtgcttttctacctagagcagtgctaactgattaaaagggctaatatttctgatgcatacaaagttctttctcttttggaggaattttcacttttttgattgttggttttacactatttctgtagaatggttttctgtaatttccttaggagtcagtttaatttctttctcgtctagatagatcccgttgattttgcgcttaagaaagagatcccatacacagtcaatagcttctcctccctttatccacttaacagttttctttctaagaccaccacacctccacctactcccttattaggccattaatttccctgaagggcaacactttccataccaggcctaagatggaccctgcactgtacccccaccgctaccactgcagcttccactctcactccagaagagcttatacaagatgtattgtgactagtcatttgtctttatagagacttaagctgaaaaccagttcctcaaatactgtcctggaagtgattttcaggacttttaagtctgttagtattttactaaacctttaagttttagtgatactttgtaaggctggaaattttaaattatttttatagaaccaaccataccaactggatgcagtatcatgtgcctataatcccagctatatgggaggctgaggcaagaggattgcctgtgctcaggagttt

SEQ ID NO: 67273 - DNA, 3164 bp, Homo sapiens
ttttgagacaagtccttgctctgttgcccaggttgtagcgcagtggcaacatcatagcttactgtaaccttggacttctgggctcaagaaatcctcctaccttatcctcctgagtagccaggacttcaggcgtgtgttactgcacccggataatttttattttttgtagagacaggggtgtcactgtgttttccaggctggtcaaactcctggcctcaagtgatcctcccaccttggcctcccaaagtggtgggattacaggcataagccacgaagcccctggtctttttccagtgttactggttttcattgttcagtgtctagattgactggctcactagaggttgctataaaggcgtaagtgcatttctaaccagctatcaggaagttgctgaatttaaaatgttgtctctgtggagccagaagataggctttagatagtcatagtgatgtcttttttaaaaagtctctctctttgcctaggaaaacccttttgtaacaatgagaccttcggccagtatcctcttcaggtaaacggttatcgcaacttagacgagtgtttggaaggggccatggtggagggtgatgttgagcttcttccctccgatcactcggtgaagtatggacaagaggtacgttggagatctttatttgctgtgccagtgacaaagccagttaagtaggagtgagcttttgggcagactagtttcccatcacatattaagtaactttacacttagcagaacttgaatttgtcttaagtctctcatcagttgatgtgagtcagtgagtatcagtactttgataaataatttttactaaaactatgaatttgagttactcgtgtaaaggttgtatgctgcttctgatgttttaagtatgatcaagtttctctctttctgttgaagcctacctgtacctgagtagggagaacccactgcctccatattttcggagggtaaaagtacagtgattaactcctatggtatgccatttagaatattttccctattatagtatttactgttctcaattgtaaattctgcctttgcttttaacatttttaaaatttaattttcatttgtttatttatgtatctattttttttctgggttggaaagacgggggaagttaaagggagagcatgggtagttaacatctcagtattccagttaggttaagaattagtgaatagcatttgtaacataattctttacacagttgggattgttctccattgatcatacattttgagacaaaactgtggcttatatatgattccaactcagtaattactataggagaaagtggagctttcctgaattaaaatagggagcctaacatgagccatatgaaaatacattcactgtagagcagtgttggaactcagagagctgctgcctccctggattttcaaggaaaaactgattcctaatggaggaattacgtcatctgtaccatctgtgcaaacctggtgcatcctcttacaaaagagggagtcttcaccagctatacttaggcctgtggagacctgtattccaggatgggaattctataaaaattaaacaaaacaacaaaattgtcatgctcatttagatttcaccctgaggtggtctcacaggctgtgtgaattcacctcattatgctgacagggtatctgaagggaatgttgcttgcacttgtggtaaaggaaatattttaaagctgttgacaggaacctcagacatacaggtgaattgaatagaaaagccaaatctgatttagcttttcctcacctgtgatccctgactgttgagtcttttttatgtcagtgccttccttctttgaaactcaagtaacatcgtaggttgatttgactggcttctttatgagacctctgtaagtttttgaaattcagagatttttcttagaaattgagaaattgtaaaaccatgaggctatttcaaatttcctttgtatatataaaggagattcaaattatggttaatagactaaaacagcatgtaatatatgtacacatatgagtctttttagctggcacatggagttgtctctttagctacatgctgcttcgatcataatttcatattctgtagttaggctagctgttaagtttttaaacctcttctgaatactgatgatgtaacgaatgagttatgtagatgcttagtgcggttcacatattcaagggtggtttattctgaggatgatggttgagtaaaattctgttgactggctagtaaatttggagtcttgaggaatgttgaaccatattctgtaagagaatgagattctaagtgttgattccctttagtgtttgggataaaaaaaagttctagtatgagtttgccttgagtataagttctataccaaaggaagaaactttaatgagagatattttaaatctggttattgtaatttcctaaaattaatttttctttctctcacatttctactcttgacactagcgttggtttacaaagctacctccagtgttgacctttgaactctcaagatttgagtttaatcagtcccttgggcagccagagaaaattcacaataagctggaatttcctcagattatttatatggacaggtgagttcttggctgatttttttttttcctgaggtattacagcagtagagatgagcacgtactaagtatagtgtgcgtaggaatcacctgggagacatgataatatgcaaatttggattctatgagtctaggttgagggtctttgcctttttctgagacctcccagggttgtgctcatgttgcttctgatctccggaagcaagactttaggtgaaagccctcctccttttgggggtaggaactacctgaattctgggggtgggggtgctcctagcagacttacattatagaatttttgtttttttttttttttgagacagagttttgctcttgttgcccaggctggagtgcaatggcgcaatctcggctcaccgaaacatctgcttcccgggttcaagtgattctcctgcctcagcctcccaagtagctggaattacaggcatgcaccaccacacccggctaattttatatttttagtagagacggggtttctccatgttggtcaggctggtcgcgaactcccgacctcaggtgatccgcctgccttggcctcccaaagtgctggtat

SEQ ID NO: 67274 - DNA, 4589 bp, Homo sapiens
gtcattttataaacactttttacaatattatttcaatgactgcttaatagtctattgtataaatgtagtatagtttatataaactacttcttttggctgggcttggtggcttatgcttgtaatcccaacactttgggaggccaaagcgggcagatcccttgagctcaggagtttgagaccatcctgggcaacatagggagaccctgtctctacaaaaccaaaccaaaacaaaacaaaagctactccttttgttagacattaggttgtttctattttttacctaaaagtattaatattctttgagctaattttttgtgcacaaccattatttccttagaaataacataagtcaaattgccaggttgatagttttgcatacttttaaatatgaaataaaatatttgaagtgaaaaatacatatgttgctgcagttattttcaggaaaggctatgaatccctttctttctttatttcagtctctctttcaattgcctgaatttcgaagacttgttctcagttatagtctgccacaaaatgtacttgaaaattgtcgaagtcatacagtaagttggtgtcaaggaatttcttcactgttgtttagtccctttcatccctaaggcttctagatttttgcctaaagctgatatccgtgatactctttggcttgtgctaattatttgttttcatttctaaatggctcattttccttttttgggataacatataagggtatgcaaaaatgtaaaattaagtaggagtaaaatgagaaaaacagctccaagaatatgtgggtggggagaccctgaatacctgttgtgtttgttgtatcctttctcttcctgagctgcttaggcaatgtgatgctggagagatgccctgatgccagagacctgagccgccttagtctattttattctgtttttgccaaaggtcgtagcctcctcctagcaatttaacccttcccaggatttcaccttggcgcaatgcattttcctcatgagaaggagggcagcagcttcagaaagtggacatttctgtttttccaacagtgctgtctctggcttctacatagttattcttcagtttagagtacagtccttaccagagtccctgtaacacacatagccctgtgactttgacctagatctaggtaaatataaatgagggcatgattattgacaacttttttttctttacacgttctgattttctaaatgagatattgtaagagtacatgtactgtgttttctacaggaaaagagaaatatcatgtttatgcaagagcttcagtatttgtttgctctaatgatgggatcaaatagaaaatttgtagacccgtctgcagccctggatctattaaagggagcattccgatcatctgaggaacagcaggtacaaaagaagccttgttcttgagtttgaagtcatgccttgtcagtgttaatgcggtactgcttcatttcaactgcgtaacaagctgtgaacatgactaagcaggactatggatgctcgtttctgacttttgttttgcctacagaacaggtggtgagagagaaagcatgtgtgtgtgagagagtgtgcgtgtgttgcacgggggctggcagttctaaagagaagaagaaatagtagtagaaagaatgtagaattataccggggctattgatgtagaaaggaggagattggaaaatacctcaatgagctgtaacaaaagggataccaagaaaagtagtcctttgtctgcacctttgtcttggaatggtccagatggaaatagtatctttaaaactatctaaacctgagttcaggagcttttcggagcttttctcagcaacttctctcttctagactttcccttccctacctcctattaaaaaatagccgggcatggtggtacgcacctgtagtcccagctacttgggaggttgaggcaggaagatccctggaacccaggagtttgaggctgcaataagctgtgattgcactactgtactccagcctgggtgacagagtgagaccccgtctctgaaaaaataatttaaaaacaaaaacaaagctgtcactaattagatcatcttcttcctcatatgattttttttctttctctatttgaaggtcctacagttctacaaaattctcaaaacattgaagttttctttctttattcagatctctgtattgttctagagttccttgggcctttttcttaaaaagtcctacttggaagattttgtttatttttctttctttgtcataaatagatgtggctggaagtagtagagttccagcttccttctagctacaactttcaggttgcttaatgcaccttcttttttatgtatagtagctgggtttcagtgttcctatgttttcatgatattcagcccccaaaaataaacgctttcaggctgtgcgcaatagctgatgcctgtaatcccagcacttgcgacgccgaggcaggtggatcatttgaggtcaggagttcaagaccagcttggccaacatggtgaaaccccgtctcagctaaaaatacaaaaattagccaggcatggtggcatgtgcctgtaatcccagctacttgggaggctgaggcaggagaatcgcttgaatctgggaggtggaggctgcattgagctgagatcgcgccactgcactccagtctgggcgacagagtgagaccctgtctcaaaacaaaaaaagaaaagaaaaaaagaaatgcttttatagtagtataatcttaattcattggtgggataaggataaattttaatttctcttagtattgcatctaacttttatgcaatttgtgcctctcttatagcaagatgtgagtgaattcacacacaagctcctggattggctagaggacgcattccagctagctgttaatgttaagtgagtgttgagggtttgtttgtacatccttccgactcacagtgggccagtgagaattatatgctggaaagttactctccttaactagaaattgctggtttttaaccatacctcctgggataaccactgaggtagtcctcatcatgtatccctgtcgccttcagctttcccctctgaggatgtaccagtcatcttatcctgcagcttttttttttttctaactaaaggactgtaactgttaactttgttaataaactcagcatgtgctgtaaaatgtatttgtaaaaaggacaaatcaacctctgttgtgaacatgatggtataatatgggtacttaaatttaagatcccttttgaggtctactaagaatgtgtagaggataggttatagtcatttcagtcactgagagaagtgaaacttagggcacgatacggatatccctctgagaaatctgtgttttaaatggtttcaattctaggtagaagcattgtaactataaaatagttttggaaacggcaactcaacgtagcaatttaagaaggacttgtaaggagaaactttttatttctgttgtaccatggagaaaaattttttgtatttatttgtaaaactatgcaacagagttcattcttacctttatactgcttctataccttgtatacatctatcattggatatagatgtatatactgaaagcatatttgtctgcatgtgtgactccactattaggctttaagctccttaagtccagggattgggccttcttgtctttgtgtcttcagagtttagcacaatgctcgaaagaaggtgttcaataaatatttgaactgaactaattgttacttatttagatcatacctggctctttgggggttgatgaaaatgcactatttttgcttttgaatgatgcttggattttatgtagcacatatcttaatccaaacaatccagaattgtctccttttcctaaaagcagcagtcccaggaacaaatctgaaaatccaatggtgcagctgttctatggtactttcctgactgaaggggttcgtgaaggtaaattctctgctctgaattttaattctagacctttgatcatatctttattactgtgtccctttgaggaggcagtatagtgaataggcttgagagtcagcagtactcagctctgaatattggttctgcctcttggtatctgtttaactgtggataaactatgggagcttctggatcctcagtctcttcatctgtaaaatgtgcacaatctttatctcagatttgtcatattaatacttgcacagcccaaatctgacattaatgtcagatagtgattttactcggttttctctgtgttgcttattctaatataatacttaatctcaaaaggttttattgagtgagactgccaaaaatgtttttctagactagaggcttttcactctggaggcttatctatctaagctacatgcaaggcacataatttatttttaattatgaagagtttagaatacattcaaatagagcaattttacaacctccatgaacccagccttagcccacagccagtcattccccatctcaccccactcttaccaatctgatactctttttaaaacataacccaataccaatatgactctgaaaaatagcattttaaactatcaaatatctagtcagtgttgagatttctaatttgtttt

SEQ ID NO: 67275 - DNA, 1175 bp, Homo sapiens
ttcagttgcattacagtcttacagttccttatatagctagggattatccagtaaatactttttctggtgttttgaattatccacgaaaagttatagcatcctccatatgctatattattctttaactattttcttttttgctgtgtggcacgctgcacaatataggatgcatgaagcaacctctgcagaaactaaacgctcaaagagaaaacgctgtgaagtctggggagaaaaccccaatcccaatgactggaggagagttgatggttggccagttgggctgaaaaatgttggcaatacatgttggtttagtgctgttattcaggtatgatatttttaagagataactgtgtcttttggaaataactttgtaatttattaaactgaaatgtagaaacatagctttcaaaggattaaaatagatatttaaaattaggggagtttttctggcattattgtgtatggatttagatgctttgatgtctaagttgggcagtactaaaaagaaatctgctgtggttgtaaatatattgaataggtgttttggataagcatttagtggatactatattatagcagtgagagtgaataaggaggaatcagttgttgaaggctatcatagctatccaggtaggcgacagtggtggcctggagtagagaagtggcagaagtcatggaaggagagaagtgaatgcattcttgaggcgctgaggagatcaaatctacaggattggtgggcagttggatccaggatatgcctgcagtagttgagtaagagtaagactatgaggtttctagttcgagtaaccaggtggattatagtaccatttgaccctggaggaggaataatttgggtgtgtgttaacagtgggtttcagttcaggtttttttgttttttgtttttttctttctgacacagtgtctcgctctgttgcccaggcaacagtggtgcgatctcagctcactgcaacctccgcctcccaggtttaagcaattctcctgcctctccagtagctgagactacaggcatgtaccaccaggcctggctaattttgtatttttagtcgagatggggtttcatcatgttggtcaggctggtctccaactcctgaccatgtgatctgcctgcctcggcctcccaaagtactgggattagaggcgtgagccaccgcgcc

SEQ ID NO: 67276 - DNA, 1050 bp, Homo sapiens
tgctgggattacaggcgtgtgagccactgcgcctgccctgcttggcatttttattgtagggctgacttcatttagaatgtctatgttaattgccagcccccttttttgacacatcgtgctttagactgttcagagaaatcatgagtagtagtatccgaagcaatgggaacaaatctccatcaagatttcacttttgtttgggtgttgtgggaagtcagagcatggaaactccctcctgtaatgaggcatttaatagacgcttcaagcacattagacctactgtccaccatagtctcataattctaccctagaattatgcctgaaagtactcagtgtgtcaccagggtaataaagttaatactcaaaactggttttaaattctatgattacttttgaaatttctattgtctttttctcccataggccagtaatggtgacattactcaggcagtcagccttctcactgatgagagagttaaggagcccagtcaagacactgttgctacagaaccatctgaagtagaggggagtgctgccaacaaggaagtattagcaagtaggtaccatatatcctgtcttggtcctttgctgaactagcagaaaataacaaaccaagtatatgtgagttccctgtcaatcacatcagccctttgaaaataatagtaataacagcttattactgagctattgctatgtggcaggcacaattctaagcacgtaaaaagttctggccgggtgcagtggctcatgcctgtaatcccagcactttgggaggccgaggcaggcggattacgaggtcaggagatcgagaccatcctggctaacacggtgaaaccccgtctctactaaaaatacaaaaaattagctgggtgtggtggtgggcacctgtagtcccagctgctcgggaggctgaggcaggagaatggcatgaacccgggaggcagagcttgcagtgaactgagatcgcaccactgctctccagcctgggcgacagagcaagactccgtctcttaaaaagaaaaaaaaagtttcatttgttcatttactcat

SEQ ID NO: 67277 - DNA, 1024 bp, Homo sapiens
ggcggaggttgcagtgagccgagatccggccactgcactccagcctgggcaagcctcaggcctgtttatccaagatgcttttagttattctttaaatgtacccaggtttactttctgactgacatgtttgtggtttttttgttttgcaaatatagagctgccaaatgctgttaaatcaactgagagaaatcacaggcattcaggacccttcctttctccatgaagctctgaaggttggtttccagatctctgttagtcaggaggctttaaagcagctgtctatattatagttatgtcagttcaagctatttctattcccaaattaaagcacatatagggacagaagctctacaggtcaaatgactgacccaatgtcttcaacatgtaaattataaggggctgggggagatttgtggttcgggtaaccctgcagggtataaaagagatttaagaaacatcaaccagttgcactgtttaggccttatatttcctgatccaaaccagcaaactaaataatatttgagtcagggaagtttgaactggttatctgatattgaaaaaacctgttgttattcttaaggtatgtatatatatatacttttttttttttttgagatggagtctcactctgatgcccaggctggagtgcagtagcacaatcttggctcactgcagcctctccctcccgcattcaagctgttctcccacctcagtcagcctcccaagtagctgggattacaggcatgcgccaccacacctggctaatttttgtatttttagtagagacggggtttcaccatattggccaggctggtcttgaactcctgacctcaagtgatccacccgacctggcctcccacagtgttgggattacaggcatgagccaccacgccgggccatgggttatatttttaaaagatatgttctgaaatgttgaccagtgataagatggttagggtttgattcagaatatctacgagagtataggaggtttagagaaaataagaaaggttatgactaagtg

SEQ ID NO: 67278 - DNA, 1004 bp, Homo sapiens
tgtagcctatgactatagtctgactacagcagaacgactgttggtgcttctttgaggactttatttatttatttattgagacggagttgtgctcttgttgcccaggctagagttgcaatgccgcgatcttggctcactgcaacctccacctcctgggttcaagcaattctcctgcctcagcctcctgagtagctgggattacaggcacgtgccaccacgcccaactgattttgtatttttagtagagacggggccatgttggtcaggctggtctcgaactcccaacctcaagtgatctgcccaccctggcctcccaaagtgctgggattacaggcatgagccaccatgcccgacctctttaggactttagagggatgtttcagttagttatttctagttgtgtaatactttagtgttgcattgggcccacagctgttgaagaacataagatactgtttctattatagctgggagtaaatgtaggctatctctctgagacatactactaacttaatttaagcataaccttaggaatggtataaattagatttcttgttgctgaattaatttcgaactactttgttttcaacattcatctaaaaagatcattgtgtctcaagttgggccagccagttgtttagattgagctgtacttgcaaatcggtgttttgtattgtctttgtgtaaaacaggataaaatgatagagtgaagatgttaaggctgaaggggttgtaaactgattttgtgttagctggaagttaacaatttaggtttttccatgatttaggttaatgaagagaaaacatttcatactttataccctttgaaattatgtatttaattgagaaaattctagctttagctgtactttttaattagtcaaacacagagttttaaatatgttggtgttatcattggttaattacatgattggaaacttattgtcagtgaaaaatgatacacactaatggcatgtgcaggaaagcttaaaatagcacatctt

SEQ ID NO: 67279 - DNA, 1149 bp, Homo sapiens
tgtgcatcagaatgatgaaaatagcatcactgtttgaaggaatggaataacctataaagcttctcatcacaatgctaaattaggagttttaacgattagtaatgaaatattttgcattatttcatcagagagttttaacctagttactgtgggatcaggccaggtattgattgttacagaaacttgatagcttaaggtttttagtgtctgaataatcttgttaattgctgattgtgggtgagttgtttttgctctaagaaaatctccttcctgagaagtgggctagattgcaccaaaaccactgagtagcagtgaggtcaaaaagcttgagttccttcctggtaaaggtttgtgtttgcctgtctttctttactgcctctgggcaagaaaagggagtactttttgttttgtgaaaacaatgtgaatttagctcaggaaatgcaaacctgttggctcttgcaagttatttgacttcattgtgagaggagtacaggctttgtcttgtctccttgttgggtgtgtactttacatatagcaaggtagagtgaagttaatatttaaatcctctttctgtgaagttcaggtgaagtgagttagtaatatggtaggatcctgatgggtttagtgttactgtaaaattaatatttatataaatatatatatatagtacgaggatttggagtgcgggttctgttaagaactttagctaaatctttacaagactgggtcatgtcatagcatttgtatatgtatataaataatgcatgtgaaatttgttattcataccatactctttacattttatttttatttttaaattatggaacacttcatgaatttgcatgttattcttgcacagggtccatgctaatctctgtattgttccaattttagttaatgtactgctcaagcaagcacttagacccttaatagctatgtgttttatagctatctttgatttagcttttaattcaagtcatttgatgataaatagattttgtaaaccttaatttcctaacgtgtgcaatgcctgcctttgttattaggattacatgcatgtaaggtgcctgtttcctgtcatatgttaagccaggtatggtgatgtgtgcctgtagtcccaacaacctggaaggctgtggtgggaggatc

SEQ ID NO: 67280 - DNA, 1059 bp, Homo sapiens
taaatgccttttcttccttcgtatatcttccctgctgaggagcctgcagtgattatccattgttcatcagatcaaacctaaactcttcctgacatttagaaccctttgtaatccaatcccacatcacctctctgatctctgttatttatttatttgagacagagtcttgctcttgtcgcccaggctggagtacagtggcgcagtctcagctcactgcaacctccgcctcctgggttcaagccattctcctgccttagcctcccaagtagctgggattacaggcacctgtcaccacacccagctaatttttgtatttttagtagagatggggtttcaccgtgttggccaggctggtcttgaactcctgacctcaggtgatccgcccgcctcagccccgtaaagtgctgggattacaggcgtgagccaccacacccagcaatctctgttatttattaaaaatagaaactacacacgaagacccagctagtaataacttaaaattttaccattgctatatttctaaaactgtaagcatgtaaatttgatttctcatatctttccctgatattttcccagtttttcaattagccctaccaatatgttgttaaaaattgtattttccttcatttttggagatgtgttcgatatgtttgtcagcctcatttctcatatttagttggaacatgtattcaaagaaatgaaaaatattgtcttaatgtattctaaaataaggaaaaagcaaggtataggacattatgtatcatatgaaaaaatatattcatgtgcatagacaatttcgggaaagataacagaaactgttaatggtagtagcccctgggaaatagaactaggtcgggaagaaggtgatttccttttcattttatacccttttgtactattggaatctcttagtacatgtgaagaaagagatggaaaaaatttaaaaagtaaataatgattaattccttttttttcttgtttttaagtcccagttttaacccctctacatgatataatagtggctaaattttaaacacttttaatggtttttaaaaactt

SEQ ID NO: 67281 - DNA, 2744 bp, Homo sapiens
tctggcttcagaggtcagttctatttgtttttagcacagtgatttaaaaacatgggaaaattttagtttggagactatcatattgatttagagaagagactattttaagggagagagaagtcatatttaaatttgtcgtggctcagtcatttaagaccatgtgcctattaatcagtggcatcttcatttacctctgccgcagtttgagtagtgaccctatttcagcattctccgtttgagactgtgtgtgagctacttgatgagcatttgtatgtaagtcatagctattttgggaaggcttggaactccagtggctgtggctggctggagtactccgattcctggccacctgcagagtgatgacatttactgttcttcccagtgatttgccctatacggaaagctgataagcttggaatgcttgataatgtttgccccttttatttttgctaataaaatgcttcaagttaccaggataggttgaaggaacttacaggaaaagtaccttttgatcttacaggaaagattttaataacttcttcctcatcttggtaagtttcatgttagaatggattcttttattttgaactctctgaggcattctacctttcccttaaaggatatttcattgttctagttgaggagagctatccttccctgacactcagaagctatttaaagcctagactgcttcccttcccttattggtcagttgtacacaggacagacaaaaccctttatggcctcccaagaattttagtgcgagaaatatgtagtactcttgaaatatgctatcagtatggactcgaatctgagagtagacactttatgatttcactaaatcctctagactgcaaactggtattcgaatatctaaagaggttacatagtgacagattcctgtattttaatcaattcttgacttcgatagcagcaaaatttactgttattacaggagaaacaacttgaagtcagtttggttcttataaacctgtcattcttggcagctgtactgagggttcacatcacacattctttatgtcagctgaagccttataaaaacctgccagtttcagtgaaaatttaatgccctttttgctttctcttgatttattgacctttcgtttccttttgtctcattaactgatttttaaaacatcagtaagtcagtgattggttccacaactctcatgcccctctgcccccaaatgcaaacagtatttttttttttttttgagacggagtctcgctctgttgcccaggctgaagtgcagtggcgcgatctctgctcactgcaagctccgccccccgggttcatgccattctccagcctcagcctcctgagtagctgggactacaggtgcccaccaccacgcccggctgatgtttctgtatttttagtagagacggggtttcacagtgttcgccaggatggtctcgatctcctgacctcatgatccgcccgcctcggtctgcaaacagtatttttaagacttactggcaaatagcatcttaccaggcgagatctctccatgtgttctgtttcatcaaagaaattaaatcaatagtaaaatgaagcaagtacttaacaaggaaaataatgctggtaatagtaatagctaatgctaattgagcatgcactatgtgccagactcggtgctcagaacttaacatagcattctctcagtacttacacaactccatgaagtttctatgagaaggcttatacttgttaagtaattcgtccaaggtcacccagtgaggatatggtacagttggaattgtatctaggcagttctgaccccaagagcccaaggcgcccctggtcctatctcatagttgatgggcccattgccctggatcacagactttccactactcttataatgccttttctagaactctcctaatgttttaaacttccagtcctccctacagtctttctaaatagataatcttcttttctacttgactgagctcgctgatgtctaaaaagagctccctgccttctgttttgtccccctctccctacgccatctcatctcttttctcttatttcagtggaaaaggttcccttcctttttccccctttcatttcttagagataaacctagattaatggtttttactagggagagattttgtaatctaggaagcatttggcaatgtctggagactttgattgtgactctggagggaggatgctactggaatgtagtgcgtagaagccgggaatgctgctaaacatcctgcagtgtacaggagtaagcccctctaaacagagttatgtgtaaattgtataaaatagtgctgagcttgacaaactctgatctagatgatgtctctcttctctttctattatgtcccttctccttagtcctagtctaacccccagacaccttcactgtcttctcccttgctactcacattatggtccacagaccagcagcattcacatcccctaggatttagacatgcagaaagttgagtgtgctagagccagcttgctctgcctctccagctgattttgtacatctctttccagctctgtgttcaatgacctcgtgttgataactgtgccaaggtgggaatatttataccaaggaaacaagcatacactgccaatcagcataccactgcctgtacccccactctagacctattcaatcagtttctgccttttgacaagattcttgggtgattcatttgcatattacattttgaatttgcattttccattttac

SEQ ID NO: 67282 - DNA, 1040 bp, Homo sapiens
gctacaaagcctgatgggaaatcctttattccacggtcattcggcagtttcccacggcgggggaacagttttaactcgcccgtggggagggtggagccggaggtcagtcctacaaatgaggttttgagggcagagagcggagaagactcaggaacgcggctcccaggattcgcaaacccagttcccggacactggcagcgcggcccgcagcctccaccggctgtgaagctgaccaacagcgacaggcggggccgggatcacgtgaccgacgtctggtcagccgggcgtgcgcgggagcacgcagaactgttcggccccgggccgcgcgccttgcgtgcgcgcgcatgccgggggcggggcatgtgggccaagcctccggcgcgcgctgcgggcgggggcgggacggagcggggtggagggcgggggcggggcctagtcctgagaggctgggccggcggcggctgcggcgggagaccggtgacccgcggctgggcgcctcggccatgactgcggagctgcagcaggacgacgcggccggcgcggcagacggccacggctcggtgggctccgcggcggcgagcgggagctgggggcgggctccaggccctgaggggagcgtgcggggcctgcagggctgcgggttgcgggctgcggagggcgccccggccgggcgggacagggggtgcgcccgccagcgtgggtgagaaggccaagggctctgcggggctcgggccgcggagattgaggactgcatcttcgcgtccgtgggcgagctgaagttgtagggggatttccagattttggaaaaccaaatataaagggctggacgtggggttctccgccgcagggatcagtaaggtgagccctcctgggccccgtccggggtgagaaacttccgaaagcggcagcgttggttggttttgttttgctttgacttttaaatcagttttatggcggcgtttttaaaaggttaaagcagaccgaagttatctcacttaaagtccggaattaatcaccgtcttctataagaccaggggtcc

SEQ ID NO: 67283 - DNA, 1047 bp, Homo sapiens
aacaatactaaggctcagatgtcaagtctcttttctagggtcacatagatagtaagaggcagagctggattcaaatttaggtccttaccccctggtactttgctgcctcttggagtcacttagacttgaagaggatcatgtctatggaacagagcgttttgaagattgcttataggaagtggagtaaataacaggggggataagtagcgagtttgttttttttttccttgcttctgtcataaaccacgtgcccatcattttatcctctagtttctgggtcagatgaatggagtcaagaaatccagctttctgttgtcattgacgacagcatttggctgcataccctgtggtctgctgttttgctgatcttgggtggattctccacttcctcccccttcacccccattcccctgttgctcgttcaggtacgggggatgtgagtgagaggggttggggtggggatatctggaagttgatctcatcacccctagccggaatctgctctgaccctgcctcctcgacagctcagaggcttaacttgtggaaagtgtggcagagctaaacgtagccgactttttccagtgggtgcgaaaaataaccgccactaaggtgtgtcttcttgatgcttgtaccgctcagaaatagactgaggttgtgtttgtttttgctcaaactttcctaaagaggaaacccgctccccaaagttgaccagatagatgtatcatctttccggatgtgaattatttcggctgtgtgctatgagaactgggtatggtgggaagtaattgtttttctggctctcatcaggtcctggttcctggttgcttttctttacccgagagggccacaaaagataccactctcctgagacttccaagttccccttcagcaagaccctcattcctctggggagagagggagagttggccatgttatattcgaaagagcctgggtattggaattggccatatttagtggtgagagcctgtgatacttatttaacctttctgggccttgtttcactcactacatttttttttttttttt

SEQ ID NO: 67284 - DNA, 1036 bp, Homo sapiens
gcccaagactttgtctcattaaaaaaaaaaaaagaagaagaagaagaaggaggcaccctggatgaagactcaggctccagaatttactatctgtatgtcttgggcaagtggcttagcttctctgagcccctgtttacttttcttttgaaaatgaccaccttgtccatggtaatgaggataaaaaacgtgtaaagtgcatagcagagtgcaggtgtactgggtagacatgtatgattgcgctgtagccctgttatggcccggggagaaactatgaaaggaaccagtgaaatcttttgttttgggcactgctaaattgatgatagtactaaccctgtgctagcagccagctggtgaaataataggtgaataatgttagtacattgtgaatataaaagtttccatttgcaaagtgctactgctgttctaaagaagccacatttctaataaatgattgcttaatcctgtgatgctgccacagccccacagagtttgggaatgtttgggaattctttctgaagtgtgtgccgcattcttttgctttgccttttgggagggtagatgtgactattggaaatggtcaaaataatgcagtagcaaatctgttgactatagtgagtgataagcactgtcggctgctgtgtctgactcggaaggcagattctggaaggggtgtgtggggaaggcttgttggctcagcactggggtgagtgttggcctcacttcttaggtgggaagtggacaaggccaaggggcttttgatttccagctactatggctggactcccagtgaggaaggagtcgctgccatggattgcctgggactgggaagactccttttaactgctgtaatgtttctgcatttgtggtttggcctcctgtgagtttgggctccggggcggcacttctgttgttaaaagaacagaaaagaaaacaaaacaaaacaaaaaaccaggactgtcactgttagatgttggttgaggctagaaagaatggattgagttttgaccccctacaccccggggagtagggaggcctg

SEQ ID NO: 67285 - DNA, 1093 bp, Homo sapiens
gggatctggcattgaagcatctgttgatccactgtctcttcgccactccttgtcgtaacacgagaagtgattcctagctctgaggtgtccatgcagagaccacagacacatgcagtgactcaaattggttctgagatgggccagtgtaaggtttcccattaggtagatttcccacagcttggcttaacgtcctggtggcttataagtgagcatgcctagaactgcttgtccctatttttgactcggctgcatacgattagggtttgagtattcatgtggcctgctcctattctgggagtgtcattcatttttggagccagaggatgtttaataagcacgaattgtgtgtcaggctctgtgcacttaacagtgaagactgctacaacatccctgccctcaaggagcttaagtctagagtgggagatgagtatgactatgcaatcatcatacaagatggtaatgtgtgcaaagtgctaagaaatctaggagaaattcagagtaggagagtgttttgtgccagagggtaacagaacagcattttgaaaggactcggtgaggggaagccgaagccacctatggaagtgggtggtgtaacctgcgagtgtaggctgggcctgcagggagagagcagagtgcagggtttagaagagatggacgagatacatctgtggaaggaatagcaaaatgatctgcattctccctgaagcactggagagccactgaaggactgagtaagagggtgacatatttttgtgtctggaatagaagggactgttgggcttttttttatgtagactaggctagaatataaggtgaataaagcctgttggagaacttgaagactggccgtctgtgttggggtgtggctggagtgttgagaggcctgtgccttctgtgctggttagggccctgtggccccattctgccaggtgggaggccccatccttccactcctctcttgcccttgtcaggcactgtaggccctggctgttgagaagcatccctgagatgaggctcttccccagagttagagccatggggaaagaatgaaggctttcgttgatagattttctgatttcagcagcagcatgga

SEQ ID NO: 67286 - DNA, 1036 bp, Homo sapiens
agagctcgggaacgacgtcgattttgcccatcactggggccacatactgggtgctcagtgttgcatagcctgggcccactctggatttgcccctgagcatggggatttggaggtgtgagtcccgacactggctctcactccagatgggtaaagaatgcaccttgtattcccacctttctgaggcaccccctctcctgtctcccacaggcactgacatggccgtcttctgtctgctgtgtgggaagcgcttccaggcgcagagcgcactgcagcagcacatggaggtccacgcgggcgtgcgcagctacatctgcagtgagtgcaaccgcaccttccccagccacacggctctcaaacgccacctgcgctcacatacaggtaggtcagtccagctgatgggtggatctgggtctctgggagccagcgtctatatttacctccaaggacgtaaagtggaggtggtgggctgagtcagccttcagtccttctgctcaaggcttggacgtgcagaggctgcccgtcgtgcaggtaaatgtggacagttctcccagtcccctcctgtggaccgtcggttcaaagtctttccgtgttcaacacaggatgctcattaaaaaggcaggctcttgggtcccactctcagaaccttttattccatgggtccagggtggggtcccagattcagcattattaatatgtattcccaagggattctcatgtaggtagacccaaaatgaattttgagaaaaactgacctgctgggtctcttaacattgtctgccctgcctcccaccactcttgatgccccgccgctctatccatacacatttctgaagtcagcttcgggcttctgagggcaagttgaagcagtgatcctactttccccacagtaacaaaggcctgtacttggaccttaaccctgtttagggaagacaaggagggcatttaaacgatgagcaatgaaatatcactgctcagccagttccaggtgatgggacaagggagggggtacaaggtaaggaggctgggccaggtgctg

SEQ ID NO: 67287 - DNA, 1024 bp, Homo sapiens
tgggagttttgctctgttgcccaggccggtgagagcctattttcatatgcattttaacctgtatacccctgacttagaattttatattggctatagccttcaaagtggggctatattcttcaatataaaaataatttcatacaccttttttttctgttgactatgtgattctacagaatgaaattgatattaactagaaacaattgcagctatgacaatttggacaatatctaaagttatttagtaaataaggaaattcccagggtttgtagaatctcagggaaactttgtaataagtaaataaatcttcagtcactgttagacaacacaccttgccaaagtccaaatcatctgtcaagaaggcctttgaaactttgttctcactttctgtatccaccaccggcctttccatctcattcaaaaataaacccttacaatctagcaggatagtaaaagcattacttatctcacacctgaaatgtcagcttggaacaactagctcttgagacactgtcccctcccaatcactctgttggacattgcatttttggcagtaaatttctgcattcttatccttatccttgtgctagatcctgtggctttaattattttaagaatgataatgatcctatgcaactcatgtctttcctgcatcttcaagtagctttatcaacctacaacctatttccttcaagatgatttcttctttatctgaagttttttcttgtgctaaaggctgccaaagacgtatgtactgtctcctgttcttctacctctgcatttaaataccactcattttaaattagctggccatagtggtgcacacccgtattcccagctactggggaggctgaggagagaggatcacttgagcttgggagatcgaggctgcagtgagctgtggtcacattccagactggctggcagagtgacactctgtctcaaaaataataaaaaataataataaaaataaataaccctcatttttacaactatccaaaaaagttttaagaaagtcaaacac

SEQ ID NO: 67288 - DNA, 1022 bp, Homo sapiens
gtccttgggaacacagtgtgtgtgtagggtcttcgttgagcagtgctttttcttatccttcctgttgtcatcttccccttaggataatttgtctttggtttatctgactgggaacttaatattttaatttatttgtgtctgttttcccctaaagtttgcttatcaaattgcagcattattaaaatatgtaaaataaaatggttaagtactccgtagaaaaacagcattttagtgttgctgtattaaaaagtgtgaaaaattctgagtatcctattccccccatccctatcccctaataactggtattgtttgattaatcaatacaaaagtccgtttttagttaaagaaaatcattctcttgttcttgataaatgttcattttcatggagtggcaaaataatggcgattggtcactatgttaagccatacagtgctgtgaattgcaaaagtgattgtgtttccagttccttatgggcccccttccccaaataaatctaatgttcagtcataactaggatgtttactgtagccaaaatggaaatccgtgcatcattttcaaaagaagtttctgattacgtttctgttgtttttaaactttgtcatatcttatttgtaaaatttgagtattttcccttagttgctttatttaaattctaaacacctttttgtttgtaggctgggccagtaataaaggtgaaaattccaaaagataaggatggtaaaccaaagcagtttgcgtttgtgaatttcaaacatgaagtgtctgttccttatgcaatgaatctacttaatggaatcaaactttatggaaggcctatcaaaattcaatttagatcaggtaactgcccaatgaggttcggggggcattgtttcctgctgtttttaaatttattattcagttttaaagaacctcttatttgtagatgaaacttctttcttaagcattgtgaatagtaaactttatatagcaaactttatatatccctgaaaacgggtaacattgacacatggattttgaaatt

SEQ ID NO: 67289 - DNA, 1802 bp, Homo sapiens
tgtttcattttaggaagtagtcatgccccacaagatgtcagtttgtcatatccccaacatcatgttggaaattcaagccctacctccacatctcctagcaggtaatatttctcacttattgttaagatcatttatcaggaattcttatagggaatagcctcaaaacacatgagtaaatagtctccttcattattctcttatctcttcattctgccgttattacttgccttttggggttgttgttatgtatctattctaaggggtatagaatgtgtctattctatagacaaacacattgtatatagtccccttagaatagatacgtatataactatttgttgatttgtagcgacataaccatacccacatatgtgtacagtacatgtatacacttgaaacaaaatttctcaaaacattatttaccctcactacttggattactatttcatttaaaacattttaaaatttattttacagtcattaattggttgttacttacagttgaaaaataccagttagtcaacagtctattggactaagaattcctagaattggattctaggtctgcatctatcaattgtgtaatcttgagctagtctcctttctttagtcccgtcttcccatgtgtaaggaaaataagttgaattaaatgatttgtaaaatctcttcaggtactgagtattagaaaatatcatatttacttaaatgattttatttgctttggggaggttcatattttaccagggacaatttttcccggtatatccataaagctatttaacagtcatttaagaaagatttaataaatacctgccatatgtcaggttcttcaccatatcttttacatatatgatttcatttattcctcacagcagttttatgagggtagggattatttttatctctacctcttatatgaagggaaatgaaaaatggaggttaacttgctcaggttcagtgggctgggattcaaacccaggcagtgtagtgtgattgagcccagccactatgatgtattatctagaggagcttaaagtctaaatgaagacacatattatatatatttttgtgaatacctgttcaattactgtaataagttctctaaagaaagagtacaaagggctttgagaaaattttaagagaaggagatgatatagatgaatgtggaactgaaagaagccagtgtacctagatcataatgaatgaaaatggagagcagtaggggattttggtagataggctggagagggtcttttaaactataatcaggattttgagattttaccctaaaatggagtaggaaggcagtgaaatgttttaggtagggtactgataggaacaagtttatattttaagagttgtttggttgcagtgggagaatggattggagggggcaagagtgaaaatagagcagtgaggaagcttttggtagcaaggcattgatgttggaagctattgatggatgaggttgatagtttagattaaggtggtgccatgagctggagagaagtggatggatatgaagagatactagaaagtggaatagtgagccagcaatagtgcaaaaagtgtaccctcccggtgttctttcttgccagctgaaattaattaacagtgtttaaacatttcttggtaaagttggcatttaaagcacttccagcccctttaatggagtcttcaaaggcatcctaggtagaggaaaataaaaagttttccctcttagaatttcttggggagaaaaaaccaggtgcagtgacccattcgtatagtcccagctacttggaaggctgtggtgggaggac

SEQ ID NO: 67290 - DNA, 2040 bp, Homo sapiens
ttcaggatgctcaaaattaaagaactgatattctaaacagcaggcaatcagtgaataaaagtatgttaattctttgtgtacaatgtctctgaagtcagtgacataaaaaaaaaaaaataacacacacccttccttttatattttcagtatattaaaaaggaacagtacaaatgctgtggtattaaaaaggatccttatttttcaacaaatgaacttttataaacaattctgtaatgaaatgaaaacagtatcttaatacaagcttttgttaaacaagattttaaaattttaaaattagaaaacgttaagattaaactctttcaaaggttcaaacaaaaaaacaacctgtacaatctccattacatgtgtctttgtacacagtctgggcactttgaaaatgttaaagtttttaacgtttgactgacagaagcagcacttaaaggcttcatgaatctattttccaaaaaagtatgctttcagtaaaacattttaccattttatctaactatgcactgacatttttgttcttcctgaaaaggggatttatgctaacactgtatttttaatgtaaaaatatacgtgtagagatattttaacttcctgagtgacttatacctcaaatgggatttaatgaacaatttctaaattttagaatgaaacagtatgtgtaaatctacacatgtatgttcaactagggtaaagctcaagagcatgtcacagaatttatacctaaattatataagaagttaagcaatgcctttatccccaaactttaccaataagccttctcaaatagaatgttagtaaagtgaatcactgaaaagtttcatttttgaattaactaaaataccagtagccattttagactgtcaacctggatgttttcttgattcactagcaagaaatttcttgcaatacaaaaagataacaaataattaaaatatctgctttatcatacaacttcaccccctcctaaagtgtctaaaatgattaggaattgtagcactttcttttgcataaaaccctttcctcttcataaaaccctgaggtgaaaggttattaatgtaataaaaccgcaattcattttgtattaaactgtagctttaaaaaaatttataaagaaatgtgacaacttgtaaagctgctctgtacagtttttcaacaaaatatttccatatcaacttagtcaaagggcctaaaatgaccctataaaaacaatgtccttttaacatgtgttagtgtcgagatgagcgccattttccatctctactactgtctcttctgttatcatagtcatggctccagtcatcatgattcctgtcttcatagaagaaatcatctctctttcctctgtaatgatggtcagacccatgatcagtgtaacgctgttcccggctataatgtctatctgctaggtagggataagaattcattctgactttacgctgtgatgatggtgtaccttggcgccactgggagcttgaagactgattgaaactatgactgtgtgattgaactgatggtgaaaatcctgattgatccagaggtgaagaaccaaattttccaccatatgacatttgtctcaaagcactgttcatctgaggaataggaaaagtggaaatgttaatacttctagatatcaaagctaatatgtatttggtcagttaacagaaaatgaaagaaaataaagtcactcttgcctagatggatccacaactaaagcagtacaatagcttcaatcattccaatgtatacctacaagatacatatatatacataaatactactctttgtcctcaagaatgcaactcagaataagtcacacaaaatgactataatgcaaaatcactgtgtaaaaaacaaagaatcaggagatcagtatcattaggaaaggtttcatgaaggtggcatatgatctgggtattaaaacaatggatggaatattttcatattttaagggagagatatgccaagaaaaggaaattgcacaaacaaaaataacagggaaacacagaacaggttcatagaataccaagtaat

SEQ ID NO: 67291 - DNA, 2077 bp, Homo sapiens
tatgtatatatatgtatcttgtaggtatacattggaatgattgaagctattgtactgctttagttgtggatccatctaggcaagagtgactttattttctttcattttctgttaactgaccaaatacatattagctttgatatctagaagtattaacatttccacttttcctattcctcagatgaacagtgctttgagacaaatgtcatatggtggaaaatttggttcttcacctctggatcaatcaggattttcaccatcagttcaatcacacagtcatagtttcaatcagtcttcaagctcccagtggcgccaaggtacaccatcatcacagcgtaaagtcagaatgaattcttatccctacctagcagatagacattatagccgggaacagcgttacactgatcatgggtctgaccatcattacagaggaaagagagatgatttcttctatgaagacaggaatcatgatgactggagccatgactatgataacagaagagacagtagtagagatggaaaatggcgctcatctcgacactaacacatgttaaaaggacattgtttttatagggtcattttaggccctttgactaagttgatatggaaatattttgttgaaaaactgtacagagcagctttacaagttgtcacatttctttataaatttttttaaagctacagtttaatacaaaatgaattgcggttttattacattaataacctttcacctcagggttttatgaagaggaaagggttttatgcaaaagaaagtgctacaattcctaatcattttagacactttaggagggggtgaagttgtatgataaagcagatattttaattatttgttatctttttgtattgcaagaaatttcttgctagtgaatcaagaaaacatccaggttgacagtctaaaatggctactggtattttagttaattcaaaaatgaaacttttcagtgattcactttactaacattctatttgagaaggcttattggtaaagtttggggataaaggcattgcttaacttcttatataatttaggtataaattctgtgacatgctcttgagctttaccctagttgaacatacatgtgtagatttacacatactgtttcattctaaaatttagaaattgttcattaaatcccatttgaggtataagtcactcaggaagttaaaatatctctacacgtatatttttacattaaaaatacagtgttagcataaatccccttttcaggaagaacaaaaatgtcagtgcatagttagataaaatggtaaaatgttttactgaaagcatacttttttggaaaatagattcatgaagcctttaagtgctgcttctgtcagtcaaacgttaaaaactttaacattttcaaagtgcccagactgtgtacaaagacacatgtaatggagattgtacaggttgtttttttgtttgaacctttgaaagagtttaatcttaacgttttctaattttaaaattttaaaatcttgtttaacaaaagcttgtattaagatactgttttcatttcattacagaattgtttataaaagttcatttgttgaaaaataaggatcctttttaataccacagcatttgtactgttcctttttaatatactgaaaatataaaaggaagggtgtgtgttatttttttttttttatgtcactgacttcagagacattgtacacaaagaattaacatacttttattcactgattgcctgctgtttagaatatcagttctttaattttgagcatcctgaaatacatcttttgtacatatagagcatgatgtttcacaatcagattttcagtgacccctcgattatagcttggagtactttagttaccctcagtggtctctaggagttaaagtacacttagatttcctgtttataaatgaattcagtttttctgtttctaagtaaatgtagctattcaactactcactatagaattaagataaacaatttgtttgcttaagcattttcacagaatttgtttccaatgagattattatttttgggtatcttatccatatgaaaacttagtaggtttgtag

SEQ ID NO: 67292 - DNA, 1101 bp, Homo sapiens
ctctatgagactgctctcaattcagacatcagccacatgctcagggattcccaggccacccacacttctggccaactggctacaaattcaacagtttccactactttcttaggtttaataacttgctagaaagactcacagaactttggaaaaagctatacttaagattacagatttattaaagcaaaagaaaacacatcaaaaccagccaaaaggggagatgcatagagtgagacccaggcgggtcctgaaggtgaaacttctgtgttcactccctgtcactgtgtattatcagcctggaaccttatccaagctttaatagccagagtttttactggagtttcattacatacgcatcattgaatccttggccatgtgattgaactcagtctctggtcccctccaatcccaatcaatatcagactgataccacatggcataaagccccaaccctataatcatgtggttgacttttctagcatggcctggcctcatcctgaaatatctagggaccctgtagaggtcatctttgtagcataaatgatcagggctcaccaggaataataaagacactcctgtcacttgggaaattccaagaatatagaggttgtctcccaggaaccaggaacagaggccagtcaaatcctggcctttgttggcactggtgtacaacaccaactctaaatggaaactagacagagaaaggaattccgggaaccatagttccacctcagctaagtagacacagtacaaagccactacaacagtatttattatatctgtctcccctacactccaccaagaaaataccttcagcaaactctattagtccattctcatgctgctatgaagagatacgtgagacctaagactgggtaatttataaaggaaagaggtttaattgattcacagtttagcatagctggggaggcctcaggaaacttacaatcatggtagaaggggaagcaaatacattcttcttcacaaggcagcaggagagagaagaatgagagctgagcaaagggagaagcttataaaaccatcagatcatgtgagaactcactatcacaagaacactagcatggggataaccacccccat

SEQ ID NO: 67293 - DNA, 2031 bp, Homo sapiens
aaagatatacatgaaaaaaatgtcatacagagataatcagctcttttccaaccaaccaaagtaagagttcttttttaactgcgcggttacaactaaccaaaactcaggaaataactcctggaagcaaacaaacttagcagtgaaaaacaagcgcgtccagtaacaccagaaaaacacgtggcgggggtggggcatctggtcgcaaccgcaggtgagactctaagtcccatcattcccttcggcagccaagccaggctgttgagggcgagccggcgcaccgtacgctgggacgtgtggtttcagctcgtgcgcctccccgtgggtttgcgacgtttagcgactattgcgcctgcgccagcgccggctgcgagactggggccgtggctgctggtcccgggtgatgctaggcggctccctgggctccaggctgttgcggggtgtaggtgggagtcacggacggttcggggcccgaggtgtccgcgaaggtggcgcagccatggcggcaggggagagcatggctcagcggatggtctgggtggacctggaggtgagtgaggtcggcggggggcttggggaggcgagtgaggtttcgctcgtggaaccgaggagtcgagcccgtcctgggagagcgttgggggtctgggtctcaggtgtggcaggtgagcgcggccggccacgggcggtgcagggcaagtccggaggcaggagtcctgcgggtgttgggcgccgtgctgcgctgtagggcttctttccacaagggaggagtcctccgtgtggcttcttctcctccctacccctccgcccagatgtggacttttcctaacgctctggcgtctctgggcttgggtcactggagtgggggcgggggcagcggctctgttcccagcttcccccaactaaatccttaaaggaccctaggttgttagggccagacgggactccggagatgactcagccttacccctcattccataagtgagaacattgaggcccacagaaaggattcaactcattcaaggtcgtgctgttagtgagagtctgagttgagaccagaacccagttcctatcccttcaggctttccatgcccgaaacaagggctcctcccaccgttgagcctcagtttatatgaagtgaggataataacagtagtttttccattagattgtgaaggtccagtggtgtaattaatgtgaaaactttgtaaactctgcagagacgtggtggtggtagttatccaactcttccaaaactgagtgatgtcagcactcagttttacttactttgcatctgtcccggagtagaatctcagtgcttgacaaatagcaggcccttggtaaatgtttgttgaataaacgaggactcgtgtttagtaccttcagtagttgcccgaggagcattctttctcttctgtttcggctatggattacaagctgactatgtttgagggaattcctgttaaataaacttgggtaaaagaggccagaatgatggctttgtgtgtgttatatatttatttttaattgcagatgacaggattggacattgagaaggaccagattattgagatggcctgtctgataactgactctgatctcaacattttggctgaagtacgtgatgccatgtaatacagtcatactttttaaagggcactggaaatataaccatcattttttccagcttctttatttaaaaaataagaaagttgaggtctatatgggttaaggtaatgtgctaggtcatggtaggggtggtactagaaccaaagtaatccatctcacagcctagtgaaaattaaaaattaaacattattttttaattaaccatgccagaaatttacagaaacataaattctgtcgtttactgagcgcttactgtatgccagctacagtttctgtgtgctttatatgtctttgttcttagttctcacagcaactataagttagttattgttataatgctcatttgatggatgaggacacttgagcatagagatgttgggtaatttgtctgaggtcccagtggctgtt

SEQ ID NO: 67294 - DNA, 1074 bp, Homo sapiens
gctttccctctgaaagtaaggttattcctgttgtttcttggtgactgatggcgtttcccatccacagggtcctaacctgattataaaacaaccagatgagttgctggacagcatgtcagattggtgtaaggagcatcacgggaaggtaacattaccaaataacaggattgctgctttggggatcagtagcaagctttttgctcccacacctgaatccgataccattgttggatggtattttaaaaaggcttagagaagattgcatggcaagcctgggaaactgcttgcttgtttacttttcatctttgggacctctcgagatcatcttctcctgaatgtcctcttttttttctctcctacattcagtctgtcgcgaacgcattgtggattgtcaagtattactcaagtcagtcttttggataaggttagacatcaactttcagagaagggggattgctgctctcctgttaatagttgtttcttcccagaggttaatatccttggactttgaacaccgtcttttttgactgtggacatgctattaacagtcaggatcataactaagttggcttggattcttgaagaaaaaaaaatggtgcaaagatggcagttgcaatttgaacttgagctctaaaaatggtctatttgtggttatatttgcccattttaaaagtgaaatttcatttctggatgcctttgaaaactgactttacatgtgtttttggtggggggctggggattctctcttgcagtctggccttaccaaggcagtgaaggagagtacaattacattgcagcaggcagagtatgaatttctgtcctttgtacgacagcagactcctccagggctctgtccacttgcaggtaaaatccaatcctgtgtatatcttatagtcttccatatgtagtggttcaagagactgcagttccagaaagactagccgagcccatccatgtcttccacttaaccctgctttgggttacacatcttaacttttctgttcaagtttctctgtgtagtttatagcatgagtattgggaaaatgccctgaaacctgacatgagatctgggaa

SEQ ID NO: 67295 - DNA, 1446 bp, Homo sapiens
cctattatttttcccctgtgtcattgactttctaaagagaccaggcctgttctaccaggatttttaaaagggtgacattgccagagggaagttaatgtttctctgaaggtatatgtacgtttgtatatgtaagtcgatgtggtagctaatactgttcttaaacatttataaaaataagttttggcattaagtactagagcatatattgtgtaaatgtttccgccagccaatgtggctgatatctgttttaaaggtctcatttaaaatttagtgtttttagtataagttactttttggggacataaatatgcatatgatttgtttaaaaatttggattgtaaataaaggtttatctacctatgtgattcagttaaatttttagtgttagtggtgtgaattttgtgacactgggagaaagtttgcatatcaggtatgaccttagaaagtaacaaatagatttgtgcattacatcaagcatgtggaatgatagatttgtccttctgttcatgagaggtcatttacaaatttataaggagctaaactgactaagtacttggaaatctgtacttgtaagctaatcacatttacccaaacctgatttagaaatatagaggtgcttttaggaattgtttgaattttaaaaaatcatctccatttcaaatacaacttatgaattttgatatcctgttgtataatactagaaatatagagatgcagtatgcttcgtgtctttctaggaaattcagttcatgaagataagaagtttcttgacaaatacatgccccagttcatgaaacatcttcattatagaataattgatgtgagcactgttaaagaactgtgcaggtaagggctatatttaggatccattaaattacctcatttagcatgttttaattgagaatttgtggaaagtaattggatagagctgtagaactaaggctaccaagtgggttcatatcttcctcatcccattcttgcttgtataggaccttaacttaccctggactggtgagaattgggagcaacaacgtcagacatgttcccagtaaataagccaatgcctggcacaaaataagtgctcaatacattttctggattaactaatattatgtggaagtcttgtgactgggaacatatagatgaaaagctcttaagtactttagaaaatagtggatcgacatatgtgtaaaaaaacgcaccctgaaaatatactctatgatgactcctatagtgaaaatgtgcgtatggactagtgaggtcacaagggaagcagcatctaactgtgctggagcaagaggaatggggagtcagagaaacctttacatagcaaggaaatagctttgaaattgagatgtgaagaagagtggaagtcttgcaggcattttattgaggagagagcattcagagagagcagacagaagtataagaatgtgagggagcagg

SEQ ID NO: 67296 - DNA, 1035 bp, Homo sapiens
aatcttacacactgatgagcttgctcatagaaaatatatagaagaaagagaggagagggtagaagatagaggccccggcaaagaagcaacttgagaatcatgactcaaatgccattttcaatgttaatggattacttgaaggaggtaattgttcagtatatttgagacagcttcctttgagagttccatttctgctgtgtatagacgctggtatccagaagaatatgaatttgcaccaaagaaggctgcttctcataggtaagtttgagttctaccaagcgttttccagtctgacacacacttaactcccaaattcctgactgcttgaaataatgtcccttaactcttttttctcggggaaaagataaagttcaactagcataaacataacattcttttactgttaggaattctggtcaggattccagtgttccattctgagagggttatatagcctttattgctgtttcaaaactcttagatagcttggtttataggaatgatgaaacaatctgtaatctttctagtaatgaaccgtgttaactttcttcccacagaagatatggacttgcagccttttgaaattagaacactttttgtgtgcaattctataatacagttgcctactttgacacttgttatagtttttctgattgtttctcttatgtctgtagccttaggtacaagtagacaaggaatttaaagatcttgtatattcatgtgtcctgtactggttcttttctttttgattttgtagtctttcaggagaaacatgaaacctgatgggaggtttagcagctggcttctaagggtagcatttattaaaccatttactgaacccctatgatgtaccttgcacagttataggcaaatagagaaagaccaatccctaaagagtctggcattcttacattattttattgagtgtatgtagactgtagcacaggcatacaggcctagactaccttatctgacacaactggggtatgttttgatttcagaatttttcagattttagaaaggtgttactacatc

SEQ ID NO: 67297 - DNA, 1307 bp, Homo sapiens
aaactgtgttccatgaactgtttataagtattctacaaatgtggtcgattaagttttagaaatactaaaatttattaattttagaaaattaataaattagaaatataggacagcttccttttgggaattcataatacacattagtatattaaatgctttgcaactttttatttcagtaaaaagtttactctagtttttctaaacttatttgaccgtggaattattttttctccctgtggaacatgtcgccatcttttggaacaatttgggaaactttaatcttctatattttacaaatttttttgtcaaaagtttttaaaaaacaaagcatttaaagaaaattgcttttctgaaatgttctacttttgatgatgctagacagtgacacttacagtaacatccattgttcttaagtcgttttttaaaagttgtacttttaaaatgattttcatctcctggttttggacagttcattcattgtggtatgtttgcttatagggcacttgatgacattagtgaaagcatcaaagagcttcagttttaccgaaataacatcttcaagaaaaaaatagatgaaaagaagaggaaaattatagaaaatggggaaaatgagaagaccgtgagttgatgccagttatcatgctgccactacatcgttatctggaggcaacttctggtggtttttttttctcacgctgatggcttggcagagcaccttcggttaacttgcatctccagattgattactcaagcagacagcacacgaaatactatttttctcctaatatgctgtttccattatgacacagcagctcctttgtaagtaccaggtcatgtccatcccttggtacatatatgcatttgcttttaaaccatttcttttgtttaaataaataaataagtaaataaagctagttctattgaaatgcaaacctttttgtaccatctattctttagtagtttaattattgggaaaagatggctttttcttttttaagtgatatggctaatgtttaaactcttgtaatgcaattaggaatcggttaataagttcatgtcaaacaggaagtgaatatgttttgctttagaataaccgcagataagtttaaagaagcagatttgggctcgttgttagagttattgaattaacagcactggactaggctactctgctacattcaggaaattcaattcagacggattctgtaactaaggtttattgcaagtaataattagggcttatttatatgcacagcagtgactgcttggtttacagaatgtaaatagcttgctgccctagttctaat

SEQ ID NO: 67298 - DNA, 1125 bp, Homo sapiens
aactcttaattcaagttcaggcccctgacatactgagtgactttggcaagttgcttttctaagtctcagtttccatatctgtaaaatgaggttaataacgttacttaatgaattgttagaattaatttaaatgctattcatacagttctgagctcagcacagtgagcatcgtgtaatgatagctaatgaatattgataataaagggtactatgattagttatgaggctggaggcattatcttaaatcagcgttcacttaatgcctatgactgcctacattgtgctgaggactgtagtaaacttcactaatagtgtgaccttgacttggtttagtgtttccaactaaatttggcaaaagggtctttgcccttacttggctttcaggaatgttaaattctaatgtgatgatagataagaaaacactgggcttaagaagggttcgtaggaaccagatactgctattaatgaatgcctcaaggtttcttccacacaactggctggtttattcacctgtttaactgttcaagccagtttaaaaatttttaactcctggtgttactgctttaatgctgtcttctgtatcttaattgtgtagctaattctattgtcctttagtggagcttgtgttgaattttaataaaataactggtagcctgtgagttaagcaaaaccagtctagtgcaggtatatatgaagacatgctggttcagtgattagttcattatttttaagtatttttaagttaaatttaaatttgtagtgctggtatttaggatttcacaggggattcctgaagctatgaagtaatttctgtgaaatgaactgcagtgcaaattggtttaaatagaactacagcttgaaaaatgatcagtatatttgcttagtagagcttgccattctagtgctcttggggggcctctcatttgctggttcgttcggtgcagtaattgtcctgcaagctatgttcttaggatcgtccaggtgtatttccccctattaaactcaaggtgaatgaatcagtacagatgcattttgacttacagtggggttacatcccaacaaacccattgtaagttgaaactattaagtaaaaaatgcatttaataaatttagcctaccaaacat

SEQ ID NO: 67299 - DNA, 1026 bp, Homo sapiens
gttttgcaagttgttaaatgaaagcacttcagaaatattgaaaaaagccttgtagaatctagtttaataagatgatacagtctgttaatgatcagagcataaatgaagatgtcttgttcacgtgtttcacactactgctgactttatacagtctttataggaatgctgcagattctttggttatttgacctttggttttccacttttgatgttctgaagtggttaattgtgacctttagccatgaagcctgatgttcaaacattgcttttctgaggatggatggggagaagggacaggtatgagttttaaaattattttagagtttcagatattatctgaaaattttataaataattttatttgaattaaatcctaaatctagtttaggtttgaataatataggtatgtgtttcctgtggttaataccagtttttgagaaaagcatgacatatgcttttatacactgagttactgaaagacccttggaaatgggatgttatagacaattgatttttaaaaagttctaaagttatatgggagaatggtccatgctttggaaatttcttctttgaaaatatatagcttaaactacttaaataggatagcacacacccaaatttctgcagaattaaattagatattatttgatagaaaatttatgattaggaattcattgttttacttaattcatatttattgaggattttagttagtgttgagtattgttgtaaaacttagggatctagcaaggacttagacatatccctgccctcacagagtttatgttctaatgagcaagctagacaatacataagtaaataaagaattgtgatattaaacagaaagatgttgtggtaaagacaaatgatggcgggtgctgaggaggagaaaggctactttaaaatggatggttagtgcaggtgccttgattaggtgacagtgtagtccaggaacatgggaagaaggctgtaggaggcgcagagaacaatggccttgtggtagcaaataacttagtgtattcttgg

SEQ ID NO: 67300 - DNA, 1056 bp, Homo sapiens
gcactgtatgcattacctcattttactaggtagaaactcttttcatcttcagttgacagatgagaaaactgagggatggaatggttatgtaacttgttcaaagtcacccagataggaggtagagaagtcaggttttgaacccaggttgtctggttctagaatcatacccttaatcattttgctggttctagaagctggacaatttaatatcttacattatctttggttccatcaatagtttttggagcctactgggtacatactgaagtgtgaattctgcagagatagggatgtaataaacctttttctacactgctttccttccagttagatagctgtattgtttttttaaaggaaggataacaatgccttgtgaaaaattttggtgtgttgtgattgaagaatatgaaaaaaagaggaatttcccatattcccttctcccctttgaaatggaaaagaagtttctgaaaggggtaagaattatagcttagactgaggcatactgttgatactggctttgaagtattccatccactggcggatcgtggaatctcccattaggtatatgagttttcctctcaggcattccttcattttgactgtagccaaactacaggagacaggattccatgtgtttctccagacatgcccactggggattgtggatgtcattccaaacttgcatttctctttcattgcaactgtttcttctgccaaagaatcaatgagataggatcttccaaaacatcaaattacccgtcagtatgtattaagagccttctatcctctaagtatcctaagagggggtaaggtggtggtaatggtggaaaaagtattactgaagtattctcttaatggaacagctgtttttttaataaaaatttttctctgatgtgaatttcctaaataatgttcattaatgttcgttataagagtatatgtttcttcccagaaaaaaaatggctttctggaggaaaatttaagtattttccagcttttctatgaaactaaagtcatcaattcttgcataggaatggaagctcaattatcctatca

SEQ ID NO: 67301 - DNA, 1118 bp, Homo sapiens
atatacatatatatacacacacacacacacgtacatatatttgtcattttctcttgatgaattgatctctttattattacataatgaccttctttttctctttttacagtttttgacttaaatccaatttatctgatataagcatagtgactcctgctctcttttggtttccatttgcatggaatatctttttccattacttcactttcagtctatgtgtgtccttaaagctgaagtgaatctcttgcagaaggatagagttaggtcttgtttttttaaaatctactcaaccattctgtctttggggtagggagtaatgaaatataccattttattacagagtctcacaaaaataaaaatagtatctcaaaactcccccaattctgcaggtggaggatggcaggagactagactaccatcctccacctgcagaactgggggaagacagatggcaggcagtgtgagttttttggctcacttgaggccagtgagaaggtatgagaatggaaccaatctaaaaatggctgatgttacttaggagctgaaaagaacagggcaaccttgaagacccagacaccccttttagaaggtgcaataaaggcacctttccaaagctactaagcaggcacttggcatttcaggattttgtcttctgtttgcacaaaagtattcccttcacccagacctggcgccttttatgcttcagagttaagacctgcagagggataggtggcaaggcatttcctagaagagatcacccagcacagctgccctgggctcagggtcttaatttctgtctagtccctggaactatttatatttaataaattttatatgaatacctggagaaatagaagacataaaatctgagggtttgggagagaaagattggggactaggcaggaagccagagcaggggaggttccctcaggccagcttgacctgctccttgacctctttggctcctggcttctcctccttcatttttctcctcttctgtgacatttcttcatctctgagtctctctttttcatcctgttttaatcctcttggcttttttgaagatgggagagatcttgcagccacgctctccctcctcatcagagtcgaagaactct

SEQ ID NO: 67302 - DNA, 1109 bp, Homo sapiens
ttaatatctgcccagataataaagtaggaatcactggtttagatggattaaacctctcttctccaaatgcctttccccccttattttgatatatttaagatatcctggggaagttaatgggtcaggattctggaaagctgttcctctcctaatggcagggaatctagagatccagagaaagtcattcaccctccatacgcaatccatcaaatctatctaacatctatctatctatctgtctgtctgtctatctatctatctatcatctatctatctatctatctatctatctatctatctatctatctatgcttattttaattttaccttctaaatggctctctaccacaaactaccctctccacatttccacctgtagtaattcaggccctcatcaaccctttccaaggctagtgtttctcaaacttgagcgtgcatcagaattacctgcagtactttattacaactccaattgctgagcctcacacccagaatttctgattcaacagttatggggtaaattctcaagaatttggatttctataataacaagctcttgggctaacccaaagccaatggtctacggacattactttgagaaccctgtcctaagttattataatactatctttctgcccttttggtttatcccacctaaatacaaaccctatgctacctgttttattcccctatgtaaaactttcccatgactttctgtcctcaacctacagaaaaagctccctaactggtataaaaatctcctatgagtgtctacattgccagcttcatcttcatctactcttcaccttcttgagttcccaggagtctatttttcatagtctgttatctccctcagataggaatcaagtcaatattattcagtataatatttcgagtgccagcacagtgagcttcgtctcaaggtatcagtcccaatgactatggtgactatgtccagccaaattgaattcactctatcggaatgaaatccatctgggggaaggtaggccctttcagagccagagccacagaaaccttcaaaagggatagagaaagccctttctaagattgagaagaattgcctgaatctcaggaaatgagtttttggg

SEQ ID NO: 67303 - DNA, 1057 bp, Homo sapiens
ctgtaggccagaagtctagaggtcaaaatgtcagcagggctattgccttgtcttttccatattctagaggctgcccatatttcttggctccaggccccattctccatcttcaaagccatcatcatggcatcttcaaatctctttctttctccgctttcatcatcacgttgccttctctgactctaacccccctgccattttgtaaagaccctcatgattacatagggcctgcctggataatttaggatgatctccccacctcatgatcaagtgaccaagatttggtcactgattcaaagtcccttttgccaagtaaggtcacatatttgcaggttccagggattaggatatggacattttggggggtcattattcagcttgccacaatgactgttgtagcaggctttcccgactgaaatatttaagcttttaaatctcatccctccaccagaaagccctaacctccttttctgctttaattttccctaatggcacttagcagctaaaaatttgtctgtccagcccattaaaaatgagggtaggtaggttttgtcacttttgtttactgatatatcactgaactaatatatctgtgtatagatatattcagtgtctaaaggaatactaggacacattaggaactcactaaatgtctgttgaattagtgtaaaatacatctcataaataataacatggtggaatgagactcaccactggaatcaaccaacgaatggtgtattgtagaagtagtacaaccgtttgccaatattttgttctctcctttttggcacatagaagctgcacgttctgctcctttgcagttggctgggaccacatagctaattctggccattgaaatgtgaccataagtaatgtatatcaagtttgatatgaggcaataaaaagcccatgcatgcttcttcggtctctatcccctgctgaagcaactagggagtggtcatttcagatagtatagatacagaatggcaggacctttgacagcctgagtccctgagtgactatgcaaaacaggaccttcactccacaccccccaccc

SEQ ID NO: 67304 - DNA, 1060 bp, Homo sapiens
acccagactcatcagttggtaacattttgccacatttgctttatctttctttatgtaatgtatgtagaggcgcacacacagaagcctctctttccttttttttttttttaaagaaaactatttgaaagtaagtaacagacatcatgtcaattcactctgagaatttcagcatgtatctttaagaacaaagactctttcctttagaactgtaatactactatcatgcccaaataatttaatattaacacaataactttatcttgcatacagttctatattaaaatattcccaactgtccttaaatttacatctagctatccccaaacccccatttatgatctcagcaaggatcacatgatgcatttgatacatatatgtaaagaaggaaagcagtaaggtagggtgggaagagttcgagtagcctgattctaatgagctatatttgcaccatgaggaaacaggagttactaggtataaagtgacctacttgcttggagagcagggacctttccctgagattactggtaaatatgacatggtggtgatgatgacgttgatgatgaaaagcaagatgaatggtgcatagcatcaaacgaaaaaatgacacttttcagatgttaatggactgataaagaaaaattagaaatatgatttggcaatgtaaaaagtaatgctaattagactcttcataccctaccaaaaatgtttaattaccatgcattaaataatcaatcattaaatcaatgtgaaattaatttgttctaagttctctacacatacatgctcaatttgcaagtagcatggtcaactcctcccaactttaattaattagagctggcactggtgatggaatatttatttatggaccaggtgcaattaaagaggaatgggctaggttcactctagaaatgctaaggggaatttaagatatgaatgcttgagacacctagaatctcagagccagatgtgacttttgtgatcatttatttcagttgatccctttatatcatggggatctgaaagttataatgtgaggtcatgtgctattctcagtatttca

SEQ ID NO: 67305 - DNA, 1035 bp, Homo sapiens
ccccccaaatcaggtatacacagatgaaagtaggaatgaatatcaagagtgagggaatgatcaatagtgccatactgcagagatcaaggataatggagtggagagctaaaatggttgtaggtatacctcagagatattgtggattttgttccagaccatcccaataaaacaaaaaaatcacaataaagcaacttacacttttttttggtttcccagtatatacaaaagttatgtttataccatactgtagtctattaaatgtgcaacagcattatatctaagaaatgtatgtatcttagttgaaaaatacttcattgctgaaaaatatcaacacagaaacttggagtgagcacgtgctgttggaaaaatggcacctgtagacttgctacacacagtattgacacaaatttttattttgtaaaaaacacaatatctgcaaagtgcaatgaagtgaagtgccataaaaaaagtatgtctgtatttgttggaaacaaatgtcagcttgtatgaaaaatgagattgggatgtcagaggtggagacattagcaaaggccatcagcttaaagagttcaccaggaaacaggaagagaggaaattaggagttataataggatcaaagataggactttctgagatacagagattggaacacatggagagaaggaggctgaagttgtaaaagatggaggaatgaggtacaccttgtggaagaaaaatcccagaaggagcaggggtccagagttcacgtgaagcagttatctttaaatgagagaaaagaaacctctttctttgaaaataatggaaaaaagtccactcagacacaaagcttttatgaggtgagaacgaggtacattagatgttcacaaagatggctttaaactcccactgatctgaaatggccacgtagcatgagtgagatagaaacttttgatggtttaagttactgatattttcagattgttattgcatcataacttagcccatcctgactgaatacaaggagaaagttgcctcctgaggttagtatagaaggga

SEQ ID NO: 67306 - DNA, 1036 bp, Homo sapiens
gtttgagttcatatttttatacatgtgctttatatatctttttaatggacaaataaaaagttatatatagttatggtataaacatggtatttcaatatacgtataccaagggagtactaaatggaatggctaaaccaagctaattaacatatgcattacctcacatagctattttttgtggtaagaaaacttaaaatctactctcttagcaatcttcaagtatacaatgtattgttgttaaccatagtcaccatgatgtacaatagatcttttgaacttatttttcctgtctgtcaagttaatattttgttcattgacccagagttgattcatggcttaattgatttagcatagaagaaagcatttcttattggcaaagactgagggaaaatgagaggccttgctctgtctatttggcatgattttgaacaccacctacttgctaggcactttacaaggaaccagtggtgtaaaaatagaaggtccctgccctcaaggagatgacaatcgaaggaagtgacaggcaagaaaagttctaatttaatatgatgattcgtgatgcagaaatccacacaatgtactatggaaacacaagaaggggtgataaagagctcaccctaaagaaggtcaggcaaagcttcacagacaatggacctgaaccagagcctgcagaggcatctttcccaaagccaggcattccaggcaaagggaagaacaaagtcagagggacacgagaggcagcacatggcagtttccggggaccagtgggccagtgtctccaaaacaaatatgaaattgggaatgcaagtatcctcatccatatctttaggaagaaacccatgcctctaactggagagatactggtggtccttcttgctgggaatatgaacaggattttctctgggggccgtctccccagagatgatgttcggctgctcctttgggccacaggcgtgtgcccttcctccagcagtgtctgcaatggtcccaggcccatgtccagcctgaggctccacttggctcctctgaccatggc

SEQ ID NO: 67307 - DNA, 1058 bp, Homo sapiens
caaccccaatgatttaattcctcatagaggatgatgaatgaaaagcttcgagacctggcacaaagctgggcttggtgcaggaccaagattgctaaaatgtctgcctgacttgtccccatggttgaggagcagggaggactcctgggtgcacttctggccctgactgctgctcaggccaccagagactatggacagacatgtcaaattccagacattctgggaaattggggatagcgaaaatctgggttttgtgctgataaaacctcgtgattgggagtatgagttttagaatcagaggcacctggaattgtagcttgtaatcttcagcaaggtgtgtaacttctccttctataaaatggggatgaaatacctatcttagagtgctaagtaaatgatagctgttattatgagtatagtgtgcgtcttcccaaatgtacctttggcttcttacagaaggacaactgtagggtctgacattagggtttatttaggaactatgctaaccagagagagaaacaggaaatggaaagagaatgtgtctattgacccttgtttggaattgtaatcctttctggggtcttgtcctccttattgcttagctgagccctattaggccctatactcctgagtcaagatgagctttaatgccagagggggctcttcagagacagcgaggggcaagatatcttgacacagggagcagcagggcttattgtaagtgcgtaagtcccctggtggggaagttgaggagcttgtgcatatctgactcagagaagtccttgagttcattgtagggaattccctgcatggccttctctgaattcgtccatcagcaaacatttgagtacagcagcatgcctgccaggtggctccgggcagaggaatacaaagatgaacaagatgcaacccctgcttttgagggcttgacccagaggggagtaatgaaacagatgagtaaattaatagcaaggatgtcatgtgaggagagtaataatggagataagtggagcgagtgtgtcatgggaaaaaggagagggatgcctggctttaccaaggcc

SEQ ID NO: 67308 - DNA, 1056 bp, Homo sapiens
cctcccgggttcatgacattctcctgcctcagcctcccgagtagctgtgactacaggcgcccaccaccatgcccggctaattttttgtattttgtttagtagagacagggtttcaccgtgttagccagatggtctcgatctcctgacctcgtgatccgcccgcctcggcctcccaaagtgctgggattacaggcgtgagccaccgcgcctgacatctttacttcttcatcccaggctgctggcaccaagtgtgaatttcttctcccactgctgtttctccagttcacccttggtggcaactcatctgctgttcccatctttgcttcaattttactttcaccctaccttatccattctttcattcatactagctttggtaacgtgcttcctctccccagggtctgatcttgactcaatctctgcttttgtttctccactgccatatcagcactgatatcttgaaagggcatgacctgctattctgcctgaattacaactaccagtccagaggcacagagatctctgtacgcaccctgtgactaggtaaggggccaggagacaactgtggtggaataccacttctactggctttccataactcctgggtggcccggcttcctcatggcagcttccccagaggggtcttatttcaactaaaagaatagtttgggcatatacagaacatggacctttatcttccacaaccaccaacagcaaagcattttaaagagtctgtaagaacacatgggaaccctgttaatagcccaaggttcaattccacccttctctcaccctttttttttttttcaaacggaatcattctgttgtcaactttggtgagagttagctgtgtttgactgaagcagtaatttgacaagaggtgtcttcgctgtcactcaaattgtggaatagagctcttagcatatgcagggtttgttctctctgccacctccatctcctctttgtgaaactctctctgccttccccttggagatacgcctccttaaagattaagaggaaaaaaaaaaacacccaatcctagaggtcaggagggca

SEQ ID NO: 67309 - DNA, 1025 bp, Homo sapiens
ataagagggttttcagctcaacataaagaggtgctttttaaaatcacagctgtgcaaaggtgaagcaggatatgctaagaggttgtaagttcctttttaccgcagacattcaagcagaagctttagaaccaatagtaagtggtgtcaatgcagggtagtggttagagcatagactttgttttctaagctataaaatgagaataataatatctacctcacagaactgatgtcaggactaaatgagataacatacgtaaagtgtttagcagaatcaattaatggcagctcttgttattttgaaataattgatataagaggatttgcacaccaaatgggggaagcatcaagttagatgtttttgaagcctctcccaaatccaactgtctataattgtaagataatgagtacttactggtgaacttggatttatagaaatggtatatcatctgtggatggctggtatcacatggcttctacttcccttgaggattacagtgatcattttggccccagagcagcagtaagagaagaatcaccagaaagacactagatctagaagagctgatttgtagctgggagcagagagttattaaaagataaatacaggcaggaaattagaaattaagtttaccaagtcaaaaatgtaaagtcaggaatagatggggggtcagagtccagactagtaagacacagattaaagggcatatagaaataagagtttgcaggaggccaaatgtaaaacccaaggagacagctctgatggagtcatcagcaatcattatgataaaaattttaatacggggcaagaactgcttcaccaagggctgaatgacacattccctggtggaacggggctctgagtacccctttttaaatctgccaaaggcacccctatggggagggggcccatggaactttacaaagccattatatcccaatcctgtacctgcatatggagctgctcagcacgtatcttagttatttctttttttcttttttttgagacggagtctcactcagtcgcc

SEQ ID NO: 67310 - DNA, 2001 bp, Homo sapiens
atgcaaaaagcttttatgttatttttatttgcttcctacaataaactggggctcagaaagcttgagaatctgcccagcaaacagattggacagaacaaggcatcaaagatggtgtatcttttaaatccaagtcctatgtcctttctcctacaacaccacagtttcccatggctgataggggaattctaggtactgaataggagtgtgagagagctgttttgggatagggtggatctacctggtaccaggcaaatcataccatataagcaacttcctcctctacccacggtgaacctatccctggggagaagttatggccttagccccttttgaaaattcattagtgaattccagggtttggtcctaggctggctgagcagacttaggtgctatcattgcagtctttcaccctaagttgaatgtaagacatgcacaggtgcatggtggccagagatagatagaacaatttgccagcaagggcaccatcctaactggaaaagagtggtttccctcaggggttgtgttgaatgccaactgatgagtggacatgaactcatgtcctggcagggtggagtctctccaggatgtgaatgctattatcagaataccaaagcaaggatgggcaacagggactaaacagacggggagagatgaataaagagttaatccaaagttggaaactgggtatcatgcattcaaggaccaaatgaagttgtataggcaggatcctattgtgttaggattattttggaaagttgaaaccccataaccctgaaagagatctgttttgagccaagccttggagagctgactgggaaaccagttgaggaatagggaagctgaatgcaggagggtagccaatccctactgaaaaatgaatcccatctctgaaattcctagagtctttccctgtgctcatctgcaaagtctagatccagccttccttcacatcccttctccaaccacttgcaaactgggaaggctttctcttgcttccttcacctcccaggattgtcaatatacagaggcgtgctatttatctctgtcactcagccttctcctaccttagggcaaaaactaccattgattacagacctacccaattaaagcttcagaacacttaagttagcaattattattagccacaaaatgctggaaattgttttttaggcatcatcttgttgtttactctgacaggttcccattgagctttctctgaactattctgtgagttggaaggatagttccaaagcagttaatttgcctcctgagctttcatggttcacagctgagaatgagttactcctcaggatggggttggggggggcgggggtgcaattcatccatccccttgcctgaaggaagactatgattatgtaaactaagaaggcagaagacttgggaagaatagaacacaaagatcccctaatttaaagattccccatgagtgggaatttcctattctatgataggaacatttggaggtcaaattcctccctgcagtagtagctgcatacagaacagacagattgcacctacagcacagcctttactgtggtccctgcagccaaacttctatgtttcatctgatacctgtttatttttcaagcctggttctccagcttggattctgcaagtctgatagctttgcaataaagataagatagtctagttggtttctattgcttcttgcctggtgtggtaggtacacattcacacccagtatactgagcactcaggacatgccacaagatgatctggaagtgaaggggcacctaattcatcatgattgggccaactaaatgtccccagaggccacactaagctgaatcttgaaaaatattattgcaatatgaacaagcagggggaagggtgcttcatctagaatgagagccaagaagtgaaagagaatatggtctgatgaagcaactgaaaagtttttggtaactgctgagcatagagttcacaggagaagtggctggaaatgaggctggggaagtg

SEQ ID NO: 67311 - DNA, 1048 bp, Homo sapiens
tgggtttctctcatttgcaaataaaggagatcgcaagagctacaaaatagtttcttataatttcacatactaatcagtaattgtcatagtttagaacttaatagattataaagttgtgttgaatgctgtaacagtagcaacaacagcagcaacaatgatacttgtttattgagcatttactacattctagacacaagatttttgcattagtcagatttaatccccacagaaatcctgtgaggtgggtatctttatcttcttttaaacagtgttataaacagaccaagagagattacacaatttgtccaagattacacagtaagtaaaattggtgggctttgaacttgaacttgggagttctgattccaatgtcagtatttattcatgacatcacactatctctggaaagtaaatataatgctagaatatgaaagataaatatttaacaaattcaacactctacttcttactaggtacgaggtttgcagatatcttgctagatagaaacttcactgctaacaacaacagcataaaatacgactcaaaaggcactttacaggaaaagcaaaaaaaatcagtttaacaaacagtttgaataatcaaagaatgtcaagagtctaaccttcgctactaccttacattttattgtagcgtagctttagaagaaacaaaaatatctgctcaagcatctcacagtgatgttgagacattataaaggcattttgagtaagaaaaattatatcatgtgcatgtgaggtttaattatttttagattggttaaccccttattcccagagacaaatgtcagctcatccaagaagcttgcaattttgggggtaaagatgctgtttgttctgtactgctgtgaactaataagaattgttcccataagtaggaccaatgaaaataattttaaacctacgaacatttggaagaatgttggaaagaaatagaaggatctaggcacaattgcattggatccaaatagccggaagtcacagaccaagaagcttgtgttatatttccttagaaacactacctagaaaga

SEQ ID NO: 67312 - DNA, 1048 bp, Homo sapiens
ggagaacccagagtggcaaagaaagacggcagcactccaatggcactgtagaccctgagtgttgttgtccctgaggtcagacccactcttgccaaatctgggttgtttattgggctaatgaattgccttttattccaggatcgtcctcttctaaatgacgtttaaatcttggcatccccaaggttcagtcccaagccattttcttgtctttatctattcactctcttggtgatctcatctagtctcatggttttaaataccacttatgttgatggcttgtaaatttataagtgtagcccttacctctacacccatagatctggctgcctgatcaacaatgcctctccgctgtctggtagtcattttgatctgacttgtccaacacaacactcatccctctcctctcctctctgcccctaccccctaacctgggctttcccatctcagtaaatagtaccaccaattgcatatttcatggttcagtccagaaacctgactcgtccctattttgcacctccaacatccaatctatcaccaaatcctgctggtttttcctctaaaataaatctcccatctgcctactccttttcttctccttttcttcacatcctggtctatcacaacagcttcctaactggtctccttgcttttactcttgacaacctataacatattctccaactccacgcagcacatagggcactcttttaagaatctgaatgagttaatgccattcccatgcttaactttctacaattgcttttacaataattaataaaatccaggcttcttatcatggtctacaagactctatgatctgtcccctgtccatctctccaactcatcttcttccttcattaagtcttctttccttgaaactgtcaaatttgctgtctgccttaaggccttgcatttgctcatctctgcccagaatgtttgcacaactggtttcttttcatcattccaatgcctcagagaagacttctctctcccctaaatctaagttatctctgattctttagtaacaatctatatactaggttaagta

SEQ ID NO: 67313 - DNA, 1049 bp, Homo sapiens
ctgcccaaaattagttaggagtaccaaaaaactcaccaaattttggacaaacgataagggagaagggaagtgaacttacattaataggtacatacatgcctagcctacagtaacggtgttttgtagacaagtaaatgaaggctaagtgatttgcctaaggttaattgctgctaataatggatgggcctggatgggcatgcatatttttctgctctaaagcccatgcactttgcaatataccctccggtagagggatcactcatatgaaggggacctaagctagacccatcccacaacatttccacccccttcatcaaaccattgaaaccattgaaatgctcataaggtcaaggagcttggggcataattttgttcttgctgaaccccacttgatcttacctgggtggctttcaatgtttacaagaatcagaaaaactgaagttagagatgacctagggatctaaaatgggcagagaggctcagggaaggaacatgtcaacaagttctgactgatatgtcttatgtgcctggtcctgtgcagtaggctgcacatggagagaggtacagtcaaagatagagtgagactcaggaacagcgtaaggttctctttgcacattttgttaattgtgcaagctgcaagtttaatctttatattaaatttctgaaatatgcacagcataaaaacagccctatcgtaatggcttcatgtggatttttgcttagtaaagcaatggttcccaatgtttttcttctttctaatgctaaaaataccttgaaatctcccacatcaaagtagtttttctctaagtatcgattcatcaagaaaccatgtaatgacaaaaagccatactttaaaatgtgttttattcattgcaacatttgtagcatttgacagataattgcacatagtatgtatgagatacattatcagtggaggccggagactgtgcaaggtgcacctgaagatgaactcccccagacatgccccatcccacatgcatgcatgcacataaatgaacatgcacagatgagaaagccactgagctggt

SEQ ID NO: 67314 - DNA, 1608 bp, Homo sapiens
tcctttttacctgctttgctaccttgtgcaatctacttgacctctctgtgccttttcctcaactctgaaatgtggaaaatactactacttatctgttaagtttgttgtgaagattagatgaggtaacatatgtgaagtatttaggcaatacttggcacatggtcttggcacatggtaagtactcagtggtagttatgatgacacatccacaagaccaaaccacagaaattactgtgctaggctctcagggcacagatacgaaagctgagaaatccagtttcaaatcctaacctttgcctacaagttctgtaactgcaagacaggttcttagcttccctgagcatcaatgcctccggttttacatccgtaaaatgaaggttgaatttgtgattcctgaaggcttttctcaaactctattttaataagtctgtggatatttaggagaccaggcacaagaagcaaatgttagctatgctcaaatgctgcctttgtgtgcccttttcccactgtctatatcttattccttatctctatttccccttctcctcttcactcttccttatataatgtctaatctgtgatctctctctctctctatgtgtcacacacatgcacacactgaggcactcacatgcacacacacggcttcttttcttcttatcacctcgttaaatttctttcctttcaggctctgcctctgatgcacctctcagtttttcaggaaagctcagggttaaggggcctgggcagggtggaggcagaaagggctgtgcccctgctccatcggttacctgcaaagctgaggaagctgcagaggcttaggttttattagatctatatatgccctggctttccgtgggctgagcttccctgatgcagtgaaaactatgtgggcttcacaagtagtcagggcactggagaaaaaatgaaaaaggattttttttacctttttaataaatgacaaagaaggaagagaatattaataaacttcagacccctccccttctcatttctcgcccggtacagaacctgtgcacccacatggaggggccaccccacacatgtggcctccccctgtggtctaaccagcaacctgacccatagaagaagctttgagatgctgcctaggaactgtttgagggttgttccttctgcagaagatctcttgctgtctctttttcttgtgctgctgtttctctccagcttgttctctgtttctgactctttctctctccctcgccctctctccaccacccctctctcattgctttcccaaccttcacggagaggctccaattaaagcagaaatggcagtttggctcctgagctgatatctctgttgctgcagaagctttctcaattgacagaaatctttggctttcttacctctttatgtgctatgttttgggggtgggggaatcccgcagccccactaaacccttcctgttctccccctctccctctccttccccagcccctgttcatgcaggacagcaggatgcttagacaggagggcatttgcaatccccctcagctcctccacagcatcctgctcctgcctcggtggaagtgccttctgcattgcatttcaattaggttctgaaggaa

SEQ ID NO: 67315 - DNA, 1048 bp, Homo sapiens
gtggatcacgaggtcaggagattgagaccatcctggctatcacggtgaaaccccgtctctactaaaaatacaaaaaaaaaatagccgggcgtggtggcgggcgcctgcagtcccagctactcgggaggctgaggcaggagaatggcgtgaaccctggaggtggagcttgcagtgagccgggattgcgccactgcactccagcctgggggacagagcgagacactctctcaaaaagaaaaaagaaagaaagaaaagaaaccagcaaagtaaccaactgctgcccagggtgttacaggaacaccctactgggctttgtcatgccccacctcaatccagctccaggctctgctgagtctgtgctcctcacggacccccaaactttggaggcaggtagggcaaatggaggctcctagtgtcacaacagagagtgaggttttgtaacccttgccaggccaaggttggggtggggaggtacaacgcgctgccaccgcaggcagaagagttgtgcttttccctgggagctgggctgtgggcccagccaggtgctgccgagcgggagggctgctcacactccaagagccaggccggcaattccagaaggcaaaacttcagtgtattccaattttccaaaatagaaggaataaaacaaatcagagcagatgttccaacatgtaattatcaactaatcagtttggactttttttaaaaaagggaaatttcaaaatagctcccagatttcatcaactgcagccctggtggagactggccgggttggaaaggagttactgaagagagctgcaggtgcccaggtggtgggggaggggagatgggggtggggtgacggggcacaggtgcttctagtgctgggactgctgctgctgctgctgctgctgctgctgctgctgctgggttcagcaaggagggagcagctctaggctgcaggtgccaggttgaggcagctgggcctcaagacaagcagcttccctcctagaaacactgtgagctgggatgagtcatctcccggcctcattctgccccagatcttgtc

SEQ ID NO: 67316 - DNA, 1694 bp, Homo sapiens
caatgggaactgagagatggaagggtggctttgagagagttttcaatgtagaatgtggtttctgggaatagagaacagtttaaagaaatctgagattttatagtttagttactgagtaagttttaacagtgataactactaggagattaaagaaagagcttgaggtgcctgtgagtcattcaggtcgaaatgtcttgtaattaattaaatgcacctgtgagtgtagaattgcggcgagaagggagacctggagttgtcagagtgttgatgacagtggcccccagggaaagtgagacatgtaagaagagggcttggggtgggctctcagggttcatcacttcatgcctcaaaggaaacactaaaatctgtgttggaaagccctggacttggattctgatctagcatctgcttctaacagactcatctaggctaagtcattaaccccagtgtcctcatctgtaaaagctgaaggagaggatctgcatgctttcttctagcattgacatccaggagcctgtgatttcatctgcataagcagagtattgcaaaattgcaaagtctagcccatctcccagtgggtgagatctcccagctggtgtgaaggaggccctagtggccccatgaagccacgctgcttggggctcttctctcatggcttttctcacacctacatgtggcgcactgctcaggaaaggctttcctgtggctccccagcctctacttctctgctccattctgccctccaccccaggttttattactcagtgagtgatgtgtgcctggaaacactttctttatgatttattaataaaaagcaagaagggagaaatggaagaaacacaaggtaagagaccaggattgtatctaagtaaaacacttttcaaagtgtcaaaaggtctttggggaaataggaaaaataaatgagtcaaagtgtgaagtgagtgaaaggcaggaaactttggcttcaggaaataagtccccagcaacagcaatttgaacaaacaaaacaaagcaaaatctgacaaaatgaaaactaacaataatcatcatcatattcctcattgttgtcactctcaccataacagctgatatattattctgaggatagattgatctgaaaatgaccaagtcataagaataatgggacaaggtcaatgaaggaggtccaggcagagtagatggtcagggctggctacgcttgtccctgggccccagcaaatggtggccctgagtcccatggggctgggggacatctccatggatggaggcaatatcccagatcaggctttcttacagaatccaaggtcttcaggatctccaaacctttcctagaattgtctgctttttattgagaaggaggaggtagccaccaagattgcaaatctatatgccctgtgggtgaaattggggacagatggggcagagaaggctgcacactttgcaaatctttgaggttcattgtgagatatgaaaagcagaggcaacctcctagaggccttccaaagatcactgcacgttagtgatggctcttagggctgaaccttcagagaaggttttagtgagaagaaaacaatgctgctctcttattctgtgccccccctttctgaaggtcctctatttcaggaagtttcccattttgtcccaccaccccattgccctggcgtttaggacattggccagcctggagggtattt

SEQ ID NO: 67317 - DNA, 1075 bp, Homo sapiens
attcatcttcactccattaacttgaaatgttatctttatcatacaccaaattattatatgtatttgagtctatttctaggttttcttgtttgttttattagtgggtcaatttagtacaaagggtgggctattgattcattttgctatattgctctttagaaaggtgctatcagtttatactcacattaacagtgtatgagtatattgcccctccacacccttgacaacacttaacctcatcacatcttaaatcttttatcattttggaaaatgaaaagtataatttaattgatttttgtttgcatctttattactatcaaggctgaagttttgtgtgtgtgtatgtgtgtgtgtgtgtgtgtttggtttattgaacacttatgtctctttttttgtaaattagatgtttgtatctttggcccgtatatctaaggagacatttaactttttcttgatgctaagagttttctttaatctttcccagaggttctgttgatgtcaagaactatattagaaaagcaggctggatggaggagatcattctaaaatgtattttcaatagtgtgtctaaaagtggagagccttttaaataatgaggggaaggagataggttataacaatactaactatgaactgaatgtctgtgtctccccagaattcatatgttgctgcctaatccccagtgtggtagtattgggaggtggggccttttggaagtgattattatgagggattagtgtcctgtaagaacagatactagagagcttgcttcctctctttgatctcccccacatgaaaacacatcaagaagaatgtcacctgcaaaccaggaaagcagtccctcaccagaatctgaccatgctggcaccctgatctaggacttcccagcctccagaactatgagaaataaatgtctgttgcttaagcaacccagtcaatggtattctgttatagctgccagaactaagacaatgtctaattttgggaaccacttatatgccagtacttttcaagtttctgttcattgtttcatcagaatcaccttacaaggtagggattatcattatcactgttt

SEQ ID NO: 67318 - DNA, 1025 bp, Homo sapiens
tgggtactctgaatggaaaaatatgttggtttgtgattgcaacatccttatgggcagtctaatccataattcaatgaaaaactagctatggagtatctttaatctgtaaaagctttcatttactcagcatttattaagcatctaccatgtgcactgcaatgtggtagatactagagaaaagtgataagaaataaatcagacatggtctctgacagacactaaagtaatttacagtatggtggatacacacaaacaatatacagaagtggaaacagatgggaatgttaatataaagatgatcaatttcaagttttcaaaaggaattataatttctgtagtatacaggggcttcctctattttaaaacaacatttttttccttaaaaacaaataaaatatatgtttatctgtcaaaatgtggaaaaatagaaaattccccctaatctcatcagccacaaataatcactattgatggtgatacttggatatctcatatgaatcttaagcattacaagcttataactgaattttatttctacatatacataaacacttaacataagtgtgcacacacacacaaacaaccctgaatcaaacccacaccatctgctctatcctcatatcatggcagcctctcaatggcaccatcattcaaatggttgtttaacacaaaaactgggagttattgtgaatgactccatctccttatctaacatccaattatccacaagtcctttctattctaatctacaaaatataactaaacctacctattttgctccctcttcactgccacaacccagctcaaaccaacctgctcgcctagattactcaatactctttcattaagcctaccgatttcactcttgcctcctccactccattctccatatcataatttttaaaaagtaaattggataaaatcattcttctgtgtaataccttcagtggtttccagctgtacttaaaatcaacttctttttctgatgataaggcaggctacattgtttggatgatcctcatgtt

SEQ ID NO: 67319 - DNA, 1008 bp, Homo sapiens
tgaaatcccgtctctaccaaaaatacaaaaattagcctggcacggtgacgtgcacctgtaatcccagctaatctggaggctgaggcacaagaattgcttgatcccaggaggtggaggttgcagtgagccgagatcatgccactgcactcctgcctgggtgacaaagtgagattccatctcaaaaagaaaagaaaagaaaacaaaacaaaaaacaattcaccctctttcgtccctccttcctcgccctaccccactgcctacacacctaagagagactacatgtctctgaacatcatgcagttctattctgaaaggtcagtcccactgagggtatcctaacatcaaattatctcaagagatgataacagagatcagcaaactttttctgtgaaaggccacatgtaaatttttgggcttgggacagccatacaggctatgcaggtgtaggtgtgaaaacagctatagacaatatgtaaacctataggccaaaaatccccctttatttaccaaaacaaggggtgggcagaacttagcccactggctgtcagtttgcccaccctggtttatagacttacagagaagagaactgaacacaaattataacatcaacccttgcccctcctttgaagttacaccttctagtaaggcaataagaatgcttttcctttcttcctcttccttctttcctttcttcctttttctctctcttccttcttttttttccttttaacttccagtctttcttcctccttttgttattttcctttttcttcttcttcttttcttttttacttctagtctttcttgctttctacatctctttcttccatcctcccagcaaatatttactgagcacctacttcacagcctctgccctgagctctgctgactcctccccactgtaagctctaagcactttgtttctagcggtgctccggggagcgaagagggaagggatgggtttggggggaggtgaaaaagggagtacaatccacaaaaaaggggggt

SEQ ID NO: 67320 - DNA, 2790 bp, Homo sapiens
gataagaaacctgcttaaattcacttcagtgataactaccaggaggccccgagtcaagatctgtgtgactggaagtctgatagagacatgtgcgtgattactgattaatacatatttatattgttatttttctgaagtcatgtttatattaacatcataattgggtggaatatatgaattaatctcaagattctcagttatctctgcttgacaaggaacttattcttttgagcatttgttatccattcacctcatggtaactacgttggactggaagcatactgtctcagagggatcgaccctactacagtatgggaaggagtctaaatctggcaaaatgaaagtattttcaaaacatctatgtttacacacagcatatgtaaattaccttggtacccaatcaaaagggaattgccattaataagggggtgattcctcacacgattattattactgtcattaattttttaatcataatttttaagacattgattatcagccagggggattttgtcccccaggggacacttggcaatgtctggagacattagttgttgcaactgggagggaggatgctattgcatctagtggggtaaatgtcggggatgctactaaacattctacaatgcacagcacagtccccccaacaatgcagaattattgggccctacatctcaagggtgctgaggttgaaaaatgctattttaacagtttgtggtaaaagaaggtgctccttaggggtctcactgctaaatataaggtttcactgcttttctccaggcctctgacacttagtaaaatttttcatgatctccaaactagtgactactctctcagtactgatgataattgataatgatggttaatagtttttgagttcttacctcgtgctaggcattgttctaagcgcttttcatatattgactcaatcctcactgttagtaatgtgccattattattcacattgtacaaatgactcttttagtaatgtgccattattattctcattgtacaaatgaggaaactaaggcacagacagtttgagaaacatacccaaggctacaaaactagtgtggggcagaggcaggatgctaccgtgctttcattcctttctccttcctccagcagtggaccagtctgattacctgggtacatatcctgaggaacaatgcaatgggtgggagtcatactcccattgaacagatggggaattggaggcattaatcggaggaggaaacagggacattgcccatgggtatcaggcaaaaccactttcatggagtgctcagccatggttgtttccaattcacatgttgaacatggatttttttcccaataagtcttgtctgagagaatgatgtacctagtagagtttgaataactctagtagtgccacatgaatactgctggctggataaaaggatgcatgcacgcatggatggatggatagatggctgaatactgagccactggaagggttcaaggaatggtgcattggtgcattatggcagaggggctttattcctaatactacaaccatgatcaacaattccatgttcttaaaggtgacagcaaagctgggagcctgcagagctggaaaaagccagagaccagagatagaaacaaaacctacagtttgcccgaagccaagtatcatagaacatgtgggcccttatttgtcacagcctggaagtaactcgcctttaacgtgtttgtattttcgttgtccttctaaaccagggtttctcaacctcagcactactgggatttatgatctgataattctgtgtttgggggctttcctgtgtattctaggatgtttggctgtctccctggcttctgcccactgaattctgatagcacccaccctaccccaagccatagcaatcaaaaatgtctccagaccctttaaaatgtctcctagagggccaaaattacccacaattgagaaaaattttgtatacctagttcctacaggacagagtttgggtttcctcaccttattgtctattgtagagcttggcgcagttatttaaacttcataaatgtctgtggaccaatagattgcttatctcctttggcagggaaaaagtcaaattccagggagaaaatgcagaaaacaataatgaagggaaagagaaaggaaggaaagaagagagggagggagggaagcagggagaaggaaggctacttgtaaataacagcgatgctccacccatgaccccttcatgtgctggtggctcagcagcagatatgaagaaactctccaactcagcaaggagcttcaggtgacttcacctcatgaaccagaaaactcacactgtttttgtattcacgttgtttaaaggggaccagggttgtctttttgcgtgcatggatgtgtgtgtgtgtgcgaaagtataattacccatcactgattaatcttcagactgagtcaagcattcattgcaaatccttgaaacaaacaagtctatttatattttaattatttttttggatttcaagttgatttgtctttcttctgcatatttatgaagctgttgatccatggtaaccttacccttacctcctgtggaacaggaggaagagaaagaaaaagacagagaaagaaacacaaagagctggctttaccccttttcttcccttcccttccccagaagccatagcattcccacagctctagaggacagtgaggacaatacaagaacaaaggcagtttttttcaattaaggtgtaattaattaattaggaccccctgcccatggctgtcattcttatttaaggtgacct

SEQ ID NO: 67321 - DNA, 1404 bp, Homo sapiens
accaggatcagtggataggatgacaggcagattttatatcagcgtaaagactttcctaacactagaaatgactaagataaaatggacagttgtaagaagtgaatttcccatcactggagattttaaagcaatgactgaatgtctacttgataagaatgttgtagagaaaaatcgtgcattgaacaggaagaagcagagggtggagagtggcaggaagacatggatctttctggtccctcccaagcccaggagtctatgaatgctttatgttactttaggtccagtgggaaaatggcagcatctatttatagagctattgatgtcaacagtgatttctgccagaggtgtgagtctttgtaaatggtgcaagctttggggtgaataaatggacaattcagtggagaggacccatggatcagaatgaagatgagcagaaggtaattaaatgagacatgtatcagtaggagggttgccaagtgtaactaagttaaactttgattgtgattggaaggtgaggagaacatgacttctatgctttcctctggggttgttcgaaataaggaaatatggtggaatggggaggataggacaagagtctgtgagtcaacaaaactctgctcaggaaggaatatcagagcttgcttggagtgactgtgttcttaagttcattaacagaacaaaaaaatcaaaagtgatgctggcgctgattgaaataagcagatggttaaaaccacctgtgggagaacctacttttgccaagtcaagaaacagcagcacccactcaagcagagcctgagaaacagagtaggctggtgtatttgtttcccagggctattgcaacaaagtccacaaactgcatggcttacagtaacagaaatttattatctcacagtttgggaggccagaagtctgagatcaaggtgttggcagggccatgctccctatgcaggctccagaaaaagaacccttccttctctctttggtggccaccagcaatccttgctgtcctttggcttgtagctgcaacactccagctcttcacatgccctccctcttcacatggccctctcccacatgtctgttgcttcacatgactccaaagaaggaaccagtcactagatgcagtgcccaccctcatgcagtatgacctcattttaactaattacatctgcaaaaactctatttctgaggaaggtcacattctgaggttctgtgtggacatgcatgttggggagacactattcaacccagtacaattaggagccccaaattttgtgaaatagcacctgaaaccagttgaaaatagaaaagggcaccaatctgtgtccacgttattcttattttaaaaattttgacttaccatttttctcattttagcaacaactatagctaatacttactatt

SEQ ID NO: 67322 - DNA, 1014 bp, Homo sapiens
tcattcttggcttctgtatctctgacggctgatcgtgggacttctttgccttacggaatgtaaaccagatcatccaagccctcatctgctagcctggttcttgaaaagatctcgtggatgacagatacctctgatacaatccttagaagaagtgagctgcaacacagctcaggatgtatttttgtagttgtttcaagaggacaggtgtgttggtgtatattcagagtgtgaaagtgtgattcctggaaggctcaggtcaaggatttagtctccccattagtttgctgtattccattcttctgaatgcagcccctgtaccagccacacatttcataaaggcctcttgtatgtcagaaaagggactggacaagagaaacagcacgattcacttagcagatgcctccctactcctaacaactgagtttatttgtgtgtttaacagatatttattttgtacatagactgtgaagaaaacaacgacaacaacaaaatagtccctgtcttcccaggaactctgaaccttacttaactacagaaagatcaacacaaacacgcaaggaacagttaagtaagaaaagaaggcagaatgtgataaaaacgtcaaagtgagggagacagatggcaagcatgataggaggagtttgcagaagaaggaaatgaatgtgaggtagatgtgcacagaacagtttgggaaaggctttagggaaaacggaattggaactagtcttgaaaaatcagtcaaagcattcagattgggagagtggaaatggaatgcattcattatggaaggaaaagaatgatcaaagcttggaattttaattatgaataaaatctagaaaacaaacgaatagcaccattgggaagttaggttactaaatcgtacattcaaggtacaaaatattgcagagagataatcgtacctacaacagtcttcctttgggtttaaggccattgatcatcggtcaaataaatatgagctgaaaaatagtgatagatgacaatgtatggtaattg

SEQ ID NO: 67323 - DNA, 1059 bp, Homo sapiens
gcttcatttgttttaaggaaagagggatctatgatcctttgctgtcaattcatcagttgacatttttagacacttgctatatatcactgaggaatttctccttcaatcactcaactcaattcaaaatgtagagacatgatgaacacctactatccatcaataaaataggtattcacttcctactatgtgctaggttctgaggagtacaaaagatatgtcagtcatataactgacattggaaaatgaacataaatgaaagacatataactatttctttccctccccttcctgagggagaattattcttttcttcctccattgaagtcagactttgccttgtgactttggccaatgaaaggtaagggaaagtgatgtgtgtcacttccaggcagaaactctaggagcccgtacttgcttcaccatagcctcttttccctttactgtgatgactggcaatgttacagtaacagctcctttgtcagcctagtttctgcagtacagcaacgtgaagttgactcctaactgtgctaggaaagacgtgtcgtgaaagtgagaaagaaccctgtgcttttgtaagatgtaatgtctgagcttacttgttaccatagcataacttagcctaatctgacttctacacgatggctctagaaagctagcatttattgagtatatcctgagcattgaatatatcctgagcattgtgctgtgggctttatatgcattatttcattgaactctcgtaaaaacaccatgaggtatatattatatgatttctattttataggtgttgaactgaatcccagagctaagttcagactgttatttagtgttgaagttgaatttcagaatctggtttgcttggatccagagctcataagcttaactactatgccatactgccttatatagtagaatgaatataattgaagatcatttttggaatagactgtaagttctctgggcagtttagaagaggagtgatcaataaccattaaaacttcttgggaagagctttatggaaaaagtaagagttgaaaaatgtgtaggttatagatagga

SEQ ID NO: 67324 - DNA, 1089 bp, Homo sapiens
gacttgtaatggaaagtaagttataagtacatttaaatagtgagatattttgctacaggcttgcattggaaagaggcatgtagctttcaaaagcagacagtctgtatcaaaagcagcttgtaaaagagctagttgctaaagggattcaattcaaattttggcttacacataattcagtgaaaatattgataagaatgaaagaagaacgctaagaagaaaggaaggaaagagtgagttcgtaaataggttggcatccttttacttcaggaagctctttgatgtgcctcctgcccaccccctaccccatctccaaaccagtagcattaagtgacttgagcactttcattcccatttgggattctgccctatggaaaacggagaaggtaaattatgagtaggggacttgaaaggagatagctttttcccgctggaaatttctttctagtgctgagacaggaaaaacttggtagttaggttgtgtgagatgtctgagcactgctgactgaaggaaaactcttgagaagcaaaagattctccgaatagaggcttaatctgctgttggcataagaaagactccagggacattaatatctggtgcagtcacagagtcacagaagcactggagccataaatatgccccaggaaggaattttgactctaagtttcaggattgagagtgatttgaaagaaatgtactcaaggttagggagaaaaccagggagacataatcgataataatgaataattagagactcaaaatttcctgggggattaggtttcattttctttaaagacttgtgtctttggactatcaacacctcctttgacatttatttaaggaatcatattttcaggagcaagaagctgtatctactgggtgcccagatgcccagtccacatgtttatccctgaaatatctagaaggcattgtgccctaattgctggccagcacccagaggaaataaagagtttcatttgtgctggatttgtggatctaaatggaaagatggtggaaacatcatacattttgtagaaaatcaagtaaaaaattactgtaaaagaaaatattaaggcaaatacggacttgga

SEQ ID NO: 67325 - DNA, 1051 bp, Homo sapiens
gttagcatttgcaagtgaccatgcaagacctcacttttccccaagctttattccttccctggggtatctacctggaagggaaaaaaagatatgatctgttgtccctaaataaggcctgtctgggaagtctctgggggtgccttttgtgttgagaccagaggtctttcctatggtccagccagtacctctgagcagagagaagtaggggagctagatctcatcaccccaggctacaaggcagaagcttctgaggaagacagtgtccacgtctggtaagatgatgagatggggcctgtttgcagtcctaggcaggctctttccacagcctgaaactctgcagttgattttgcctatgttggcatctgtttgtagctttcaccagtgagatgcgccctgtttgcagtcctaggcaggctctttccacagcctgaagctctgcgttgattttgcctatgttggcatctgtttgtagctttcaccagtaatgtctgtcaatggactcattatcatcaaggataagagattaagaaattatgaatgtgtagacacttttgtttgcatctaatggtttctgtatttaatggtttattttattgatgacaactgtcctcatgtgcactttataaagtacaaattggacttgtagttactcttatttgaagtttctcacctctattatctttgacttttaaccacccctaatgaggataatagtcattgttcagataaatagatgatagatatagatagatagatagatagatagatagatagatagatagatagatagagatagataaaaagaaagaaataataaggtctccaaggtagcaagggctttggaaattatgtctattaaaggagctcatgatgtgtagcctggaaaagagagtttaagtgggacatgatagctgtcaagattagaattacattcttttatttttttcttctcacttttgtcaagtctctactgttttataaaatctttcattttaggctcagggataatgtgcgggtttgttttataggtaaacttgtgtcatgggggttt

SEQ ID NO: 67326 - DNA, 3615 bp, Homo sapiens
cggtggttcaaataaatgagctgaggtgacaacagaagcatcatcagggccctaattcatttattggctaattgctcttccttgctttggtctttaacaatgtacgtgcacatatctggtcattggtcattggtgtttactgtttatacgttagtcagcccctctccagctttctgcatttttagctcccactcacgtcttcttctgctgacatcctctggtcataatcactgctctaatgtctcatttgctgaattatatcgcagcggttcagttggagtggtgcctttggaacccccggatccccctttgtctcacccaccccgctctcttcttccaattgttttttcccctctgctgcctgcacaccacttcggctgatgatggccataaagcaagttgccatctctgtaccactttacacagaggccatcagacagtcacggtgctttaccccttcatctttcaggtacatacttcactcatgaagccaaaggagccgatgacgcagcagacgcagacacagctataatcaatgcagaaggaggacagaacaactccgaagaaaagaaagagtacttcatctagatcagcctttttgtttcaatgaggtgtccaactggccctatttagatgataaagagacagtgatattggaacttgcgagaaattcgtgtgtttttttatgaatgggtggaaaggtgtgagactgggaaggcttgggatttgctgtgtaaaaaaaaaaaaaatgttctttggaaagtacactctgctgtttgacacctcttttttcgtttgtttgtttgtttaatttttatttcttcctaccaagtcaaacttggatacttggatttagtttcagtagattgcagaaaattctgtgccttgttttttgtttgtttgttgcgttcctttcttttccccctttgtgcacatttatttcctccctctaccccaatttcggattttttccaaaatctcccattttggaatttgcctgctgggattccttagactcttttccttcccttttctgttctagttttttacttttgtttatttttatggtaactgctttctgttccaaattcagtttcataaaaggagaaccagcacagcttagatttcatagttcagaatttagtgtatccataatgcattcttctctgttgtcgtaaagatttgggtgaacaaacaatgaaaactctttgctgctgcccatgtttcaaatacttagagcagtgaagactagaaaattagactgtgattcagaaaatgttctgtttgctgtggaactacattactgtacagggttatctgcaagtgaggtgtgtcacaatgagattgaatttcactgtctttaattctgtatctgtagacggctcagtatagataccctacgctgtccagaaaggtttggggcagaaaggactcctcctttttccatgccctaaacagacctgacaggtgaggtctgttccttttatataagtggacaaattttgagttgccacaggaggggaagtagggaggggggaaatacagttctgctctggttgtttctgttccaaatgattccatccacctttcccaatcggccttacttctcactaatttgtaggaaaaagcaagttcgtctgttgtgcgaatgactgaatgggacagagttgatttttttttttttttcctttgtgcttagttaggaaggcagtaggatgtggcctgcatgtactgtatattacagatatttgtcatgctgggatttccaactcgaatctgtgtgaaactttcattccttcagatttggcttgacaaaggcaggaggtacaaaagaagggctggtattgttctcacactggtctgctgtcgctctcagttctcgataggtcagagcagaggtggaaaaacagcatgtacggattttcagttacttaatcaaaactcaaatgtgagtgtttttatctttttacctttcatacactagccttggcctctttcctcagccttaagaaccatctgccaaaaattactgatcctcgcatgatggcagccatagtgcatagctactaaaatcagtgaccttgaacatatcttagatggggagcctcgggaaaaggtagaggagtcacgttaccatttacatgttttaaagaaagaagtgtggggattttcactgaaacgtctaggaaatctagaagtagtcctgaaggacagaaactaaactcttaccatatgtttggtaagactccagactccagctaacagtccctatggaaagatggcatcaaaaaagatagatctatatatatatataaatatatattctattacattttcagtgagtaattttggattttgcaaggtgcatttttactattgttacattatgtggaaaacttatgctgatttatttaagggggaaaaagtgtcaactctttgttatttgaaaacatgtttatttttcttgtctttattttaacctttgatagaaccattgcaatatgggggccttttgggaacggactggtatgtaaaagaaaatccattatcgagcagcattttatttacccctcccctatccctaggcacttaaccaagacaaaaagccacaatgaacatccctttttcaatgaattttataatctgcagctctattccgagcccttagcacccattccgaccatagtataatcatatcaaagggtgagaatcatttagcatgttgttgaaaggttttttttcagttgttctttttagaaaaaaagaaaaacaaaaacaaaaacaaaaaaaaaaaatcacaccattgctcacagaattggcatctcatttttgggacctcccatctttctgttttgaaaagtgtacagtagtgcagtgttcctgatgtaactttatggcttacaatgttgacatgtctcaggttcatgtgttgcgattggtgttttccgtctcaggtagattgcaaagtgtaggccccacacattggaaaaaataataataaaacaaagcaaaaacaggaaattatggattttagttgtatattggtttatgtattttttcttaagtatacagtgcactgtttgaaatgtattgttgagtattactttgtacaggttgatcactttttttagagtgaagaaagaacaaacttgttttttgtgttttttaaaggaatataaaataatgaaggatgtataattgatgccaaataagcttgttctttagtcacaccgacgtcttatttttccctttaggccagttctgtttttaaggtgtacatggacaatgttacagtgtaagaaactccatatccatatgttcccattcgcattttgtattggttcatgtataccatttttacaaaaaaaaaaagaaaaaaaagaagtactataaaatatctgtcttcttaataaaaaaaaattaatgttacaaagtgatcctttaatctctttatggacttcttatggacgcctccgagtgagagaagagatgggcctctggtcccagcttcctccttaggaccatgtacggggccaggaacgctggcagtagatgctaggacatgctgccggctgggttgctgggggccgcgctctctctccttctccgctcatc

SEQ ID NO: 67327 - DNA, 1055 bp, Homo sapiens
gcatcttgcacggctgcttcatgtcatgagtgaggcacagcccgcaggtgcaggcagctcaccccggccctgctgccttgagccaatccatggcattataaacactcccccaccctccccacacgtggaaataaaagaacggactgagatgactccagaaacagctctgcttttcatagggaaggccaagacagaggcactcagtgaacaggcacaactctattaacacctcccacgtaaacccaggaggtgggagtgggggtgggaagaggcggtgaggcgctcgtaaccggcagtgttccctgtaaattaaacatcagttaccttctgtgtccatctgcagtaattgaaggcaggagaaatgtcttggtgattaactggtggtagtaaactttctgatcaaagtgggtatcagaagatagctggagagattacccttataaataagtatctgtaaaatatgtatgtccttgagggtggggaagataactagaacatctaaggttctagtttaatttgggcaaagtgcagggaaaaatagcaacactgagcatatttagctcaaagttcatggagggcaaaggtcaagtaaggagtttcggctcaagaaattaatctcacagatacatatacctcgtgagatctttttgtttgagggaggtttttgtttttctttgtcacagagcctctctctgtctctcccctcccccctcccccctcaggcttccagaatattcctgtgtctaggcatggagaggaggcggtcttttattaagagtggacaagatagtgtcttcccctagatgggttagaactgtcctggacagcttctcgaagcttctctctgttctcagtcttcctggaacctctcttcacctcttgcctcttgtgcctaactttcccctgtcctcaatgtctagtctcacttgttttcctcccccaattttaaaacatacagagttcatcgaaagacacataaattttaataggtctgaagctcatggccattggagatgagttaattctcattcccccaagattccctattttgacag

SEQ ID NO: 67328 - DNA, 1059 bp, Homo sapiens
atcactcttgggagtttctttgagatttctctgtcccgcaatttctaagatgctaaagcgagcccagggttgttgaagctgtgacccaagcagtagtggccaacttaacattctgcaagcagctggtaaactctcacctggagccaagttgtttcagctttttgccaaaagaaaagctaactcacgaatactaaacacctcatgatttatctgtcacacttagagccatggaagtggctgcgggatgggacacgacaggcagggagggttgtaccacaactgtgagctgtcaggaacacctccctgcaactgctgcctgcccgccctgaagccctcgactacagagtccaaggtcagtctttttgccaaaaggacaccaagctttctacctctgaggaggagtgaagggtgacacagcgatacacaataacctttacagggttcatctgcaagtcagaatcattcaaggactaggcctaattcacctgaggtcacatgtgaaataatttggatgagattcttaactccagttgaactgtgttatgcaatcatgcttggttcactgaggctggaataacctttatgctggaaccattcaccaagcaaaaacatggctttacttttcaggatgatggggcagggcttagtcccagaaaagaaacactcttacacttgttactagtaagaggaacacttgtagcctcttagggaacaagaaaacatggctttctaaaccgaagtgatgtccatatgcctgagcatcaggcatgtttaaaagtgctttccactcccacatttatttttcaattgacaagctaggggcagctgtagaatctgcctctggtttcgttgcctgcccgattcagaaaatgagccgggaatctgaagagaatgtccccaggaaagccagcacttcatgggacctgaagaaggggtctgcaccctgcaggaccaggatctgtggctcatggggaaacccatagctttcccacttagaagtcatttctcatggaattggttagagtccttgccttgggaatggaaggaaaggtcaagcag

SEQ ID NO: 67329 - DNA, 1050 bp, Homo sapiens
gaatttgagaggggaaaaaatcaacaagaaaaaacccaaaacacttgttttcatatttagctacaatagtatttaatatcctgatactcaaatggtacacccgaatcgaaacctgaatcagacggccttcacctgccaggcccacagccttgaccttcataaaggacagctaagccattagttacacagtttgtcaattctgtataaatgaaaagaacttggtgacttcaactcagtaagtgtttattgggcatcttaccatgtgtgggcaatgctgagtatgcagtaccacgcttacccctaacgaactggtaattatttgccttgggtcggtgataagaactggaaaagccctccttaggctctaatacaggagatttgaatttggcaaacaccaggtccctatgatactccaagccctgagccaaataggcactttcatttggctcaggaaatgaaaacagtggcctctcaaagtgaccctgtgaagtacgtaattgtactcagtggctcagagtgcctcattgacctgcctgaagtcacagagaaaagtaatgaagctcaagttctgtcccagaaatgacagcaagtccagtgctctttccaatggaccatgcaggagatgagctcctagctcgtcccctgttcaggcctgtttctggaaagcaatgtagccagtgatagtctaagagagccctgagtcctgatcatttgagtagtgacaaggtacagccaaaatctgtgtgcagtacttctaatttaaatgaacacatactgagctctgggtggcaccatgaggatgatcactgcagttttcctttaagtagcttaacatagctcctttgaaacgttagtatagatgcagttacattgctagaattgaatgcagctgacgtgtagtagtagatgcctgggatgctatatgggagtcttcatgattttcttgctttacgtttattccttctcgtccactttctaagaagacagaaaagaaaggttatgctgcataaaggctagtgtgctccaatatatattaacatcttaatggga

SEQ ID NO: 67330 - DNA, 1027 bp, Homo sapiens
tagagtaataacaacaataatgataataaaacattaaaaaccagatgagctgtatagatatatttaagttatagcccataaatctaaagtgtggcatgatatggcttgtatctgtatcatactttgtaacttagaaagctctttcacacatattacttcgtttgatctttattcattcaacaaaattatttgagatccttgtgctgggctctgggctgggcaccagggatgctgcagtgaacaagaccaacaggagctggagctgccatggcgtccaggagccagggcccctgctctcctaccgcgacaccctactgagggagacagacccaaaacacgagttaatcttggacagtgacaaatgctgtgaaacaataaaaccggataaagtggaagtgagggctggggctggaagaaggtggaggtcagtttagaaaagtttaccagggaaggccattgggacaggaagacccagatagatgagaatgagccagataatagaagattttcatgaaaatctcctgagattgttaaggaagggctcttggtctccatttataaatgaggaaactgggacccaaacggctaaacggtttgcttaggagacagtgagaagcgaagcatgggtcttcctggctctagaggaaatagaggactttggtttgcaggggccacctttccccctatgaaatccacagcttcctgtgtgctggagcctttggtaatcctcttgacccttttcaattcactgtgcgcacccggggaatgagggaaaagtcaggctctctgcagcccatcaggcatagagcaatgtgctgactaacctgggaagattttttttcccagcatcaaatcaagctctttctcctcaaagaagacctaaactctgcttcagtagtttagtactgttgtcccactgattcccctaaattatgggatcagtttcccctgggaggtgaccctaagtgccatgggaaagtgatggctggaaaaggttaaaccacatcaattcccttttaaaactgag

SEQ ID NO: 67331 - DNA, 1050 bp, Homo sapiens
aaagggacaaatctgactagagaagtatgagcaaactgctgtgcaacttaaaagacctaagcagttagtcacactggactttgagcagaacagcaaagaacaagtaaagccacattgaatgtctaacattttgtgttattaaataaacttcattaaaggatcagctcacaaataaagcaaaaggaaatggaaaccatctcctatctgagcctcccattgtttatctacttccctcttcaccccttttaattcaaatcagagctagctgagaagcatctcagctggccagcattggaattgactcggatataggcatttcaagccccgatttgattacctcctgacctaactgctttttcagctttgagggttttatttttcaggaataccattgatttatgaaattctcttttttaaaaaaatcattttgcgaatcagattttctgatgaaggcataacctgcaatctgcagttagcagatgctgtaccattttgaaatatgtgatccaagatcatcataaattgataatgaactgtgtttgtcagtattggcagcggatttcaatttacagtaaaatgcgaaataaaatgtacatacatcagtatgtaacatctaaatacatttttatttaagagatatcagagcatcgacagctaacaatcaggctttattgattttctttttgcatgctgttacgaatgagtgattttaagcattcaccttcatgtttcatgtcctttgaacagtggagactgaggaatctttctgcctcgattgcgtattaagaacaaaattacataattgaagaaatgtacttatggattaatacattcatgctatcaaaaacatagatagcaagagatttggctcatgtttttaaagaaattcatcctcagttcttaagtgttttgtttatgtccctcgaggaatgaaaagaaaaacgatttgtttttacttgtaaggccttactcagttgcccaattccgcagaagaactggacagtgaggacctctcaggtaagggctagtcattaggtaaggcactgcagt

SEQ ID NO: 67332 - DNA, 1061 bp, Homo sapiens
acatctctctgtatgagcacataacaatggcattcaaaggctgtcattcagtcacgggactctgcagacattgtacgttctacacaagagcaaagctcaagaggtttacgaatggctgcaggacctgaagattgtgtttcagccttgatatgcagtttggaaacaatgtgctactgtctaacggcgtgaaccaaatttctgctaatgggaagaagggaaaactctccacaaaagctgacaaagcaggaagaacaggatgactgagtttttagattaaaactcccgggggcgtctgaactcatggctggtggtggaagtaagagtttccataatatggccaagtgatcagatgtatgctgcttaggtaagagagagaccatcgcctactttgtttttcataatgggaatggtactagggccggtgggctaagtttttgttttctggaggttttattcgatcattctatttcaaaattttctggaaaaaaaaaatgataccctgaaaaactgagcccataagcatttaaatcgtatttgaccttgaattgatttaatatctctagaatttcttactgtttctaattttttgaggtttttcttaccctggttttaaatggccacattgtatcacttttagaagccagcaattactgttgaaaaggaagaatcacaacggcaaaagcattacctgagcgggcttagggtatgttatagcacattgtagcaccatgaaaaagttaaatactcatctctgcagaagagatggctatcatgcatatattaaattaccatgtttgcatctttaggactttattaattgctcaaaaataatcccatatggacaaaaagtaaactttcatttgtttaacaaagtttaaagacatatgttgaatacattttaattagcagtgactagaaagaggccttaatggatgatatgaaagtttcaagagaatacacaagaagtaatttcccacttattgttagagtgaagtctccttttgaagaatgttctctgcttcataaaatacgtctttgtctttttctttgagaaaatgaaa

SEQ ID NO: 67333 - DNA, 1050 bp, Homo sapiens
tgtcggggaaaaacttccaggtcagttgtcaggatagaaaaggtaatagaacgtggtggaaattacaaagcaacatctgagatttccaaagagatgatgatacagaactgattttattctaatgaattgtagctgaaaacccaacttcttcattacagcaaccatttgacttagattcatttgagaataatctcgagatgtttgttgtggtgatctgggcctagaaatgttgaaaggtttgataacttagcaacttaaatgacaagacattaagtcaatcagctatgggcatcttatttggtcttaaaagttttcatactggatttccttctatatttctgtgtttttataaaaaggaaaagaaaaaataaaaatttttaaagctttccctttgaagactcattaaaatattttattcaagcttgttttgctagagtatgtatgaagtttataccagttgtttatgtatgttgaccatttgttcttaccaatatctgattggaataagcatgtattggaaggttagaagtgcatgggcatgattcaaaatcaagtggattttctccaaaaagaaagccaaacaacaatcagccacaatgtgcttttaaggatttaactgatagtaaagataaatgtgagtgttaagaatgggatttttagactaggctgacacaagggatcttctttgaataaggatcttgagcatttgtgtttttggagctcatccttaaggcctggacaggaagaatcctgtgttatgtgtgcatgttgagcaatgcaaaaaacactctgccaaatcctgataccacatggtctgagaaatgcatgagtgatttaacgcacggatggtgtagtcattatgttcttgatgtgtgggtgcgtgtgatggttttcgtttgttcatatgtgggcgcttctgtgtcttgtgccttgttccttctgccctgtgtgtcccctctccccttccccaccctcctccccaatgtgaggggtcgggtgacagcatgcccatggtctggaatagtgcttgtgcttttgctgcactgcagt

SEQ ID NO: 67334 - DNA, 1041 bp, Homo sapiens
cctgtctattcatctacaggcatctgagcataagcagtaaaaggatcctaaaagtgtgattgagtcagtgatgcctaattggcagtcaagaagcccaagtgcccgggtgggttgggttaaaacaaaggcaatgtttgaatgttatgaatccattgtttaaccagcctttcgactgagcttttctgtcgcagtcctgagccttgatgctttaagagccatctaccagccactgagtttgcactggtgtttctcatcactttgcatgtccacctgactattgactagcaaatatatgtgtcctggcaagacccccagaaccaaagaatttactgttttcctcactggctcgcagctttgagctcaaggcatgtcttaaaacagtgcaactcacttcaaatgctttttgcttttcatttattattgcttgtcacgcgatgttctttgaaagcttgctcatatattatctgttccattttttttccattttccctttttttgcatgccgttcctcctgtttcttcccttcctccaatcctctgttcccgtctgtagacacaacggcgacgacagaaccagcagttcacggttggtatcacattactgtttatctactttctcagcactgctgagaggcaaggcaagcctgggaaaaagagaaatgtagtcttcaagggaaatcatgtttcaagtagactgacctcataaatatactataattttttaaggtttgaaaagatgtcgagtcttgtcatttctgttgtgagttcagtacccaatggatgcaagctgagatgagaccttctccccactgggtggctggaattgtaggagtttcagtggcacagagtcctccttacaaaactccaccaaaccttgaaatacatggggcttcaaacaaacgagtattcgcaggaaaattgtaacatctgaattaaaggcccagttgctttgtttatatataggccatagtcccaggtaaatcttgaagaggagtcatttgtgtcacttagtaaagttgagatggaagggtagaccagggaa

SEQ ID NO: 67335 - DNA, 1436 bp, Homo sapiens
cattcagcatttatggaatattcatcaagtgttattgatatgccagtatacctagtgacaagaatattttgggggcactagtaaatactcatgagccaccttttacataataagccaccttttcaagtttttactccaaaaagtatgtgtccatttttcttcatactgtcttaagtgtctacatttttttttcctgataattgtaaacctgttacaaataacaacatagctaaccagcttttgacctatattgatttaggagggaatgagaaaagacttgaatactacagtgatggaggccacctgaccccatattttttaaaaaatgaatgagaaatgtgatgctagtggaaaagtttttaatgcctctatcataatttcaataactttatgctctttattttaaaaataatcttggagataaagatatgacatgttttcatactaaagacctaatcaacaatgcaaacaaataatactgtgaatacaggtttcccagaattaaaaagtgatgtttacagctatcttggtagtgaaaaataaaagacttgactggaaggacccagccctcccatatctaacacaaaatttgccaagacttaaaaatgtgctacaacttacagagagcctctttcctgtctccatcactaccctcgtggcaacatcctcttcttttccttccctcccctctgccttcctcttttctgtacccccttccactgagcattcacacacaacatgatataggaattgtttttcttgttaaatgaaaccactatacagattcctattattttgcagaacatctggtttgcaaatgaaaagatctcaggggcacaacagcactagtgaacaattctgaagaagcttttaacaaaacttgaaattgcttatccaaaaaaaaaaatcatcccccgttgctgctgttctgtagcacacaatctcttcactcacaggggaggtgactttaacaaggaagagagctttatcctgtctctcctattttggccttttagttttcattctgttcctatccacttctcccatccctaagacaggggagtttgattaaaacataacatagatggaaagaaaattagccaggaaaccaggagaaaataaattccagagtttaattttccagcagttatttttgttttcgatcgagttcaaataacatgaaagagaagaaaaaaaaaaaacccaccatatatttaatatatattggccagcacagcacaactatgaaaataaaattgtcaggggaattccttgcctgccctagtgtctagatttaaagcacctccataacacaaactgaaggggaattcaattaagaaaacccattggcttcttattgactttagttaagaaaataaactgggagaaagtgtattaaaatatgtctaactgcttagtatgctttcatttaggct

SEQ ID NO: 67336 - DNA, 1096 bp, Homo sapiens
agcactcgctgaactcctccccctcacaatcaatctcagcaactcagcagagtcgcttcagttcacagctcttaatccttcactccagactaaagctaatcttatgtcctcaaacagctacaactcactgttatcacagttccgactgcagagactccatttaagaggaaatttaaaaaataaacaatgctctatttctgtccacatcaaaggtacctctaacagaaacttgtctttgcttctgtctctctgctactggactctcagctcaaggtaatgtaagatgatctcatagatgcactttagcctcttgatgttagcagttgagtcctccctgcgcacaaaatacatttgtggtaatgaatgcccagaatctcactggcacacccaagagtagttaaactaaaattgctactaacacaacattgtagaattcgttgccttaatggatgtgatcttctaggcttactgtgtcttaacaagcagtcttatatatatttatcttgcccagaaagtacacttgtagaatttaacatttgctcctttctccaaacagattaaaggttatgcagctgaatgattctgtgtcccattttaaaggtccaggctatcccctagatttagattagttcctaaaaaatcttccagtctgaatcctgacaaatggatagctaaattaatttccactcctcttctctcttgcactgtttggtacattacagccaccattagccttaaaagctgcagcagccaaattcggtgacagtaacataaagcctgagcttaaaaaaaaaaaaaaaaaaaaaaaaaaaaaaagaagtccacagtcatctatttcttttctgccagtcaaatgcaataactgaaacccattccctaggtcagggtttcattacaagaaaaatgtacacatgcaatagaaaaatatttttaaactcgagaagtcatagttgatttctgatttctctgaaaggaagtgttccagtgttatcttttatcttccgtaaccaggataatcaaattgttccccttgttaggaaggcagactgacattctgttctgagtcgcctgacttccttgaaacatgttaaagctt

SEQ ID NO: 67337 - DNA, 1037 bp, Homo sapiens
aagctgaaacgaaatgacaaccattgtaccctcttggtactgagttgatttaacctcacctttgaaatctggtagggaagaggggtgtcgtatgttttgatttttcctcccctctcttcacatctcctcatccctaattcacttcattaatgaaaattctcttttcttcttttctcagctcttccaactaaggctttgggatataattacaagacataaatcttgcagggaaagaacttttggttttaaagggggaagccatcaaacaaacatctcaatgtcctcatgcctttgttttgtcattactggtcattgttgtgttcagcattgtgggtttgattttcctttttttttctatccagatccccccacaactatccctcctcccacaacaaccaccaccaccaccaccaccaccaccaccaccatccttaccatcatcacaggtatggtatcttcattaccattgaaaatgtcctgaatgtatattgtctttctggtatgtataaaaagaagccgaaaagttccctttaaatccttggaatttaatcgttcctttattttggaactccaacgacattagatactatgttcttaagttgaatcttaaggacctcagaaacatcccagcatttaacagtacgtcagatattttgcagcttatgcataaaagaattcttttttaagcatcactattgaaagcaaaatgctagggaaaatggcagctggctactagagaacacgcctatagcttctgcttagacatgtttgatgaaatggtaagtactgtggctttcaatcttgtctctgtcttagtttcatctcagtccatgtaagggaaaatatacacacctaacttcaatgtgcctatttgggccatgctactaaatgcatagtcatccttcctgctccagagagtacccgctgacaagtgatactacctgtttgtgttgcctaggtagtcacaagagatcagagggagtcactgtcttttccatgctgagcactcatgtgcccctccctgccctcggtcacat

SEQ ID NO: 67338 - DNA, 1834 bp, Homo sapiens
tgtgttttagaaccaaaatactttggctctaaagtccacaacaaagtatgtctttctttgtatattctcttattctcactgctttccagtagaacaatccccttcaatatgagatgatccttttagaattaactgtctgggccagagtgcattatctgaaaaccaagaaatatagggatccacctgttaaaggcagacacagctacatacacatgtctccctaatccaagatggtacacctatccttgtctagggatttgctagatctgtaatatactacctatctcccctaatcagtcctagtaacaatacttgggatgacagattagaatattagcctaaggtattactagtctactaacaaaatactctagcagtttgggaaggtgttgagtagattttctttccaaagctgatttgttgtattactaccataattttggaagtattttatgaactaaaagttagcaagcccccataaagtttaactctctagaagcaacttctacacatgaagaatctagctggttagtgcctgagccccaactgattttattcttttagcctctacatgtcaagcacagctcattaactccaactctgtactttcttaagtggtggcctcacattgctcttattgctagaaatgatctaagcactgaagttattttacctgttaaaggaatctaattctttcaggtcactttagccagatgtgaaggacaacagttgccccagtcgtgataaagataattgaaagtgtgtgatttgcacaaaatgggagggactgatgacctttctctgaagtctgtgtcttcattagtctggtccaccccttggttcataatcatattttcaaatcaccttcagatctactcttattgtattgtggacatcacacactttatgtcaacacttttagaataggtgcagaaataggattataggctgggcgtggtggctcacgcctgtaatctcagcactttgggaggccgaggtgggtggatcacaaggtcaggagtttgagaccagcctggccaatatggtgaaaccccgtctctactaaaaaaaaaaaaaaaatacaaaaattagctgggtgtggtggcgcatgcctgtagtcccagctactcgggaggctgaggcagaagaattgcttgaacccgggaagcggagattgcagtgagctgagatcatgccactgcactccagcctgggcgacaaagcaagactccgtctaaaaaaaaaaaaaaaaaaaaaaagaaataggattatagtatatcaggggaaatctcccaggaacaaatgttccttttcagtagtagatatagtaattgaagcaaaacagaaaaatcacattaactgaccctgtgctgggcagcaggcacctctctggatatagtttagttgtgtagtggagggagcgggacgtctttagtgctgggctcaggggtcagtgcacttggttcatttatatctatgctgacacctgcagcaggtgtgtaggtgcatccaaatgagtttccaggtcacaaaatgcttccctacctgtggcctccataaaaagtgtgaaggagcaagactgaacacatggcctgaatcaccgtatttctcattctgcctttcttttaaaaaggtagtttaaaatcactaacttaaccatttttacctcttggaggagaatgagattttttttaaacgacatccttttttggactcacgtgaggctgctttaaatgaaagtgtaaactgcttgtatccccatcttaaaggaacggagcctcccattgaacagaacagttgattcttctctgttaatttcatccaagtgtgtttg

SEQ ID NO: 67339 - DNA, 1072 bp, Homo sapiens
gtataccaaacagatttttggagacttcacagttgtaattctgtgaacttaaaatatctccagtaggtcctcattaattgtgtcaccctgcatgtgggtgagcagtttgatgcaatggggaatgataatgtgacttgtcttcctccccttccccctgcaggcctgtgatggtaacttgggtgagagtcgatgatgaaatgcctcaacacgccgtactgtctgggcccaacctgttcatcaataacctaaacaaaacagataatggtacataccgctgtgaagcttcaaacatagtggggaaagctcactcggattatatgctgtatgtatacggtacgtgagaagataaaatgctcttctactagagtcagtcacatggagctgctacttgtgatttactctcaaagcttttggtcaagttgaaaatcaaaaaccagttggtttccttctagaacttaaagaagcctggcctgaggtggaccctagtgtctccacctgggatagtgacttttcttctctccctctaatggtgggtgtttctactagatcacagtctttggtcatgctgagaaggaaagctgtgtcctcaggcacaagccatggagattacgttagaagtaatgactgaaacattcagccttaccaattagcagcttttcagctcagaaagtttattcccagtggtattttactatgatacctgggctagctttctcctgctttgatgagcagaactattctattttcagcatgaagctattaattccaaaagatgttgtaagccagtaaatactcagaacaaatacaaggtcccttgtagctacatgaaccacctgtagctactgcttcagaacaaaagcttttttaaaaaatgtgtctgtttttttaatatcattttacaggattattaaaacatcatgaattttattctctagtcaacagatatttattgagcatctactacatttcaggcatcttaaacttacttcctgtttataacttactgttgattttgcacatggtgaatattttctatttagttgagatgtgcacctcctctctagttttataa

SEQ ID NO: 67340 - DNA, 1024 bp, Homo sapiens
aaaagtgtcattcatacttgactcccagaaatatttttgttagtaaggaaaagctcaggaacttttcttaaggaggatatatatgccacttcataagagaaaaagaagaaacaactaagactcttattttattgaaagtataaaggagccacttgagttgccctgtgaaatgatccaaagtgaatttgaggaactacatatatcatcactaatacaagaaaaaaagccacacagtggtaccattttaactattattcagtttacttactgggcaggggacacttctttagtgtttctagtaaagattgtttttaactgttccttagtgggggaaagaaaaaaacaagttgaggattcatgaaatggaataataggtcaatgttgggattaaggacgctcaaactttagtggtacccaacaaaaaacagcattgagctccctttgctgtccccgtagtatgattttgttttttccctcaaagagttttgctagccagcgtcatcacagttttcatataaagaattcagagcatcttaacaaagcttccccagaaatctctggaaagaagcctccctactttaactaaggaatgatctatgacaagagaccagaaagccaaagggggctctgcctgctgttggttctctcttctcatttcaaccctccctatctttgcacttacctctccatgtgctggaatttccttccctctgtgctaaccatgtggagttttaaatgacctttaggagctggaaagtggtcttggttctgtttcactttccctctggtgtttccaagttatttggttttgaatgcttcgagcttcagcagagtgatctttttctcgtttgagcactgccaaagattcagatctttctttttgtaaacagtttgaattattccctaattagcagctttcttccagaataatccaatggagtaagaaaaaaaaattctcagaggcctcttgccgcttgcaatacccgtgctcggccacattaaccacagttacagtctatggctt

SEQ ID NO: 67341 - DNA, 1117 bp, Homo sapiens
gcattagccgctcttgtttgtgacatttccctgttgggtgctcgtttgcaagctcattaataaggttttctcataggaacgttgccgggaatgaagaacatacagtaggtctcttagttttctagctttcattctgagactcagcaagggtacagcagcagcacacagttaaatgtttaaaacagaaaataattatgctcccaagctggaagagctcaaagctctctttccttagatgttatgcagagaacagttttgctttttaatgttccgagctgtatgaccctaaaatctttcagtgcatttttttcttgcgaatgtctgtacaggtggtggtgcccaaatttacaacatggttgattatagcagagtgtgatacaattgtagcacggttagtagagcttcagatctgagggaatgtactcttgtcaaataaaagcctgtttaaatgggaacagttcactgtctgagcgttaagagaaaactgtctaaatagcatcaaggtggcaacacatagcgacataagctgggaattcaaagaaaagctgtgaccctcagtatggaattcagattgctttgcacaagggaggaaagccttcctctggactggggtgaatatgaagctcttgaattactgctgtgtggcttctgctttcacccatcatagccttgctctttaaaatgtttggcaaaaatcctcattttttgagggttttgtgtttgtgcatattttaaaaaaagaaagaaaactcagagatgagttttgaaaagaagaatgaaaacaaagactctagaaatgggtgcttgaatgccatgcctgctctgattatcatctgacagttaattgtatacgtgggcatcattttcaaaatgagttttattgactgaatgtagctaggtattttataaatccatagccctgttcatccaaggtccagagaagggtagatttttttttttctttcattccctcaactggaggaaaattgggcattgaggagatgatcaaaacctgttctttatctgtgccaaaataaatgtttctctggtatcgatagtgccctgcattgaaggagagaggaaaacctggaaatcagaaaatctttcctatttggag

SEQ ID NO: 67342 - DNA, 1147 bp, Homo sapiens
cctagaataatttattcagtagccactctgcatggaggttgaattattttggatgcctgtgaggagtaacattgcacctgtattttaatgttgactcatgccgttgaagtcagcagttcttaaccttttggggatcattggcccctttaaaaaccctttgatagctatagacctggaaaagatgaatacaatcacatattcaccatattctacttacaatctaaggagtccatttacccctcagggttttcctaaattcagttatttgaggaccactttcacaaatttgccatgttcatgcatcatctgtatttttacctgatttagaatttttctttaagtcactttattgctttatcctaaccagggcctatgtaaaaatatctattaaattacacatttcatttgttatatatagtgtctaataagctttaaaataaatgtacaactaatatttttcaatgtcctttcctttgtcacctaaaaagatttcttatgttctcggtgagaaacaataggttatcactaggaaatactgatcccattcatggacctcagagtctactccgagtaaataaggctaccttgggggcaaatctaatctgatactattggtattaaatatgctcacttgtttaagcctggctgattttacaccatgaaggtttatggaaacctctctttatccccatctaagatgaatggatgttaaccaggacatgaatagggttaaatgacagatcatggatttgaattctacatcaagtaatttttaaaaaatactattaaaaaggaaatgaaataatgaaaacctgcgttatatgtcattaaatatcttactttaagtaagacagggaaaaaagagaggaaggataaaaagaaaggaagtgttgcacctctgtccttaaaatggagtgctaccatatggcatagaagacaaggcttgagctgcaacttggaattgcttttgtcttgtggatttaagtcctaattaattgaaccaggattttgcagtgtttgtttgttaggacccttatttgtgataccaggagaaattgttgtgcccaattatgtgaaaaatcagccagatgtgtatgctgtcatacttttaataatccttaagtttttggtgagtacagatattaat

SEQ ID NO: 67343 - DNA, 1660 bp, Homo sapiens
atagaagtattaacttaaatatacttgaaagtagcactttcaagtataaaaagtagtagatattctttctgtagatattattcattcacttaatattctttccatttaatttactctaggattccttgacagagtaaaattgttgtcatcagtgtttgagtccttcattttccaaaatctgacaatttccactgatactcgtatattccaacgtttctcgtaaggtttagagttttcagatattacaatgaatgaagaatgacagtagcatcttcgttgctatcttcagttctctgaaaaggactccatgcgtacttacacagctgtcaaacttcttgataggttgaagatgctcattttagtgcatgtgtctattagttatttgatacattcagtaaaaacttcagcataattataagatatggaggcgggtacttgttaatgttgtctatgctattctatagttactattatgctcatgatcttatccatgtaaaatctgaagactctcctatgatattttgtatgcatttgttgcctttaaggatattcattcattccttccacttgtgacgattttgtttctttctccagaacataccgtaggactctctttatactactattcataagaggagatgaatgagacagagaatacacttctttaagattaatatagttactggtaatagtagctaatattatcacagtcctgtccttctaagattagtgttcgttcttaagattccaggaacaggagaacctaattattttaaagggtcttagagtgagatttcacatactggatcagctttaagactcctcttttgttgtaattaatgtgactcatcttgatattgctgatttttgttaaatgttgtaggcgtaatgtttataattagcactcttatagatttgaggttagctgagaagaaccttgacatttcattactgttttctagtatttccctctatgtgattttcattcaggttttcatctatatgcacctccttagaaatatctttggttattttcattaatggctgcaggcagtttttactaaatgtgcctgtttagtggaccatgcataagtatattctctggttagcagcagttttaattcatttttcttataaatggatttttatactttactaaccttttgtattagagtagacattgtgaagctaaaggaaaaacaggatagaattaatagaccaaataagttttaagattttcttgtccaaccctttttttttcagaaaagcagatttaaatcacctcatttatatttttgaaagctttcttgctcttaaaaaaaaaaaactgagcaaagtcagctttgtaacatatcaataaactattatgattcacaatatcagattttattttataaaccaaacaactcccagtatacatgcctgtttcttcttctaaccttagctaagatcagaaatactggtcacaatcttgagaaaactatttatgggcttggaaaaaaaaatcattcagtgatttcacaggatggtgatctcaacaatgaataagcccttcatttttctacactgggcaaattttttttttttttttttttttttttttggagacggagtctccctgtgtcgcccaggctggagtgcaatggcgtgatcttgactc

SEQ ID NO: 67344 - DNA, 2570 bp, Homo sapiens
aaacctaaggaacatttaaaaggttgaggaaagataaaaggaaataagccagcttcttttcttaaagttaatttttgtcatatactaagttagtctttgccaaaattaagaaaggattttgaaagagaacatttgaactaaataagaggcccacatgtatcagttttgcagtgattttgatttcctgcttaatgcttaatcagtttcatactgtgaagccaaatgtacttaggaaaccacaggaccagtttaaggcctccgtaggctcgaggtcatccacttttggcagctccacctcaaatcacgtcaaatatgttaaggtgcatccaagttgattaggtttattttgctattagattataagtttttaaaataatttttcatgttgcttttgtaattaatatgaaggcttttttagttctgtttcataatttgaaacccttgttttttgaaggccttacttacaatttttgaggcattttaaaaggctgtaggccctagtccctgaacttccagtgcccaaaggctagggggccctggcactccctgcttcaggggactcatgacctgctttttccctttgttttctttttgtctatctctagtataaaacctgaaaacatgtatgagtaagtgctgaaaactgacagcatttggaattgtgccaagttagaagggtgcgtagctgggtgtgtgtgcatatatatatatgtgtgcatatatatatatatgcacacgcacacatacacacacactcacacatacactgatatgtgtaagtttcctttggacaaggttatttgtctacatgaagttactgcaaacacccaaaatagtaagtcaagaagtatcagatacagcaagatgtaataaataattaaggaaaatagactgtccgtccaccttctcacaatcactaactctctgttttgtttcacagctttgaaggacagcaggtttcagttgctgaatttttctagcagtgaactcaaagtatcattgacaaacgtctcaatttctgatgaaggaagatacttttgccagctctataccgatcccccacaggaaagttacaccaccatcacagtcctgggtaagaaacgcatgtggggcttacccggggaaatggaatagagatggcccttttacagcagcaaggaaaaggttaatggtgaattctcctgttcaaacttgtttcaggaagaatcaccgcccatcttgctgaattttaaaaatagcctattttaccaaatgctgtaaggaatggcaatcagcagtctttatagattccacctgctcttgggtttcaaccctcaagcttcagaagcaaagatcaagagaatttagagccctcaaatgaatcactcaccacatgaaatgttattacttctaactaccgggatttttttcttccttgtgtgcaggagaaggggagatgggctaccaaatctataccccatggcagagctcagttatgaaatccacgtaatgatttttccttctgagttacatcctcgttttaatattgttgatctccttttcattggcttgacttacggccttgtttattgcttatactctagattatgctgtaaaaaaatcatactccatgaacatatactttgccacaaattgcagtcattggacataaaagagttaagagcactttaactggtaataagcaaagaactgttgacgggctgctaggtacacctccagtgagctgagtgtcttcatttatgatcaccagattgtgagtttcagcaaaatcctagtagccaggtttccatgttcaattttaatatagtcagcagatatttctatgttgaaggtggtctgaattagtcacctttagacaagcttactctactgcataacaccagctgatttggattcttgaaactgaattttcaaggacatacactatagcatgaggcaagatctctgatttacaccttcgggaagatgatgaatcaaagtctatttgaggcggcagactgcagcttttcagtgtaatgataggaagattaaagaggaaagataaatatgaaggacatttttgcttggtatgtgtgcacatatatgtatttatggatgtacatattgagctgctgcctcattactttacttcaacacagctgtagaagggaaattttttttattcattaagctaaaacataaccctaatgctcacatatatgtttttgacaagaggagtatcaattttagaaagatgtgtttaaaaccagtccatacaatttctaatctggtctgtgtttaatgatagatggctttcacgtattcatatttgtcactattgtggttttactccagattagacctgtagaaatagtaagcatgggaggttttagtgggatgactattttggtattttgcagatgtaccaaattcgcaagcataaatttgaagttttctgtctgtctgcttgtatcagagtatttgaaaatgctctttgcttattggagtaagtcattagcagcatagacttcaaattgactatccactcatccaccctttgactcatcatcgtttatggcatttccacaaaa

SEQ ID NO: 67345 - DNA, 1195 bp, Homo sapiens
gcctatacattgggactgtcaacatcaactaacaagacgagattatttattgaaccctcctacctacttctattaagtggctccttgagtttctgtgaggctgaccaaatagcttagctcaagggcaggtaagctaaagttggctgtgtctatcttccctactccatttgtgagagattcagcattcacaaaagctggtactctgacctttccaatacctcctcaatatactactcaactagtacaaagtactagaggctgaaaccttttgtaccacagcttttgagagtatgatgattccaggcttagttgtattttgtcccttgatctgtcttcgattaacagactcgttttgtagactacaaagaaaggtattagagccatgctaaatgttgctacttgtgttcattttctaatatgcctagttcccactttaatagatcccactgatcacattttaattgatggaaattttcctctgaccttttcttccctttttttaaggtgatgggcagaatctgtttacgaaagacgtgacagtgatcgagggagaggttgcgaccatcagttgccaagtcaataagagtgacgactctgtgattcagctactgaatcccaacaggcagaccatttatttcagggacttcaggcgtaagtttccatctctatagttgtagatggcaacttttttacctacatgttgtcttgataaagagattgctaaggccaccttttttaaatttaatgttagatgcttaaagtttagtcagttctttagagggaagaagagacaggcaatcataatctttctacttaatagaaaccttgaatggccccttttaaaagtaaggcagtcttactttgcaatagaaattgattgtagtaattcaaggtgaattgcaatcgagtcccaaatacttagctgacacaaacaactcaacagggtaaggcaaggaaaatacagcattctgaaaggtaatccctttggtttgaagattgaagtttccaaggcaataaatgcctataagcataaaaccaagtcttctctcatcatagcctttggcatatagaagtgtccacatgctgaaatctttccaaatgtaatatcacaaaaaacaaaattgcaatggacttgtatagaatagaaatggttcatatcagtgtcagggcttagtaagagcaagaatcaaatctt

SEQ ID NO: 67346 - DNA, 1026 bp, Homo sapiens
ccttcagatgttaataaaacaagtcaagactgacaaaggaagttccgtttgtattttaaactcccaattcatcagggtctcctcctttagatcttctgtgagagtgtccttggtcttaatgtagctggaagataaaatgcagataaaagagccattgtctcagaagagcattaataaaaaatgaatgttgatcctaattgagtagtatttaaacatacggggtggaggcagcagtctgcagggagcatctgagtctgttagaatttgactctcgatctcatcttcctcctcttattacagggacctcaccacccagctgccttctgtgaatgtaaactgtcacactggaatcagaaaagatatatatagacatagtactatagcagattctcagctcttttgctatcgttgttcttattttgaaacaacgtactactattcctctatcttttcctaaaaatcttgtcataaaatgttcaattaactcattttctgttcttcccttttcattgtttgcctgtttctgtttacagtggttcttgataacttagttttaagttctccttaattcttaattctgttatgctggatataacagaaagaactcgcaatggtcaaaggtgaaagaatttgaacaaaaatattagtaataatagtattggattataaaccaaagaacaaaataaatatccatgagtccatactgatataattaaattactgaataaataaatgggaggaaagacaaatgtcttccttacagaagaatttcaatttaaggagtgaaagaaataaaaatgttaccacttgaacactgaagtaatttctgcagacaagatccactagtggatgctaaaattaacaagtgaaagtttaaggagaaacatgatagtttcacagcctccaagtattttcccccaaatatttattaattcctctggtggttttaacatacacatatatctacaaattctttaatactgctccctcttaggagatgaggataaattcccctcattgtgagga

SEQ ID NO: 67347 - DNA, 1018 bp, Homo sapiens
aggtgtattcaatggtggagacagggaaacttttccatgattttatgagggatgaacactggagcacgtaaaaatatgagaaatacataccaaaagcgttttctgtgtggatagaggcagggctaaatagctgagtaatgaaaagctagaatataaaggaaatacaacagcaagaatgcactgcccaaggttcccagatttggcatagcctgtatcttatagaccagaagccagaggcccaggaagactaagggccagatactggtctaggcactggagaaaccaccatgaacacaacacccaggttccttctctcttagaggttaaagtcacttctttcctttcctcatgagaaaaggggaaatttcagtattggtattgaattcctaaaaatagggagatgttatgattccttggttttaaaaacaggcaggcagaaaactgttttcctgatgtaagtgtgtatattcaagaaggggaggggcatgtggtaggtgggaggcagtccagtaaacaatatttcgagagcaaacatagcctagtgaatgccttatatttttcttaatgctaacagacttttcattcctaatataatggtttgagtgtgtgcgtgtgtcccaccaaagagatggagaaatactgtggtgttgttcacttaccttcatggcacccttgtttagtaaatggggtcaggcagtagactctccttccccattcccacccgattccagcttgttctcttgtgtaggtgtggaaagaaggatagtaagagaaatcatcatgattgtcatatgatagctgctgtttattgaatccttataatgtcaaacagcacgttcattgtctcgtttcatcctcgcatcagttacaatggttcttaatatttccatttttatagatgacaaaatggaggcttaggttaaataacttactcaaggtcacaaagcttatacaagttgaaacaggatttgagtctagctccatctggttccaccaccagagctctcatcatcagcac

SEQ ID NO: 67348 - DNA, 1122 bp, Homo sapiens
cttgaggtagatcccaaaagtgatttattaaccatgttgtaaaccaagtggactggattttagagaaagtgggaatgttctcttgaattcaagggccaaagtaagaaggatattttaaataaacgagcttaataaccttagatattattccataccaacgtttttattgggagtgggggtgagagttgggaatatgtacagggagataagaatgcccatttatcatttaacagaagaggtatcaacatttgtctgtaaagctttctttttaataaacattgaattggagctttgctgggccatcagctatccagtcagtgatgggcttcaaagaggccactctttccttccttttaaggttttcaccaataaagcaaatcctgtagttgcaacaagaataagaaggaaatgttctggaagaaaaggggagggggtgcccagaagttatggggaatagattgatatttatagacatcagcaatggtctgttaccaacatttataactccaacagtagcagattgagggctgaatcaacatttttccccctctgtaaaataataaatatggtaaagtagctctcagaactgcctttatcatagggataaatcaggacagtttgtgttgcaggagagacttaaaacttataaatatgttgccctttaggctactattcatcaaagtgtctgatatgaaatctagactaaaggcttttgttattgtgtgtctgcgtattctcttttagaagtctaaattggaaagagcgctgtcattttggtcatactggcctgctgtgctacttaaatgcatgtcccttttgggatgtatttgaagagaaggaaatagtgggagttgacgcctgcacacttttacacaaatcctcttcgtcgcctaaaccttccttgcagagggcataatttccagcaggaaaaattcagtaaataaccgcttgacaaatgacctattttggtgcagtcaactttcttcctaagacaccggagtagagaggttgttcttaaaagcctcatcaaatccagagggacgtagctttccttcttggtgctccaattcaaatgtatacaaataggcatggctaaagattctttcagtttgcagagggaaa

SEQ ID NO: 67349 - DNA, 1044 bp, Homo sapiens
gttaaagaagaaagcataccctactctttagcatgcatttcagggagctgtgagccctgtgtattttgtcaagccatggctttcatcgagtctccgtaacaacattagagcttggtggttgatgtgagctttcagggtatcaatgctgcataataatactaataggcaaaacaaaacagaaacttgtaggagcaaaagatgttgctatggcttactttgtggtggggcattgtgttgctggtcagcaatatgttcccgtctactcaagctggcttttggctaccaactgtgagatgtttcgttgctgacaagccttccccattctgtattttgccctcgggctcgcaatttactggatgcaatcttgttgagaaaatgtggtctttattagtgttcggcacagatcgacttttctttttccgcttctgcagagctagtgggatgcttggtgcagggaagaaacaggggacagatgacagtatgagggcaggaaaataagggttttcgggtgctgagaaccagaatgctggcttagtgtagagatgattggagcagcatctagggtagaaacagcttatttgtacccacggggcttttggcagcattctaatcaacaactaattgtcagagaaagatatttgtcaataaaaatacttgtaagttagtttttaggtacatgacaaataaggaaacttaattgtataagacagttcttgccctccagagttttatgatgtaatgagaacacaaaaataacattgatgctccccaaatcaccatgaatatgtatggctttacatacaatattttatttttcactgtgaggatctgtgcgtgtattcttgtgtatatttttctatctgtctccacgccgctttgtctgttgacttggctctgtttcattcatctaatgtattctacaaagagatttgtgagtggcatgctgcagctacctcttttccttctcccatatgctgtctctttaacaaatgcccacacatgtgactttccccctcctaatcctgatggtgcctattgttttaa

SEQ ID NO: 67350 - DNA, 1018 bp, Homo sapiens
cagcctccatggagagctgccttggtcatctgtctcctctaacaacaccctaggagaaccattggtcctcccatcacagctccccagagagcaaattgccaacactttcctagaaatgaatgagggaacaaagctgtgggcattctgggctatgtttttatagtgttgtgataagaatgcactggtgattgtgaacccaagttgctaactatagtgtcgtcagaacttaagatgcctcttatattgtgttcatatttaaataatgaggtctgacctttacatttactcataatcatgtatctaggtcatcacgtcacattttcaaaagtacaagataatatcctggaagctaaaggttccagccatagggtagatgcagctgggtttgaatcctggcttgggtaccagtttggctgtgcttccttaagcatgttacataaccactcattttcttcatctgcaaaataagattactcactgaacctatcccataggattactgtgacgatagcaaaaagataatccatataagacatcaccatagtacttggttcatggtaatcagcattacttattcagtaattcttctttttattaagagtctaccaaaaaaaataataaagcaaggaactggaaggatcttattaaatctagacaaacattttcaataaaactctaagatggatggcttgtgtgtctttgatacatgttttactttgtagagctagtttaaattgtgttgtaaacagaaggacacctaacaaaaaatgaaccagttatttatttaacctcatgattaaatgtcagtgacatggtgttcttttttttttcagttagccattaaatatagtattatgattttaaacttaccttttgcacatcagttgtttagctgaaaagtacattctttttatttattaggaactaagctttttttcattgaaaactgctgtagttatagacagctcatgtatttccacttaaggtgtaccttgtactgcatatttgccctggatct

SEQ ID NO: 67351 - DNA, 2515 bp, Homo sapiens
tttattgagggtaaatgaactaatgtatctaaagtacttagaacaatttgtagcacagagtaggtacacaacgaagtttacatattatgagctatattagtttttctcctttagattataaattgtgttcacaattgttttcagtgtgaatgtgtctattaaaacgttttagtaagttctaagtgttcgatctgattttaagcctgaaaggtaaagtcatactctcctgagtccttcgactgtataaatcagggggttggcaatttggtttctgattccttggcattgactgatcaacatttggttcattggtgagcatttaagaaccaccagtgagagcataagaaattagcaatccttcatactgtcaggcagcattgagattgagctgtcagaggctgagggtgaatgcttcgttggattgactcactgaaccagctgtatttctttgtcttccatggcattcttggatagagtccatttaactaggaagtaaagactttggtcagttcatttaataagaacgaacttagaaaatcctgcattaaccacttagacgtattgaaaataggagaacattagttatttaactaaactcctttaaaaatcaaaaatattagggcatgaaataatacataatacctttgactttaatgcacaccctacattgtaactttaaagcattagaaaatgtttgtattctttcttttttaaaaaaaattaatcagagtgactggggtggttgtagtggtgaagaaaaaatagaaaaggaggaactagacatttggaattgtgcttggttacagtatgtaaactttcatgaatgtgctttattcctttttgaaaactatcttcctcttacgtttttcctttctgttttttttttttagacaaaccttgtctgactgactataacctttaaataattggtaaagtagagcagtgaaactgacatgaaaatctattgaaaagaaatggaagccgggagcattattctagtaaaggactggctagcctattgttcccttctcttgtgctgtgtgtgggaattatttctgctggcaacagacaacatcgacagtagtagtattaaaataattcacatctatttttgttagtaataatgtaatactggatcatctctaggccacaaaataattgacccatttctaggagcagaaagtcttcaaactacaagtgcttctcttgtctgcccacgtctgctttctctgcctcctcaccatacacacacacacacacacacacacacacacacacacacacagagagagagagagagagagagagagagtgtctgggcttgtagatcttcaccctggttctcacaggcccccctgcctggaacgccactttcagcctcaataattttaccatttttcaggagcaagtctaggacccgatcccttaaagcttttcttcacttgtccattgcattcagtcctattcaagagacatttgagcactggagataccacgctgaacaaggtgggcaagcctctgtactgagacctcacagtgtagtggggacttgtaagcaaggccaggcctttacagcagcatggtagacactacgacaggtggcacagggccctgtgggagccttgcccagaccttgcctagtcttctgcaccgatcccactttgccctgaatgtctggcgtggctttagtagcttccagggaagttggcatttaattttttgctgccttgcattgttttctttctgtctgttatctccctggctggatggtaactactttgaggataatggacttcattttatttttatgctgcctttttaaaccctatagggtcttaaacagcactcagtggatggtaaatactcagtaaacactcactgatttgcttagaccctcttcccttccctccacctctgtggctttacacagggatgacttcccctcactgcgttccttccaataccttctataatttgaaaatggctggcctctgaaccttgtttgcttaggggcagtgaactccagctgattatagtcattgtcttctggccctgggttcttgggcagcaacatgacttccttctaccaacctatcctttcttcctcagctcccatcgatttaattatacttcaggctctccaggcacagatctaccatcacctctttttgcgtagcctctaaaatgctttcctctttcagggactgttttcctaatgagggcagaatataatttagaggcttaattttagaaaactatatgaagcagcagacccataaaatgttatgattcacaaccacttgttttgttctcataatgcaacctaaactaaaaagccattcatcaaagctataaaagctgttcatggctgtctttagtatatcgtgtggagcataattcagcccacagagaggctaaagatggattcatggggccatttgccttggtgtacgttaaaggccagtaatttctatgctctgtagaatactgtattttactataaaccctggatttt

SEQ ID NO: 67352 - DNA, 1383 bp, Homo sapiens
cttatggctattgaatttaacttaagcaaaattcaatacaattaaaaattcagggccgggcgcggtggttcacgcctgtaatcccagcactttgggaggccgaggcgggcggatcacgaggtcaggagatcaagaccatcctggctaatgcagtgaaaacccctctctactaaaaatacaaaaaattagctgggcgtgatggtgggtgcctatagtcccagctactcgggaagctgaggcaggagaatggcgtgaaccctggagacagagcttgcagtgagcggagatcgcgccactgcactccagcctgggcgacagagcgagactctgtctcaaaaaaaaaaaaaaaaaaaagaaaaaaaaagaaaattcagttccttagtcgctgtagccacacttcaagtgctcccatatgttgagtgactaccatattggacagtgcagatacagaacattttcattgtaccagaaaggtatactaaacagtgtcagtgtagatcgtccaccattcttaaaggtagacaattattacagaggaaaatctgtaaataaataacttgatttatttatttttttattttttgagatggaatctcactctgtcgcccaggctggagtgcagtggtgcaatctctgctcactgcaacctccaccctgcgggttcaaacaattctcctgcctcagcctccctagtagctgggattacaggcgcccaccaccacacccggctaatttttgtatttttagtagagacaggttttcaccatgttggccaggctggtttcaaactcctgaccttaagtgatctgcccgcctcggcctctcagagtgctgggattataggcgtgagccaccgagcctggcaataactcttatttttcatctccagaaacgtttaagcttttctggcttcttcagttcttcctgagaacagtcagctaagcaaaatcaacatgttccttatcctaacctgggggtagtgtgaggtttacaggaacaggagggaggagggcagctgaaattgaggctccctctgagctacctgagtcatctgcctccagtggagaaggtcaagatgggaaggttaaagaggaaggtcaaggtgggaaagctgagtaccaatccactttttcattcattgtttccagaaactttttttaggcattgagaggcaattgcagtgaagtaaatacaatatttttatctgtagtggaaggaaacaagggtcaaacagtgacagggcagcatgataagtgccatgatataggaatgcctgagagactgtgggaacttggaagacattgtacctgactgccctgtgaagtggggacaagggagagaaataggaagaggtacatcagagaaggaccacaagttgtgtgg

SEQ ID NO: 67353 - DNA, 2027 bp, Homo sapiens
ctgatgtctgttctgcctgatacacatatcccttggaggattgaatgtgataatgacttggtatatcataacatgccatacaagtgtagattattattatttcaggagaaactttgtcatctctgaatttttaattattactaatttgaaatgttctgagcacccgatttgttctggcttccacatagaatttaaattggcctcagataaggatgtgccgtgcttcccctctttcatattagggaagttgaggcatgtagatgtgaaattgactgctttttgttttccattgaaatcatttctccttgcatactattaatgagcttactatacttggtatcaattaaattcacattgcctgaaattactgcatgaagctacaaaaaataatttcttctgacaatgaaatgatacagtcttacaggtacttttagttttaatgtaaacatgactgcctctgatccatttaatactcccatcttggtgtgcttgtatgtatttggaatcccttgactttagacttgaacaaggttgtcagcgactgtgcggaagtaagtgtttttgccatcacaccaggtggatgacccctccagctgttgtttcagtgggtggtaagaaacagaagacaagcccctagtcttcattattcttaggtgtgaaaaattctcccaattgtgttttccataggttcccaatataccaattacttcctaatgtcatgcagacacctatattctcagaaatgccaaagaaaggctgctctgcaatctctcagaattattttcccagctgaatttgtcagtccaaatttaaaagagcaacaggcaattaaatattcatttttaatttttttgtcactcactgctgcaggtcacaggttttataagatttctctgactgtgtagtactgtatactaaaccctgttttgatagtattaattaatattctcttgcaggcccaagtgagggtgagagagagatttggctgggcattttggtacagcaatgctaatttataggcctgggcagtggaatattatggaagtgtgtaatgataatatcaaaactgcatttaattcttgaagaggaaggaaggctagcacatgagagacagaatctgctgttctctttgtaagtgaaaggtcatgctactgagcgctgcggggtggattggtgagaaatgagctcccgtttgctaggaattagaatgagtctatctgattttccttcacttgtgacctttaaagatgcagcttttagattgataagcaggtggatgcttttagtaacccaatgcagaatttgtttcatataaaaagactatctttcagacactgaagatattgcttccacaaagggtttttttctacaaagcctctggagaaagaaattcagtgattatatcttatctgtcacacaaagagaaaattcagaattactgtatgttcaattagaacatttttttttccctcaaagcattaatcatttcctggaacacacatcctccagttaagaatctctaggaaggcttgacagtgggcactcctcgttgctctcgcctctggatttcctgcgccactccacagagcctcctccatgcccataaaagagcttcctatgttgctatagtaatcctttcatgttgggcactacgctatcttgaaggcaatcagatgggaacaaggagtggggagcagtatagagttaatgtcaggcagctgaaggtgatctgcgctattctatttggagatgttttggtatgctgaagacgggatgccagtcaatgcaagcccttagcccactgtgggcccaatttgatgtttagatatttaaatatagagttttttatgacacttgtgaactctaaacaagcctttggatttaaacaagttgaaatagcttactttccatagccaacaagctcaaatttctcttcctctccacttgttttctgttcgtaattacatcatccatcttatttgttctaatttcctccttttattttccttatctccccagccatcaac

SEQ ID NO: 67354 - DNA, 2348 bp, Homo sapiens
aatagaaaatgtctttatgggccaggcacagtcgttcatgcctataatcccagcattttgggagtctgagatgggaggattgcttgagcccaggagtttaagaccagcctgggcaacgtagtaagaccctgtcttactaaggccaaaaaatattagctgggcatgggtgcactcacctgtagtcccagctactcgggaggctgaggcaggaggatcacttgtacctaggagttccaggttatagtgaactatggttgcaccactgcactccagcttgggtgacagagtgagaccctgtttcttaaaaaatatataagaaaagaaagaaaatgcctttatgaaaggcggagcccttaagttaagcattgacaaatgaggaagatttgtagcatttaagaatatagtattaatagttgaaggtattctaaatagaaggaccagcattagataaagcatagaaacaggaaaccccaagtcatggtgagagaacagtatgttgtaggctagtttgatcaaaaacctggagagagtaattctatgagaaatcatgctgaaaaagcagattgtagtagatcctttagagatttgaatattatgttaggaacttcggattttcttcagtagaaagcaggaagtagaagtaattgaagccttttaagaagggaaattgcagaatttatatatgtgtgtatattatatatgtgcatatacatatatattatatatatatatatatatatatatatatatatatatatatataaaatatcttgatcaaagcatatagtatggattgcagacggcagagagtggagcctgggagatcctaatagtccaacaaggagtactgagtactttaaccagggcagaagcagtgggagagagacatgaagactgacctcaaggatgtggaatgtacaaaggcagggcaagtgatcacaaatgagggagtgaaagtaacttagagagaggccagaaggaagagcaggtggacgtactgatgtgatggattttgccgtgaacttgttgaatgctcactgatgcaagtgaaagtgcccaggactctattgtcaacatggagttgggagtggatgaaatgcgtcagagtgtagaaacaattcatggttgaattgatagcatctgataaaacatctctaagcaaactagattaactaataagcattgctgtgtcattgagctgatataattctttttgttgttgttgttgttgagactgagtttcactcttgttgcccaggctggagtgcagtggcgtgatctcggctcactgcaacctccacctcccaggttcaagcaattctcctgcctcagcctcctggagtagctgggattacaggtgcatgccaccatgcccggctaatttttgtattttttttagtagagacggagtttcaccatgttggccaggctggtcttgaactcctaacatcagatgatccacccacctcctcctcccaaggtgctgggattacaggcgtgagcactgcgcccagctgagctgacataattctgtgtatgagtgaggaggcttatcacaagtaaaatttttatttaggctttttgagatctttttgaaaattttataatcacctgaggcttccctctctattttattaccttataagaaccctcagaagaatagccacatttaatgggcaggaagcaaaggaggaattggaggtgggtgtggtacaaaaaaatgaaaaaagccagaggaagaggaaggcccttcccaaagttaaagggagagtgctgaggtgggagtgggtcagcacagtattaaatactagaagagatggcggtagatgagaacgggctattgagtgtaatgtttaagaagaaattgtttcaagagagtagtttcagtagttcagttgcattaaaatggtaagagctgaaggaaggagggtttggtgaggaagtggaggctgtaggtgtacacacaccaccactggagaacaggctgtgtttctcagtggtgctagcagaggcctcctctggcaaatgcatgacttgagaaggcagcccaggttccttgtgaagagtctagaggggtgtggtaggggtcaccagaggctacgtctggagaggcaggctcatcctgatcatgtttcctggccagtagccatctgagcattgtcctggttattacctgcactgctgagatacttcaccccacctaatactccaaactgaacagtggtgggtatcaggaagccatcatgaatctcaatatctgattcttgcttgtgaaataacttaagatatgttgttttaatttccttatttacctctctaaatcacagaatctgaaccctgtgagttca

SEQ ID NO: 67355 - DNA, 1043 bp, Homo sapiens
tttctctataagacacctgctggagatgagagccggcacaaacaccgagtaggtatccagggcttcattacagcagtatctctaatgatcaaagaagccttttttatacaatcttgttcctgatcatgcagctgaacatctgtctacctgtctgtccaccttttaattgcatcatccaggtctctctgatcctagacggtctgtcagtgcagctctgctttccaccatttctgatcatagttaacacaaaatttcccacaaagcaaaacagtaaaactgagagctttctaataaacttgaactgaaccattttatgagaagctaattttctattgcatatccagtgaaacccttgtgctaatttattcttcaaagccaaatactgtatagcaaggaggggaatgtactataggaatacttgaagcattatatttactggatacaaaagaagcttgttctacatagatgctgcaatctgctaaacactgatttgttttaaaaaattggcagtagaaagtcaggaatttaattcactgatttatttatgtattcccttgtcaaatacttattaagacaaacccattatgtataggactgtgtgtgattcaagagtgagatactgtccacactctaaagatgagattcatgtagattaattataagagaaacattatacattgatttctataagaaaatactcaaaaagcggcatggtacttgtctcattctgttttgtcttgctaaaacagagtacccaaagtgagataatttataaagaaaagggatttatgtagttcatggttctgcaggctaggaagtttaagggcatgtccctgacttctggtgagggctttcatgctgtgtcataacatggtagagaagatcaaaggagatgcagacacgtgcaaagaggaggaaacctgaagagtgtcctggctttataacaacccactctctagggaactaatccatttccacaagagctaatccagtctcaccagagtgagaactcactactgcaaaagcagcaagaaccagcacca

SEQ ID NO: 67356 - DNA, 1040 bp, Homo sapiens
tagcagtgaacttcacgggcagtcaggcccagtctttcatgtttccttccagttctaaattgaaaatatttttttgaaaagaactatgacaaaagcaatttgagttagtgatatcttgaaagagaacccaatttaagattacctttatggttggtcattgttacctacagtaggcagatgtcatggtgatcttcttgatattagtattccgagagagtctgacctggcagtgttcaggtaacatcagagagtgggctataatattgagatttcaagtggtggtgcaaagggctgctcacggaaagctagtgcagagagaaccactgtaaccgagaaggagggcagccagccattctcctcatccttctatatttagtaaataccacgtgacagtgagtggctaattaaagtgtgttgggagtgagctttgtaactgtaaactgtagagaaggaaataggaaaacaatggtgtcttcgctgattttccaacctgtaacttaaaatgttgcatctttccaactctttctcaaaaactcaccacgctggtaaaatgtcatcatatctttcagatttgtgtcattacaattgtaacaggatcaatgattcatgaacatacggagctaaagtctcttacaagatgaagtggtgactaggaggagaagttattgttaaagaggaccatctgtctttgaaagtgtgatttactgaggcattcacctctgccccaagccatgaaaataggatctagtgactgggtctcatcgtctttctcttcctgcctccttccctttcttcttctcctcattctatccttagagccagaatcagtcaagagattcagtaagaaatgatgctactgtgaatcacatagcttcttagagcatcttatttacgttcctaaaatccctaccagacaaataacaagtgttaaaattgtttctgtgtttcagatgaggaagccaagacaaggagataaattggcatgcccaatacagaagggtgtcagtagcattgctgagacttgtgtctaagtctctact

SEQ ID NO: 67357 - DNA, 1711 bp, Homo sapiens
caccgtggtaatgtgtttgtatgtgtgtgtgtgtctgcgtttactgaatgctttacctgatatcatttttacatgtacatatatattttcatttcattttcaaaattatacagtaacattttattttgtgtatgtatagttctgaagttttaagaaatatatatgttctcaagacacagaacaattctgtcacaacaaaaaacttcctcatgatctgtgataagcattttgagtgcattgctatttaattcttataatgttatggggtgtgtactgttatctcttttttactgttttatttttaatttctgttgaggaaggtgagacttagagaaattgaataagccaaagtcacacaccaaatgaacagcgaagtctggattggaacttggagctaagttctgtctaagcctagaattccagcttttatgcactgtatcatattactgctcacagaacatggcttgggggctatatgatcagtaaagtacaaaggtctacatgtcagttttatatgatataaatgtgatgttgcaccttgtagatgatcacaagatatttttatgtgatgcactctcaaaagactctgaaagactagggttattttttatttgtttgttttgttttgttttgacttcaagtaagactagtaagaggactgaattgaacatctcaactggaaaccattagtgctctgctcttcaaactaaacttcccaacacccaagtctcattactgtcatgcctatttccctcccgggctgtgtcatacacatagaaagtgaagctgggctttttcatttgccatggccaactcacactatcctatccctcttttgaaaaaaaatagaacccttttcagtagctgtgggctcttctgtgagggtgagtcagctttaggaataataaccacaatctttcatccatgccttcagtctaatgtgctgatgctgaaatcatcctaaatatcaatacagaattttgctttagactagggattctcctgccctcactcagtgtaaatcccctgaagtacaagagaaactgtgagcaataaaggaggtgctaaagttctatttgagtggtgggggggcggtggaggcaaaatgctttgctcagggaaaggctagtgcttcatagatggttagagaaactcccttctcctcggaacttttgcaatttggagcccaaccttaaattgagctttactaggacaaatgtagttttatgaccagagcctacatgcatatctcacagttttaaataatgtattcacctcttccggatgatcataatcagtgatgatcatggtgaaactatgaggaagcagccctccatgtgctcgttttcttgttgtctttccatttcatagttttgcttcttaattataatgatgctagacataggctgttaaggtacattgtaaatagggatacgagcattccctttgtataggttgagaaatattactccagcaaattttgtttcaagagttcttcaggacagaatttcgatagtatgtgctttctgtgatatatatgcttaagaagtaagattcactgtatattggtataaaataaaggaagccagatattaacataaaattgtattttggattctttgatgccttaattttatctttctcaaggcagcatcttagaccttcactcctgtgagtaaacacactcctgtctaaagacagatgatgggat

SEQ ID NO: 67358 - DNA, 1031 bp, Homo sapiens
tcaagttcctaaattgagatgtgacgtttacctgtacactatgacaaagtgccagtttttcttgctttatcttttacagaatgctgttagtttgcactaatgacctatgagacccatgcaaattacacaatcttgcaaattagtgagtatgtgaacaaacactataaaactatcagatacagaatcaaataaatgtagtttattgcaggaagaaaaatagacttgcatatggagaaggaatgcattttcacaaccagataagtgctttcctgttgtctgcttgcccaccggggagcgtcaacacattatatgatctgtggcagccaatgacttactggctcttgggcaaaaacatcattttttcaaatgcaggcatagaaaatctcagtgattacatgcatactggaatctggtattgaattgtttcccttatactttgcctccttaaaagtattcccctttccagcttcatatgctgaacgtttacactagaaaggaggacaggatttaaggttattaagaagagaatgtatacttggctggcttttttgtaccacacccatctgaacctgggagattatttgttgccccccttttgggggatgaggtagaatccagcccacacacccagcagcatacactctgctcatcaaagcacttttctcagttggtttgttttcatgtctagcagcagaaatagctgctctttttctttccttttttcttctggcatcttgtaattgcaactggtaatgtgtcttcttcctaacctggaagcagcacagagatggcaacattgctccactcatacacagccttactcctggctataatccaatgctgccaccgttgggtcaccaatggtgacccagtgcatcaccctttgtctatcactccatctcccttcattgagaacctttcctgggccaaccagttgcctcctttatttttgtcaccctggttacctatattctatcaggtttgctaatgacaataaccccagtagcaaaaactatatcaataatgaacat

SEQ ID NO: 67359 - DNA, 2459 bp, Homo sapiens
gttctgtaccaatgactatgaaaaattttagaagaattctgttatatctatgtctttaatatagaactgctagaagtgagtagatgaccattaatcttagtaggtgatgtagtcatgcattgcttaacaacagggatacattctaagaaatgtgttgttaggcaattttgtcattgtgtgaacatcactgagtctatttacataaacatagatggtgtagtctactacactcctaggctttatagtatggcctattgctcctacgctacaaacctgtacgcatgttactgcactgaatactgtaatcaattgtaacacaatggtgtttgtgtatctaaacatatctaaacatagaaaaggtacactaaaaatacagtattataatcttatgggaccactatcctgtatgcagtccatcattgaccaaaacattgttatatggcacatgacggtatgtgtgtgtgtgtgtgtgtgtgtgtgtgtgtggtatatatcctctgcaaatatcccttaattaaaattttgaagtttagtaatgcttattgctgaaagtggtttgatatataggaaaatgtgtaggaattctatataatcaaaattatatattatagtgcctgaaagtttacatggcatattctttttttttttttttttttttgagatggagtctcgctctgtagcccaggctggcatattctttttacactgtagcagaatttgatcagaactaaatatcctgaaacgaatgactggctggtctgtttctagctctaacatgagtcactaataaagtattttggtgcttcacctttttgaatgccttagaattctaaggctgttgcccatcctaaaaaaatctcaagtcaagatactagttccctattagctgcagaaaacacagaggggaggagggagctagtgctggtagaagaaactggattttaacagaactttaaagaatgcctctttcattgtggccagccaatgctctatttatcccttatctcattgtgctgtggctctccaagctagagaggagagaaaagattgagaatcaaggtgcagagaataagcagtagagaccaaaaggacaaaaaagcaaaaactgactagaggaagcagaggactgaaaacacagaaaaggagaggaatttcaaagacagaattggatagatacatattaaaaccagtgagagaggaaagtgctttctgataatgcgaactgggttgaggtctgtgtatataatcagatacttgtctgagctggaaggcgcccgtaggcaggagtccagataatcttgtggccttctgggtgttgcatggcaggtgaggctagaatctaatttttttctatctcaacatcatctcatattaagcacttgtcaagctttgatttgagggctccgggtgatttggatttcggtgttatctctcagaagttggtttccccacttagttgagtgagttctcatttcaccatctgtgagcttctatgtctcctgtctaggtgtctatttcgtgcatggttgagacagtctgtgcagtcttgaattgtacttgtgactaagaggagtagtcataatttaccattcatttctgtcagagatggacagttgataggtttttgccattgtttacataatgattccatacagccataagcaaaaaggcagtgacctcatattacctggtaatttaactactccaaaatcaaggacaaaaactgtctgacaataggcacttaataaaagtgaagcttgtcatttgtttcctttttttaatttgagttgtgaatttaacatttgttatgttattaatatttataagcgtatgtaacagggttttatcttacacaattttaattctttgtatacctgtttgtggtatgatatccaatcagattattgctttgataattctaagatgaaatgcatagggagtaaatgtgtcatttttagcacaatatctctatttaagttttctttgaagccaggaagtttggacataagctgtttattatgccatagttatatctcttcctaaagaaaaccaccattgaattaacttttgcatggtgtttttctatcaaagcatttgatccttgtttctgcaagataatcctaagaactttttattttgagaatagaagaccatgatggatttaattcataacggggagctgctgcaaggaatgtaaatgtaagcgcttgataaggtaggatttcctagttgctatggcaacctttgggtcatgagcctgagaaaatataaagtaagtcctgaagctgtgaagatgattataaaatttaactgtcattcttcatttagagttgatggcaaacattatttacttaagtttatctcaaggcaggcaaagatccattttttaaaatctgagactcagatcacaaatgaatccatgttgcacatgtctaacattataaagcacatgcagcatt

SEQ ID NO: 67360 - DNA, 1082 bp, Homo sapiens
gtatatttattgagtaaaaagacagataaagaattaacagtggttacaatttctgtatatatgaagcatctaccactgcctttgacttaaccctttttatgtctgagcttcaatcatgaggttttcaaaaattatttctagaaagcaagttgggtttcttcaatagacagtggagtgttttgctccagagtactgaaatattctgttgtgatgttggaaactttcaccaattaaggacaaaaaccttctcataggtgtgtatatatatatatatatacacacctatgagtgatatacacacacacacacacacacacacacacacacacagagagagagtttgtgtcttttacaggaatcattttaggagttcatgtagacttattttattgaggctgttgagcaaaaattttttttctacttctccttgtgaattttatttgggtattatttgaatagtctcagaagtagcagatctttattttttaggataatttatttggaatcagcccaaagttatttggaatcatgctgttaaggtggacactgaagttgtggattttaaaaaagaaagcccagttgtagctatcaaacactagggtataggtgtgacacattgattgtcatagaaggaaaggatataaggagtagttgaaaatatgcaggaccaatgacagtaatgttggaataaacatatgacccttcaaggcaactattgtgaaaggtaatcctctcttaaaattttaaatctataaattccagtgatttttcttcaaagttttaaagtctcaccttacatagactcaaagactgatgtgcaacagcaggacaagaagaacctgaatacttaggatctagttaatcctaaagacctgaagcaacataaagatcactgtcaaccttggcattagcctattttagtaattgggtctcagcatatatatatatatatattttttttttcctggcttaaatagttgaaaattcatttaaaaatgttcttctgatttttaaattttgtatttatattttttgtcttcttgtctcataggaaacagggtaactgcatttttggtgttctt

SEQ ID NO: 67361 - DNA, 1126 bp, Homo sapiens
aaacattgtctgattttctgctcacattgtttagagaaattatactcccagccatctcttggctgctttagggtgaaatatatcaaaatctttggacattttaacctgtggttagactggctttagtctcttctgctacgttcccacaaacaaagggttgtcagagttcttgctatgcaatatattctatttttaaggtaggatttagattattagtcatctgatgttttaggtgttagcacaactagacacttaattttggttttgtgccaatacaaatcacctggagttttatttttggtaaggtggggacaagaaatcaatcaagtgtgttctaagctctttgttttatgtagaatgtaattttattttaaatatactcttccttgatatatcttgttgctctaatattgatacggcatgaagtagaagtaggtgtttttcctgagtatgatttactataagtcctgtgatttcagctatattgaggctactactaatggattagtacattccagcagtgtatttatttagcatcctaccctccggtaatcaaaacatgagatgcttcagtgtagaattgcttgctagaggtgatggagagaaaacacacctctctagtggtgatattagtctgttttaactgtcttgtgaatgtgcttaatgtctagggcatgttaaattgagttatccaaaaatagagtccctgaaatttaaataaagcggcattggagcaagaaactaatcattctttttctggtagttaaccaattgccacctttcccggctcacttattatagcagctcctatggctgtcactacactgtcacattgttctgtaatactctgtttacatttctctcttctgtaccagactgtgagcttcttgtaggacgggaatgtgttgtattcatgttcatggaactcctagtcactaaatagttgatgaacaaattaaaagatgaagaaacatattaaatacattgagtaggaaaatcttatccttgtgccgataggtgaaaactaatctgatgacattcctttaaagtttggacaaataagttggtattggtgatttctggatatagggaatctttttgttgcccatcactgctcatctgatta

SEQ ID NO: 67362 - DNA, 2826 bp, Homo sapiens
attaaaccaacaccgggaagcaagaggagagaagcatgcagaaaacaccctcccagttgaatgaaaattgcactgtattatgacttattccctttttagcaaaagtatgggctttgtggtaggtcaagataactaaaatgggaaagaaagaaacaattgtgtttttaattcgtgttgctccaggtagtgggactgagaaacttttcctctttttcaggagagttgtgacacgctatagtatttagatactcagtttgtgttcccatttttgttttgtttggtggtgttttgattattccattttttttttttttggctaaacatatgtgatgtgtgtttaattgaatttccaaggcaacgatacaggcacctgtcaaaaagtatatttaaagatacactgcaggttttctggagaggtggccatgtgaatttaacaatctgcaatgagaggggaaaaaaaagtttctgagtttgtataagtagttgagattcccaagtaaaacagaatctgttctcatgcagttttctgggctagtttggacaggagctggaatctcatttttatacattaacaactcttgttggatttctctcatttcttcaggacaagtcaaaaactttgtagttctccacaatgaaaatgtgtcgtgtcccatcctgtccttttgccatcttttctatcaaagaaacactaattataaaaattgaacataaatttgtactgtttaataggtttgggtttaattttgcctcagtgggaagacgtttccattaaaagagtccttttttttctcttcctccctcctttttcttttggtagaacagttagtaaaggcgtaggaaattgattttagtgtcacaaaggacatttctgacagggatgtactttgaaatgattcaaagcatctgtttctcttgcatatgcctagcactgctgagagctgtacctagattaaactgtttaacgtgtcaactccaaatccgatcacaatttacatcccagttgcttggttggaatttttaacatttcatgaactttctcccctaatttatgaaacaagcttctgctgaaagtgaccatttgttctagatgccaatatgtcacagtcaaaattgacttagcttgagaagttatttgtttttgtatggtcattttgcctatgaaacaaaatcatctttgcagtttttattcctgctggcagggtttgtgaatgaacgcttggtgggtgtttttgttaccatttgccttccactggtgctatgtctgtcatacaagctggctcagagaattccagttttaagagtgtctgagcacagaaattatgggcactctgtttactaccatatccatgacatccagcatagtaccttggaaagccacctaaaataaatctttcatatacaaacgaggaatgagcactttctacatagtcatactgcatagtcttagtcatagactcttgattctgagggctcacttatctactctgcttatgtttctcagaaattagtaaggctcacttgtattacttatagtgaagcatgtcctttgaagttgaagggcaggggcaattattttatgcgtgtgaactttttatattcatagaagaaataatttactggggatgagaagaaaaggcaaccatgttgatgcataatagggacccgagctcattaacttaattgtttagtggctcctgactgttcttctctcccccagtgtccccccatgtgccctttcacagtatttccccatgagctttgagtgaagaatcctgagaagggcttctactcttgcctttccctctgctaatacgagcatagtggtggcgtttgtacaggttttcctggggtactagttccccagtggactcacttgttgaccttgaagatgcatggtcactcatgactagtcagttgagaacattatccataatattgttatcaatatcttgcatctctatcagcagttctctgggattgtgttagtgaggatagagagcttcacatttacaatagcttgaatgtttggaaattttcttaccttcactcactagtctagggtgggtggtccagatctatggatgggttggcttcatctagttgttcagtgacctaagttaatggcagctctgccaccttttgcatgtcactctggaggcactctggtgttactgtttcagcttcccagaaggaggaaggagaaagtacaggaggagcaacctcaggcactaggctggaaatggcacacatcaattctgcccacatggaaaagaacttagtcgcctggctgaccccgcttcagggaagaccaggaaatgcagaggagcaggccagccttgtgccaggctgcatggaagaagaggaaaatggatttagtggacagttagcagtctcttggaccttaggtttttcccagtcagttagctgtccagcagctttatattgtaaagctagttgatcttagactttaaataatatctagtactatctatgataatttcccccctttaggtttctttgggtccaagctatttataaattgtactaactggcagagcattcagcttaccttcttctggttaatgtcaaggactcagtagtttgcacagacatatttttaccctttgaagtgataaattaacatttgaatggttgcttcatttccttccacttttttatgtctgggacacatggtagaatagggacatttttgtagatttgtgatttcttcttcatttgggaagatattgtatgtactactggtatgctagtcattcactgtataggaaaacccagaaggcataatcactgttgtctgcaaat

SEQ ID NO: 67363 - DNA, 1677 bp, Homo sapiens
tagggaattagtgacacagctgtcatggttacaggatggatgtaaatatcctttgcagttgatgatgaagaacagtcattagcctcctgccccttgggaactggtcagaggaacaaaaataaacttaacacgtgatggtaaaagccattccttatgtctccttttcttcagtatgaacaattaacgttctaatagaagctgcagagagcatgtggatgaaccctctccactttacaggcgtgttagtgtgataaatgttccttcgtgtagggcattggttgttcacagtttataaccactcttattagcttataggccagttaaaaactgctctttagagacccacaggccctatttaaatttttcgtgttcatctccaggtgttgtgtattcagtttgaccctttaaagactgtccacggttggatttttgcatgctgtctgcaaggctgcaggggcaattgaagatcaattttctgtatctgggcttacttgcttgtgtaaaatatatattgttatgaagaagacctagatgcttatctgatcctcctttatagtttttaaaagtcattgaaggttgaggagccgttttttccgccttcttaaaataaatgtcctaggtgtttaagtgtgcttcgtatttatattcattccacttccttggtgttttgatgttgtttttcattgtaaatttgcttaagcaatcttttgtggagtaatttcataacatgcacacactgtggttttacattgagttgctcgtgatctgcaattcattaacttttgctgactaggaagtcagtatagcacgttgcattttctctcactttatcttgctatatagtcagttttattccttgtaaaagatgttagtagaacacttccttaagatggcttctcttgctgtctcatatgctaaatcttttcctctggtccaagtcttctcagggccttaaggagagatttttggcatttgtatcattgcattagaggtgaccagatagcgtcactaaaggaacataacagttttctgggttttagctcaaaatgactattcacggtaacactatacattttaaggatgaatttattgctgcttgtgtctggataagattctttgcatttgctgctacttttgtgcccatgtctcctcttggctttagcaagaggaggtgccaaatggaaggatcggaattccgcctcggaactatcacacactgtagcccaaacctctgcctcttccttttctattctttggccattgtggaaagaatgaaaactatcaacaagctgaacaaggtgaacagagccttgttcagatgtttaaatgcctcctttgcaactgagttactcactctcccaagatgaacttttctcattagacatagctaactcactgtggagatgtttctagctgacttgattgtgatcagacattataggatgcaaggtaattgctgaccctaaatagtaggggtgagtcccccaaagccaaataacttgaaaaaccttacatactgagcattttaaaaaatgtgtgtatcttagtccagtaaatgacaaaatcctttggaaaatgggcattattctcaggcatgttcatggctggccaaattatttgggttttggtgggatatgactctctggagactcttcgcaggatgcctgtctacaggag

SEQ ID NO: 67364 - DNA, 1607 bp, Homo sapiens
tgcttcaccatcctcagttggtgacttttttactgatggtcatctcatggtccaagatggagtttttgccagtgctgctgcctgttaggcagcaggaaagacaaagaagagctgcttttggcacaaccagtttcttttccaacccacgcaacacttcctcttaaagctcatgacctagatgtgagggaggtaggaaatgttatctttaccaggcacagcttaaaaagaggggttctgttaccaaggacagaaagaagaatggatgtttgtgaggcaactagcattctctgccatagtgaccttggatcctttcatctcattgagcctcagcattcttgtctataaaaaatggttgtaaaaacaggatctaattcaagatcctattgttttgagtatcaagtgagttaatgcatataatgcattaagcacagtgtctggcatataagtaagcaataaatgttaattattattcttgctacttccttaatatctctaggttaatgtcctatagatacttaaaatgcttatgtgtattacagatccttactgcattacctagctcaccacctacctattccaacaggctggaaacctcagagcaatctttgagtatgtctttattgctgtctgtacctaaaagtcatcaagtataattctgcctgcaaaattcttcatggatttctcaaacttgtccctccatttccattcccgtatctgaattcaagccgtcatctttccttgccttctacccgtcttcactatctacaagatcacatccaaactccttagaatagtattcatgtcttcatgtagtctgattgaagtattaaaagcttaatcttgattccgccacatctccctagtctccagatcacacacttcttgtactctaacttcactgaaaattcactattccccaaataggacattatgactctagtttcatcttcagggtaaatttttacgaattttcaagttgaaacttgaggaaactaagcatagatgtgtttcagcctataattttgaacattaggatgtgatttctggaaactcctttgtgattttatttatgaggccaacagatggacaggtattccagtatttcttatcatagctgagtatctaaatgtatgaatatgaaagaacgaagggcttttaagtaaaaggaatggatggaagggaattgatgcatttctaatggatgggttagtttgttcagcagttctgaaagtataggtttagatatagagactcattatttttactttgctagacagtagcattagtttaggtacttaatgtgaatgttatgtacgcattttgctttcaaattaaaaaaaataagtagggaaggttagctttacttttattgtgtgtgtgtgtgtgtgtgtgtgtgtgtgtgtagtgtgtaataggatgtataatgtaatttcaaagccctctgatgcaatattttgaaactaagttggtagtacaattaaaacatatctttggtcatagattacttggccttatgccattttcataggcaatgtcctacttatatagcctggattggctgagaaaaataattgctgctatgaaataattttgcaattaccactgta

SEQ ID NO: 67365 - DNA, 3193 bp, Homo sapiens
tgttgacaaggatatggagaaactggagctcttatatgttgctagtggtaatgtaaaatggtgcagccaatttggaaacagcttgacagttcctcaaagtgtcaagcatagagttaccaatatgacacaacagttacactcctagttatatacccaggagaattaaaacgtgtctgtgcaaaacatgtacatgaatattatattattatttataatgtaatgcattatattattaagcagggatgattcataatcaaaaaaatggaaacaatatccaatatccatttattgatgaacaaacaatatgtggtatagccaaataacagaatattacgcaaccattaaacagaatgaagtactgatacattctatgacatggatgagccttgaaaacattatgctaagtggaagaagcccaaaggccacatattttatgatttcatttatgtgaaatctccagaaaagtcaaaagctatagagacaaaaagtagattagtggttgccacgggttgggataagaggcgaaccagaagtgactatcagtggatataaagtttctttttgggatgaagagaatgttctgaaattagatagtagtgatagttgcacaactctatgaatatattcaaagtcattgaactgtacactataaacaggtgagttctgtgatatatgaattatatctccataaaagtgttatatatacttgacataagactatatctaatgaagtcattggcagctgtatatgcttaacagcctgcgtcagattcatttttgtgtcttccaaaatgctaaacacaatgccttgcatatgtaagcctttgataaatggttgaagaatgaatgagtggatgattgaacaaacaaattcacgagtggtcttgttacagtgtgtggaaggattgtttttggcaagtgctacaggagagaggtaaagaacaatggccacgaattgaagcttctgtcctcctgttcacttaggctgacagttcagctgtcctgtcattgatctgatgtcagtctgatagaatcattctgtgctttgacgccagctagatggtatatttcttttttcttttgagtgataggttggcaaaatgtactttagcgactgtatgttatgtggatgatgcatgatgccagtgctctgttgtgacctttatttttatgagctgtgagaattaagaacctaccagttttagtttaattaagcagtaagacacagcagatggtgcatttgtgggtgatgattgcattccactggtttcctcaagcagcactctaaccctatggaatgctttgcctggagtatcacgccactgttgcaaaattaccaggaagacaaacacattgtaataatgtagtcagaaaatcttggaggacagtttagaaaaggacctgaactccacaggagttttagtagttagcagctactggaactaggatattaaggagaggaatccatgacataacggctgtagccatttactacccatctttactttccaatatttgcaaataaagtatatgaagatttttattaccctagtattctttcgtgtaatctgggtcaaacattaaaaatgcattggaatatgatttgcatgtattaaagtgctcagagaagtttcagtaaatggagaaatactgaattgatgtcaggttgttttattatgtttgcttttagtcactacagagggcctagagtgtcctacaaaatgcatttttccccaagtactgtgcacttaccactagcatatttactccataggatgttgaaaacatacctaagcagagataatatagagttaatccagtacttcttaccaatcttgcaactctttaggaagaaaaccaaattggtaagtagaattactttcattgttaagggatagactgcctaggtcagattcttttccctttactatctttgaaaaactgaattacttgaaggctggcataaaacttacaattgcacaatattttagaacctaagataatatgcctcaatttttctcattaatgcaatatatgaaatcatcaaaatgaaatacattcacttactggctgtaatgttgttaaaagtatgaactatgtggattttacaaaatatagcaatggttgctttagatagaataattatttatctcatgtctttgctacaaaggaagactagatttggaattctagtaaaataatgaaattcaaaaataatattttaacaggagaatataaattctctttggaaaaacccacattttatattgatttttcccctatattacataaggaatctctttccttctatttttaggggtattttcatcacaaaaacatgtgactacatcatccttctgcttggagacctgacttatatttaattaaatgaaactttttttttttctggattcccaccaacttcaggatactcaagcattgaagataaaactgtaggtctaaacactaattctgcaattcttcttgtaggaataaaacattattaaccttttagttaatactggtttataatacagtatagggaaatactataaacacctatctgcataggaaattcaaaataataactgattttatcctataaattattcaagattctgacacaagaaattgcaaattttatttatatggaaacatgctttactgcaaaatcattggtatttcatttctttatagaactagattttcatctaattaaaatttagaaaagtgctcatcatggtagctcacatctgtaatcccagcactttgggatgccaagacgggaggattgcttgagcccaggagttccagaccagcctggacaacatagagagacctcgtctctataaaaaataattttaaggaaattagtcagccatggtggcatgtactcccagctgctcgggagcctgaggtgagaggatcgcctgaggccaggattttaggctgcagtgagctatgatcgcactactgcactccggcctgggtgacagagcgagatactgtctctaaaaaatacatgaatgaatgaataaataaataaagtttagaaaagatggaactagattgtttcccgtttactcagcatataggtaacttgccgatttttttgtagctctgtttaataaaaatacactacagaatctccaaataaggccccaacaggaagataaaattatgtttgataatt

SEQ ID NO: 67366 - DNA, 1027 bp, Homo sapiens
aaggtattgacttgtgcatagtatttaatttgtgtaaatatgtgtgtatgtaatgttttgcccctctgagttttattttaaatgtaacccttgaaactgggataatagaaattcttagcctaggcctgctagcaattgcaggtgccaacggtttaaactgctgtagaaatacaattatgagcagccaagagcaaatcttgttttaaggtccatgtgtaatgaatgcctgttagtatcatagaatacaattaaaaagaggtttacctctcctaagctgtgattggttctttctgatggaagtgtagagtcccatgagtggactgtgtattcagctcttggtgatttagactccagtgagcctggcattctgcaggcttggataaattcagggcagttatagtcaggcagagatgagaaaagactgaaagattaatgagggagcttaaaacaaagcttcaaaaatgagagcaacacactgcttggtcttatgtaattgtgccgagtagaagtcagtcttggctgctgttgtttaaaaattttaagaggttggcagaaaatatttgttataaaaattgtatcttgagaataatagtgaaaacctaggacataagatctaattcttggttgcttgtgtatgccctccaagacacacccttctcttcatcctgcttttattgcagtttgaccaagcaccctgctttcctgctgccccccaccacttctttttggcaaggacccttattgatgactgatgtccaagccctggctgcctccaggagatgcacgtctgggacgtgctcctagagttcacgttgatgctctctcactacaaggcctgaaagatcgggagcatatagaggtgtgagagccctctggggagataatctaagggattgttggtgacctatggccatttctggttgatggttttaaatagcagttggttaacatttcttctatagaacttaagggatgctaatggctttaaaatgctattttgcctttgaaaatcctcttaatagatgct

SEQ ID NO: 67367 - DNA, 1005 bp, Homo sapiens
aggtagcctgcacatatgcaaattagatagtatgcatgtaaagatggcaagtagataagataacatgtatataaaaatagtatgtatgtttttatatgtaaaatgtttagctcagtgcctgacacataatgaatatttgattaatagtagctggcattattattatttattatccagatacaatcttcaagtaagtactttagaaagtatagcccggtggtaagttttaaaaaagattctaattttatacagtcctctcagataacatatttgatagtaaaatttcaccctctgtgtacccttttcacaatttgggagtttaccgaatgctttggtgttttaaaggcagtcgtttgttcactgaaaatgcagcttatgacaaattcaatggttgccaagctctaatatgttagcaggcagaagcatgcttttaatattcatcatctttaagtgctaccaactgacatttagtactaaatgtgcagatatgggtgctgagcaaaacagagctaggaagaggacttgctaatttgtattctagatggaaatcttaaattagtttctgagatttttaaatggatttttaaatgctgggcacataggaaattgagttcatattaatatttataaggtttgagaagatatttagtgaaatatttgtataatttaattttggtcataatcaagtagtaaaccataacaagaaggacattgtactttagtctggtggctgttttgtgacttaggaatatccttctggaaaagccctgaatgacacacatacacatacatacatgcttcaaaagttcttctttattagaacccagaaaccagaggttatttatatataaataccttgggttggattgttttgtgttaattttaagttaattaatttagaaatcagtgttgataatgatttctttaaaagcatttattgacagttctgcagaactctataatctagctgcttttatattctttattatacagaacagctccgtt

SEQ ID NO: 67368 - DNA, 1077 bp, Homo sapiens
agcacataaggtattgccttgtctttttgcaaaaagtatgtgattcacctgtcatggtgcatggtaggcactaaagaaatacttgttgaaggaatgaagacatgtataacttaactagctatacacttggaaaatgtaatttcatctacaaacaataactttataaataattgcactgtttctcgcccattaaatttactgtgaaatctggacaaaacatctgtcattatgtaagccatggaagaaatgttgagattagcatgcagtaatgaacatggtagtaaatgctggggaaggcagaaatcagaagagacgtaaataagtcctaagttttaggccctcaaaaggttaatttggattttcgttctgggtgtcttcatatcagagagacttggccaatctgatataaaaaaaaaatcggaggtcaacagaagtgattaagcagctaggaaaattaactcagaaagaagatcttagtatataatttggaaaaaggatttgaatctctcaaaacccagagaaacagaaggataatttagaatgctttgtagagcggtagagctgatggcataaaatgaagcagaaaaaaatactgagtgtaagacagttcttaatagacagacaaagaaccatatagcattccaaagaaggtagtaaagttgttttgatagaatctgacaccccaaagacagacaagcgctaacatttattgagtacttacaatgtatctggtactctgtatgcataatttcatttaatcttgcagtaatctgtgaagtaggtactaatacaatcttcactttacaaatgaggacactgaggcttggtcacatgaggctggtaggagatagtgccgtattttgaactcttgttctagagttcagtccacatcactatactctcctgccttctagtcatgaagttgggtctcagtaggtgtgttgtgtagaggtttgacagaataacccagctggttttccaaatgctgaataggtgattctaacaagccattttaattaagttaaaaaaaaaactcttatgtattccaatcaaaagtgtactttttgttcagtcttc

SEQ ID NO: 67369 - DNA, 1149 bp, Homo sapiens
gtctcaaaaaaaccaaatccccagaagtaactacaatgagtggcaggcactgagcccattctagtttctggaaggaatttttacattctttcctgtagttgaaatcagatggagttgccgtttcttcaccaggccccccaacctgcaacctgattcctcctcttcacttccctgtttcagccactagtcatggaatcctgctcaacatgtaccctgtacccttttgttcatgtccagtgctgctgagtgttagttgattctgtaacagctgctaacatgctccttcttgggtggaggtggttctcattgaactgactcctggctcccacccaggttctgggctggtctgtgaatttaggtgcttgaaagtcaagaaccaggatttgcacctgcttccaatcatcctttggctccactttgaacacaagggcatctgcaaagacgtctacatgcggtcactagtgtaggattttcttgtctcctccattagactgagctccatgagggtggggaaggaagagatgagggtgggagtatattccttctcactgaatccccaacactcagaatagtacttagcacatgttgggtactgaagacacgcatcaaactcattaatgtaactcaatcgttgggaaggacttaaaagcagtcctgaagcatggtaagcactaaaggccaaggtcaaaccaagcccaaggatgtaaaaaagaaatgaaatcacacattatagatgaataattaaaacaaaattctgcagctccaaagcaaagaaattgtagagatctgcagcaatatctttctgaaacaattttcctttatgagacagttataaaagctgtgctttgtaaactcagtaagatacctgaagagtttacatctagtaaatgagaactttaaaaagaataaaacgaagtgaaaattatagtagataaaataaatctccattgtaaataaaaagctgactgtacttagaaaattcatccagttgatatggacaggaggcagggaaatactgggtaaaagagggtggttccctggcaaaggccccactctcaagcccagaaacccatggctctaaatgagaacaggacttcctgttttcacacccaaatgttctcttttggcctgctgcacccctctatcctg

SEQ ID NO: 67370 - DNA, 1052 bp, Homo sapiens
aatgctatcaagatgataccgactcccattctatataccaacgtgaaaataataaaatacctaagtaaggttgttggtcaagattgtctttgaggaatcatggatgctctgaaattggatgccaaattttacatgtaggtggatgtgtgtttttgagaaaactccagagcttttatcagactctccaaagggattgtgatctcataaagactaagaaccactagataagctttatagttttgaaagtgcttctccatacatttttatttgatcctcccaatgattttcagggaggcatgttgggcattctctctctttctctctcgatctctcaacagaagagcatgactcagagcttaagtggttttgtgcttcatcctgtaggcactgggagcctttgagggttttaagtgaggaagtgatctgatcagatcgtcctttagagagattgccctggtggtagtgtagaggatgttttaggggagtaggaggctaattaggacaccattgggaaaatcaggtaagaaaagatggttggccttgagtttgttgcagtcagattggaaaagaggggaggaatttgctaaacagctttgattttgaagaactgatgggacatcagggagaaaagaccagtaagcaattggacgttctagtctgggactggtgaggtgaggaggacctcgcacagggtgtatagagtgagaagtgaagagttcctggggagaaaatgtcagctagtgtttggctggagtgatggtcttagggaagcgcagggagatccaggaacatcgcttttttccccccattctctgtattcctgggttgacaagtagggattaaatatattttttaaccctcttcatttactatcagattatttatatttttatttctcaaggactttaaatttatgaagtttacaaaaatcagtcataccactctaatctaccttctgctcagtggaggcgtcaagcaaaggatgggttaagggtactcccctataatcaatatgatcttctccattcttagatgtggaaattgacacgtta

SEQ ID NO: 67371 - DNA, 1009 bp, Homo sapiens
caaaacactgataaatgtttgtggtgatattctggtggcatatagttgtccccctttattctcaggggatgtattccaagatccccagtggatgtctgattctgaggatagtattgaaccctatacagactattttccctatacatacatacctatgataaagcttaacttataaattaggcacaataagagattaacaacaacaataaaacaattatatcaatatgctgtaataaaagttatgtgaatgtggtctctccatcacctgatggggtactcatcaattgatgagtactgtactcatcaatttttagacccccattggcccagggtaactgaaaccatagaaagtaaaactacagataagggggggactactgtatcatcacttgtgattgacttaaggtttagtcattggttgataccagaaacttggctgataatattcttctttctaaagggaaatgtgatcaattctttatgatgtggagtttaggtccacactctggtgaagagtttgaatttgctgcccttaaatactacatcactgtagttctgtgtgatgtgtcctgtacaaacatgcagagtaaacattgttccttgccttctgctttcttgagcactaaaatacacagtgtaaatatgcacaaacatgtagaaggacatatagacaaatacagccttagccaagtcatgagagatgcagctgcaagaaacaggctcatgcataatgaacatttatgctatggcatagcttgtgtttttgcatccatgagctgtatgaaaaggaaggaacctcacttcgttttcattcagttagaatgaaggcccactggtcagttttttgactcaattcagctgattgttttcaaaataacctgttcttttctaacagttgtgtgtagggacagctgcactctgatgaaatgactgtgagcctatacgctaactactgtactaattttctgcctatatttactatgtgcccagtgactctgctgatgaatat

SEQ ID NO: 67372 - DNA, 2377 bp, Homo sapiens
agtattttacaacccgagatacccacttagggccaaccagtatgctaccagctttgagcttaggttatttccaaccaatctcttaaaagccggagtcaaaattcaacctcagttcagtaatggtaattgtttttctctggtcatccctaaggtgatttattactagacgtatcagtatgaccctctcataacatttttatctattaaaagtttcctgagaaatggatttttaataaaccattatcacaacagcattattatcactactccatggtgtattaatttaaccacatctgtggccctctagtttatttatagtattgtgatagaagtcatggggaatacaaagagggcaaaaaagaaaaaaatatatgtataacttagttgggaagacataacaaatgcatatcaaacgttaaacagcattaagaaaaaacattagtaaagagccaagggaggttagagtaaggaaacagaatgcctgccctaagtcttggggcagaaatagaaatatagaaggcaggatctcaatacacagaaaggaggggtgcaggtcgaatggtggaggaagaatgtctgtggtgcattaagagaaaccatgagcaagttggtttctctggaaaagagaggtgctgttgagaactaataggatagcaagttggtaagtttggaagacagacaattatgtggaaagaaagaaattctgttacctgcaacacctaatgtctacaacctatcaaattagcacatgtattaagcactgataatgccagctaaatctcagtcagaagctaaggaactggagaacatcaaggacctagttgcagaagcatatcagagctgctggccctgaaaaaccctgaaagagccgggaattaagaatttcatctttggactcagccaagcttagacagacttggttttaaactcagtttagctacttactagttgtattagtggaaacattaattaattaattctctgtacctcaatttcctcatctgtaaaatggtgataaggttaatttgaagatggcatctttgaaatgtgtaaggattgaatgaaatgggtaatttatgtaaagttcttacaaattcaaatatatagtcagtacttacttaacggttactaataataacagcaacagagtatgtttcaaccagacagaataagttcaatttaattttttttcatcttgagatgccatgtaaaatgttaactaatgttccacttctttaagaaaaagttggaaaaacactcatacttatttttaaccttactactgtgaaatgacagtgcttctaattctggctgtgaaatctagtaatccttttaaaaggattaaattgtgaacaaacacatcaggaaagaacttaaatctagtgtttcctgacttattttggttctgattaattaaatttttttcagaaagggtagaaaccaagagtaggtataattgaagagttaatcagaaaattaaataagggtactcattaaccaagtgttttagtaatagaggttttactgtattaggagttcccacttgttctttttctgcaaatgtggcagtcggttttatttttaaatgctgacataaattgaaagtcttttataacctctgaagcatgtttcgcaaagtgcagtccatggatccttggaggctcccaaattccttttgagggatcgatgagatgaaaactgttctcataatactaagacgtaattgccttttttgggtgtgttgacatttgctctgatggtgcaaaagcaatggtggggaaagttgtgggagccttagcctgaatcgagttagtggcactaaactgtcctagaagtcattgtattcttcacctccacatacagtaaaaaagaatatccctgatgaagcagtaaaaattattaattttatgaaagcttgaccttgagttacatgtttttaaaaatagtttgtgtgaaggagaattacaaataaagcatttttgctacatacttgtctcaaggaagaagactggggagattgagttaaactatagttattcagacgcgtatttggcagacattttctggaaagcagtgagcctgtcattttaagagaaacaatggacattgttgtcagtgataaaattaaagatttcaagtggaaatgtgaattttttaaaacttgcatcttcctctgtgaacttgacagcttcctaatgaaccattgacttttcttatgatattggtggtgatactaatgaatgtgacttttttgatactgaataatgaaatgtgtcaccatttggaagagtgctgcataactcagtgaactaatattttccaaatgaccagtgcatgattttaaaacatcatgagtggctaaaagatccattcaaag

SEQ ID NO: 67373 - DNA, 1151 bp, Homo sapiens
attttgtatttccttaaaggaacaatagagcttgcatttgtgatcaaagatggaacagagataatcatagaagtgacccaaatgccataaaagcaaaaatacagccataaacctacacattattttatctttatttctatttaataaacattttgggtatgtacagatatgaatcttaggtagtcattatgctcaggtttttcagtcattgagggaacacatgattgcagtggactccagatgtcgtcagccagagttcaggattcacacgggaacgcgagctttatggcagctgggtaatttggaatctcatctttataacttggatgcctggtctggcatggtagagtggacctgatgagtaggctgatttgaaatctgatctgaggtactttagtgatcttattggaaacaaaagaataacttagaatacgtggagggatgaatacttttttttttctacctcttttatactaaaatactatgaatctcagttgggcatgagaggtagtgaattgaagagggtttgtgtccgagctctctggtcaaagcttggatttacttattctgtgctataaattaaaaggaaatacactctcttaattggtggtgaagagacttgctgaaagttgcccaatttgtaattaaactttggatctaatattctttttttcattttctatactttgatattagatagctgcttgtatgactatacatgatgaaataattggatacatgttaaaaatgaaaactaaactctgcataagtaaaattagtgaagaggcagaaggtaggggtggcctctatgaagcaggtatgagaaaagctccatgaagttatgattacatttgtttgatttttttaattacaccatgtttagatggttatttaaaagaaggtggacatgaactcatcattttttatggctgcatagtattccatggtgtatatgtgccacattttcttaatccagtctatcattgttggacatttgggttggtttcaagtctttgctattgtgaatagtgctgcaataaacatacgtgtgcatgtgtctttatagcagcatgatttatagtcctttgggtatatacccagtaatgggatggctgggtcaaatggtatttctagttctagatccctgagga

SEQ ID NO: 67374 - DNA, 1459 bp, Homo sapiens
ggtaaaatatgcaatgtgagatatatctttgaaaagggacaaagtactatggaaacacatcatttgaagagagaaatttcagcagagggaaatcaggaaagacttcatgcaagagatgaaaaaattagatatctatgatgcatagtgttttgatagatgaagatagtgaagcatatccttggcatagcaaggtttgtcatatggccatttctgtcactggggccttagggtttaagtgcatatactagcccttgactttggagacttagagaccggtaaggagcttatcttctctccactcactctgttcctccatgtagaatctctttatcttccttccatctccttcaggacacaggcaatgtttggatttcctagtttctctcagaaacatgatactacatcgtgtattacttaagacagattcaggccagagtacacatacaactcttgagttggtcaaattggaattcagtttctaggttctccatgattactttaatctgatttatctgaagaaaagttaatctgttggtatgatctgatggcaaggctttacaagtatatgtgttttaatgtagtcgcaatttttaaggtaagttaaagcctttccagttgttacttatttttcagtgacaggacaaatggctggcataatttatttttgtttgtagatggatataactggagatcttatatattgggtatgcattttttatgaatttatagaattttagcctaagacgttggattagatgttaaagcatttatgttgataagcaagaagtaaattgtattctgatccagtttgtataataatgtgcaaccaacccaattcactaagtttgtattggtaattttgcattgctatgggacttaagttacatatataagagttgacagttatttcagcatgtgttagacttgaactccagaaggttaaggggaagttctgctatttattttctgttcaaaaacagatgaaaaaaggatctttatattattctctgtcacacaccggtaaatacatggtcttcccaaatccaccacgaaccaatgctgtgagctgcttagtttgcttgtttccctaaagctttcatgtgacaaatttataattttgtatgttatttctaggtcaacagttagattaatgttttatctcctgagcaaaaacacagtgcttctttgtaaactttgttatcttactgaaactgaaaattgcaaaacaaagaattttctagttctcacattccttgatggagaacagtgtttatatagaggttatcttgtggtttattttatattctacttaactttaacatttctgcaggtagaataaatatcctatttaaagctttcaaatcttattaattaaaggtagttgtcattactaattgtttactgagttttatttatttttgcttcattgtagctcatgaggaggccacctaaattgatc

SEQ ID NO: 67375 - DNA, 3718 bp, Homo sapiens
cagaggttagccggtgaccctttggcttgatccgggcctctctctgacagctttcattcattttaaagaaacctgggaaaagttgatattcagaaagtgctggttagctgtctgttactcaccccaacaaaaaagaagtttcatgaaatgtctttcaacaatggaaaaaaataagaaaaaacaaaacaataagcaggccaggtgtgtgtggtggctcaagcctgtattcccagcactttgagaggctgaggtggggaggatagcttaaggccaggaattcaagatcagcccggggaacatagcaagaccccatctctatagaaacaacaaacaaaaaccaaaaacccacaatggcttcctgaagttatttagagttgattttgtaatgttttatgaaattttaccccagtaggttaatccaattctgttttgcttattctgactttgacattcacttgcagtccttaagcacgtatcttttgaatacaagccaagccatgcagtgggtggcaaggtaagtcaatttgggattaaaaggctgtcagggataatgctgaaccacatgtggatatttgagaggtggctgcaccccactttgctctctgtccagcttgcaaaccgaagtctctggaaaaaggaacttcttaaggtaatatgattcacgtgagcagaagagcccatcagaggctgtctggtttcagtagagatgatcaacagataatgtactgaattggtaggcataatgaggatacaaagaaaagacatcctggaaacctaatgaagacttcactttattatcttttcagataattgcttagatgcatgtacattttccttttaaatttagagttaaaaaaaatcaagttgaaacacaaacataattttgagtgaagaaatgcttgagcatctgggaggtagagcaagagggtccttggaagggtatggagcagcacagtgaggctgtgacaaatgtccccctagccactggcctctatcaacccaaagtgcttctcagaaaacaaataataaaacaaacaggatgtaaacatcagcaacttaagtacttgccagctcagttgttgggagtgggtaaagctaaagattaaagacagcttgacaaaatcctacacactatccagctgagttttacacattatgagatgtggtaggacagaatgagggtgtttaaaaaaattattgctattatgcagctggagggcaatgggctgagttgggaatatgccaggagaacttgtgctgcttgtgtagataaacttacaggacttcagctttcaaccccatccaattctttctgtcagattctcttaaccttgtcctgtcccttgctgagcactgacattttcagagcagaggaaaatcatgttaaatttatgtatgaggaggggtacatctgtgtgtattgctgtactctggttttaaatgtttgggctcttttgattagttctgcccttggtttattttgtagtctcagaagtgcttataaaccagtgctggttaagagtctaatttagcttctcctcatgttctttggtcagcgtggtggcagtcttttgtggtcgtgcagaagagcctcagcccctgctgtgggacaaaggggaccaaattgtttgctgtccctagacagcctaggcctgttgcagcccagatggtgctttttgtcagtttagtttattgggattctgccgaatactttgtttgatgagagagttttaacactgaagaatgcatgaaaacctgggatgctggagaattgtgagagatgggcttggaaaggaagattcaagccaaattgtagagtaccttgaaacctgacaaaggggaatatatttttattttatctgtagacacgtaatggggaaacattgaggatgactgagcaggagagagaccatgtgaaggatggactgaatggagacttgtatcaaagagtctgagtatcaaagacttgtattagagagggttgttgtagtaatctagtcagggtatgagaaatggtttgtattagagtgtcaggagtagtcgtggcaaaaatatatagatcaggatgagggatgggcctcatctcacaccctgactccagtcaatggcagtggctccctggagtacactactataggaaggattttgtaaagttttgtctggcctcagtggagggtgaggtaggggaggagttctatgaacagttagtggtgtctgccatggttgaaacaatggagaagggggacaccttttctgtgcagatgttgcttctggtagatataatccacaatgtaatgggagaagtactaagaatcagtaaattatggagggtgtaaaagactactgatatttaagcctggcggaccggacttagagaaatgatagttaaaggagaaatatccagcaaacaaagatatgacattgaagtttgggactgcgattagtaccagagattggattggaggtgatttgtatagaatggataggtgattttactcttgcaatttggattgagggtgggaaaccagagagggcgggggtaaattagtagaggtcaacttgaattctgtgtccatatcaatgctgaactgattgtgaacatttttacatcttgagtcacattgtaaggagaccagaagtgaattgagcatagtaagcatttggaagtaggtgagtgtttggggttctctgtctacaacttttaaattttaacaaagctccacgatactctatttaaactcttaaatattaccttgtttattaattaccaaattttagtactgacttgagcaagaggtctcttgtctgctattttgagattatatagaatattgacactaagaagaaactcaatcgtaactcctattagagaagaaaaataactcagaagcgttaaagttttgcccaatatcacagagataataggtagcatggttgggcctgagactcaggtcttgtgattttcattctaagtgctttttctgtattcgatgctatttttttttttttttttacaatctgtatgatacagatttgaacattatttatagaaataaaggataaatgatgtgtataatctgatagaataattttgagaaatgcagatattgatagtccccagctttttccctttttattgtgctgattcatttatatattcataaatgtatttaaaccagtctctgaatatttaggtcagtgctagtcatttgctcttataaatgggaagagactgtataagttaaccagactgtctaggtttaaatctgagctcttccatttcttacctatgagatctttgataaacttcttacctttgtgttccagttctcttatttgtaaaatgaggatgataatggtgcttaccccattgggttactgtgaaggttaaatgagggtggatatgtaaagtacttagaacagtctttggcacatggcaagctctatatatgtaagatcatagccttgagagttgaccttttggattcaaattctaactccatcttttactagttgtttgaccttggacaattaacttaatttttctaagcttagataacagtctgtaccttatagggctgctacgagaactcagtgagataatgcagataaagtacattctcaatgcttgacttcaaataaggacacaatacaagataatcattttcattattaccatcataatcttcataatgaagaataatatgataatgaacat

SEQ ID NO: 67376 - DNA, 1640 bp, Homo sapiens
tacatgcactgagtctagctcacggtttctcaaacttcagaggcccatgacccttcccgatgtagttaaattgcccagatgaccctcctgtcatatatttttaattgtaaagcacttgaaattaatcatgttttatttctttttaaataagcacctcaagagcagtggtgagcagttttgctcacggcacttatccactcttaaagaaaattaaagattggaaagggccttgcgtctcagtggcagcaaagccatctacatgggggaaaacatagcagacaagagctgcgtttgatactcctctacacagtctcttgcctgtgcacttagtgaaaattggcaccggtgaatataacaaagtaaaagcattttgaattattaccgcaagccttcaagtggtcataacccaagatttcaagtacctcagtgaagggtaaggttttctacaatttgtgtggtaactgagtgcctttaatttaaactacacggagctaatctttaggagaattggaatctgcctctgaactaattatgatttacagaaattgataatttgtcttctgcatgtgtctgcaggaagaaattactattaaatttgattaacaaatgacagatttcagcctagtaatttaccatctttattagcaaacttagaaaacttcttatagtaatcttttcaatcatgtcaactctattctggtagttaaggtttatgtagaagtaacccatgtgtgtggctttagtaagaacctaccttacctttaacaaagaaatcttggtgtggtttctcttttcaataggcaagcactactcaaacgctcacactgatttcccatggtacttagaacttaataataggtaattaacttccaaaaatgaataatctgttcttttgaatacattcctgcactccctcaaaatatatgaaattgtgtaaaaggaagtagagcattatatcatatgttcgccttatttttcgtgcaccactttgtcaaatgtttttctttctcttcaaacagattgtaattgtgtaatggaggatactattggctaaagcagtgccatatatatgattgacattgtgaatgattctgaatcctactttggatgtacataactgagatgtaaaactattgtagcatggcagtatagtgagggcattaaacttttccttacatgagtgacatggtgtagttttcaaaagtatgttaatgtacatgtttttatatagttgaaaaaatattccattgcactaagcagcctagcagaattgttacagtggttaaaaatgcccttttatattttcatgtcaggaaaatcttatcttcttgcatgtcaaaaagggaatttgaactattagcctttaaagacccagaggtaaagtttaattttataatgacataaaataaatgttctattatctaagtaatagttcaccagaaaagtctgaaatggcctcctttctcaaggatgcagcttgtatgtgatgctaatattaaaatggacctgccaaattgagtgatgggaggtgctaataactccaagtggggagatgaaaacaacatattgcacacacctgctctcagctttatgtcagtctcattaagttattgaatgggtgagtataatggggaaggagg

SEQ ID NO: 67377 - DNA, 1054 bp, Homo sapiens
agttcgagaccagcctgaccaacgtggagaaaccccatctctactaaaaatacaaagttagccagtcatggtggcacatgcctctaatcccagctactcgggaggctgaagcaggagaatcgcttaaacccaagaggcggaggttgcagtgagccaagatcatgccactgcactccagcctgggccacaagagcgaaactccatctcaaaaaaacaaaaaacaaaacaaacaaagaaaaagatggtaaggctatgaaacaaatgaagactaattggcccatgtggtgtaaagccatgactttggcctttttattgtgaactacctccccgacagttccatagacatgtatactctgaacaaaatatgagtcattaatccctctaatggagggacctagaacagtgaaatagggaggacaggaaggagaatgatgctgaattgaactgggatcttcttgtctgtcaagcccttgaacagctttccctttaagcaacaaagatgacaagtttttgctattttggattagtgagagtgtacgaaatggtttccctttccttccaggcaaaaataccaacagaatctggcttcggaatgaaagtgctaatttcatttggtgactttcagatttgaaatacgggcttgaacaggcattgtgcattagtcagctgaggcagtggaggttatttttacgatgctaattattatttcctgacagtgatttactttatgttgtctactgtttacgcccccaaactagccattgttttaggaacagaattggttgggttgtcatgctcttttcaaagacaaatcttactattttatgcatagaaatactttcctgtaataaagaagaaagctttattgaagagaatcttgcatatgaaatgtaatctggataaatattcaaaactaataggtttatattttagtcttgatttttaaagtatatttttctgacatcctaaccaccttgctttatgtgcattaaagttaaatctgttttactgggatgcggctgaatttttgttactcacattgaacttagaaagg

SEQ ID NO: 67378 - DNA, 2649 bp, Homo sapiens
tagcaaagacatggaatcagcctaaatgcccatcagtggcagattggatgaagaaaatgtggtacatatacaccgtggaatactatggagctgtactgcctggcctggaaatctggctgtgacaggcactagctgagtgaaacttacctctgtcttacctcgactgcaagatggggataataataataatatctatttcatatggcagtggtgaggattaagccaattagtgtaaaatacacaaaaatactaaaaacagtgcccatcactgtacaatgctgtgttttttctaccttctcctgctcctcctcttcttcttcctaagtcttctctgttgttttactaagaaacacatattctttgaatatggaagagaaaggaatttactttgctcatcctgtaatatttttcctggagatgagctcttagctggcttctgggaaaagaaaatatttcctctattttatccagcactctgcatagcctgtgacagttatataaaaatatcagtttagatgtgttagagattgttttagaagactattccatgtaagccatgcattggttcattcattcattcttgcacaagtgcgtgaggattgcttcttaaatgcagggcactatatctgcatcagatggggacttagaatcatcattccgtgctgacaagccctctgccaaagggatcagtactccacttttgtatagaactgggacagactttccgtcacaattttgttatgaaactgtcaggtgagatgttgcactgaattccctttagtagatttatacagtttcagagattttgttatggtaacttgggggcttttaatttgattttattggattctttttttagactcttaaggcagtggtgttttcatcactacatctgcacaatttgttattggcattattgggaattgcggatgtaaagcagtctatgacttttgggaatattaataaactcctaaagtacttgttcaattagcttctctgacctgctgtccagaggttgagctgtcattaactgaggaagcttcctatggtttaagtggtggtgaggaaaaccattgtctttcttcctcctcatctttgtcttgcctacttcattcactactttcttgggagcagtgcaggaagaggccgtccaattccagagctgcagaggggctcctatgccctagagaatgagaaagagcatgctggttaggttttatattactactgtgcctatttttgattaagagaatgttttctgtgtgtccagaggtttaaaagattaataatttattttacatatctggagaattgcttctctctgcctcaagcattagggccagagttctgtattttgtttgcatacaatttgaagtgttttctctaggtcttataggggagaatctgaagacttcattgctcgctgatttcagtcttactgatgttgggctcttagatcagcttgctagaatacaaaaattattcttttatcgtgacaccaaattctgtaccctgggactccaagtggccattgaaagacttgggtttaatgttagtgcctcatgctatcaactgcctatctgttgtgaaattcttttgttgtcagatttgtcgtttccttttcagatagtagatcatctgatttagagcatgaaggtacgtcttcctaagtttctatgacagaaagatattgaagaagaaggagaaaagccaaataccagagaccagacaaggtggcaggaaattgcaaacatggtggaatttccagtctttttcattttttgaagtcacagataatttaaaaactactcgcttttacttttttttgtttgtttccttgcttttgcaaccatgtctatctgccaacctttctaaaatgtcatgatgtaattattttaacaggcactgtatgctcctttatttgggggatattaacctttctaaacaaaaggaatgttaatatacactggaaacacaactaatgggatttcatttttcttgttaggcaagaagcttgactttttttttttttttttaacttctcgtaaaagaatgcggcaagtgaaataattgccttaagctaatccatgatagcgattttaaacgtgactttccagatcacttttatatggcttagaaagaataatgtgattttcttgtttttgtttgctttagctaaacagtgttgaaggatgatataaattcaatgaattcaaaacaaagaaaatgctaattgctaatgcgctaagttcttttaaggcatgaaatacagtgtttaattcataagcattgtttcgttttatatagatttaatttttttttttagttagtatgggacaaactcagaataaattagccagctagccattttcttaattattgtgtattcctatttgatgtttaaatatatatgacctaaatatgttgtggtttttattaaaaaaaaaaaaaagaaaaaaagaatggtcataggctctcagatagtgaggcaaagcacttttaggatttctacagggcacctcctctctccctggctttccacctctccccttccctgccttcttccctccttccctttaatatccactgaaccattttcacatacttcctgaatcacccttttgaccaatagcatgcatttgccatggc

SEQ ID NO: 67379 - DNA, 1006 bp, Homo sapiens
tcctatagttttcagagatatatgtgatatacataaacttggctctttcccatgacctccctattgctgtttagggcttaggtcactttatattgtaattattgggccacctgtaaatcccttcaaagaaaggactgtgtcctattgaagtttgtgtctccaatgctcccatcagggctttaagcagttgttggctgtcctagtagaagggtccgtcatcaaggctcagtaacctcctaccatttcttgaccctccttccttgccctgccttgtccagtttatttccaggtcttaagaatatcagggttatgtgggtggaaagaagttgcttcgtcctctgttgcagacggatctaggcttgcatattcacttgatctcttatcaactgtgtgaccttcggaacattacatattctttgtgccttagttactcaatttgaaaacatgaataatcatgcttaatttatagagtcgtgagaactaattaaaataatgactagcatgattgtcacatagtaggtccttagtaaatgatagtttccccatatcttttaatcagttcaccttcttcagtaattttttgaaattctttcactgcattagattcttgttaactgttttccctattgtttagtctcttctgcttccagatcagcagagatattgctgccagattaaatgtttattaattttgtactgtgtgctggacactagattttttctttcctgtgcatgattttaaacaaacaaaaacagcccatcactgcttcggttcacagtctggccgtagcctagttttttagccttatcttgtgccatgcctttcacatacctaacaatccttacaaattgaatactcctagttcctgattgttaggaattgggatgagacgatatccagggactcaggaaggctcaaatcccatcctaccaatcacgtctacccacttaccaccctcctttcccaatgcaaggaggagcagaatgagaatctgaataccactcc

SEQ ID NO: 67380 - DNA, 1025 bp, Homo sapiens
tggcagaaacctgaatgggaagcaggctggggtacagcaggagcgaatgcctttgggggagcctgggcttctgccagcacatctagctggggttcctgaaaggcccgagggacattgcttctccattgtcatattggagattttgttccaggagggggatgaagagagcatatatttcaattttcttcacagttgtattatttgttagattcctctaaaagacagttgatttttgtaagccagtattaaaattccaaaaagggattacaaaaatgtttgcattgtaatgttataacacagttggaatacactttagtcttcccttttggttataatgctatcttataagaattgtagaatacaaagaatggttacatgtctgaaaataatatatatatttcttcaggcaattggtgtttttgtgttcttaaaaaagccattacagcatcagtttgtctcgtgtgtatattttatagtagtacattaaacacaaacactgacaaaagttttttagtttagcttaaaagcagtagttatttctcatatactattaggtagaggtcacattgggatttacatggactgctgttttccctgttgaaagggctactttaaacaaatacttgaaatgttgtatagccacatttaaaaaaaatcccttataaggatatggaatataccactgatttcattagacctgtcattcactgacattcccctatttatttatttactcattcaaaaaatatttatcaaggacactttatgtgccatggtctgtgtcaggtgctggagggccagtgaaaaatgttcgtaagtgacatctgctttactgcagggtacttgtcgtttcctcctgtagttttgcttttggagacattagatgtatcaaaattgttaatatttttatatttgcttgtaatttcttccaaattcgcaggttatttaggtcaacttatttgaccttactgtcctcattatattatataatatgtattatataatatatataatataaaatcata

SEQ ID NO: 67381 - DNA, 1817 bp, Homo sapiens
ggtatattattttatttccaaagagaggcttctttatcctctcctctacatgattaatgctcttggccagaatttaagctggcagggcctggcacatagtaggtgaacaatgaatggatataaccattgttgtggtttttattcaaggctctcaacatgtgattgaatgaaggatacctagaaattgaaatatcaaggcaattgtgaggataactgaggaacactgggtgaagcttgtgtaatgtcatgatttagcacatgccttattattttcgtaggtctcaaacttaaccctactaggagagaaactgtatttggaacagtacaaagcaaatatgtcagtgtttgcatgtgccattctcttacatttaaactaaataaatttaaaacattcaacaaagattgagtcaggagcgttttatctgattcatccttaaaaaaaagctttctttggtgccaggcatatagtagacactcagtaaatatttgttggcacactagcttggtgctgaatataagacatattcaattttgttgaatgaccaattaaaaatgtaggagtcactgtaatcacggtgggacccatttctctaaggaagtttctaatatgactgtgtcatgtctttgccttgggctggtcttctatcaaggttgttactgacatggctatgctttattggggtatctactatataccaactattatacttggttctcgagcaatatcatctcatcttaatacattgtactagtgagaattacaagaaatttcatattaaaatgaaagagaaattttaatttaatttttatatccccaaattacttaataatctgctaaagggaatagttgtcctttccctctacgtggattctccatcagaagctcatgcctttgagtgatatacttggccactcagctggaaaactgtcagtcttcataacaacattttagatcctagaacctgtatggaacagtttctcaaaaatttctaccatcttatgaaaagccacacagatgtgccttcattttgtagtatattaacaagatggtaatgcatgtatgtatacaaatctatcctgagagtcttctttgagggttgattgaaaactcactcctcatcttggttttgtttgcttgatatgggaagcacaaaacatttatctttatgttctgacaatagaaatagtagttggtatgaaatactcggtgggcgaagcagtgaatgataagggaaatagtattttgcatgttgcatttgcaaaggaaactcttagaaaagtggctaactttagatttacttatactccttagagttcacagggatgaatttaggtggagagatgatatttgaaggaaaaggtacaggtctacgtacagtagactagattaggtgatcttgttgtgcaatatgttttgaaattactgatgtgacatacattaatctcaaaataattatgctgtgtgaaataagccggataaaaagagtgtaataattgatatggttcggctgtgtccacacccaaatctcatcttgaatcgtagctcccgtaattcccacatgttgtgggagggacctggtttggtgggaggtaattgaatcatgggggcaggtctatcctgtgctgttctcgtgatagtgaataagtctcacaagatctgatggttttaataaagaggagtttccctgcacaagttctgttcttctctcttgtctgttgccatgtaaaacatgcctttcaccttccgccatgattgtaaggcctcctcagccacgtgaggcctttttctttataattacccagtctccagtatgtct

SEQ ID NO: 67382 - DNA, 1722 bp, Homo sapiens
cccatgtcccagctacttgggcaggtgagttaggaggattacttgtgcccaggaggtcgaggctgcaataaggcatgattgtgccactgcactccagcctagggtacagagtaagaccctgtctcaaaaaaaaaaataataataataaggtttgggtgtgtgatttggggcagtgtttttggcatgcacgggtgtattgtgggtgtgcatatgcctagacagacatatgcacaatctgaagacataataggcattttcctcgaaataaatttggctcttagaattgctttcttctcagtcacatgcaaaatatggtgaagaatcataagcagtcataaatactggcttgtatacaccattcagggtcaccttcaacaaaatacaagtcactcaattttatccagcagtcacagtgctggatctactgtgggactcttaaaatgtttcaagtgagagctggatagtcataggtagaatctgagttatacattctgatttcctttatgggctatagattaactgcaactctgatactacttcattataatcctactgacttctttctggtaagagaattgccaggtacccagctctgaatgtcctgaatcctgtcagtagctctagtttataaaggatgatttgctaatgagatttcacagacaagcactagatattgacggtgattcaatgttgtatgttgtctgagtggttgttttgcttcagggtacttttttattttccatttctttagcaacctctttccccaccctgctcttgcagaatttgagatcaagaagtagggcattattaattacatatagacattatagaatgttttgggggttcttaatcaaaatgtaaatgatagtttaaaacatagtttgaatactctgaatgcctagtacctatgtagtcagtaaatagtgattgccgtgaggactacaactgtatcaagacagttttatcctagtgttcagttaaaatcttaaaaaacataaaataaaattcttgctgtattttatgagtaggttttaggaacctagtaagatttttaaggcagaggaacctttagaaggggctcaaggtcacagttggcactcctgtgaaaacgtgtgaattgccttccagacacttttattttgccttaagactgcaactatgttctgtctaggggttctgctgacagcacgaccacacaagtacagtttcctttctgtgcatcagcacaatcagagattgcaatgctgcttgtggccattaggatttagtcatggaatgtaaggaaatttcaacaggaaatgtatctggctttgatatattttcatctgccgtagtcgcttaacctgcatgcctttttggtgtcagcatttaattctaggatttcatctggaatatgtgtgtatatagttttctccatcactgtctcaagtaacccatttgatgctgttcatgtacaggccctgttatcattaataatcatgtaagcagtgttagcaggttttggcaaatgcaccgtttcatctatgccgaggaacataaaactcttatcagcaatataatttaatttcactgtacgtttttggttaggatgcagccaacaaagtcagcaaaagtgcaagttgtttttagatggctcagttgtattatagttatacttactgtacctcactgctcttaagtgtcttcaataacaaatacagtatcagtgtcagcttttggatt

SEQ ID NO: 67383 - DNA, 1956 bp, Homo sapiens
tgtgaagctgtttaaaatttttcaacagtagagagtgataatgtgccaaatgtgaaataaaattgcagaggtgaaactgtcaacgacttaagtgttactactgactgacagtgacaggattcaagaagtatcatagataccaatatgctatgtcacaagtataatatgaccagagtggatgtggtccctgctaaacaagttaaacaaaaaggcttttttttttcttcctagtgctttatattttcccccactatagaaaatgcatgaagactttttaaatggtgacatttatggccatgatagatgtgtgcttctacaagaccaagtccaggtgtttccattgggaatacatggaaggaattgatttaagcaagtgattacttaaaaaggaaaattaaaagagtggaaaatggataggagagaatgttaattgggagggtttcaagtataaaggagacttaaggatgggcataaatgtaaatgttaggaacacatttgaaataacttggccttagaaaagaggtttatagaagcatataatttaagaactgtaggttttgaaactgagacacactcattgccagacagaataagaatgaacatatctgaaatttcactgagaaagatcacagatatacagtcatgtgttgcttcacgatggaggtatgttctgagaaatgcgttgttaggcaatgtcatcataatgcaaaaatgtagattttttttttttgtggatcatagagtggatttaatcaaacctaaatggtgtagcctatgacacgcctaggctatatgctacagcttattgctcctaggctacagacctgtacagcatgttactgtaatgaatatagtaagcaattgtaacacagtggtatttgtgatctaaacatatctaaacagaaaatgtccagcaaaaatatggtattataatcttacgggatcactgttgtataagctgtacattgttgaccgaaagttgttatgtggtgcatgactgtatttaaaattataagaacacacaatcccaaggtcatttgattcaggccccaataaagcactaaaatagtccaagaatcttaccttttcccattagtgaatgaaggcattcttcagacttcctagttgaactgatgcaatgatcagtggaccttgaatcaaaggaaacaaatttctgtttatcttaagccttctcaattgtgcttttgtatgcattcatcttattctttctattattcttaacttagtcatccagattgctgcttaaaatggaaaattagcctaaaatggagtgggcaaacaaacaaatcgatcactgtccagagtttctgaatccttaacccatttcttacaagaagagagggaactattttctttaatattgaaaagacgttacctggagcacccctaatcaaccttggtccacaagttgaatgatgcagtagaatttagaggattctgacattcagagaacagcagccaactgtcagaaaaacggtaggagatggtaataatgacctcgatttaaggtcactggtgcttgaatgcttgcggtattttggcactagctatgccacgtcctgctgatcatggaacaggtgccaggttcactcagtggggccaaaggaactttgagtatagtgacaagaggctaaagagcctcagccgcttggcttataagattgattcttaatggaagattgatctggattgggtgaatctgtgattttttttgttggtagggacttgaaattggtgaatgagataaacatgaagttcagtctccttagcagataacaacagctttgctctatatttctgtcacctagcacctagtaggagcttgactattgaatgaagaatcaactgaacacattttctaggtagacttataatagaattaatatctacattggatttgtaaaagtaatgatggtaccagtatacatttaatta

SEQ ID NO: 67384 - DNA, 2328 bp, Homo sapiens
agatcatcttatattcaggattcacttaaatttgaatttggatatataaagtatctacttctggagataaccttactgtttttttttctaagaaattctaagcatttccagagaattgattaaaatttattaaactacagaaagtgaaatcagaagactactgaataatttcttaaaatcatgttaaaatatataaaatttatatgcatataagtatgctaaaagtatacagaaaagaaaaacgtggaagaaatgcaacaaaatgctaacagtggttgactgggcagtgggattcgtgttctcgttactcctttattattttctgtttcattttctataatatgcattattttaataattagaataaaaagaaaatgtaaatgaacacttaaaaagcacatgttaaagagaacacttgatttgatgtataggttcatcctttgtaggttaagcaaatggaaagaaacttctttgtacaaaaactaattccatgtgggcattggatacctttctcagagaaaataggttgtctagccagcacaccttgtttgttttttaatctctaacaacgttcaggatatcatacaaaagagaagtcttggaaattcttacatatatgatgattatttttagagatggggccttgctatgaggcccagactgaagtgcggtggctattcacaggcgcaatcatagctcactgcagcctcgaactccggggctcatgctatcctcctgcctcagcctctggagtagcggaaccactggcacatggccattgtgcctggctttacataagttattaagacttttgttttgttcagcatatctgggtaacattgcatggcctatcccaaagtctgaaatattttaaattccaactgacaagatgttaggacactcaaaggaagcattgaccacacataaaattgtttaaatatgctcagcacttttcagactatttcacattaattcctagtgaaataatgtagaaagatgactttaagggtaaaggtaatttaggccttttttgtttctttttttttggtgttgacttactctgactttgagtaactcaagtcatatatttccagtttcctctgtgttactcctcatttgacatcttaagaaagtttttggttttgtttttgtaaattgccttatttggaggaaatgcatgttctaagaaatttgaacacaagtgtatccttgggatgctatttctcttcctttctctagtgccattttttacatcacacagatttggaaacaaaatgacgtatttctttgcatgttgtgtgatgagtggaagaaaggaaaaaattagcaactctctgcatatacaaagagacatttcaggatctccgaggggatatgaactcccaggtactagtagactaagcctctttacaaccttacaaaatcctgtacagatgacctgtgtgtaaaatgcactgcctgttgctttggacatcacttgacactaaaaagctatgcattttgtatttttgcatgtcagaatcttagccagaggaattaaaaataaatatttaagtaggttcctgacttttcctatcaaggaggcactgagacaggcaatttgcttagcaagtctttttgttcacctgtttttgtgctgcggagaaatgtgatgtttgcttctgatgattccaaatgtgcgtgcattatatggtcagagcagagtatagaaaatgccagtgctatctgtgcaaggctggatgataacatgtgacccgagtgacagaaataaatgtgtcctggcaaaaaggagtcttaatctgaatgaaaatattaccacacagtgggcagattaatcttggcagtttatggcaatggccctcatacataaaacctattctgtgttcccacaaatgcccaatcaatcagtagacagctgccccagtgttaattgtgaccgtgtgggacacttgggtaaaatcttcccatgttaatgatcctgaatttctaaatggtcttatcctaaaaattgattcttagtttaagcaagattagcaatgtgggcctttcagcttttttgtttgattttttgaaaatgtttatatatttggggtttaaacaaagaattttttttttattttttgccgcgctcagaacatcttagctaatatatgaggtaattaaaaagttactgtagaagtcttcctgtctggtttgattgatgctagtagttggttaatcaaaaaaagtcataacaaattataaatacataccttctacttttcatgttaatattaaatctgtatatatatatttttgtttttttatttgccaatatttgatattagg

SEQ ID NO: 67385 - DNA, 3215 bp, Homo sapiens
acctcatgactgtatgtttctattttcctctctcagcctttctgttacttttgtcaaacattttacttttatgcatatgctataaaccccacaatacattattattgtttattcaatttatcttttaaaaattaaaaataatttaaaatatcttttaaataacaaaaaagtcttacatatttactatatataaagtgcattttttggtgcacttttttcctccctgtcaacctatatttctattattttccctctgcctgataacttcctttagctttgcttgaaatatgggtctgttgctgatgaagtgttgctgcttttattttgcaccccatctccttttttataattgttattgttcaggcaggacagtaaatcttgtccctgttaacttcattttggtgagaaatggaagtcttcgttagttttaaatgtaggttaagttgtcggtagttaatgctgaattctttaatagctgagttgcagtaacattaggtattcactgtgggtgcctctgacttccttcagaggtcaatatatagggatcagggtggataactataaaatccaggttgtattcctctgtacagatagtgtagctgtattagtctgcttgggctgccatattaagataccatagtgtgggtggcttaaacaacggaaatgtatttctcaaagtctggaggctggaacttccaagatcaaggcattggaaagattggtttgattctgagactcttctcttggcttatagacagccagcatctctctgtgtgtttgcatgacctcttctttggacatgaacatgtgatgggggaagacacagcaagctctctgatggctctttttttaagggcactaatgccatcatgagggcctcacccttataaccttgtctaaccccaatttcctgcaaagggactgactccaaataccccctcgtcagggcttaggacttcaacatgaattttgggcggatacaaacatttggtgtatatcagcagccacaagttatagtgttctgtgaacctgaagctttctccttataacttgtgtagtttgtggttaaggaccagagccatacatctgctctgatctctttcttacccctctaggcatctctgtggtaatataaggaacactttacccatcaatagattagaaccttacctgtacttgtctggagagagaatttttgttcccgtaattctttttgaagtgtcaagaacttatttagtttcactggattaaagagagcaaaattatcagcttgaatcaggagcaacttgaaggagagatcagggctatgaagcctgttgggagatctgcatttataaggagatggcttcagcaaggataagtcatatcttaacatcttagtcttaaaggacagatttgttgcaaagaaaatggaaatggtaggaaaaagtgctaagtcttttttccgtggcagcatttcagaattgtgtattgtagctcaatttttgctgttgcctctcccttctgttaatattagagtcagaagcctgatcagacacagtgctgttttttctgcctaaccaaagctgtggacccgtgaaacctgtaaagatattaaagaattgagaaatttcatgtgagtgaggtggttgaattttatttctgttgttaatattaggtgattgcaaatctacttattttgttacagagattccaggatgccaatatgcccttaaatttgttcagaattttatgtgggattatacttttatattttaatttactttgtaacttgttagctattctttctctaaacatctgagagatatttttcttcccggctttaaaatttaattgaaaaataaaactgtgactatgttttgttaagttaaacaatactctctgccaggcttcttaaggcaaataggattataaaatcttacatgcccagttcatattacttgctctgaacaaccgattaaccactcccatagaatcctaggagagtttaaaaattacagctttcttaatgtttctcacatttgcccaaaggtttcaaagaaggtgccataagaaatatatgaaggtgcccttggagatataggcaaagaaggtgctgtggaaattagctttcttttagtggcatgtttgcagtgagattgggctattaggggcattttagttttcctgtacctaggacaatctgctacttacaatgattccctgatgcctttataaagggaaagaggcttccgtttttaggattcatctaacaaagtgttattgcttacctaattttttttttttttttttttttttttttagattttttttcactctgctaggcactggggagctataaggactaagaggacctcttcccctctagaactgcactactaaattgggtagccattagtcaccttgactatttcaatttaaagttaattaaaaattcagttccttagtagtacaagacacattacaagtgctcaatagctatttgtggctagtggctatcatgttggacagcatagatataggacattcctgacactgcagaaacttctgttggacagtactgtactaggagttattattcagatttatttacccacaaaatatggttgttgtagtagtgtttttagtctcagagtcatgttaacccaaagatggataggaaaacaaaaatatgctacaaggaaaattattatgggctattcaggtgttcttgttactgtatgtgcccctaatattaggattttcttcacagaacattatcattcaaaaaagaagtcattacatatattcaggttcttacaaaggctctcatgttactgactaatctttcaattacagtactttattttgaacatcaaaatggctttcatgaatgtttgcttatgatgcttgaagaagttactggtaaaatcagatttataaagaagaaagatttaacacaaatttagtaatttggtcatgacctcacaacgacaagtgttgggcattattgtaaacaaccctttttaagaacagataaagcaacaccacaagtgtcattgctatggagatcacaacccctgcaggatctatgacaaactgtcctgctatttagcaaattggtacttgtggtaaccgtgccacacctgaattttaaaaacggctatcccccaaacaatctggaagggaagaccatttcctccggaaagtaaaaaaaaaaaaaaaaaaaaaaaaaa

SEQ ID NO: 67386 - DNA, 2618 bp, Homo sapiens
aagagtcaaatgaagtccgtgagtataactacttgattagcacgccaagtttttcttagcctatagcttcttcatcccttttttctccctcgaagtttaagaaactggactgcttgtcccataattgcccacagtctgattttgcttattatgtcttcctgatgttgtttaacatgttttttaaaaatttttttatttcttattagtcaaataagtctatgagattcagtcttacttttcttttttggggtatgggagggtataaagggtaagaatacttcataggtaggtatataatgtctgtacctttttgtatgcatgtgatgtcagtaaccatttgaagatcactgcgtagatttattctttcagtgagggctgcaaaatggtgaggatcttattctgccattccttcataaagagaaacttccccttatcatttaacttaagtgcaatatacatagaatggccagacaaatgactgattctttacctttatttactgattttcaaaataattagttggttctcagcacccttcaaaggtatttatgaaagttttgttttgctttagtattattttgaatttatagggttaaacatgcttcaatccattcaattattattcttactgatgctcaaattatcctgcttttggctagtggaagactcttttattatgaccccagaatctttgctaatatccttttctggttgcgataagatattccaggctcatcttagaaggttttttgttttgttttgttcttgcctcaaacctggaatcagctatttctcctagaagctcatttcttttagtggaaaattagaaactatactctggtccctgggatgtgcttattcctactggataggtcactgtttttagatctttttagtgtacagaactaggcaatgtattgttgttgtcttaaagataaaatgtataaggactccattttgactcttccaattcaaattcaagactacgtagctttcacttaaaatcatgtatttgtgttttcattcatgcatgtgaaaaatcctgacaccagcattggagattcttaaactgggatacatcatacgcacagtagtttctgggaggtaaagcttggcatctgcatttttaacaatttccacaggtgattctgatactcacccaaggatgagaaccactgatctattttttacgaactattttatgttatagatacttaaatggaacctcccattttcttcttagaatcccccttttctttgttgattgtccacattctttcttcttcttcttcttctttttttttttttttttttttttttgagacagagtcttgctctgtcacccaggctggactgcagtggcatgatctgggtcactgcaacctccacctcccaggttcatgcaattctcacgcctcagccaccggagcagctgagactacaggcgtgcaccaccacaccctgctactttttttatttttggaagagatggtgttttgccatgttggccaggctggtctagagctcctgacctcaagtaattcacctgcctcagcctcccaaagtgctgggattacaggcatgagccagtgcgcctggccaaggttgaccatattcttgatgagccacctgtgtacaatctgaattcttttcttgtttaactcattggtctgtgcatctgacagtaaagttgagttatttcacttctgtgaaagccaggctgcagttatctttgaccgcttgaaatgctaaaatacaggtgaacctcacaactaaggctctgcccaaggccagagagagaatcctccctcattgctttgagcagaatgcctggtactggagtagatttgcttaaaggcaactctgcatttgataaaatatcagagcaatttatgtccttgtacccttgttccttttctttcctcttaggcagaaatgttaattgacaatcaaaggagtaacaggtgcatacctgaattcacaagcctttggggcccatcttgaatacttctgcagatccaggcctggtttaggttatgccttctttcatccatgctcacctgagagttccagtgttttccttgttcttgtttctgcattcagagttctaaaatttgactctggctggtcattttatcacttctctctcttagagtagactatagatctatatctgaacatttagcttctaattgatttgtattgataataggtgaaaaagaagttaattagcctggaaatgactacaccataagatcagactttggttaaaaatttaaccacattaattttgataatcttttacattcatttaatattagctttgttttatgttaaatttgcaaactttcacatttttatcaatgttcttgagagggaggcaaagaaattctcaatttatgatgcaaaatggaacttcaggtcaattatttgacctctgtgatttagatcacacatcttataagtgggggagcaactgctcagtctgattcctggtatttttttctgttataaagcacactcttaaaaagaaagaattcaaagttgcttccaaaagtacaatataagaaaaataattttaggaaaggtcaaaaatgattagaagaaggaagtgagaa

SEQ ID NO: 67387 - DNA, 2189 bp, Homo sapiens
tatatatttatgtacttattgacttatacttctttgatggtttgctctgtatccgtgcagttttccatagtgcaggaaatgtggatggaatgaattttcctgtcattctcttatctgacagtctctgcttgatgtggcaaaggagaatcaggtgttcaacctccaatgagagtaatttctgatatcagttggtagttgctgtttaattctcaaggtgcagacaaggtggcggaattgacttatctcattttcacattctgggagatgatctgttagtcctgaggatgctgtcagttttctggtattactctccctgcgtggtcattaacaatagcagagtccataaattgatcccaggtttgaattgtaagttgttggccctgaaaacttggtgaacaaacttgctgtcagtgtttgtattgatggaaatagtctgaggtcagcttcattactgcaccctaactgtctcatacattgtccgttgatttttcggttgtgttgcaagagggttcttgtttcagacacttgctaccagacatattcacctcaaatatttacagtacaatgaatcattcaaacttaaggttggcagtgtctttttgaaatggtgttcatgaaggactgggttaatttatcagatacagattttgagaagtttttttctcttaaagcaaaagttcaatttgctaataaatcagtggcaactctgtcatctgacacatggatacttgtctctttcacactgaagcttgccactggtatcttttgcaagagtggacatattcttatctataaagtattttctagattcattcagaaaaaaataaagtgagaatactagtttccttcttgaataatggaacttaaagataggcctaggtatatgaattattactgttgcccattttgaatgactactgagctttggcgattattatcagcttatttctagaattatttattaagtagggaattttattcattgtcagatttgtaattttagctaagttctgattagatcaccttgtggtttcttgcaaacatttttagtccttgttttgtgtcatcatgaaagaaaatttaacaaaaagatgcatacttgctgtaactcctgggcatttttatttattcatttatttttagtcctgtggtttctctctataggtgattggaacacaccagacctctcagaagcgttctgctgtttccttcctcccagtaagcagattatttgcaagtgacttgaaaataatttcaagtattggagagctttcttctcagccacccttgccaatgttgtaggtgatgcacaaagttctgtaggtcagcttgaaatcatcatgcttgcaaggaaaaaaaaattaaaattgacttcaaaggacaactctgacacggtcaattaataattaaaacagttttttaatgagctatgcaattacctgtatgtccctggagatgatggtttatggtattattgcagtgccctttctttagtcatggcgcatgacatttgtaatttaaagccggctagacattaaagtgacagaactttcattaaccttgtctaaagtttgctgatgacaaatgacttataaaacatgctgttgtcaaaatataccacatatttaagtaccttaaaagtcctgtgggctctgagaagctatggagactcagagagacaccaagaccaccagtgtcctgtggaattacttgacagaatccccggtggctggcactatttctttgtactcaggtaagtggtacctgcttcagacaagagcttcatgtacttttcatggctctctggttcaggtaggtttcccacgggtttttataccacgtgacacgattctctcaatcagtggtttatgactattgaataatttcttctaaacctgctttgatatgtaaactttcaagtctttagaagcagttttattttttcatcttgaaaccatttagcaattatgttttgattttagctttttttgtatcttggctttctaaattcttagccctctgtttgcactatgccatacctctcttttgtcttctccctgtatttgaaattttcattttttgtagaaactatgtagaaacatcctctaatcttaaaaaattttctcatcatatttcttttagaagaatatcttgaaatgctaccaagggagatattgcaggtggatatc

SEQ ID NO: 67388 - DNA, 1088 bp, Homo sapiens
ataatcaggactggcatgcgagggctgagaattgcttgagttcaaaaatcagagctagtgtaagtgcagttttgtgtaacttctcttcggctgccaactgaccattttataattctttcttcccccgattgtatttttcttggtttcctgtttgacttatattccaaattcactttacatctttgaaattatggaaataaggaaatagaggaactgtatttcttcctttctgagtgtagcatctggatgctctggttttaaacgcgaaggggctgtaaaccctaggaatacaatgtcttttaaggaccggaactagtacgtcttcagaactgacttcaaatagtttatttcaccccattgatctgacctatatgtgttgatttttattatatagtctatactgtagggggaggaagagcctgcagttttactattacctcataaaattaattggtgcctaaaacaaatagtattaaagatactgtattttataacataccaagatgactgatatagtttctgtagggagtttttgtttttctgtgtttgtgtcaataaactcataaaatctgcagaatgaaatgagtcataatctcatttttactatcaaaaagtgaagttgagcagaagcatgaccacgtagttcctcccagtggctcaaacaagtaaataatttaacatgtcttcataacacagggttttgcttatatcaagaaacacaatcaccaccccttccctgttcaatgtaaggggcttagctttattggagtcaaaaaatctagtgcagtactttgtcagtcagtgaatattgtgagcttctttattttccctgttgcttttttacacaaatgtgggaaatgttggtatcacaagaaaatcagactacatttggtcttctaaaatgtaactccattgtccccatgctggactgaatttctttttaatgtgctgttttcctcaacccaacctttctatagggaagagtagtaagtttattgtcagtattgtggatattttaattgaagataaacgagttttctttttaaatgtcttcagtattacatatctttagttttattatcctaatt

SEQ ID NO: 67389 - DNA, 2534 bp, Homo sapiens
gaatgaatgtcagtatgacagtgatttttgtgatatggtcttgaagctttattcttcttgcctattagctaatacaggatcctaattagccattaacatgctcttaccttgtatggtccaaactatagaagcatatctcactgtatttcagagaatgtaactgctggttaccttttcacttattctgttttatgtatttcctttcgcattgaatattctccttttgtacatttctgaaatagagctgtacgcttcctgggcatggatagcattcgatccctttcaacatagcttcagttgcctgtagctatctacctgtttatttatctaaactaatactatgtacagataaattttgacatgatgcaggtttactgttaaaatgttatagaagaatcatgcaggaagacaactttaaaatagattaaagaagcaaaagttaatacattgtatgagttaggagatgataataagacttttgttttaagatatgtcagagttttaagaagggctagcctattgtgagagcttttaaggagtctgtgattttccttgggaatacatgtaaagtccttttctttttcttccctattttgctacccatttccctttaaagggagacttggtttgtttcactctattttcaaatgcaaattcagcttattcttgtcacgtgtaccatctctaaggatgatacttgctgaagtctaaaactatttagcgttcctggatcttacagttttaagtagattgttccttgttttgctccaagtgtcttgagtgatttggctgttaaaccagcagaaacctttgttttcttagtttcctataaaggaaataaaggtgagaaaataatgatttcctggataattcaaagagaagatttaacataaaatctctaacatgccactatacaaggacttgcaaatcagcttatgttacaactcagcatgacaattgttaaactcatttatttttaaagagcttttatatgtgatacatgttaaaagagccaagaagagagggacttttagcactgttcttcttgaatataacatacatgtttctgaactcttacttggggtatttcatttgtttgctcattcttgatctgcacagcccttaagctgtaagctttttgaggacaggaaacctctcgtgtgcattttatattcctagaatgtatttttttttcttgtgtgacttaccccggatctttatattaacagtattattatttacataatatttctctttaaattggtttacctttttacccaacctcatgcaaatcagtattagccatgaaattacaggtttgttgggctgtatcttcttttaatacatattaatatttacattaaaatcctaattattgccacacacggtggctcacgcctgtaatcccagcactttgggaggccgaggcgggtggatcacttgaggtcaggagtttgagaccagcctggccaccatggtgaaaccctgtctctactaaaaatacaaaaactagcccggtgtggtggcgggcacctgtggtcctagcaacttgggaggctgaggcaggagatggcttgaacccgggaggcagaggttgcagtgagccgagatcgggccactgcactcaaacatgggtgtcagagcgagacttctgtctcaaaaaaaaaatcctattattagaacttatagatttttatttgtataccacttaaaagtcatctcatgcatcacacttgaggaatggtgccctagcatagccttgcacattctcacatgtagtcactatttgtttaattgtggaggggagggaataagattaatgtacttcgtgtgtcaggtattgttttcaatagtttacatatggtttctcttttaatccctataacaaccgaatgagaaagatgtctccattttatacataaggaaagtgaggctcactaaggcttagtgactttcccaaggtcaaatagttcagtaaaaattagagctgagctatgaacctaggtttatctgatttcaaagcttgtactgtttttgctacatgttgtggactctcagtgattagtgggttaaccttgtgcattactgtctgctttcctgttgttattcctctgtagttagaatagagttgaccctgaatggtatttacagtttgtcatcttgttctggaattgcattttgcacagtcttgaaagttgttgttaccaccttctttttttttttttttgagatggagtctcactctgttgcccaggctacagtgcagtggcgccatctcggctcactgcaacctccacccccgaggttcaagtgattctcctgcctcagcctccctagctgggattacaggtggctgccactatgcccagctaatttttttgtatttttagtagagatggggtttcaccaccttggccaggctggtctcgaactcctgaccttgtgatccacctgcctcagaatcccgaagtgggattcaggcatgagccaccttgcctggcctgttaccaccttatttttaaggtttgtatgaa

SEQ ID NO: 67390 - DNA, 2495 bp, Homo sapiens
aataagacttaaaaatacatttaatataaaggctgacatatattccagctctgcataggatataagtgttcctcccacttagggttgtggtcagatatataagctttcttttttaatatttggaatttatggactttgcccatgcaatagtctcatgtccttttctttttcaaaattacaacgggtttgtggaatgatggactcacaacagttaatcctgaatgacttaatgaactgccagacaggttaaggtgaaatggtgttctaggacagatcttgatttgtagaattaagggtggcaacaaacttcaaaattgcttctttcattccagcaggtaattttgttagaggtaactcaagtaatcttaatatctgaatgtgttcagttttatcctgttcttatacaggaaatcccaatgcagggaagaaataaagtagcttgaacaccaaagatactagaaaggtagagtctagggagctgtcagcaagctttgcttctattttttatactggtcagttgtgacttttgttaagtcaaagaacttagaaatttagatgaagggaggctgcctttgtgcagccagttagctggtctgggcagtcaatttgagtggtgaaattaaggctttatctacttatatttgggaggaattttctggcagattgcaaaatcttgattaagttagccccagtttaatatgtacctgtggcgggcttttttttttttttttctttaatcctttacattttcttgttataaattatgaattggtccacttcttattagacagactttgtatacattccaaggcaaacataaagtaaaaatcatattttcaaatatgtaatagaataattgagatgattctcagatgcatgtcccttagtagagtcatagtgaaggcatttgctggctggctggaggcattgttttattgtctgtttcaactcttgagagaaatgaacagatggagacctgtattagaagtactcacacatagaaaaagctttggaatatttttagcattgtactcaggagcagcaaatcctatttccacaattttgtgtatttgttagtgtgttatcttgttaagccttttttcccatctgcatttaatgggtcagttgtttctaacttgttcttttgaaatttttaattgaaaatctgttttttttttttttggaaagcacattttacaaataaaggctgttcagctaggtggctaggtggtaaaaactaaaatgagtatgaatgtatgttttctgtaagggttctgaaaacaataataggatctctttaagctctactgtatagggaggcgagtgatccatcaaaagcacagtcttagatttgggtcttctatttagattaggaatgttaagaaagatggatggtaaatgtcttttagctgtattgtccccaaaacatgaaatgaaatctaaagactctcaaagaaggtttcaattacactagcaaatgacttgaacaaggattgggtaaagggaggtcacgggccagtggaatgccagttgtggatttatattgtttaaaatgaaaacattatttccattaacccctttccactaacacctccaccagagttattttcagactgtacgtttgtaggtgttagtcatacttgatagaaatgccttatcacaagtgtgaattgcacagcctttccatgggtatatattttttccttgtccaatacacaatccagggtttcacttggctaatcctctagagaggtactggcatccctgtgttcttcaaacttgattttaaaatgtagcagtaagctacccagttgcaaagaagcatttgtaaatgttttaattaaaaacagaatgaatggattctgtgttgtggttttctgtgataacagccaatcgactgccaaatcacactgtgtacttgagtttagggagggaagagtctaggtttaagggtgactctcaatggatttgcccttaactgtcaatgtgggtttgagtgtggtttttgccctctcactgcaaatggagaaaagagttggtaagcagaagatgaagcatccttttaatgagtcggctatagtgtgcactcagggcagacactttaaaagagcaccattaatttgaataaaacaggagaaggtaggtactttgtacatccataaagcactgaaggggataaatccaattatctgttcaatatttaatggccatgaagttaaaaattttaaaggcagtacctcggagactgcttagtcaattctgtccatattatttttgacattcaaaagtcaaggtagaatagccatattgatggcagtgctcatcacgttggtctgccgatttagtggcagtgaccctgggatttgtgtttctctacacagatgaagatcagttgcaatttttttttttttccaggagctcttagggaaaccttaggatctactgagcttccaacctgtttctttcagtcctttgctattggctcttgctatgaa

SEQ ID NO: 67391 - DNA, 1001 bp, Homo sapiens
tatctttcccatctttgtttattaattttattttttgaatatgtggaacactaataagctttccaaattcaaaactctgtataaaggtatactgagacatgtattactgctagaagttggtcatttatttatagcaaatggggttcatctcttcaagtttaaaatgatcaactttattttttaatcaagcatacttattagatattcaaagagaagaaaagcaacccttgattcttgtgaccagccttagctttttgtatagtagaaaataagagatgtttggttcacagataaggcaagtgacaggcacttcacgacagaggcttgcttagcccctttgtctgtgtacaatgggttatgttccctgcttccatacactgttgctacttggttgttgttgttgtttttatattttacttcttgatgctagcttactggtgataaatttcattagttcccactcttctagtttaactttgaaaacatctttgaatagtgggtatatcaactatatgcatttttcaagggttaagctcttgatcacatgttgctttggttgaatgtttgtctcctccaaaactcatgttgaaacttaattcccagtatggcaggcagtattgagaggtagagcctttaaggggtgactgggtcatgaggctctgccctcatgaattgattaatctattcatggattagtggattaatgagttatagactaataggttataatagaagtgtagaactggtggctttataagaagcggaagagagatctgagctagcggactcagccccttcaccatgtgatgccctgagccgtcctgggactctgcagagagttccttcaaacaagaaggctctcaccagatgtggctccttgaccctgtacttttcagcctccataactgtaagaaattaattccttttctttataaattacccagtttctggtattctgttataagcaacagaaaatagactaagacatgtgtctttgtttt

SEQ ID NO: 67392 - DNA, 2331 bp, Homo sapiens
ggctcagaataaggagaaaagaggcattaatggctcatgaatgtgtggatgcacaactctaaataagtaccacttacgactgtctcctagtatgactatgacttctctgttttagttcccatctttgagactacaagtagctcagattcgattttgatagtcgcacatccacagtataatttacttacataacaggtgttcctgaagataagtaaatgtaacttattcctactaacttctataatttaaagaataaagcttcttttgtattatataattattagattatatatctaattaattattagtagaagagaaaaaaaatcatccatgaaccatctcctaggaacagatgaccaatattgatagtttcttggatttctttataggcatttttgtctaaggtttttccttttatctgcctgttttacttagttgtgatcatgctatatgtatcatctttagtcctgttgtttgcacttaatatcatgtcatgtgttttcaattgttataaacttttgtaaacacatttaaatactgcataatgttctttggaatttacatagcataatttaaccattctcctcagtttttgaaaactacatgtggtattttcaagttgcttgcttttataaacaatgctttgacaaatatctttgcacatatgactttttccacattgaggtgatatttccagaaataaagttatgagattaggaacaccgtgtatgttattttaaattcacaaggctgtgtgagtgaagacattgttttgtttgtctgttgttgttgtttacattttttatttggaaatcgtttcaaacttactgaaaagttgcaaaaatagtacaatgtatacccgtattcattttacacggattcgcctcttattgacattttgttccatttgctttatcatttgtgtctgtgaactctccctctgtctttttcactccttccttctttatctttttcccttccatctttctctgtgcattttttctgaaccattctagggtaagttgcatccaccatgtctttttgcctccaaatacatcagagtatatttccgaagaataagattttcttatgtaactatggtataattattagcttcaggaaatttaacattgacataatacttttatctaatcttctgtcagcattctccatatttcagtttggtcagttgatctaatgatatcctttatagcaattttcctccctacagtgcaagatccagtccaggattacatattgcatctagctgttatgtctcttcaatctactttaatggggaacagttcttcaggctttctttgtcttttgtgacattgacattaaaaaatatacagaactcccccacctcttttattttttaggtaaaaaagttttgagtttgatgttttgtcatgatgagattaaggctgtgtattcccaaccagaataatactgaagtaacatgtccttcactattattctggagattacactattacatccagaggtacccaatgtccttctaccctttgttggtgatagtaattttggttatctgatcagggcattgcctgatttttctactgtatagttactatattaacccttacaactaataagcaatccgtgggaaggcactttaagagcatgcaaatatcttgttcctcttcaaaactcaccccttagatttaacatctattgatgatccttgcttgaaccagtcttttctatggtgattttccaactataacacttcatcaacctttaccagtcagtagttagcattctcctataaagaatttttctatccattcatccacccatccacccatccacccacccactctcattgtctgtcagtctgtctatccatctatctgtctgtctgcctgtctgtcagtcgtattgacttatagactcccctttttagtggtgtatagttcactacttttcttaattattttggtgctcaaattgtcctagatttaattggtgggggcccctttagattgtctcttgtgttcttctaatatgctcccatcattttctcagcactaactttttctggtgtgagatgtgctaggcttatcttgtcctttccctgccctagccctgtaatcaaccatttctctgatgacttctgtttttgttttttgggtagttttgtttgtttgtttgttttttttttagaggagaaaggtattagaaaccaatattggggtgctaggtgtgctgcttactaacagggtagatttgattctaggccttttttaggagacaggaaaaataatatacacacacatgcatgtgtgcatacacaagcacatattt

SEQ ID NO: 67393 - DNA, 3844 bp, Homo sapiens
cttcactgcaggacagaagcagtggaaaatttaggatgaaatagaacaactctaaagttaatctccagcatatctgttttggaaaagaagtattcccttcacctttatgtgctcctaaaaataaataaataaataaagttagttaagtggtgacttgttgaaggttggccaacgaatattgttgaaatgaccaaaatgccaaaaagccagcactaaggaaaaaatgttatgtagctcaaccctggctctctgaagagtggtcaagatttatgtttttaatcctatgctacagtaatgaagcacaaccatgtctgtagcacataaattgatacaccattttttctggttttcttgtaaaggactttcttctatcttaaatctaatgtggtcacattcacaaggacacgcgccctttgcttccaccaccaatgacaaccacatctttattattcacagacatatgtggaggccctgccaaactgagaggcatctttgaagtcaaattttgtagtgctcatagcacgttagcattatggtccctcaggggccccttcatcatctggtatctgggacagtctcccatttggatggcataaaaataatctaggttctttcctagggatgagagatttctacagagttaagctaagtacacaggtgatcctgtgtgcatgatgaactctttgaatgtcatgaaccaatggtacaaatggaatgcatgtaccttaaatcatttctttaaaaaagaaatacgggacagaaggagaataaaatgctatgtagcaactaaaatcttttggactatgtttaaataatatgtaaaattaggaaattagctacagtgagtcttttttaaaaaaagttggaattacagggtttaggatttttttcttgccctcttcttccatgtttgaacttaatagagagttttaatatccttccccttattaaaataaaccattaaagtaggcaaggttaagcaagttcacatttcaaacatctccgattgctggcgatttgtcactagaaagctgtggtagtcaccttggaatctgcatacctttttttgtgtttatgagaataatctgtcttctgctctctcacccaaatccttcttaaaggactggggctctgctgtagaaactcatgtcagcataatatgccatgtacctctataatgattttttttcagcattttgttgagccagcttcagaaacagcagtgagtatgtgtgtaaatgatttgctttaaaaagcagatgtagattaatgcattggtttagtaattttttcccaactctttccttttccctttatctttttctcccccttcagttctctgggataatcccaatgagaaatctgaaagaaggtagaagaatttgtttgttttctgtactttacgtcaatgattcccaaacttggagagcatcaagaaatcctgaatgcctgctgtcacccccaaagattgtgatctaattgtttgggggtgtggtttgggctttggcatttaaaaaatatctttaagtgattctaatatacagacaagtttgctttctgctttctatatatgaatagctgaaaattgaactatcaaaggcaagtctaaatatcacacgtgtatttgatttttataaatctgttgtgccccttcctactttatgccaagtctcatttcctctgtataagaacatgctataaaagtaatcaatctctgacccacgaatttttccctttcttttggaatgaataatggatgaacattaattatctctagcgttttgttttgtttttttattttctactttttaaaaaaattggcttcaaaattttaggaaattttgcatcaagactataaaacaaagtcatgtggctcgtagggaaatcaacagagctcctgtttcagaaacttgattagcactggaaattgaactttagtttttgacattgggttccacactatgcaccatctctgtagtgtgctcagtctgcatgcagattgttttccttaagctctttataaataagatgacattaaaagaatagtttaatcatgttttcgtttttcaatatgtaacgctagagaagacgagaagtagatttcttcatctcataaaacaaactacctttgcaataaagttctgactaaaacttaacccggcattttttttttcatttatcttggttattgcttttcacatgtctcgtggttcttgtaaacatgattttccctctggagctagatagaaagctaaagtcataaaggaaagtgttggtatccaagcatcttgcttctgatgtttagccttaagaaatatatttgagcttaaaagaaaagtaataggtttgcttgaattttcttacttttccttcacattctcttttactgcatctatggatagctctaatacttgctttagatagagatctgatgtaattttataaagcagtgctgtaagatgactgcaaaggatgttaatatttctgttgacactgccttgtagatttccaatgagcatgtgcagatgttaagtctgtagatctagatctgtaagcacaaccattgtctttgttctaaatgtttgaatttgttttagatagtcaaaatgattactctacctgtacatactatgaaaaagggcttccctaagagcttgggtagttttttcttctgaccatccagaaaggttttttgttttctttttttttcttcaataaattcagccttttcatagcagatgatttattaccgtggtcggtgactctgtatttggctgatttattgaaaagtccatttattatcagtaactttagtttatattcatggtaaggacagtgctaatgccataatgctttgtattttctcatttttttcaggtttgttcctctttcatagctatgtggattaggaactaaaactgaaaagatcccttgtcaaatttcagattgaattttaagatacaaattttaatgagataattttggaatgaatggaccctataaggttattcagagctgtggatttttttttaataggggaataagaatgcattctgtttttaaaaaatgctacctctatgttttttttttttcagatactgttaacatttgctcttttttctaatactttatttactaagacttcattcttctgtttgattaatgacaaccccgaaaagtatattttatcccaacttttctattaagtctttctttccttcagtcttctgtgaaatctgtttcatttaaaatttttttctaattctaaaggtagaatatctttatgttgataaaaaagataatccataaaagtatagtttagaggataaaattcagctataatcctaccactcagagaaaaatattcttgatattaatatttttcaccttccatgcatattaccatgcctagttcagattagactcttcttgtttttatttatttaatattgtattatttgcagtcttctgtctttgtaaatattcttcaagcatatgttttaaagactatataataattaattttgtggatgtatcataattgaatgggctatttctccttttttttttttttttttttttttggaagagatggggtctcgctatgttgcccaggctggtttgcagtggctattcacaggtgcaagcatggcatactacagccctgagctcctggcccaagagatcctccctgggcccaggagcctcagccttctgagcacatgcgaactacaggtgcacaactactgtgcctggcttgtttcaccacttttaatcctctagatttttccagaattttgctattgtaaatactgctttcatgaatatctttgtatttgatctt

SEQ ID NO: 67394 - DNA, 3117 bp, Homo sapiens
gtatacttttttcactttctgagctttttgttttattctattctgtttcttcacgcagcaaaaccacactctttcacttgtagaagctgtataatattttgaaatatctggttgtgcctgcctcttccctatcctgatgtagaacacagacacacacgtacactgtttttcttttttaggttttcttggtaattatttggtctgtttgtttttaatttgtttaagtttttatagccaacagacctagttggcatctaagtagctagcatttctttgctatttctagagactttctttgccacctagtatcgaccaattctttgttgatatgtcatttattctgaaaaagaatgagcattttatataggctgggtgcagaattttgtatgtacatcacacatttctggaaatttaaagtttttgtgggcttctaaagcaaattatgcagcatgtgtaagattcagggatatcctacagcctgctctcatgtcatgttcatcatataggtcagtgggtagaccgcaggtggactgtgaactggctaacgctatgtgaaagagggtttctatatgtgatttttctggagagaagatacatgaattttaaagatgttttatcatcacaaaaagttagactgttccaggtaaaggtgagaaaaaagactggaatttaaatactctgttaaaaaaagaatgaggatggctttgaaaaattgaaagatgaaaaaaaacagctctttttatactatggtgctcaggatacattgactataaaattaaagtgtgttttaatatattagtaggtaaagtttctgagaggtgaatgtctacatttacaataatggtgttttctctcatatttcttttaggtaagtgacaatcttatgcttggatacatcagcttcaaaatggatggattttgagggtttcattcctcttctctgatgctgtagcagtaagtcatacttctcatgtgtgctctgttctggtctggtctgggccaggggattggcttgacaaaagaaactagataatttcttgtaaacactttgcttcttttacttgatatacgtgttttgttaagaactctttgtatgtgtagtctctgagattgcacagaagaataaaaggaccagcttccaactttcaagaagactggattttcgtaaggatacaacagaaagaacttgggttttggagttgtattaggtttgaatttcactttttcattactgtgtgataactcagttggatatctttttcttcttctatttcctcatttactcaataggtgtaataataactacgtatcagattgttgggaagattaaatcagggaatatctatccttatcacagtgctccaatatatagattttgttgctcatttcttctttccagctctatcccatggctcagaaagaaacaacaatgtctagaacatataaaaatagagactaactctccctcctgttatctgaagggtctttggctgagattcaggaaatcttggagaccaggcaccaaaggattttgtaaaggaatctgtagtgggtctaagtaggcactttttaaagcatcagccatcttcttgaatgtcatagtcacattaaaagagcctagttaaatgtggcttagatattgtttcacaagtggccttagtggaatccctgtaaataaatatgttagaatattaggttgggaaaatattgttttgtttaatctaaaatggaatttaaacaaatgactaaagaatgtaagctgagattgtttgatctcatgtgattctttaaataattgtcacattgttgtgtttagaattatctagctatctggcctagtaaacagatgagcaatattcactgagaggggaagtatatacaatttggtttggaacgtggaagagaaccatgcttaagttggagagacacaagtcagaaaagtcagggggagattcaggcatggccattttagttcatatggctcaaatacctctaatccagtggcataaggcctgacaagaaatgttcctctctaaggagatgctggggccaagggagactacagttcattgcacattcagagattaaaatatctccaaattagttccagtgaatcattttaaattattttaaaagccttttatattttaatcagagcctattcacgaccagttaatttggatggcacgttctaaaattactttcccccaatgatgtgttgtgccactgccattgaatgcagaaacctcacggaagaggggattaaggaaatttgaaagtaccaaggagctgttgatcttagtcaagtgtttactggtttatgagtagattaagatttcgttcttgtcatctgatttggatgggaaaatgagtaatgatactcttgtagagagggtgagtgattccataggatgccaaaagtatggcgatgtgcccatttccccaaatattcagggaagacttgatgctgtggcattgctgcagtactttcttcaatatttggatgtagtctctgggtttagggaggtattgttttaaccatctttgctagtctcaaaatttttatccaccattttgttaatctgttctacaattagcaaaggggtgcatgcctgttaagagttccaactgtatggtacacttcctagtcattaacgtaactgatagagtacaatgtctctattgtcattgagaataaaaaaatgagctatacagatcatgtgttggttcaagtttgacttttatgctctgttattctcacttcaaagatgatgagactgaaactcaaagaaagaagacctgccttgggttacatatcagtttagtgatggaactctaggccagcgcttttactgatagtgatcttcactctctgctcctctttgactggggaggagccttgtgcttagctgtactattctacatcttgatacatagacttttcattttgtgggagagtagcagcaagtccttggaagttgttcattttgcagttagctaaggtagaggggctggtaatgttcagtttttctgtaccattctcctgatatgttggctcaagataccagaatctatcttggaatgttgtgtattacccattagttaccaatcttctgc

SEQ ID NO: 67395 - DNA, 1141 bp, Homo sapiens
gtactggccagatattttgaagaatgtccctcagtttggatttttttgatattttctcatggttgaatttgttatgcatttgtttgcaagaatgtgatttgtgtcctcagtgtaacgtatgaggaagtctataatacccatttatcctgttattggcaacgttaacttcaatcatttggctaaggtggtgtctgccacgtttctccacagtgaagttactgtttttctctttgtaattttagcatgcattctttcctatggtgtttgctaaatgatttctattcccatcatcctttccacatttgttagttgcagttctatcagtaccatttattgaagagtccatcatttctctagtgagttatgtttacctctgtactgatttataaatctacttctacatctctgctagcacctaactcccttcatttagagttttatacccttttgccttctcaccagtaacatacaaaggtgctatttcccctcagcctcataaacggagtatgtagtcaaacttggagttttgccaatctgatcagtgaaaaaaaaaatgttatgtctcttattatgaataaagttgagcatcagttcacatgttttgagccatttttgcttattcttctgtatactccctgtttatgtcctttgcctatttttctgtgggaatgctggtatttttcttttagatttcttagaagcttttttgttttgttttgttttgttttgtttttgagacagagtctcactctatcgcccaggctggagggcagtggcatgatcttggctcactgcaacctccgcctcccgggttcaagctattcttctgcctcagcctcctgagtagctgcgactacaggcacgcaccaccacacccagctaatttttgtatttgtagtagagacagggtttcaccatattggctaggctggtctcgacctccagacctcatgatctgtccaccttagcctcccaaagtgctggtattacaggtgtgagccaccgtacctggaccttaggagctttttatatgttaggcattataattcccttgtctgtgataggttgcgaacattgtttttccaagtatatcatttgtcttttggctgatggcattttgttttattttgctatgcacaag

SEQ ID NO: 67396 - DNA, 1013 bp, Homo sapiens
gatgaattttccatttaagcctctttcttctttcttatctggcttttgaagtctcctgcacaggtggattcctttatgccttctcactagatcaggattttaaaaatgttcattgttcatctcttcatatacgttatagctgcctgggctccctttttgacctccttgggctgatgatgtgtgacatgtgacactgtgcaactagagttggtatttgccaatctgtatgcttttggtttatttcatattaccggattaaaacgaaaatctatttcattccagtagcagcagaaagcacaaaatcttgaggttcctgccaatattctctttttggaacactatcaaaaatgtaacttttctgttggaataagtatttttctggccaacatctccccctctgcccctggcttctgtgtgatgaaataacattggcttcttttagctcaagatttggactatttaggagccctttcacataagaaatggatgtcttaactaattttcttggagtagagttgattatgaataagtactaggaggaggggctatgtagaacctttgtaatgtaatatggcatagtaaaagcaggactaaatgagatttctcaggattgggatgggggcatatccttcctatgtcatgtgattttaggtcagtaaccaacacagttgggaacttctccacagcttttggccgctccacatctttgaagagtgctggcctgcatagtgggatagaaatccaggccttcattgatttattccttttggtttcagtcccagatcttgaactgtgcagggatttaaactgatcagggacagccaactagctgtagtataaagaaatgagctgttgtgcttgggggaaaaattgtttgaagaactaaaaatgacacatttcctttaggcagaggaaagttaatacattggagtgttactattttttaagggggacgtcattccattctcatttccagtgttcacatgtaaaaataagaaagagtggggcttttg

SEQ ID NO: 67397 - DNA, 1097 bp, Homo sapiens
tttttttaaacatcgaagagcacctttctgctttttttgccgtcatctgtatgtcatgttcttgtccatctcatcatttcacattttttaaagctctgtaaacagacataatgcaccctctgcttccttttcagcatttattctgttgctcttccccccaccctcccattctgcctctagactttgtttatttttcttagagaggaattctaaattaaacaatgcaagaaaatgaaaatggcaagggtacaacattatagaggactaaaggggaatagaagtaagttacgttattgaaatctcagtgtgagggaataatgaggataacacaggttaattttccgatgtgtcctttacccacataattgtccaggacatagatgttatcggagagaagctaagaagcacaatttgtaagagtcttaaaagggtaatagaagacacacttaggcttagcatcgttaatgggcagagaggttcaggtcatagttgatttgagtctgctcaaaacattgtgcagcatgttgtattcagtgttctggttaggatgttggggatggcccaagggcccaataactaacagtgtataattttgatttgagtgcttaagtagatatgttttcctgaaaaaacatgagcagtaaaggttgacttggatttgtatgcggcatgtttccaagggggacctgggaacagatgtgttgtctgttctgaaagcattgggatgcatccatgttttgcgtacagacccccttctgtctggtgcactctgccctctaaaagcttcctgaattgctttgtaaacaaggcagctactacagctgcaactgttgggtttggacttttgccagcttgaaatttatccctgccctaatgctatatatctgggagcaggcagtggaatttttttttttttttcttcaagcttatggaagcatttgctgaggaagatcgtcttgagggtcaaggaacccagattccttaaaactgcatgcattctccgtggattattttgaccaccaggtcagatttcagcacctttcctgaacttttctccagttacttagttgggttactgcttcattaaaaacccataa

SEQ ID NO: 67398 - DNA, 1032 bp, Homo sapiens
ttcaatgggctcttgaatcttttatctttagtagactatgatgttatatagtttatgtaaatatttgtcttgacgtgctttaagtacttgctcttgtaaagtctcacatttgcattgttttattgcagtcattctgtgtaaattaaaccctaatctcttcaattctattgtcaaggcctcactcttggcttgggtgtaatggagataggatttggttggtcctttaatgtggtatatttaatttaatttttcaggtagtgacaaacattggggtttgggctataggctctttgacattaatatgtataaactctgacctcaaatatggaacagtttaaagtgttacactgaatgcaatttgcagcacgaattttttttaaatatataatgtgaaatagtatttctggtccagattctgctgtagagcttagctgaagcaaacccccaatggcttatgctttcctgaggctaatagaatttttttggaagcctgtaagggtagtagtttgatatttatctctcagttctcatgtactataggatttttctaaatatagccatcttgactgtaaataggttacatgaagcagtagactagtagactggccgttcttgttaagtgtaataatcttaaccacttgcgtgttccactccccttataccctcgggctatactattaaagaagtttcattttctttttcggattatcaaaatatatagagcataaccattgagccacaagtgacttttgcattccaggatgggcaaggcaaatgttctctctcttactgtaagatcacactttgttgaagaaagacatcttttaatgtgcaaaaggtaaaagaggaaggagagcaaaatttttcttcacgtcaagttgaattattttgttattcattaacattgcttcttatccgcatctgaattagatgttatatagtcagacccaaaccataatgtgaggtaatcagatccacactataatataataaggataaatgcatcttcactacaggtgtcgtttgctttag

SEQ ID NO: 67399 - DNA, 1775 bp, Homo sapiens
gctgctgattttaagttcagctgcgtaattttacttgtttgctcagatgtcctttaatttattttctggggacctgatgacagtagcaagattttaaagttaattgctagattcaaggacaagtcccatgaatgggctggaagcatacccttagggcataagcctgtgtgcggatctgtgacaaagccctaattttgagtttatgtaatcatcgtaccgaaatatttaagatgggaatctatcaagtcttatctgttgagacgtgatcccttttatatctggcaggcctcatgcaacaaatttcctttcttttaagtgatctccaaagctgtcaagttcatttgagtgaactgtgcttgagagaaacatgtacaattttctctggcaatggcatgctgctgatgacatatttttagaattagctttttctctcccccacccttctagaaactgaacttttatttaagctccctgctgttaacattggaaagaaagtttcctgtgccaatgtttgcccaaatggaagaaaatgtttgcattttgtatgcagtgttcataaacttgatgagtctaacagtttggcaccgctggtgagcgcgtctgctttgagttctgaagggcaggcagaaatagtgtagtgaagcactgcagctactgtgaaaaggtgtggctgagctgctgtgttgagatgcgacaggtcgagaattcagaattcatttttcctagtgctttgaaggtcagtagttaagagagacatctcccacttgtcaagtagttgtaagcaaaagaatcatttcttccctcattcatttggttaaggttagctgaaacactggcttgctttgatttctctgggcaagattgttttagcaaggccgtttgactctctgtttctgtgcttttggttttagtttcaaagatcttgccaaactttgccagggcgcattctggtcttcaaaccctttgttctgaaagctggtgccaccaaattgaataatgtgcaacatgttatagacccactgtagaaaataattgcagtttgttttaacattaagttaaattttttctgtatgcaatgcaaaggtcaaggaaaaaggcattaaaaaacatccctgcacaagtgagtcatttgcatagaaaatgctccactggatgatagagtatgaaagcagtagggaattaactggtaagtgtatggcaaatgacctagccaaggatccaagcaagaatgatttgttccaagaaccagtgtaagacgatttaggaagatgcacttttctttggccctcatcctacagcagcattgaatcaggagaacgaaacagccttggctttgttcatcatcagtaagccaagaagatcacggcatgggtcattaagatttacagctcaaatgtaaataattcaggacccacaaacaataattaaaaaaccaactgcggcactgcatgtagtcaggtcctctgggcctctttgaagtaggaacctctcctgttttggctggagacctgtccatctgggtacagatggttgtaagagctttttaatgaccttttctaatgctggtgaatgtgtctttggacaccatcgtaaccaatggatgaggagggtggaaacagcaggatggtggcagctgaggaattaaatgtcctgaatttgttagacatctgcagaaacatgcaatttgttgggcagaaaattgtaaacaaaacagactgagtcaattatcaatacacctgtgacaccccgggatgccagctttggctgacagcttt

SEQ ID NO: 67400 - DNA, 1098 bp, Homo sapiens
aatacggtcacatcatgtatgcatgttctgtgattttgtcacttaatggaaatgtaggatttccagcatcaaactaacattacaattgtcctcttcaggtgttcactcgaatgttgaaggttgatgggtatgtaaatcaaaactcatttaaattttatccagttggcactaaggcctcgacttttgtctttgctctattaaaaatgcacaaacattaaaaaaaaaaacagaccgtagcgttttctaggtttatattttactgtgttcagtaactttcttttcattttttgttgtaggagaaagtgttttccaagtatatattttaaaaacagttaaactgaacttcgcttggggttttctgacaaacagaatcttgaaaatcttccgtttctgagtgtcagaaaaatgtacagtttcaataaaatcatagcagtcagtttcctgacaggtgcatcaagtctagaattaaatcgaaaggactgatgtgttaaaaacacattaaatatttaatgttaaagatcagcttatagtttttctcttatgttttcaaagggcacagcgaactatctgtgctgttccaaagagttgcacttgtaaaagggtctattcaatttagaccaggatccagaaatgtaggttatggctaagaggatgagataacaaatagatgtgttcagcttctacaactgacttggtagtttagtggccatgttgtccctgttgagatgggaaagctttctgattggtatgttacagctcaccgctgcatcaggcatttcttcaaaccagcatagtgttgtaattggagatcatcttcttgaagatggagccttttatttttgtggctttctggggagttgtaatgcctgcctgtttttccttttaatcagatgtttgagagctgcagcttcgggtcaaacgaacatattcacacctgatttttacagtattttttcagcaacttgagtattatgtttaaatggaaaactatcctgaatagtccccttttaggaaatagtctgtctgagagcggcattttccagcatttggtggatttgagagaaggcactgacacctgtaatttgtaacccagttaaa

SEQ ID NO: 67401 - DNA, 2139 bp, Homo sapiens
gcacattaaatttgggtgaagaggatgcattctgcataatgcctagagatgtctcgttacgatgcggttacctagcaacaagtggaaactgtatgaaaatgaggcgcttatctgttgttgaagtgggtgcaatgaaacttattacgctagcctgtttggcttggcatgttattaaaatcacagctaatgtggaaagaactggagcctgttctcatttgatacagaagcactgttaaatgctgctactgtaaaatggcaatactttggttaggaaaatagaaactcgcagcctccttaagcactcaacattgagatgttagagtttgatttatattatcaaagacttattaataaaagagcggacagaatctgtagtggtgacttaagaagcagccagttatttagatttttaaaaacattcagggagccatttatcgtttcatctataataatagcttagtacggccctgtttcttgtagccaaattgtctttatctgctgagcttattgaattctaaccacagtcttcttaagtttgtttaatttacagaatcggggtgcattgtcatgatctttaaaggttctctttttgtctagtcacattaaaacaatctgcacatattttatactatatactgatgcatattttgatgggaatagaaaatcttcttatccttactggatcatgggttttgttgttgttgttgtttgtatatatagaaaagtgtgttttctggctgggcgtggtagctcatgcctgaaatcccagcactttgggaggccgaggtgggcagatcatttgaggtcaggagttcaaaacaagcctggccaacatgtcgaaaccccctctctacaaaaatgcaaaaattagctgggcatggtggtgcacatctgtaatctcagatacttgggaggctgaggctggagaattgttgaacttgggaggcagaggttgcagtgaacagagatctcgccactgcactccagcctgggagacagtgcgagactccatctcaaaaaaacccaaaaaacaaaacaacaaaaaaagaaaagtgtgttttcctacaggtttgtcttactacttctttatgtatagtatatgtagcttcatatggaagtctaacttcactacattaaaaacaacaaggtcaaactgagaattctaccaaaatatcctctgtgggtggcctgtgatcctaacatgatatagcacctgttatcctagagatgaagaaaagttcaagtactttctgtgcttgtcagagacctgtgatgacacacagaaatctggcatacaggacccgactctgttagctgtattctgacgttacttctggggctttggaatgtgtttatgtgtagcagatggagctattagttagctgtgctatcttgaagaattgctttcccaggtaatcagctctgctcatttaggatgtcgtttccccacctcgatatgtcagctcaagaagcaggaatgattaattgctgcaactggacagtgcactagaataaggggaaccatcccctggtactcccattcaacagggagtttgaagtgctatgaggcagagcaaacaagatggaaacgatgaccaggatgcttcctgaagcttacctgtcagtatatagagttgctgtggcaacctgaagatttgcaattcataggaagagtagagcgagacaaaaccttaagtcatggctgtcattacagtggaatgggtgccaccaacacctggcaacctctattacttcaacttgtttcttttcacgcttggagaaataaaatgcataaaagattaatatgcatagtaaaccttttggtaaaacatgtatgtgttctgcatttcagatgagtaaaaacttcaagagttcccctctacttaaatcaatattacctaataaggttcaaagtgaggttaccatcagactcttgataaaataagaactatgatgcaaggataaagaaagcatattctctttcaaatttaaaaaaggtggggggatagataacagtgtatttttaaaattgttgcccctcctggaaatgcttataatgtattaatgtaaattatgtgccctctttgcagctttctctgtcaccatgcatagtaaggagaaagttagttctgggttttg

SEQ ID NO: 67402 - DNA, 1048 bp, Homo sapiens
tttattgtagtttggaaatcaaggtaaccaagattattagaagtgtgtgaaaagtatgttaatagagtaaatggtgacagctcgtcatcctttcccatgacttcagtagcacttacatggaaccaagacatttgagtgacttagatactcccttgtaggttctctggcactctggagagttgggcttgccacgtactgggcctcaaacgtgagatgttactgaaactatcttgtccaaaatattttcctgtgaaatcctttgaggcagtaacctttttattgcaacatagtacgatgttttataattttatcctttctggatttcctagtctgctcatatgcgcacacacgtacacacacacacacacacgcacacacacactgctagttttttttctctatagctaagctttattgagtgaaacctttaaaatgatatctctacattctgtcagtggtatattaagaattataacaaggcaagaaatagtgaaaataagaattgaggagcttatagacaattgcaaggcttctagactggatgctaggttacatgaacacacaacatattgatttggggaataagagctatatatagtttagatgcaagctatgacagatgggggttcatgagcaacaaatctgatgacttctaggcatcattccaaactcttaaaaaaaaattcaccagatgcaaggactcttgcctttcttaatgaattcttttttatataaatgagtcccatttatatatttcctcccatggccaattatcctgagggcattataagaattatgattttattattatttttccatttagtggatgtattgccacatggtagtagggtagttacattggtaaagttgacttttttctaaaggaacccataaatatctagatagcaacccagaaatgtctagatattttaaacctatataagattacaatctaatgatacgttttttcataaatatttgtacctttgtctttgcaatgcttttcaaaattatctcttttggaggaggtagaacaggttcatctaat

SEQ ID NO: 67403 - DNA, 1365 bp, Homo sapiens
ttaaggtggtgaaagtactcagttgcaactctaataagaagtgcaaaaagaagcagttccaagccagaagataatatcaaactaaaatatttccagcaatatcagcaaaatgtaaagacaatatcggaaacaaacatttgctgcctcctaccttctctgtcgattttaattcagaaaatttaagtgatttttctcatatcgaaaatgagttaaaatactagagagtcttttattccttataaactaagtcagagtaatttattttatctggaggagagtattaaattagctgtcaaccgtgctatacaggtggatggtaactattgaatgaaatgaccaaatctctggtcctgcggcattcatttttaatctctgctttccattgaaaaaggcaaaacatgaaatattgagataatagtactaaaactccaagtaattgcttttgttagctcaactcatgtttactcatattaattactgaaatttgataacccctttgttttttacttagcctgattctgaatgcagtggacagagctataaatcaggtaggtggttctcactaaggcaggactcttttgctttgatgttggcagcttaaggctaattctccaagcttgataggtttataattcaagaagatgtgatttaatgttgatggaatttatttttgaaacacattataggaagaaaacctttcaaagtaacaaatgaagttttgaggtaaatcttaaataaataaagattgtcaggatctctaaacgcccagcgttagctatctctataggatagttcctccacctttagctggagggaaatggctggaggagaatgagaaagtgaagagacaagatgtggaagctatagagccttatgaataagtcatgcatttaaagacattacttttttgtatcttctcctctttctaaatttacttgacattaccttcttttcataatgtttcatttgcggggttccttacaagttatttttccaaaggttaccctatttggtatgattttttttttgacatttaatttgcactataggattgtagaatgtggagaaatcctgggttcatttctttttccagtttgctgatacataaatttcatcccccctcacgccctcatcttatttgtaacactcatcctttcaagaggagtacatgccagacactgctccgggtctgggggatgtaagcagggaacaaaccacactgagttttctcatggacatccctgctttggacactactattactaggaccacctaaaatcacattatctacttctaattttttattattttttgtaacctcatggcattgttagctcagtagagctcagcagagcttagtgcata

SEQ ID NO: 67404 - DNA, 1034 bp, Homo sapiens
tgtgactaggaagataggccttgatcatttgagtaactgtgctctgtgaatccgagaggaaaacaaactctcagaagtgcataaaagttaagttaatttctttttctttgtaagccgatagactcttgtttaaatacaaatttgtgtggacagattttcgtttgtcatgcgtgagctgggtatgttgcatttgtctaaagggagcagttttaagtaggtggatgtgtaatacccgtaggctatcagaaccaccatttcaataaatcccttctcatataacaaccgtgcaggaagtttgggtaattgattctcctgagcaatacaaatattgaaattcttaattattccaagtgatgggcagagctactacttttatattttaaaaaattctgtttattattcttaggtgttcattaaacacttattgatcagcagtctacagccaggctgtaggctagatgctgagatgccaagtgggcaaaagggagaatccttgacctcatagaacactaaggaatgctgatcccacatggataattataatgcataagttcattaattcaagagatttttgtttatttagtatgtgctagatgctgggcattggggagggaaagacttgtgggatggggagaaagggacaatggtgagcgaaagcagacttggccctcatgctccttatggtcagggatcagttattaaatatatttagggccgggtgtggtggctcacgcctgtaatcccagcactttgggaggcctaggcaggcagatcatgaggtcaggagatcgagaccatcctggccaacatggtgaaaccccatctctactaaaaatacaaaaattagccaggtgtggtggcgtgcacctgtagtcccagctactagggaggctgaggtgggagaatcacttaaactcaggaggggcagaggttgcagtgagccgagatcacgccactgccctcctgtctggtgacagagcatgaatctgtctcaaaatatggtattatatatattatatatatggttttatata

SEQ ID NO: 67405 - DNA, 1052 bp, Homo sapiens
taaaagttctctaacagtttattagtatcattagaaaatgtagcctactaaaaattctaaatgatcattttaatgaaagctgtgtcatttgtgagtggcacttgcctataaatttttctagagctatgaaaataagttagacaagaggccaatggtttttctttcttctatttttttttacatttcccaaagctctgtgaacagctctgactgtctgatttgtttcatcgttgccttccactgcctgtagaacatctgttggaaaataatgcttgtcctgtcagtttccagaatcagcagcaaaccgaagtgtgcgcacaaggtagatgtcagcattatactgctgctgccaccaggctactgaaagacagaattaatcctgggctggtaagattcattaaaaataaaaaaagatctggaaaccctattcaggaatagaatgcttatcccaaaatggaccaagcagaacacaagcaaagtggtgattttgaactaaaggcacagatataggatgattattgcctgttatttagtggatgactctttgttctgagactaggttatactgttttgctggaagctcacaacagatcaatagtaattttgttatgggccagatgtcaaaacagaaatgtgctttcaaatcccactgacttgctgtgacaactagtatgctaaaatacattcgctcagcaatcaggcgttacacggtgctcctggagttctgttttctttcatgtggagccttaaagctacgtattgttagctgagtttccctgattttgtagttctttctctattacatatgtacctcttttggttgagaatagaaacacttcctcaaattctcccctttcctctgccttgataatgagctgggtgtaaagtctacaccataacttcctgttacaagtatcatttttatggtaataaataaaatctgtggtaggaaaatggtcacgaagaaaagcaaaccagcaagaagcatgttatttttttagttcctctgtagtccaactttggaattttaattttggtctggtgaagatttg

SEQ ID NO: 67406 - DNA, 1335 bp, Homo sapiens
tgatcatattcacaaatttaatagcatagtgataaatttctcacacaaaaattcctcaatgtatctttatttcatgatagaaaaccacctactgtttccaagcagtgagcttaatcttttcttcagtgtttttgcagttccacataggagttacagttatcattattaaatgtcttgggtagaggtgaaacagcattctggttttttgtttttgaaatctgtgtttgtcttatattcaatatctctgcaaactttacacattttgtatttgaatggttaaaacttcaaggctattgagtcatcattttcattggtgtgtcccatcatttctgtgagatacaacacaccccacccttttcatggaatgggagaagccctcagccagcatgtatatgatttctaagcctataggtacaagcatgagcaggcaggacttcactcctttggccctcgtcattagttttactttttttttttttcccagaagaaaaaacaccatgtccatattgctaaaatcagtgattgataaaatcttgaactaaacttgacataggtttctgtacttgaagaagaggtggtaggatcacctgaacccaggagtttgagaccagcctgggtgacataatgaggtcccgtctccacacactattaaaaaaattagttaggtgtggtgatgtgcacctgtggtcccagctacactggaggccaaggcgggaggattgcttgagccaaggaggttgaggctgcagtgactcacgttcatgccagtgtacgctagcgtgggcaatggagtgagaccctatcttaaaaaaataaaaataaaaatgaatgaaagccaaagcgactgagtatccacagttttctcagatactcagaaggaaaatgtcaagaacaaggataagttgggtgattattcaaatggtggcctgtgggtcctgttgaatctaatgcctccctctgtggattcagtggtgtttcctccaaactccccttagctgtctgtgtgtacttaatacatgaatgcttatatatgaggaggaacagttcttatctctgaagtagtaaagcatcttattgcatttgtttaatgactttgagatctatctggtaaactccaggttataatttctttctttgaatttgattgattttctcattcaaatatttccggaagtatttagtgaccatctatcatgtgctatgcacaatgctggagattgggaaataatggttcacaagacagataggatccctgttcaagagcttagcatcgagtgggaatacaggcaatgaaacaattacagtttatcacgtgtggtaagtaaggatagggaa

SEQ ID NO: 67407 - DNA, 2074 bp, Homo sapiens
ctgtaagtggggaagtagtggtctgtccccaagccgactgcttatcactgctatgttatattgcttagttcaactctagttttgagacactttactagacagaggttattgatgaaaacccagtcaaacccaaatcagcctgagtctagaatgaaagggaaggcatatacttcaggacaggttgacataaatctatttttagtcatttaaatacatttttgagaattgctttcccccttccaaatacgttctgagatcaggatgagcaaaagccaaacacatattttttatgttttgagattaaaactgtgtttgtcactatgttatagtcattagtcccctactgtgcttcacacatagcctctcctcacccctccacgtgcctgccccctgcaaatatgtcacagcaacaacaaactttagctttgtacatcccatcttccttacgtagaagctatggttgatttctccctctagtgttcctaatctgcttactgacctttgctatttaagctgacttttaaacatgaggaagagaggcgaattgattttctactagtaatgtgaaaaattagcgatttaatttcacaatatttgtaaataagaaaatgggaccaatggcctagtctcagattacattattgacttcccagaagttgtcctctagcccctacctctagtcgtgtggacatacagaacagagaactatggaacctgaatgaagtgtatgttcagatgccaacagatgattccatttctccctttagtttagtaacaacattattttcactgttcggaaaaagattggcttggtagacgtaaggaaccactttagtcagtgtggataaatgaaaaaacacaagtgatcagctttcatcatgacaaatggaaactgtcatttaatttttatccccaattatacagctccaggaccaatttttcaggtggaatgttggagccattaaaaagaaataagtaaactataccatattccatcatttttctggcagctaaccaatgatctgtagccttattacatgtacgtttttatagagatatttttctcttaagtttgcagaaggctttattaactctttactgatttcttctggaatgcatttttccaaatgaattccttttttctttttatcgctgagtgttggttgggatttactttggttttctctggaagctatactcattttcttcttttatgttttttttgattactagaattgcatggagccgtatttctttaattccaactgaagttatattagtggtcctaatgttgattacagactatgttaatttggatttcagaatgtgatttattagaaatataggacacacaaaaagacccgaccaaccaccttttgtctcctgccttaaagtgatactgaaaaagttgggtatccccaaaagtcgtgctcccatagcagtttgtccgttcttctaataggtcatgttgtaatttgccggacttcatcttcatgttccccagtaatttgaaatcttggtactgtggatacctttctatttggctgagttatctttgcatccacaaatttagcagactgcttggcacatactgggtatgcaaaaaatgtttttcgaatgactgattcaatgctttttaaaatttccttttgggactatttgtaattaaaaattatttaacaatattgaagtctagtctcttctgagaacactaaaaccctttacaattatgtgtgtagttttatttattccatatagaaaaattttacatgcagtgggtagcctttgaattttccaggtgggagaaattgagatcaaaggttactaatgatattaagaactccagagagaggcaatgctgtgattggaaccattgacttctgggttccaagcccttttttctccccaggctacacagctttgggtctttctgcttattgtacaatctgccattacttttattatcaaaaaatgtcactgatttatttttgatgtataattaacacagagagtggtggtgagaatgatggtcagaagatcggttgttttggttttggagaagctggttaatgga

SEQ ID NO: 67408 - DNA, 1147 bp, Homo sapiens
cttgtctaggtattatactagagatcactatttattcattatttagttcacttccagctggtcctacagatgaggggagttatgcaggtgagtacctgttatgtttgtaccatatatcagattctgaaacttaaaggaatagtttgtacctactttagtggagtccctgaaacctctttttttctagctgtaccttagctgtgttattatcagttacagttcaggattcatacctgtttgctcatttggcagctcccaggggtctcaaattgggttccctggagggtaggggcagacgatgatggatcctggttttttatttgaaatgttactttttctcaacctagcttctctcctcagggatacccctccaggacatgcaacccttggttgtctcctagtcgaggctgagggtacagccttgctctttcgaaagagcagtggcccttttaggctacataggtttatctcacttttgagtaatagattcatacctcaaatttttgtaaaagaagtgtcattttcatactgatttacactataacttttagaactcctttatcacttgactttgggtgagttacttaacctctctgggacttagttcttttatccattctttaatctataaaggggaatggcctttataaagctcctctcatcttaaaaacactcagtgcctatttctagtttaacatcttttggcagcagttccaaacacgtgagccttcagttgctgatcctgtccctggcaagtagttgctggattacaaataaatggaaggcagtgtgatgtgctagtgagaatgtgactgtggactcagacccaaaagggttggaatcttagcacctcagaacttagtagttatgaggccttaggtgagtaatttatttttctgtgtcttagccttttcctttgtgaaataagaacaacaatgcctgacccctgtattctgatgaggagtaaggaaaatgataataatatgtaaagcactttgtacacttgctagcacatagtaggtgttctataaatgatagatattattattccccatgaaattgtaagctccttgaaggcagggactctgtcttagtcatccttaaattactggtagtactagatatctaacaggcacttagtaatatc

SEQ ID NO: 67409 - DNA, 1592 bp, Homo sapiens
gaaatgaaggtggcttattggttttggcagggaaagggttgtctggtaagaccattgagcctcttagctgaaaatgctgacaagttgagcagagagcatctgtgctataccaagcacaatcattattttcattggcaaaatgtattgctcacagttttgggtagtctgtccattttgtcagtaatttaatctaggttgaaaaaggcatgggatataaaccgctattgttgagcatccctgcaggcatacctggcaggttccattccaacttttaatgaggagtcttgctttatgttggggtccgctggtggcttgcaatatctattttggggcgttttaagatgggggttagctcttgaaattggacaaggtgcctgcataaaagatgatgagatattttttccctcttggtctctgctccttgttaaattggtaattaggcgagactttcagacagaagtaaaaatacagatgacatgggattgtgtctaaggtgatagcttttctttcatgggaagaataatcctgaggattgaaataaagaatttgaagtagaaacttaatacatttgagatcttctatatttttatagtaattttatttcacaatatgtgccaataatacatgacaccttcaataatgtatttttatactcctttacccaagaattaagctggtacatttgcaagaggaggaaatacatgttgactttgtgatattgctagtaaccccattctttttcttttcttgggagtggcgctccaccccaccccaccccctcctaccccccaacacacattaatgggttattcttggctgggaaatgttctgttttctataatttttcaaaatattgcagtttatgagttgaaaaatgagaaaaaatggttactacttaattttttaatgttttatatattaatcaatttgattctttagatcattttgggaatatccttggcaagaaaaagcaggcattttcacacattgtggcattgtctttaggtcagacaagcaagttgcagaaagaattttctaagctgtgtgttgaataaggagacagttaattctgaggcagccctcattttttttctaatcagatttatagcagaaactattggaactaacttattcacacttttccctaacttattcatattctacttataccatataggaattttgatagtcaaaatacgcccatattctaatcaaaacagaatgagaaagggaaacaattgccttttaagaatagggatgagaggtactcaatcatttatagttattcttatgatatgtgctgtttatggaatactgtatgccaggcactggtctagaaaactgtattaatctgtgtgcagtcgagagaggaaccacacagtaatttgaatagggaaagcttactgtgactcgttaactgtaacaaggtattggaataatgagggacttgctagtaagaagtaaagagaattgtaaagaatgtagaaacagcagatctaatgagcaaccattaccctgtgctaagaaagagcacctaagaaagaacacctttcccaagctgagatccaggtagtattggagaggacacagct

SEQ ID NO: 67410 - DNA, 1042 bp, Homo sapiens
gagcatttgaaagatgatcgttatttgagaaatgtttctgaactagaaacttgcaagctttgaatcctgttaatactcactggcaatgatagccattttccattccatgagatcactttggaacttgagcataattttatttctgcttcacagttcttaaaatcctgtttggaaatgtcattaggaggataagggatgtaatgaaaaatacgttttctcatgtaccaaatcaaagtgtatagttatggagctggctatctatactgaacaacagttaacaaaatgaattggctgctttccgcatttgaagttgtatagtgtaaaattcaatgaaacgttcaataactggaaagatcacatcagcatcaaggatgcatttagcaggtttcctcctaccatattactaagatagaagcacagttttagaactaggaataaaggctatgaatgaagttaaaaactgtgggaggcctggaagtagaaagataagtaggagtgactgggcctggaaacttggatttggatgcaagtgaaggaaacagaaagatgggcctgtgcggaccagtattttatgattggtgctcttgtcagtatcttccactgaaggctgaaagttatttcttgaaactagcacctgtcacacccctccttaaggcaaaggaccttatttttggtggttgaacttgctgggtcaaacagaatcactatgcctgattctcatgttgtatggaaagacatagggaggggtgaaagcagctttttttccattcagcgtttttagcaggtttttagagtgaggagttattccatgagtgaatgaatggaatgaatgaatgaaaaaaaaaatggccaggtttgtttttcttggaaaggttttatttcctataaagagatatggcataattgtgttttccctggcataaaatgaaaaataaaatctagcaaaatgcatacttaagggatgtgtgtgcacatgtgtatgtcactataatatataatgagactgttgaactctctagaatgtttggaactataaagttta

SEQ ID NO: 67411 - DNA, 1032 bp, Homo sapiens
ctattctagtgtctactattatcctcattttactgatgaggaaactgagcattggatagattacattttcttgtttgaagatcacacacctaacaaagctgggatgtgatgatctcagttgcttttcacttttgctgcttgctgtagaacatattggtaaagcatagctcattgttttaaagcctttataattatagttacgttgttcctcactacatatgagcatttatacttttgaaaattaatcagagctcagtgtaattagagagagagagagagagagagagactttagtatcccccaaacatcagcttattgcttccacagctgagacccacaggggaaagagaagagtacacccataaatattttctgtaaacgccacaggtagtcatgctgctcttggatgcaaaaggtctctagttcaatttcctgctggaatggattcttcacaaataaggataatccctcattttatgtttactcacatgtattccttctgtattccatactgtccacattgggctttgcagtttttatatattcttgccagaatgcacttattcattagccgtttttattagtgttacggttgagatgacattttcccattctaaactccaattttctgtgacttttaattttacaaaacaattacctatcaggctgaaactccttaggctggttttctgctcagaaaggaggtataggggggaggttttaaagtctgttccacttttcttggcagcctagacatttagattcatgtaagtgctctttaaataaagttgcaattgcttaattatttaaataaatgggagctgaattatttaaggatttgctggcaagacaaaaggttctgggttttctctcctacccctcactcagaattttcagtcccattttgtgctggctaactaagaatgaatttctcatttgtattttgatatatctgcaaatccagcaacatcttttggagttcttaccctggctaagtccatggattttaaaagtcaagtttgaaattttaga

SEQ ID NO: 67412 - DNA, 2708 bp, Homo sapiens
ttttttctggaggaaagacattagtaaactgaggtggggatagaattgtttcaagggctgtggtcagaggtgtctaagtgctgaaaaaataagtttgatgagttaaagcagagggcttccagagtggggtccataggatcaatcaatagccttcaggaggttggtgagtccccagaaataacatgcaatattttgcatgcatttttttggggagagtctgtgttaaaactagattcttaaaggggtagagaccatgctgaagtaaagctactcctgccagctatctccaagtgcctattttacaggagcccatgagctctagctcaatttatttctcccctttcttcccagtcaccatccccttccctagtgggcacctactacttcatccctcttcatcctgcttcatcccctttccttctttctcccctttctattcttgatcccactgcctttcttatgtgtggaccttttaaaagaggatggtctaggtgctagccatatagactgccacgcaaactggaagggcctctcttaaaccttcctgccttgaaagtcagggaaataggctcccagcctctgcctggacagaacaattaagtcttgttgtgattataacccttacctcgttgatattcagatacttttcaacataatcatgtttttctaatgtcccttactttcctccctcctcctcctccacatcaaaaataaattatttgtggaatatttaataggttcatggggctctgctctggtgttatctgttttaattctgtgtgagatgagatgcggcacttgtcagcagaggccgctgatgatgtcggtacaccttactgagcacaggtcacggtggcctgcaagccagattgggtgattcagccaaaggagcgtcactctgtcgagtgggagaactcacagataacccgaggtgctcacatttagccctgtatgtagtgcaggtgatatgcaaggcggttcctttccggtttaactctcgcctcttcctgggctgcttttcagccattcatttgtccggcggaagcagtcagctttctgaaatagatcacgatttaattgccgctgcctccgctgtactgaaatgaaactttcgaaggtcaccaagcatcagtggcccttagttaagcattatcttctttgcccgccccacagtatttggcaccattaacttctgtttccatttaaaaattcctccatttgttctgcagcactgcctgtacctctttggatagcattatttggcagcacttgggctagctcttttttctccctctaccggctaaatgtttcccagtgttttgtcctcggttatttgcttccctttttccatgggttctctttggtgttctagatcttattccctctcacaacttcaagtgttgcttttccctacagcccaacttttttcttttctttttttaaattcctgaactgcattgtcaactacctgctgttcctgctacccctgggagtccccctgccctctcaaacttccctgtttaaaaaagagcttacctccaactattcactatctcacttcccaagcaaatatacaaatatactcaaaatacaaaaccccaaattagaaaggctgcccctatggccatcaccaaaaagcaagtccctcaacaggttcatccatattcatttctttttcctttcatagctcaccgccgttcacctaggcagcccctgaacctaaatctctgcagacatcttcatcttcttttcatgcttcatgtgcaagtagttgccagatcttcctgaccttggtaataaaacattgcctacatccggacttccttttgctttgctcagggtcagtttcttattccctcatggctgtggtctataccattccccgttagctgctcacctgttttcctaacttgcgattctccacagtttgcagtttctcacctttaagaattttgttcagcttttatcttctcccatatccattctttgagatattatttaccctttaccttcctatatgaagatgacaccttccctgacaacctttgctttatctcaactacattattattttttgtgagatgtatactatccaattatgtttagagttttaaatcaccctactaaaccacaaatattgacagattgggagctttattatatatatacttattatataatacaagtatgtgtgtgtgtgtgtgtgtttccatttccattgcacagtaccaggtacacgttaggaacccagtaaatctgtattgaatgaatgaatgcctacactgaaattttacttcaggttggttagcaggcttagaagatctcttcctactaaagatcttttgctaattgtttttggagcctttctatttagccatgcaaattagcatgggttcataggcccagaacctgaaataaattaatccgtacttgaaaggaacaaggctgtggctgtatatggatttcaggaaaaagaaaaatggaaaacattgagccagtgtccagttgatataagtgcttccttgtgtttttttttttctttctttctagtgcataggcagtataaagttacttttacctccagtgacccaggccagaatcatggcagtactgtcaccagagctgagaaaagggagaataagaggtacattagagaaagaaagtatgatgcttcaccatgttaattactcaataaataacttttgtta

SEQ ID NO: 67413 - DNA, 1045 bp, Homo sapiens
gtggaaaggacgagtcaatgttggctggtaagtgatgtactcacaggtttcctgtaagttcgggtggtgctttccgcagtgtatataagtgggttgtgcaaaatctgagacctacgattcaattgattttcctttgcataatcataatcatattcatatttggtcagctttcatgctctttgatatttctgatccttatgaagcatgacaaatgttagaactcttttggccttctagacttattgcagcacaaaaactcgagatcctaattgaaagaattttgaagagtgtttcatttaacccttttcttcctcgtccaaatttgatctcacacatggggaaggtaaatgcacaccttaatattggtgcaacatgttattctgaagacacgtgctaaacatttgaaagtcttgttgatttatatttccaccatgttttctctttcctgaaaaaccttagccagcgactgaagtagttgggttgtattaatggatgtttatgttgtcctgtgacagctggttttgctaatttgtttttacagggcagtttgtagtaaatgaatggcatgctgaatattttactgagatttcagattatctaaagaatattttccggtttactaattggtagataatgctgagtacattgatgttgacatgagcaaatggatttaaaatgatttgaagtgagcttcattaaaagatgctctaatcacagccagcaggaaatgtcaaactagttctgccttcattcactctggtggacaggaactgttgcagacttacgatgctacaagtcattgcagttttgattttggggtgccacagggtgggggaaatggtggaagtttttttttcatagcttttttggctcatcatgtctttaccagaaactaaataacaaattactaattacctgtatggctaaatgaacattctctgaaaatcatagtcacattgctggagtcttataatccattatgggttgaatacatggaagtcatgtttgttgctcactctgaactagaagtctgtaaattacttgt

SEQ ID NO: 67414 - DNA, 1685 bp, Homo sapiens
tctcataatttccacgtgttgtgggagggacccggtgggaggtaatttaatcatgggggtgggtttttttctgtactgttcttttaatagtgaataaatctcatgacatctgatggttttataaaggggagtttgcctgcacatgccctcttgcctgctgcatgtaggacgtaactttgctcctcctttgccttctgccatgattgtgaggcctccctggccatgtggagctgttagtccattatacctctttttctttataaattacctagtctcaggtatgtctttattattagcatgagaacagactaatacaggtatcatgccctagtctgggttttcctgtagacttatgttcatttactaaccttgggataaatgaaaatttggagcatgcctgtatgatttctctttctaaaaactcaaaacccacaaaactacagtaaggtgctgtcccccttccattatccatagacccttttgcctttcttaaaaaacacatgcacagcactcacacagacacacccctgtaagacataaggtaccttggccattttcatgaaactgttgttaattcctttctttaaaattgaagtcttttaggattttaacaaatatcctattcatgaagttttgtctgttcttttcttctggatttcacaactcacctgttctaggagagtcttcattattttggagaaggcttcaaatctactatcttcaagcttttttctttccagtgcacccgtctcatctcatgtaacgtggtgctgggaatataagactgagattgtgatgctcacagtttttcttctttgtaattttctgtgtcttgattttttcccccaatgaacatgtatctatttcacaaaatctattttactgttaaataaaattttggtaaacactggaagtaggaaattaaaatgtgcaaaattgtaaattatcattacagtttacttatctttcttgtagataccagatacagaatgcttttgttttattacatctttttctatatgcaaaccgtaagctgagtgtagcacctggttatgaaattttgtacttatagaatatattcacttttattggtggctataatcaagatgaaatgcttttcttaataattaatgttaagaagagaaatgtaaactttagacaactttatgacttctctccagaggatgtatggatgtgactgggtatgtgatttaaaaaatttttaaagttctttggattttttttcttttgtttaaaggtccttaggcgtttgccttggcttgctgaagagtaaggagaaaaccctgtaaactcattcactcagaataggatgagagtattgtagatttcttttctcctttgagacaattttaaaattacaatggtcttagcctaagtggtccctgttacggcttctctcttttccatgctcaacacagcctttgaggaggggctgagggacacgccacctgttttcaagtgtatttatttctttatgccttaatatgcctagtgcatctcagaatggaaatgtcctggaaattgaacagcttcatagttgggtggccccatgagcatttaggaaatattttgtgaaactgttgtggtcatcttgtgtactggttctggtactttaatccatcattttgggatcatagctcttctgaggaaagagcagccttgca

SEQ ID NO: 67415 - DNA, 1044 bp, Homo sapiens
ctgtacattgatttgttaataactaggcatgcatgtgcacgtgcatgtgcactctctctcacacacacacccccccctatatacatatatatgttttttgaggggcatctttagtgatttcagcctgggtactctgttctaatatatgctcttccttctgagaacccatttactgtcacagatccaactttcttccaaaggcaaatgactccaaacccatatctgtgttgtgatccactgttaaacttaatttccctccctgggctctgacatctacttagctataggatacaattactaggatgaccttttgatattggtaacttatacacaaaactgagttccgtttctcctcatcctcacaaataagcaaccattctcagtttcccctttattttcttgaagatagacttgctctttggaacctcagaatcatttttgactctctctttctgggaccctggtgtggtcaaatctgtagtcaatttctgctgattgtctgtgcctggttggtttggacctagctcctctttccccttgcagtgcctgccatggccccttgccctcttcttcctcccttgatttacgttcacctttttaatgcctgctagcttctgtacatgaactctttgcatgcccaacccaatctttcttgttttatgaccactggtcttgctattcattccatccatggtgtcttccttctcccccactatctctgcagattgaaagctaaagtatagctcactgccatctcacgtttgaaaccctccagttcactccagtcaacaaactccatctctcctccgatctcagcccatattgtgcccaggccagcagcgtcaacagaatctgggaacatgttagaatgccccactccagacctgctgagtcagaaactctgggggtggagcctagaaatctgtgtgtaacaagcctttggggtcattctgacaccagctaatgtttgagaaccagtgtactgtgtaaacccagattcacatactcagtgtgaaaggctgagtagccctacctctcttcagc

SEQ ID NO: 67416 - DNA, 1046 bp, Homo sapiens
acatttgggttggttccaagtctttgctattgtgaatagtgctgcaataaatgactactgatgttgagcaagttttcacatgcttatttgcgatatgaatatcttggtgaagtgtctattcagatattttgcctaattttttttttttttttttttttttttttgagatggagtcttgctctgtcacccaggctggagtgcagtggcgctatctcagctcactgcaagctctgcctcctaggttcacgccattctcctgcctcagcctccagagtagctgggactacaggcgcccaccaccacgcctgtattttttgtatttttagtagagaccgggttttaccatattagccaggatggtcttgatctcctgaccccatgatccgcccacctcggcctcgcaaagtgctggattacaggtgtgagccactgtgcccgtccatattttgcctattttttaaaaactaggccattttcttattgtcaagtattgagagtactgggtataagcctttcatgagatatatgatttgcatacgttttctcatagactgtaggttttcttttcagtctcttaatagtgtcttttgctggttcttaatttttataaagtccagtttattaattttatattttatgggttgtgtttttgatgaggtaactaagaacttattgtctaacccaaagtcatgaagattttgtcttgttttttttcctaaaagttttatagtttgagattttgctttttggtctgtgatttatcttgagttactttttgtataaagtattaggtatacattgaaatttgtcttttctgcctataaatgttcatttgtttcagaagcatttgttgaaaagactattcttactccttttaactgactttgcacctgtgtcagaagtcaattgaccatatttgtgtagttctgtatttggattctttctgattaaagcttgtctatctttctgccaattgaggtagttacttttctttttgagacaggatctcactgtgtcatccaggctggagtgcagtggcggcataa

SEQ ID NO: 67417 - DNA, 1039 bp, Homo sapiens
tcattgtgtaaatgttgagtagtctgtttgtgtatccggtgatgctaataaggtctgcattttcttagtgtaaattatgccctacagaatgtttaattctaggatcatgttctcctaccacgcagcgtgctcctggccccctcctgctgccatctcctgatgcatgcagagagcatgcaaacccattgtaacactggactaagtaacaaagggtttccacctctaagttaagataaacctgcctcagaggaaaaacaaacaaacaaacaatcaaacaaacaaatcaccaatcattctagtatagttacaaaccacatggaaatgatcgtggattatctggtcttggtcatcttttagtttagatactttagtattgactttgaccaagataattttataactgaattttaacctttgtttttatattataaaattagaatataagttatattcttgagactcttgagagtacagatactatatatggcttgtatatattgtagaagccaactctgtgccaggacataattggttcttgataaatatattgatttaatttgaatgtgaattgcatattaaatactgagactttggtaataccataataattaaaaattttgctaagtgcttactatgagcaagttacattcatcatttcattgagttcccactactattttataagagtgaacctttttgctagcagtaattttaatttacacctttaaggatttatttttaaatttacataaactgaaatttactttttttgggtagagttctgtgaattttgacacatgcatagaattgtatatctactttacagtggtatgattaccacagtcaatatacagtttcctcactcacccggatcccctcatggtgtctctctctagtcaaacctccttccaactgctaacctttggcagccgtattgatctgtttgccgttgctatagttttgctttttctggaatgtcatatacgtggaatcatactggatgcaatttttgaatgtagcttcttttacttaatatatt

SEQ ID NO: 67418 - DNA, 3141 bp, Homo sapiens
atgctaaaaataaatagacttaggtatcttttcttaagtggagatgatactggattagatgagaatattatttgggacctgtaaaaaggtaaaacttaaatgctgaaatgtttggaatttctgttcttacaaactttataattttaaagataagtagatttattcacacattttaaaattctttcattccatatttcaagaggatttactaggtgatgatgccacagcaaagaatttccatatctctcctgttgtctgttgagaattgatgattatattaatagtctctccatctagagtgttaaggttaatattgttaacttgtgaatgcttctttgggatctaccatccatgtccttagcctagacaagaactaagaagcagaaaatagaatgtcttttggataaacacagatttggtaggagtgatttagtttggagcaggggaaccttaattaattatcactgtttataatacatttttcccctttgtttccaagaatgagaatagttcagcaacacaattgataaataaaacataaaaggacagttatggttgccctggtaactatatttctcagcaagtattttgtttgccatgaaatgtgtccagggttatttattggaaatcagactccaaatgtcatgactttttgtatttgaatttcttatgtactcatttaggagggacaattttgtacgtttttttgggttgggttctgaagctctatgtgtgatggggatccttgtgtgtttttctttttttggaagacaaataggaaactgtgattacagtgaatctatttaagatgaatttccaagtctaaagtgggatttaaaagtatttgaatcattttggggatacatgaaatttcttaaaactggaatattttaatgtagaatttgaacataagatactttctgatcaatgatcaggaatatgttaacattacattttgacttaattcctatgcaattaattttgagtagaataaattattctcaaaaaagtcttaaagataaaaatcaaaataattaagcaattagagcaattgccacttctagatgatttatggtagtgtgaattaaagctaagtgaataattttttatacgtttattgtattcttttacccccaaacaaaatcacttcagtctacagacatagttttacaagtgcacaaatatatacgtagaaagatgtaactgctgcatagattttaatagcaaaaaattggaagcaatccaaatgtccatcagtaagggactggttaaataaattatgatctgtccatacaatggaatacttggtagccattaaaaagagtgatgtagatctatatctactgacaagagaagacttccagggtgtatcagtaggtgaagaaaagcatactgtagaacactgtgtaagtattttatatataattaatctataatgcatactatctaattggcatattcatttaaaatgtgaagaatcaacagaaagctcttaacaatggctatctctagagagtgagattatgaaggacttttactttctgagttaactttgcatattgtttaaaatttctgtagtgaatttgggttaccttggtaattagagaaagagagaagatacaaagctgtatttaaagggtctaaaaagatcagttgaaatgggtgtggtatgtaaatacattaggctttgcagtaatcgtttatttactctttgtttttgtctagatacataggagtttaaagaggtatttatatttatgtcttttgaaacatcatacagatttttaagccttttctagatatttacccctttttttcttcacattttcagttattttctgaatatatcctttactttagattatcactttgcaaggtaacctgttttatttacattttagttgctattgagtatgctttgatggactttgtcttttgtttaaagcattattgctggcctgattactagatttgttttattttaaaattatatgatctccatatacaataccagaagatttaggaattttatgtataatttatagtttaaaagtatttgaatgattattgggatacgtgaaatttcttaaaactggaatattttaatgtagaatttgaacaaaggatactttctgattaatgatcaggaatgcattaacttattacctttttgacttaattcctaggcaattaattttgagtagaattgaacctcttatccaaaacctctttaaaagcatgtttccacccttttcccaaggacaagaatagaatggaatctgtattctgcaggatttcatctggatgcaattttctagattctgcctccattgcactgaatgtaaagttttcttgtgtttgtgtgtgtttggtcccaggctctgcctggaccccagctgcagcagcaatctggagaagacacttctccagtgcagccagtttgtttttttgcagaggagtcatcaatgcaaataggattaggaagaaaatgcacatggtctggccgtttattgccattttcaatgtataagcttagtttgttagcacacagagtggagcagaaatcactattccagacccttgctgtgaagtttactgtttcaatacagtgatgatatctgttaggagaaagctacaaagtgaggtagactttaggtcacagtgttgacattgtggatatattttatggatctgttgacttaatgcaagtttagaaaacaggcttacatttttaattttcttcctgtctgctttggttacatgaagctggataggcaattcctcttcttagaaataaccattggattcttgtccttgggaagagaatggaaatagcctttaaagaggttttggttaagatgttattataccttggataagatttaaggcagtgtttaatttttttttccatgatccatgcaactgtatgcacaataaatttatatggtgtatttatcctttactgcattctgtgtaccttgatttttttcttcattgtgctctcatatttcctttcctttccctttcctatcaatccaaacctatccactatatcctgtccaccttaatctgtgcaccatcctatcctgtctaccctatgctatcctgccctatcctgcccgactctgttctgtactcttc

SEQ ID NO: 67419 - DNA, 3169 bp, Homo sapiens
atttttcttgactctcctcttgcttttcatgtctaaaagcctttggaatatcttaatagtcctttcctcatttgaagaattaccccttttggccttagatgggtgtagctcatctagtgcatagattaatagctctagctttgtccttaggaaggtaaatcttgaaggttactgttacatgactctactgccgtatgccaattcacattgttatttttgtgtgtgtgtgatgctgaaagtgagtgaaatgtgaaaaaaacattattcattttaaatagttttgactgccaggttaatgcaactcttaagcagagcttcatgaggtctggccatagtaactgcttttaacttgatttaaagttcttaaacgttctgaattgcttcacctaatctttttatactgaacgtataattttcagactcgtctttattttcaaatccataactgacagctgctcaacacctcattcaaatagttttaagagttttagagaaaagttgggacagactggatttactgacatcagttggattgagatattgtggatttaaagatgatagagaaggagagggaaaagtatgaaataattattccgtgttcactgcttgcccaatgacagtgatttaaagcctaataactaacaaaactgagagatggcagaaggacatttgaattaacttccaaatcttaatataaggaatgagtattttctttgaaaacaaaattttcatgtgtagtcctattcgttttattatatttttaaaaatattaatgcacagaaatgcatatatgccaaaacctcactacaacctttttcttggcgtatatcttccagattctgtgagattgtcagctccttaaaggagctaactctttaggggactccatgatgtctagtgcacagcaaacattttccaaacagaattaaccatcttataagagaaacacgtttataaatacctctacttccaatgacaaatgaaatcatcttgtgattcaactcaagaaggctctgggctacagtgaatatagagaagcttcaggaagtactgtttaagagttaaaattaatgtgactaaattttgtcctcatccttttgagaaaatgcatgcatgtctgtgtgtgtatgtgtttgtgtgtgtgtatcacttactatgtgctagacactgataagcactaggtttacaaagatgaattatataggctctcttccatcaaggaacttatattttagatgtttttgcaggacacagtaaaaataacaataccatgtgccaagaaccataatagatatagttcaggagtgctgtggaagcatagaagaggaatgtctaactcactatggagacttagagtcaggaaagacttctagggggtctcttgagttgagccttgaaaggtaggtaggagatagccagatagagacggtattagaggagtttttccaggtagagagataatgggcggaaagacaaaagcatgggggattctgggaactgcagatagtttgctatggctgaggggaatagcctttgaaggagcaccaaaatatgaagctggagagggtacacaattgtcaaatcatacaggaccaacttggtaataaagagaagtctgggttttattccatggagagtgtcaatgaggggagcgggagggtgcaggacgaatctggaggattagagactcaggtaggagagcagttagggagcagctgtggaaggccagctgaaattttgagggccagaacccaggtagttgctaggcagcttgggaggaagttggtttcaggatatgtttaggaaagtagaatttcataactgatcaagagagtgggaagaggaggagtctaggttaatggtcaggttctggcttggctgcctaagtaggtgatgggtgtagtaactaagacaggaaatttagaaagcagacagtgttgggattaaagaggatgtgcttgaccctgcagaagttgagctggaggcacattcaggtgaagatacctagcagcactctgtggcactcatttggagacatggccatggatgagatctcctaagaagaatgtatatggaagaggaagagaagctaaggacagaatgtcaggaacgtcaacaattaaaggtaggcagaagaagatgaactagtgagaggagtgaagaaggggctgtcaagagactttgaggaaagccaggaaagccttttgttttggcatctaagaaggtgagtgagccacagtgtcaaatgctacagggaattcagataagataagggaggccaccatggctatagaacttaggtattcataggggacctctaccttacaattttagtgcagcagtgagtgtgggaaccagatggcaatgcgtggagcaaatggaagtgcagaataggaagcatgctgtagacacatgtttgaagaggcttgactggtaaaggtagggtgagggagaaggggactggaaataaggaggtgtagaacttagagaaattttaaagtatgtatttttttgaattagggaggtgtgagaaggtttatatatatcataaaataagagatattacagagggagatgaaaaataggaaagtgagagttgatcactgaccatcaagggccatgatgaggctcaggaggaggcatttgctgagaggggtgggggcaagagaccattgttttcttctgaggtggagataatgggcaaggctttaagaaggagggtggatgtagataagattgcaccctgcagggctgaggcctggagggagggagaaccttcttgggaaagtaggatcccatgctaaacctgttgatggtgagatggagctgtgcagggtgagaaactgggaaggtttgaaatgttctccctccaggagaactcagaaattctaggaagcaaccagctgaggctggaaacattacgttgcagtgacccaaggccccttgtgtgctgattatccttgtctgagcagcagactgaaatgtcactcttcccagagaccagtctgagatgtccttgatatcttccttccctttcagagggaaggcaggtcaatgtatcatggaaatttagagctgaaggggactttagagagcacacagaactccctcatcttgtaaatgaggagaccagctcagaaaagtgaatgacttattcaagtggatccaa

SEQ ID NO: 67420 - DNA, 1747 bp, Homo sapiens
aaagcactctaccatttcaacaagagaaactccatgttcatacattggatctcccccataagattctctttgaaaaaagtgttttacttttttaaaaaatggtttaaaaaccactggacttaatgaatctttcaatttccaaacaacaaggctggagcaaatgaagcctggttactgggagagcacatcagggctaagaccaaagccgtaggcagtaacaaagaatacttatttgcctgacctttcctctcttcgtattctccttggggttctggaaggtgggactgtggccacagcagagaactggttcaggagctgagatttcagatcacgggcacctctatctttccattagagggatataaaggagggagctagcctggagtggggatgcctagaaggctttccatttaaacaaagtctcgaaaatatgggaaggattgctattgagaaagaggtgagaaggaaaggcattccatgttgaggagaaccatgtgaataaaggcttacaggtaggaaaactaaaatggctagtgagagatgggattagcaacagatagtttggggccagactgtggaaaaactttgaatgtcaggtttaaatgaaattcaaggccaggtactatggctcatgcctataatcccagcattttgggaggcctaggtgggaggattgcttgagcccaggagcttgagaccagcctgggcaacatagtgagaccccgtctctacaagaaataaaaaaattgcccggtggtgtacaactgtagtcctagctacttgggaggctgaggtgggaggattgcttgaacctgggagatgggggctataatgagctgtgattgcaccactgcactccagcctgggcaacagagtgagacctgtctcaaaaaataaatacataaacaaataaataaattcaagaggtcattggggagtcttaaattttttgaacagtgaagtaacatcaggttggttttttaggaatatgaatcctgcaatgataagaaattgagaggttcatgagtcctacaatgattagaaattgagaggatcttccattagaaatggagagattggttaggagtataatagttcaagcaagacaacaaaaacttgaattagggcagtgaaggaagaataggaggtagaatggagcctccattgatggctgactagagaatggggattgagggaaaacaaataatagaaatgaaggtgtgctttgattttggacttgaatgactaggagaatgactactctaatgaacaaaaatgtaaatgttatatgtgggtttagtaagggaatgcaatgaacttggttttggatatgttaaacttgagttatcactggaacattcaggtagaaatgtttagaaagcagtttgaaataagagtttagtagaaaggttgagagcagcgctgcagatacagatttgaaagtcatctgcaaagagatgtgtcttagcgttctcacactgctggtaaagacatacccgaaactgggtagtttatataaagaaaaagaggtttaatggactcacagttccatgtgactggggaggcctcacaatcatggcagaagacaaaaggcacatcttacattgcagcagagaagagacagaatgagagccaagttaaaggggtttccccttataaaccaccagattttgtgagacttattcactgacaagcaaacagtatgggggaaaccgcccccatgattcagttgtctcccactgggtcc

SEQ ID NO: 67421 - DNA, 2009 bp, Homo sapiens
atgctacctcctctaccttaagcaccttaatgtatatggctagttcctacatctctctcaagattcacctcaagcactgcattctgaaaggaaacttccatgattactcaggctggttaggtatcttttctttgaacccttcttctgtacttccctaagggctactcctaacttatcttcctccttcctatcaaacagacttctctgaatggcctgagtctcttctatatgcccgctacacatttcgtccaacttgtttccaccaatagacatgtcctatcctcataccttccacgtaggcatatttaaatcccatgtatatgtaaagaccgaagtccagtgtttttaagtcttacataatttctcagcttgaatatgttttcctttcaacttctgtcacaacttctctaaccatttcatgacatttaacattttttacacaatttgatttctaatatgtatatatcctatccttttcatttcttataaatactggttgttgggatacagaatatgccaaggccttagtgtctatgaatttaatttagtggtggtcttattatcagcttttttagggctataattcttagttgaagttgtttgttctcccataatgaatgaagagctatcaacgtgcctgacttttgtatcttgaaggaatgacttctagtgtgtttgttcatacttggttgttgggcatcattaaagagatttagtctagcagtccagataagagaatctctttccatttatttaatcacttcacagtcctgggatacctagactttgagtcattgctgaggctatatcgtcactttagagttgaagcaacaaaccaagaaacttatctctgaggtcatctgttcctcttcacctcagctttcatgagaggcttgtcttaaaactgagatatatatattcttagaagaggcatggtgaacatacggaaatttaaacctcagggtaacagttttccttgtacagtaataaagatgtatctggagtcagtggctacaggatcaaaaaatagatcacagtaatcggatcaaacctgagaaatggctttttgctgtgtttaaaaaaatgacatgggtaaggcagtctgttttgtggcgatgcttccactatttgtgtgactatacagtctgtgaaataggactggcaaagttaagcttataaagttaattgcctacaactgatctagctttaaacagaaagtaggtttccttttggtcttgtgtagaagaggggagagatttcatgtgtaggcagagagagtatgtgtttgctaacattaccttttaatttaggagaagtttggagtttgttctttcctgtgaatatagaggtggaaccactctaaccagagtttattgctgtaatattttttaaatgcgtttgtaacactgatgtatctgtgaccttgtgaaggagtttttgagaggagggggtggcaagccctttttctcactgtcataagtgatgcctactcaataactctaacttcctgacattattgggagggggaggagggcctctcataacttgtttttgtatgacttagttctaaagtgttcccttcatagtcacatccatccatttagacttcccttttccctgcctaaggcttgcatccagcctagtctgtgtttggtactttaaatgctttgaattatggagaatcttagtattttattgatgcttgccttgtagctacatagctctatattgtcttaggttacacagcttgcatttcttaggcattgtgagtggattattgcaattagttgaagttttgagaggaatgctatgtcttccttgatttctaccaagtgccatattctttttcttggtagattttttttttttccagggattgccttttaaaggaccttttaagttagaggcattaacctttctttccatcataactctcagcagatatatctttttcagcatgacctactgtcaagtaaataatgatttgatggcaatgttcaagaaaaatt

SEQ ID NO: 67422 - DNA, 1019 bp, Homo sapiens
caggcacccaccaccttgccaggctaattttttgtatttttagtagagatggggtttcaccgtgttagccaggatggtctcgatctcctgacctgatgatctgcccacctcggcctctcaaagtgctgggattacaggcatgagccactgcgcccggccttttttttcttttaattcatcaagttacttgcaagaaaataaggattgcccttttcatacaatataacgtgtctctgatatttaataaccatgccttaccttgcttctgatcggctgtctttttttaacccttctccttatccaataagttggcaaataaatgcctcaaaccccaattcttccaacttttttttttaattgcagtataatttacttttaagtgcacaaccaagatgtcttttgcatttaaacctcagactatgttctaaaagtgcctcttggacatctcagtccggatgttccagttatctcaaataatatgaatgacaaaacagcagttatatttagtgtctgtattcatgatctcatttaatcctcactgtcaccctatagttaccactgttgccccattttacagaagaggaagaggagaggacagtaataggtcccttgtccaagaaacacaaatggtaagtatcagaaccaggatctgaactatatctatgttcaaaacccacagttttaaacacttaactgcattttcctaaaattcaagacgtctaaaactgaacttcacatctgttctggccgggcatggtggctctcgcctgtaatcccagcactttgggaggcccaggtgggcggatcacaaggtcaggagttcgagatcggcctggccaatatggtgaaaccctgtctctactgaaaaatacaaaaattagccgggcgtggtggtaggcgcctgtagtcccagctactcgggtggctgaggcaggcgaattgcttgaacttgggaggcggagcttgcagtgagctgagatcgcacccctgcattccagcctgggcgacagagcaagact

SEQ ID NO: 67423 - DNA, 1056 bp, Homo sapiens
tgctgcagaatctatcagagatcacacattggatatggtctctagtctcttttaatctagaaccattaccctgcttgccacctgttttttctttaaggagtttttaaggggtatcttttatggcattgacattttgatgaatccacctgctcttttgtagaatgttctgtagttctacaaattgtttgatcatttcctcatggttcagttcagattaaacatcttttgcaagaaccctgcatagctgatactgccaacttccttgtaacactgcctcaagagggacataatatcagtttgccctattactagcttgatccttggttcaagatataaatttagttactgagtgtaggtgaatttgtagggttctccatttttgtccctttataattaataagtaaccttgtgtatacatatcttgtgagcaaacttcgttgtgaagagccctctgtcttctttagttttgagcctgaagatcttgttctctaatggccctttacttaatggattgagcagcattggtaaaccttgtctgaatcaaatattatgtccgtggttataaaactgtgattttctaattctgtaattcctctacttgggtagaggcatttctgaataaagaagagcttgccttccctactcttccccctcttttttttttttttttagaaaattacaatgggttcagtatggtatgtttcattaccatcggatttggccagtgggaaccccttcagagtggctcctgtatccttttaatatattctcattaatttttaagctcttttgtatttcatgtcacaagaagatatctatgtttacattgtattttcctgcccccatacctggaatcagttatttctccaaggaatcctgattccttttagtcaaagaatgatatttagacagcggacacatctaagaattgtgctcattgctactgacttgtcattgtttctaaacttttccgtgagcaaacaagggtgtgtgtgtgtgtgtgtgtgtgtgtgtgtataaaatatcctttgtctcaaaaaaaagttatatgtgaat

SEQ ID NO: 67424 - DNA, 4322 bp, Homo sapiens
acccctggtcgctctatcccctctgtgcttcttcctttcctcagattactttaaataaatcctgaacatcctatcatttcttccataattacttttagaatgatttctaagatacagcccctctttttccactccttatcacagtattattatctggccgtacgcacagtattctcacctggatgtaccgaatttttgccttagctttactgaggaagagagaatgaaggcttgttgcagttggtgaaagcaaaggcagaggccagagaagctacagcacgattattgcttctactgaggagaccttctcctatggtttggtttattttgagcaaggttttgtttggatcggataagatgagttttattgttgtgcaaatacagttgtgtaaatatgcagtaattgtagctagtccctcaactgtggcgtgcgctggaaagcaccgttggcgagactggccatttccaattgttcccataatgattaccgtccatgtgaggacttctgtaggaaaggctcatgttagtttgatgactatgagataccccattcgtatatttgtctttaaaggcctccatggtataaatacctttgcattttgtgaatatattgcttaaaataaaaatgtctctttccatttcgaactggctaagtgctaatttcagccgctattctgtaactgaagtgatcacaaaatgccttctttggtgtgggaaactcatgcatcaggctgtaagtatttgggccttatttttgtgggatggtggtgaaggatggtggggagagaaaaggttactacctttacttcttaatatttgctccattgatttaaaatgtgaatttttaacttcagctagaaatgttggaatgcttcagtgttaatttcaaaaagtctttggtttttctgaaaattgttccgttttccaaggttcatgaaatgtgagggtttttttttttttttttgaggctctttctcaaaaatttcattaaatatggactataaatctgaagcatttaacatttggtttttttgtttccagacaaacagggaattatgcatgagatgattttgaggggtccgaatggccctggacaggtgaaaacctgccccctgcaccgccccctctgagttgaccaggccacaagaaaagcacaaaggaatgcctacattcacgatttggggagcaccagcaaaatcgaataaaaagccttagtttggaaaccatcaatgaaggaaggaacccactggaatgtttgtaattacaagtggcacctccttgtttaaatttcagaagccacagtttctttttcagagatttaaattgcaggctctagccagcagctgctgttgtggttaatgggcagtttctctttgaagatcttccaagtgctggttctcaaaagctttggtgcagttggccttgaactagggttagaaaaaagggcgatgtagatatttatacaaatgcacagctcaaatgacgtgtggcctttattattactcaaaagaaacttggtgttaaggttgagaaaaacccagcactgagaaaaacctgttatgactgacaggtgtcttgaatgaggtgattatcttaagggagataaggtgggagaaattttttcttttagtagatgttttactggaatacaggcatttgacctaacattttgatctaggtatttcagaaatgttaaataggcttgaaatgaaagtgctgtgatatatatttaaatgctactcagtgtttgaagttgatattccagtgacatagacttttaaaaatgcctagaataagtatcttgctcttggcagacttccttgggaaggtaggtgctctgattcctcgttggctgtccagcactggactgcagtgtctagttggaattgagttatgccgtccctagaggaggtgggaagaatctgcctgaaaacaaagggttctccagttccctgactcccattgtctgtgccatatctccacttggctgggattaacctaaaagttaacgtttaaaaaatttgaacctttaatctttttgcagtaggtatcaacttttctcaaagtctccattattaccaatgacaccattgacatcctggtctccaaggcccctaaatttggagtcttttttcccctccttagctttcctgcttgcactgaaataaaatggggctgattgtttctaagtgacattctctggaaacatcagtgccctctccaaactgtgttttgctaacaggaggctcctagccagttccccctactctagtcctctgctagctactgcaattctaattcttttcaggacaggatcataacatttcccattcagaaacctaatctcaaattcttacttcttgcatcagattcaaactccacactgttttgtctttaggttgttcttcctcaattgctctcccactccctctctattgccctcatttcttattacttttcagcttaatcctgatgggactggaagactgatgattctccagtgaaactgaggaagaaagtggttctgcctatcagccttcagctggttacctttgcataaaatactctctttatcttttttcccttaactaactgtcttggtttgtaggtgtaggatggctgatttctctttgcctacattgagaataaacaccttccttttacatctttcattttaactaacacatacttacctaaaaggtacctcaacccacaagtttctttcttgacttcacaggtttatacatgattatgtttcttgatgctaagccaaactgtgttgatattatggccatgattttcgtgaaaatttaaaacaatacattcatgaaaatgtattgtctccatttggtagtttgtatttgaatatggggatttcctacagcatgaaaattgtgtaattgactaaacaaattacaagctgtcaaagtaagactttcagacaaaaagtgaagtcctttagaagtaggaagactttttaagggtcacagtcagagggcctcatgtggaactgctgacttggggtgaatgagattggctcctctgaagatgatccaagagataccaccaccttagaggagtatttggtgcttgtgtctggtgcgtgtagttacctagttaccagaaaataataaataaaataaaataaatcctaaaaaatctacccagagagatggaagggaagtgctttaaaacccaggcctttattagctagtgttttcaacacgtttgactttgggagcagagctgcctggctaaatgaagttaccgccatcagtcactgccaggccagcatcgggacaggtctaggaatttagttacattttgcattttggtagataacatagagggtggattatcactggctcaagaaacaaaaaaatgaaacctttctttctcagtctacctgctaaatttgttatcgtaaggatcttttcaaagcctttatctgggagcaatatctgccagagttcttccttccttttttgcttgcctgacacccttcccttcagagttcagttcttgctagtagaaaaaggctatgcagcatgataatacagtgattttaaaagttgattatcttgaagtattttgggacagttttggggaatgggttatgtggtatatatttatttggctctttgctgaatatggctgtataaatccagcctcctggatgttacaagtcatccccttgatttcttcttttgaataaaaaaggagcattgcttcatttttcttgcagaaacccttatttaaacaatgaaaacttcaaagatagggagaaaaaaaccaagttaatttagtactaaattactgctcaaatggttttatcttttaaaaggttcaagtagagattagcttaaatacactgaatttcacttttccttgtacgtacatatcttgtgagcaaacttcattgtgaagagctctctgtcttctttagttttgttagtaatcacataattgttagttgctgtttatttccctttcctgaagcaaatctctccatctctgggccaggttggcaagtggaatacccagttaagattacaggatagtaaaacccagtgctttaatcaaactgcttactttacaagatggcaaaaataaaataatatatatgaacactcttaagtaggaagtgttttctgcctatttacctatctctatttatcaatcacttttattaaaacagcaatacctagtggtgggggttatttctctggctactgctaataataataacttttgtaagtcttccacattagggaatactgaaaaagaaaatactatgtaaaaaggattaattcaggatgtac

SEQ ID NO: 67425 - DNA, 1120 bp, Homo sapiens
cgaattaggaccatcgtgcgtgggtcctggttctgttttctcctgtaactgaagccatccatcccccgcagaaaatctcctctcatttctcctgtgatgtttggatgaaatggatgttaatgaaatgcagtaaaaatgggtttgcttaagctcactccacagtgttaatcacgcctgttatacgttcaaggtgcatgcatgatgttgtttacgatcccgagtgaaccagtagctgatcacccccctcttatcattttcaggattagagaagatggctggtggatgggggatttatggtggtgatgggaaggaggggggctgacttttgcttgctttggcctgttggggcttgcaaaccggggatagagactttacaaaagtgccgccctgttattgttgcctttccctgcatcagattgaatagccgcagtagggacttgcacttgtctgtgatagatttgataaaatatccctcattaatgccactttatatttacagtgtgtcactggagacgcacaaggcttcatttagtgacttgtgtgacgagacaagcttgcattatttgcctgggacgttttggaggaacaagagacccattgagcaatcttttgaaatgaacaaatacgaaaaagggggggaataaaagagcaggcagttctctggaacaaagagctttattcatatggatgttgtacatgctttatccagttttccccaatggccctcctggtaaaggggagtgggacagggaagacgccaacaggcaggacactttcgtttcctctctcacttcctgacttcatattcttatcggagttggtccccggctcactgcctgctcatctctctccacactctctaaaatcccagaaggtaacggattcctgggtctccacagagagattgtgaaatcctttcttccagctctaaatttcaacagaagacaatgctagctacctgttgaggttgatgttgttggaggatatattggttgaagggaaagagatgtcacttttctatgacatgtgtcaagaagtggttgatagtgaatgtcagattggtaagatgtcttgcaattataacattagccttattatttatttggaaagaaatgctgtg

SEQ ID NO: 67426 - DNA, 1035 bp, Homo sapiens
cgcggcgtcctctggcccctgctgcaggctccaggcgggcgccgggaccgagtggcacggggccgcggggtgcgagcggcgatgcaggaggggatgcagcagggctctgagcctgcaaagcccctccttgcagctccagagctgcaggacccgggagcaacaagtggcggaggacgccgagagctcagcccccacctgcggagccccaggcccgggcgggcacagcgttggggccacggtgctgcttcaggggcgcctctccgcttgggctgtgccttttgtttacacgctagaggacacacagttatgtaaacaccgcaggagacacgctgtaggagacgggggatgtgtgggggtgctagcttgagatttgggggacgccgggttggctgcttgcccccaaaataggcttgcaaaggagctcggcttgggaaacctattggggggcgtctggcagcagcgtcaattccagcgctgagggtttttttcctccatgccactgtctccggatgttgtttatgtgtttttcctctgtgaattcttaatttatgagttacgagataattgggttcagccgatgccggtgtggttacaacttcatttcaggtgatgcctctgactggatgggttcaataaaatgttcctgaaagagatccctcgtgctgctgcattgtaaaaagcgccagtgtcagttaaacgtgagcgtgagtaaaggctcggtaactggcgcataatagaggcaacaatagacttgtattggctgcaaaaaaaaaaaaaaaaaaaaaaaaaaaagccggggggcggtggaaagctgtggtcggggatattgctttttgactaaaaatgggagtcgtgcaatgacgcttggcagcagaagtaggattagattatgcctcccctgtcaagactgctcattgaaggcaccgggtagtagcaacggtactatatttgtaactatctcgcggtgagaagttgccttccctgcgagggatatatgctgacttaggagcggtctggaactcaaccgtgcatgtc

SEQ ID NO: 67427 - DNA, 1082 bp, Homo sapiens
ttttagaaacaggtgacagtaagactgaggatatctgtcctggagtcacacctggagctgttgatctttctcctgcttgaggaacatagacataaagctgttcttgtggaattcacacaaacacttgatttccccagaaccctcttgcatcctgagatgcactgcccagcttcccacctctgtgccccacaaaccttcctcttccctgtcatccgctctacaaagcccctgctagaagttgacaaagctgactggctgcttaatgtgctacaggtgttgttgctaggcaaccaccccactctgcagctcagactctgtcagcccaaatgaaacccctggtagcacttaaccccgtaactgcttaacacaaacactaattacgcaggcccaccaaacagcacatttataagccataatcaagggtcaggagggcgcattctcagcaccttcattccttccacctacacttcctaccactgagccgtgggtcaggctgtcacaggcaggatttcgaggccttttgcctgtaagtgctggttccctttttcctggccataccaggtggacacggaattgtagtgctggtcctccctctgcactggactggattctgccaaagtcaaccaagcgccttcagttgctgactctcgtctccaggtaagaggctgcagagcctgttcctgcatttttattgatgtttaggctaagcctcttggcctaaaacctcatagttatagaaaatttgtttctctgatgtctgtattcggttgagctggagatgaccacccatttttgacaattctcctaacacttgagcgttttacatttctgtggttcggctcatttccccagatggaataactcacattcctttagcttgaccaggaattataggaacctctaggcatgtagatagatacttttgtagatcaaactctagtagaattgatctgttcttgagttggtctcccacttctagactgtgatcacatcactaactcattgtaggtactcaacaactattggtgaatgcatgaacacaaccatattttaaatttccacttcctcaaccacagagtaaa

SEQ ID NO: 67428 - DNA, 1036 bp, Homo sapiens
tattaagtccttaccatatacaggcttattcaaaccttgcccaagtcttgtggacctccttcctgtccacctggagggcccattccttctgtctcggccagcaggcctgcctttcctcttccttcccacttgtcccttccccagcccacctccatcagtgatgtgtaacggggacagccttccgccatttgcacaatcctcccccgcccctggccccccaccagctgctctgtttcaggtgtcccccacttcagggggatgacacctttttaaagagactgttgtttccggtgacactgacaatccttcagaattgacaagacctgtctctgcatctccctgcctgccgccgggctctcaacctggggcctaagtgatttgtcatcttctcttgtcagtcgccggctcagctggtgatcctgctcctccctccccactggagccataatcctctccctctgataacacaattgtctccatggcactgagcagccctcatggcactgcaggggctctcggcccacggaggaaggtagaaaataacagcaacaaagaccttctttagaaaagaataacgtccatctccatgtctgcacccactcccctgcctcttccccttcctcaggaaaaaaactgctagcggagaagatacacagaaactaggggaagggcagaaggccctcagacagagggctctgtttgctgctgctgttccttctgagtgagattactttttttcctatctaagcagcgtgccagagagagctggctcctgccctgtctcctcagcaggacaggcccagcctccagaagctggtgaggagctgctgggccttgggctgtcctcatcattactccaccttaggaggccatgggactcggctctaggaggcagggagccaggcagggatgggaagacagtgcagggtttggaattcccagtgatctctctgcagggcttacagctcggcctggaatacgtgctcagctcactcaagtcagtcctcagagttttgtatgttttgagggttctatt

SEQ ID NO: 67429 - DNA, 1096 bp, Homo sapiens
catgcagcctcgaaggccccttttctcccacggggctatctttaggacccatgatgcttcccctcctggggtaggaagggaaatggctgatgttagaatcccagacttgccggtttttataccaccgattcaaatcaagatactgtctttcagcctcctctctgccttgctaaacccattccggttcccttaccaagccgatttctatcgggggagagtcagtccttgaaaacatggggatttctccagcaaggaatggccatgaggagccaggccatgctggggtggccatctgcacactctgatgagcccacgctgggctcctctcagcctcatctgcaaggctagccccttctagtttctaattgctgtctcatccaaaaggctgagggctttctggattgactaaagaagagatgaaggtgaccctaggtccccaggaatgcccacctccctttctggctccatcctttttcaccctatgcctggtgcctccactccaggctgttttgtttgctctgaggggttaggtgtgaagggctgttctgtggctccccaggactgtctctggacccttcaggcagagcagcaggtgtatttgggatgagaagctctgagggtcaaggaccctacaattttctgtgtggaatccacaagggcaccaagcccaagtgagcataaagcccaacaaaggctttttaaaaattaccatgtgctgtccttttctctgattacaaaagtaatacatattcatgttcaaaaatttggaaaatacagaaaagcacaaagaacaaaaattcatccatattccactacctagaagcagctactatatctgaggtgtatcacctccctgtccttccccttctcactgtctctttatctctgtcttttaataggagtctcatgcagtaatactgttttgtggcttagttggtgacagtgtatcaggagcatttccccacccaacaaaactcatttgatgagtgtttcgccaggtgggaaacatggaacagcaggcactcagaagagatctcagcattgacagacctggattctctcctgcttccagtggagacagaggcccataaaatcc

SEQ ID NO: 67430 - DNA, 1039 bp, Homo sapiens
agatggagggagagtcagtatgagctgtggaatgccaccagaaagccctagggatatggagacaaccacactgagatgggaattgtaatttgagaaagaatttccaggtgaagagccagactcctgggacactcagagcactgggaaaaaaaaaaaagactaacaaattcctgtgtgaaattttcagctggaaattttttttaaaaatgtagccttaatggacaaatggacacctaattcctgaagacgttcttttttttttttttaaggctagaggaggtcagggcagaaatgcaggaacttattcctggcttttgtcctgcaccatcatctgaggccggaccccctggggttctggctgctgatgaggaactggatattgagggtcaagtcagctctggaatcactggtactaactgccagttggtgagaaccaatagttcttccagaaactggaggatggtactaggaatatgctgctgagaatgaaagaaaaaaggtttgagtcatagtagaatctgtgtagaaatggcacagggtggccaagcttgtgtgtagggagatgccgctgttcagggcacacaaagagtaattaatatgacccctcacaggagctgttcgtggacccagaggcatgcagactcacgtgtctgcgcagtgctggccccctgccctggaatgaacacatggccatgtgggaggaatggctttctcctccctcagcattttaccttggcccatatagaggaactccagcccttttggaaacagtgatcagagctgcttctgcttatccctccatgctctcaattgctctctctctctttctccaagtgggtaatgtgataagaagtggggccggcacaggggtggcacaggcacccttccttgctctgctgtcagggccgccctgccttcagggagcctgcattccacccgtcctcactggagcaaggtctacccctgcacagaaaagacgtgcagttctgagtgcaggtgaaagtatcaagagcccagctgtggatgtagacccaagcta

SEQ ID NO: 67431 - DNA, 1048 bp, Homo sapiens
ccaacaggctcagcttgggaatttctggctttaggttgagagaagggctgctgggcagagcagaggcccacttgtcctccccattgggaaacttccaggtcctgagctctccagggagatgccacagcaggtccagggctctttcctgtcttctaccaccctctctgctcccacagccctggattcatgcctctcaacatatgattttttttctccaatcatttgcttacaggtcagcctcctctatcagaatatgagctcatcagctaggatattggccttgatcatcctggtgtcctctgcaaggagacttgtgtctcccggccagggtaggttttttcctaagaaagtcctctcagaaggttcttgagttgggattggggtctcggggttgaggctgggatgagatactcccagaaacaaatcctcctggactgggtgttagtgtttacatctcttgccccattagagtacacatgtgaaaagatgaaggaaggtgtggggtagaagtcagtagactcagatgcgcatcctagtcctgccattagctgggagagtgactcccttcttgaagactccatttccttgtctgtagaatagagctgataatacctacctcaaggcattctggggagaaccgactggagtaataagtgataaagaaaagccgtgctgctctaagaggctgtcagtgcactgagaaacgcaacccgagcatctgtatttaactttggtccctaaacagagacacatacattccacacacactgtaccaatccccccttgctacagccttgggctcagggtgcatcgctagataacagaagggactgtactactggagcccagggccagaatataatgctggggtccaaggaaatgagtgaggaggactgaggcagatgctgagctagtcgtaaggaagcccggctcgcatggcatcctctctcatgggacacagaggcaaggctgctggctgaagtatcctctaccagagggaccctagtgcttgggaccaagggggcaatccagagcctccctggggacc

SEQ ID NO: 67432 - DNA, 1023 bp, Homo sapiens
gggtaggaaatccacagccagacctgttgccccctccttactcccagtgctagggcacagagggtgcatgtgtgtagtggagggcagggggaagaaatcaagagccagcattgtcatcatgttcgccccagccatcaggactgttttctgtgcagaagtctcattggaaagtatctaggctgggcccgttgaaaatccctcctctgtaccaacacggctcaacactattcatgttgcgtgctatcctttagccagctctgaccttactctgtcactagagtctgcaaacccaagggcactctctttgtggagtccagggttttgtggcctgtgaattctacagaaaggatgtcttattttctcaagtctcatggaatcacctgtccaaactcagttatgcatgccagaggatgggtgtatggctgcctctcaaccctctcagttcctggagattttgtgtgccatgtgatggagcagctgcgagcctggatggggcagggagtgacagagagcaccctgaatgtccaggatcaagctgtggctctgctgtgtgactttgggcaagtcacctgctccctaagcttctgttttacaattgataaaataggcatagtgatagatgctttgtagtatcctcttaagagcagatgagataacgaggatgaaaacgatgttgcaagctgtaaagtgctgggcatgcattagaggtggcatggggctgacataaactagggtcctggctcctggggatgggcagccccctttggagcgatcagctcattcccacagagcttgctgtcccccaggcagatcattcccctcccctagagctctctgttacattttaatccacctaattgaaagaccgctggatcaggcaaggaacttatcaaagggaaagagagaagagcctggtgccatttggctccctgcacatttgtcctttcaaatccttatagataattccatttctgtgttaggatcaagactagaaatttggatgagagggagagggagggacag

SEQ ID NO: 67433 - DNA, 1303 bp, Homo sapiens
gtctcttcctattgccgggtgtctcctgatgtgcaatgtcagcctgtgccacccttcactcctccacgcatgtgataggcagagcctgtactcttcccctctcagccctggctaaggggttctggtctccaagtcctctttcccatttcctcattccactcaccctccggagctgggggttatctccaaagcttgactccaatacagcgggaggtgggattccctggctgttggaggagcagggtccccagcagcagatgtctttctctagttttagaaccaggcttcatctttacctccaaacctcctctttcattggacttcctgaattttgcttctggactatttattggctcaggcccctgcactcagtctcagaattatctctgattccctgtgctagagactactagctcctctccaatacccatccctcctttctccttagtaacacaacttgaatgtactcagggcatggcaggtgcatccaaaagactacgtttcctaccctcccttgcagccagtgctggccatgtgcctaaattctggttagtgagatgtaagagggaatgttctaagagaaagtgtgagggttccttaaatggagctgactcagagggagacttttgcctcctgccccctttcttcttcctgctgcctaagatgtagaaatgatggcaggagctccagcagcttttttggtccatgaagtgaccttgggaatggaagccatacactggggtggtagaacagaaagtaaaagaaccagggtccatgttaaatctggacccatcatatcagtcctggcctggcttcctccagacttcttttaggcatgagacgctatcttgggtttctgttatgttcaaccatacctaagtccagctgatatgctcctctttctgcttcgtgcacccctgtctagagagtagtaaagcccagtggtctctttctccaacacacctcgtgcactctcctggccattccctcagttttgatcatgtcattacccaaatcaaatacctttcctagagccccattatcttctaaatatcaagttacttcccctggcaaccaagaccttccatcactgggtctcagcttatcttgctagtcgtatctcctacatcctgtagctcagccaagtggatttccaccaccccagacaccccctgcttttctacctctcctcctttgctctgttccccagcttgggatgcccacttcctcagtcttgcctgtcaaaattctacccatagttcaatgcttatcttaaagtttctttttccatgaagccttccca

SEQ ID NO: 67434 - DNA, 1026 bp, Homo sapiens
ctggattaagaaaatgtggcacatatacaccacagaatactatgcaaccataaaaaatgatgagttcatgtcctttgtagggacatggatgaagctagaaaccatcattctcagcaaactatcacaagatcagaaaaccaaacaccacatgttctcactcgtaagtgggaattgaacaataagaacacatggacacagggaggggaacatcacacaccagggcctgtgggggtgggggactaggggagggataacattatgcagcaaaccaccatggcacgtgtatacctatgtaacaaaactgcacattctgcacatgtatcccagaacgtaaagaataataataataaaatgttttgtcagatattcccaacatctcattcatctcagggttggtattgtggattgctttttgtcatttgagttatgatttttcttgatatgaagggtaatttttaaataattgtaacctggaattgtaggagacgcaggttcttatttaaactttttcattttagcaggtggtcactctgtttaggtttctcacaccggtcttggcctctatatgtgggtgatcactccaatgacaggtagattttcagcactttccttgtgttgttttggtccatttggtttatctggtgctgctggggattccgcttggtccctgctcatgctgcctgaggggtagaaggaattttgcagggctgggtcacaggagggctctccagggagaaggggagcctcaggcctaggagggaaggacagtgctttcccaggggtggtgtgtctgtggcacccatcaatcacaaattggtgttgagcttacctgttgttgtcagaggaattctgtttgatgttggggaggaatgagcctacttcccttctttgctaggttggggtttgagacatggtgggtctggtaaccttctcttagatgggggagcatgagatacccttctacttgtgatctccagtcctaggtcacagaccaatttgccttctcaccccctttcagagttctct

SEQ ID NO: 67435 - DNA, 1052 bp, Homo sapiens
tgtgtgtgtgtgtgtgtgtgtgtgtgtgtgtgtgtgtgagtgagagagagaaggtaaaggggtgggaagtggggagataggcatgaggggtctggatgggccctcctaccttgttttaggagaagcagctcaagtaagagaaaactgtttggattctggagttgaagagagcaaggtttgaatcccagctctgccactttctactgtgaagttttgagccagacacttaggcactttgagcctcagtttccctatatgcaaaatgggctaagattccccaccttgaagatgaacgagatgaggacaattacaaagcagtcagcagaaggcaggaagcacatcagatgcactacactaagccacttgtaaagtggttagcgggtaacctagttcataggacatactcagaaatgaaactcactttctgtgcttttgtttttatttggtcatcatcaaatggcttttgaggataggtaaagaggattacggtcatccagaggagaaactgaggctcagcaatgtcaagtgacttgcccaaggccacacagtgagcaaatcaccaggtagatcgtgactccaggcttgtctgacactgggtcctgcccacctccagtcttgctgactttcctgacccagccacctgcctccctgacatctttgtgcctgcctctgggcctgaggcagtggctgggagcctgtggtgtctggtggctagcctggatcctctgtccttgcctggccctctgcaccccatgccccccatcaccagctcccccgactctgctcctcggccgaggggcacactgcagtgaatcagcctcctttgtggtgttgattagaggcctcctcctacaaacatcaaagcttcaattaacatgggccgcttgcaaccctcttgcaaaactctgataagaatagaattttctcttggaaaatggatttttatttagttgtgtgtactgttggttaaatgacctactctatacactggcgctgagattctggggacagtgagggggctcgtcaggagctggttatctgaaggaaacagg

SEQ ID NO: 67436 - DNA, 1050 bp, Homo sapiens
tgcatgtgagtgtatgagagagtgtgtgtgtgttagtgtatgagagtgtgagtatgagagtgtgtgtgtgcacgcttgtatgtgtgtgtgtgggggcaaggggttcaggcctgctgctggccaggtgtgcatccatatttatcaggggagagtccctggaaggcagccggatgctgagcacttgaggcaatctgcttggaccagctgctctgttcctggccagacactgggaggaggagatttgggatgtcagcctaaacagtggtaccctggtctgtaatgtttgctgatttctgaggtgtaaatacctctaccatggctgagttcaagctaccaacatgaagctaacaggaatttcaggaattcctgaaattccacacggtggcccatcccccttggtgtagggaagaaactggcccagaggtggaagggcccgtggtcacatagcaggatgatgaggggctcagctggatgatgttgccagactgcactggagtgtctgtctgtcttcctggtgtcaccattgataatgggtgctctgtgacagtggggcaggatgatgaggggtcactgtgggcgccatccagcctgtgccaataatgacccaaggacaccacagagcaccaggtagtttagcaagtgctttcttacctgctctttctaaataaaattttcacagccacgcagcagagcatctattgttacattttgcagatgaggagactgaggttcagagcgatgatacgatttccccagggtcatatgaccagtacatggctgtgcattcacccaaacctaggtcttctgaggccagtcctggttcttaccactggcccaggatgctgaggtcacgatgccttcccctcagtgtggcctctccaggggcccgatgaccctccatctataagacctagaggtggaggtggggtgtgcatgccctgtgccttccactctatcaggcatgggagggtctcataagcacctgctgttgggtaatccgacccttgggaaatgggcaggtggctcagctttggcttccacttctccccg

SEQ ID NO: 67437 - DNA, 1054 bp, Homo sapiens
cgctttgccaggcttgccagcaagaaggcagtggaggaacttgcctacaaatggagtgttgaggatatgtaactttcctgaggctgtgggggtggctgggctgtggtagtgggcataggcagcgagatatccagtggtaacagttgtctgtgctaataattggagcccacacagaccagcaacttgttgaatgccagttttgaccacagaagaatattcgagacctgatgtttggactgaggtacctgtacttcttgggtgtgacagcaccggctgttgctggctttcagaggaagcattgatttctcattgaccagggtttgttcttggtagggtttttctttttcttttttaaataaacatgtatttatttttttaaaattatcttcttaactgggtattctgttttgggaagaatacaggctaatattgaacctgtggggatttggggggtggtggttgaatttttcactaatctagaaagcagtgtgagtaaaaactttcttagtgatagatccttcctctgagaaaacaggaattagtactaaactagactcaggaatagacacacagatatttggagacatggtgtatgataaagatagtgtcacaagttagtagggaagagatggataatagtgctcagaaaattggcttattatatggacaaaaataaagttgaaccctcataccatataaaacaaaaatcccaaagtgattaaagacctaaatgaaagataacgtgatatacagctagtaggaacaaatggcaaatgtttttgtgccttggggtaaagataaatttcttaaataagatcccaaagcacaatgcataagatttgatagctttgattactttgtaattaaaggtttctatttagcaaagcatcccatagtcaaagctaaagatggatacggattaggagaaaatatttgcagtgtctaaaactgacaaggattgcatatacaagggatagaatatagaaagagcttctgcaaatcatgaagaaaaagacagatgaaataaaaatatgcaaaaatatgaataggtaaa

SEQ ID NO: 67438 - DNA, 1050 bp, Homo sapiens
atacaggctttttaagaagtttagataagaagaccaagagaatgcatggtaattaaagggatttgaggtccactcactacctccttgaaattcacccctgtattgttttccatgacaccctactcctggttcttttctctgatcattcttggccacctttgcaaactcctcttcctctgtgcacctcttaagtctttcccagggctccatccataatttttagctgttctcactctatgtgctccctctggctgattcttacctagtcatgttttcaactatgacctatatgtacatgatttccaaatcagtatttgcatcttggtctggtgtatttagctgtttgttggatttctctattgatttagacttgagagatttcaaatgcattgtattcaaagctgaactcatcagcttctactgtaagcctgctcctactcttgtgctctctaacttgcctcctccttctttgtccttgtgtacctaatcaattagtgctgctaattagtcttactaattttgcctcctgtgtcttctctcttccgtccctctttatcattgccttcatcatctgttgcctggaccattgcagtgattttcctgccccagatcccctccagagtgatctctttgaaatgcagtttaagttcttgctttaaacccatcgtttctggatgaaatctaagctttttaccatggcctacgcagctcattatgcattggcctctgcgcctttccaactttgactcatggctgttccctttgtcatacttcaggttccagccataccagtttgcctttggtttgctgcacataccaggccacttcttatttccgtgcctttgttcttgttgctcattctgttctgaaatgacctccagaccctttctggcccttccatccccagtgctgtagttaacacagagcctttactgatcattcttgcccaaccctcatgtcacctttttatcatacctcccccaagctgattaagatacccattctgtttccatgacaccccatgcgtatttctaccagagtttatgctgt

SEQ ID NO: 67439 - DNA, 1046 bp, Homo sapiens
ctgtctcaaaaaaaaaaaaataataataatgtaaggaattctttaatttctaggttcttctcccagccataggagatttcatgtaagttcttcacctagaggacatcagagtcacacagattctttgctcctatccaggtgactgccagaaagcaactgattcagacctttcttctccacggcataaacaaagtccagggcaccaggattctgattcagatctgtcacctccacggaatagacctagacaccggagctctgattctgacctctctccaccaaggaggagacagaggaccaaatcttctgattctgacctgtccccgcctcgaaggagtcagcctcctggaaagaaggtcaggattttcaggagccatgtccttcttttcgtgtgactcttctctctcagctttatatatgtcccagagaatcaagccaagaagaaggatgtagctctgagaagtgtagtaaatcttagttaaaaggacctttggaggtctttccttctgaaggcaaactggctataacccatcccagatggacttacagataccagatttcccaagtagcttctgcgtttatagcctcttaattctacaatctcattttaacaggtctagaaaaacttcctattttcttaggaataaaccgaggactgtaatttgcagagtgaagtttggagcacaagcattgtgtcaaacggatcacatacagaaattctccttctgccacttactgtctgtgagatttgggcaagatgcttaatatctctaaacctcagtttctttatctgtaaattgtggataatagtagtacctactgtgtaaggttgttatgataattaagccagtgtaagtaaaactcttagcacagtgtctgggacaaagtaagcatctagtgttagtgatttactagtataaattggactataggtctctgtatccagagcttaaggagaggcacttaaaatatgaaaccacttttagaaatcatgttgtctgagaagtcaatggtttgttttaaattcatgataaggcttgatgaat

SEQ ID NO: 67440 - DNA, 1677 bp, Homo sapiens
aactgaaagacttgattctaaatggactgctttttaccaaggaggcagaagttagaagatacataagggagaaaagaggggggtgtgggaggggattttttttttaagtgtatgtaaagaaggaaaaaaaaaggatactctgaggccccttttttttctgtagtcaagctcttgtcccagttctggagttttcattttgcaaatctgattatggattgaggagaaatggtaccttgtccggaggccaagataggaaactgataggctttaagttgactgaggagagagtctggtgattgatgtacctttaccatttattggatacttaccatgggtcaggcaaaactcttctaagttctttccaagattaagaccatttgtcatacttttcataagaaggtgcagatataacaaaataggtggattgttccctgattctggggctggggtcttctacccctggcccatgtgggctctgttgctacccactagttcagtctagccatgggaaattggaggccaataaaaagaaaaaaacccaaaactcattctgttcttgggaaggtgggaattggaagctgcctgcagagagggggagtggcacagcggcactgattgtctctccttgaccttgcagaatgtgtatgcgcctgaagatgatcctgagatgaaggtggagcgttacaagcgcacctttgaccaaaatgaggagctagggctcaatgacatgaagacagagggctatgaggcaggcctggctccgcaacggtagcagtgggtggctcaagggccagcctccagcgctgctctttctgtaggttatttattagtattggatgaaggcgaaggctgggagtgtctttcccaccagcccttgcccatggtggggaggacatctggtctgagtcagagatctgtgcacactttctaaacagcttgtgatgcaagtgtgagcctattgtgttacttgaccttattttggaagttttgaattggcctaggaggaaacccagaaatgaaccaggggtatgtcatcacttttttcatatcaagtcctcaccctccttccacataatgctctatcctctaaggttggaactctgaagttggagaaggtggaataaagttacacctggagtttgttgttggttttgagtatataaaatactgactttgaacaggaaaggagtctcctgaggggagaccgagtccagcacaagtgaaggagttaccattgaaatgatgactttcaaacagcactggcctctgtattgaccctatccttgtttgatatcatgctgttagaattcagcctcctaaagaaaattttcccgtgtatctactgtaatttggggattgcagctggcatttaattcattccttcagcagatgcttgcttatctactttatgccaagcacaccacagaacagaggacaaaataaatctctttcatggaacttgaagtctagtggggaaaaatgacaataaacagatcaggaaaacagtacatcagatggtgattagtgtcatggaggaatgtaaagcagggaatggggctgggttgtgcaaggaaatggggagtagggaagatcttctgaacaagaaggtgataatttgacatttgggcaaagctgaggaggaggtcagggagtgagctgtgtgggtatctgggggaa

SEQ ID NO: 67441 - DNA, 1071 bp, Homo sapiens
tgcctcagatatgaccagagacctcctcaaggtaacagtctgcttgggaaagtcactgttgtcctcataagttagataaactgtctctatctaggggaagttgtcttttagaaataatgttcagggacatgaggtatctcctacttccctggctttgaggacccctgagcagagggagttaatctaagattggaattgcaggtttagaaggtgaccctgttagctctttctgatgacctggtagctttttggcctccagtgtctatctgggtcctcttctctgtctgtcccctagtgacaggatacctgacagctcgaagctatgactgagtttccctttattaagttggatctattcccgtggttcagatggacaggagtgagtctcaagctttaacaagggagtcagagaaaactgagacagctgcccttgtccgcagtctatcactgctggtattaattgggcaggaggcctctggttggctttctttgcttctgacttaaagcttaaactgacctctcatttcacagtctgagacttgcagtgtggaaatcccagagctagaatttgaactgggaatggcagtcctcgggggcaagttcaccacactggaagggctgctgaaagacatccgggaactggtgagtcacttgagtagtgtgtaaaccacctttgagcaatttggctgtgtgaagagggactggaagacttcagacatcctaattttcggtgctggtaactgtgggtttctttgccttaaagctggtttaagagacttaaatattactttggatggtgaagacaagtttatgggaaatgttgaatggaaattccaggcctaactttgggactttatagttattttgtggtcttggacaagtcatttattttactgtaaagttaggggatgagggtccttctagcacctaaaacttcccaacataaaaaacatacatgtatgggttgacttagcccaaatgtttatctccttgatgaattatttcacttgattctctgttgggcattttgtatttgtaaattgtactttttctttgcatttcttctccaaa

SEQ ID NO: 67442 - DNA, 1040 bp, Homo sapiens
gtcctcatgttgtgttccaggtgctccagttcagcacaaactgcccagaatgcaatgcccccgctcagaccaacatgaagctagtacgtatcttttgccaagcagttgggttgctcttcatctgactcaggcatgaagattataatcaggctgggagcatccctttcaaggaaaacacatgctttatacccagtgataaggaagatattatctttgattagactgtgtaccttgggttttgtgttcaaagagaaaattaggccatggtcactaggctgtgtgtgtgtgacctgagccatgccttcaaatgtgtgaacagggattgccatgggttgggaacttgccctcttctggaggactctgtgggctgcctcttgtgaatatttcctgcagttctgggaccagcatatgtttgtgtggggtttggctttgtttttccccagatggtggtcttgttcgcctggaagtagatttccttaactccgttttccagaaatccctcactttaaggaggttatcatcatggctaccaactgcgagaactgtgggcatcggaccaatgaggtgggtgggcgccattatttgggaagaagactagcttaagggtaacccccttttaactatcattcttcctaagtacttcagtactcgggggcagggggtgtagagtagcttgggtctttttcttaggtctagtgcagggtgatgagcccttgaaggaatgggaattagcctagagaagaaaagttagagattctataacttgtttaagacatattaaaggttgatgatatggaagagagaagtcttttgacccactcctcagaggtgtggaagttcagggaggcagactttgacttcacaatgaagaactcaatagagctgtctgaaaatagaatgagctgccttagagaattataaattcccttcccctgagtgtatctgagtataagctaattaaattctttaaccagaatattataaaggagacccacacattggatgcagtggatgaaaggactgcaataaatgcttaaaag

SEQ ID NO: 67443 - DNA, 1928 bp, Homo sapiens
gaacagagaagtggtgaagactgactctgctgccacaaggattcctgagctagattttgaaattcctgcctttagccagaaaggaggtaagtttaagatcagagtatttgggctgttcgcatgtagctagaatcttaccctctttcttgcaaaaccccctggtgccaggtctagtggtttgtgtatgggttctaccatgtaatcattgtgatcttcattagttaatcatgagtggaaagcttaggtaaaacagctcgagatggtagaaagtaatggtaataccatagtgtgtttattgtagaattttagcatcactattatcagacatgaatggaaccttgcacctggccttctcattttacagatgaggaaattaagacccagagagttcaagtgaattgcccagggtcatacagggacttgatagcagagctgaggctaagtcacacttgtcttttgttcttgttcacaagctctgaccactgttgaaggattgatcacccgtgctatctctggcctggagcaggaccagcctgcacgaagggtaagctggggttttctgattgtagcagctcaaggaataattgcttatatagagtgtcccatgtgtctgaagagtctctgactaagtgttggaaacttgctgggtaagcatatggtggtgctggagctgctagaatgttgcatatgttataattattgtcttttccacttccctccctcagtatatattcaggcctcatcagacaatataacattacctctgaagagcctttcctaatccccttgggttatctgtgtttcctgagtattccactgcatcttatatttattatgacagaagtaatatattatagctgcatctttagttatttgtctccttaattggttggggagtcccatgagaggactgatatatatactattatatctctaacgtggcatgagtgcctgggctaaatggttgaatgagtgagaaaaaggaggctcacctgtcaccacccgtcaacttcaggcttgtttgctacatctcattgtgaagcctgagtcactctgtttccactcacactgagataggtggtgacttcctaatggaagtaacatgggcatgacaaggggcagggcataaggtacaccaccagggctgatgctttactctctgttcatggcaggcaaacaaagatgctacagctgaaagaattgatgagttcattgtcaaactgaaggagctaaagcaagtagcctcccctttcactctggtgagtattgagaggctggagttgcccttgattaggggaggagggaccattaagactgctgggattttccactgtgatgcctgcgtggtctgatagtaggtgatgtaggattgtttatgattttcttttgcagtgactctctcttctcccatttgttagatcattgatgatccctcagggaacagttttgtggaaaacccacatgctcctcagaaagatgatgccctggtgatcacacactacaaccggacccgacagcaggaagagatgctggggcttcaagtaagtggactgaaggatccagaagaatgctctggaattatcgcgcactctggattgcttggagtcagtggaacttattttgctgctgctgctctgtgtgccctatctcagcttgtttgtgcttctcatcttgcttatgtccaggacttgggtaaacttcacagaaaggatggcagtggctgtgatcctatcttaagtcctgttcttcctttggttggggctttactttgtggtttctctaactgatgaggtggcacctgacataactgatgaggtggcacctgagcatttctcccactccagggcagggtgttggggacactgaggtatacctgccaacttgcgacctgcatctttgctattttaggaagaagcaccagcagagaa

SEQ ID NO: 67444 - DNA, 1017 bp, Homo sapiens
ctcagggacaagtccagccccttgtcgtcaaggctcttgtagaccgacgtagggaccaatagaaccccgtgcggtggagctattgtgaaggagcaaaaaagtgccctggttctaagaggacgtcttaggggaagtgacggctgagttgaggtggatccggctggcgatgtaaggttcgagccatataaacccgggaaccgggagcccttgacgacattgttccccgagtgcccggagtctgcggctttttttggggtggtggcagctggcggaagtgacgggagaggggtggggccgcgagagcggcggaagtaggaagccgaggtctgaattgcgcgtggtggccatggcggccagcggggctgtggaaccagggcccccgggggctgccgtcgccccgtcgcccgccccggccccgccgcctgcccctgatcacctgttccggcccatcagcgccgaggacgaggagcagcagcccaccgagatcgagtcgctatgcatgaactgttactgcaatgtgaggcgggggcgcggccgcgagcggcgggtgggtagggcttgtgccgggacgagccgggggtcagacccagccaggtgggcccggccggggaccccgaggagcgcccggagatagtagggcggggaaagggagtttcattgatttttttccttagctactttctacttcaccagggcatgacgcgcctcctgctcaccaagattcccttcttcagagaaataatagtgagctccttttcctgcgagcactgtggctggaacaacacggagatccagtcggcaggcaggatccaggaccagggagtgcgctacactttgtctgtcagggctctggaggtgagaggacctcagagcaggtacctcagtattctagagagagattcggtactggggtcagagctctggtccaggcggtcggatcttaaataaatccccctatgtctcctagccttagtttcttttgtaaaatggtactggtgttgtcatcagctcaagtga

SEQ ID NO: 67445 - DNA, 1883 bp, Homo sapiens
atatatgtgtgtatatatataatataatatatgtgtatatatatattatatatataatatataatataatatattatatatatattatatatataatatatatataaaatatatatatatatgctctcctctttcagcctctttgtcacagggaagaagtgtaggaggttgccttgggccctgcctctctcctaacctcctcttccccactgggtaccctcagcccctatattttaattcttgatcatgtagaaattgtttttggtaaatgttgatattattgttattatcattattaataaataaagagaaaaggaatttttgtttaaatgagaaatgtttaaccagattctgttctatttgaattgtgacttgcaccttttgttcaaagtatttcctttaggcattgtaattgtgaacagctcttacttgtgccagtgacagatgcagtggtctcctttccccagttgaagcagtgcatacgcagtagctattatttgtgttatctttatttctcttcattgttagaaaccaaagtcttctctgctggctggggctgagagagggtctgggttatctccttctgatcttcaaaacaagagagagaccttgaatacactgactcttccaccctttttttttctgggaaaggagagcaagaggtcccgagtcccctcctagtctttcatcctgaatttgcacagaggaaagcgggtgcccggcatggccatcctgatgttgctggcgggatccccatgcaccttgtccttctccactgatactggcagctcggctcctggacccaagatcccttgagtggaattctgcagtgcaagagcccttcgtgggagctgtcccatgtttccatggtccccagtctcccctccacttggtggggtcaccaactactcaccagaagggggcttaccaagaaagccctaaaaagctgttgacttatctgcgcttgttccaactcttatgcccccaacctgccctaccaccaccacgcgctcagcctgatgtgtttacatggtactgtatgtatgggagagcagactgcaccctccagcaacaacagatgaaagccagtgagcctactaaccgtgccatcttgcaaactacactttaaaaaaaactcattgctttgtattgtagtaaccaatatgtgcagtatacgttgaatgtatatgaacatactttcctatttctgttctttgaaaatgtcagaaatatttttttctttctcattttatgttgaactaaaaaggattaaaaaaaaaatctccagactcaagttgctaagaccttttgtcctgccttttgtccttccttttgtgaggcacttacttacaacttggttacttagttggacagcaggaagttgtgtagataggagcctgattgtgttcttaggctgatagattatttgcctgtggtttggagtctagttggaagaagcctcaggtaggtgggagctggagcagtggaggctggagaggtctcccaggctaagggtggggctttgagtgacttaagaaactcgcattctctagaagcctgaactctgcttcacactgtgtccctgggcacccagctcggactctgccctgtcagaagggagcatttgaatttgctgggccaggtggaaaacagcttccttgaaagggcacttttgaagagtacagggaaggatccttaaagagtggacacaggctggacccttcatgacgtgacccccattggccgagtgaaaggatagccaaataagtatttggaaagaaagggaggggcctggcatggctcacgcctgtaaatccagcacttctggaggccgatgggggtggatcatctgaggtcaggagtttgagaccagcctggccaat

SEQ ID NO: 67446 - DNA, 1196 bp, Homo sapiens
tcaaaatcaaaggaccatgatacaaaattaacacttagtcaataagatagatgatccatttcccttattcataccacagtttcttggaatccagaaattcctgactgccatccaaacagctaactttaaacttgtgcaatagaaaaaaagtcagcccaacataatttagtgtaaatagtgtgggaacaagagtcagagcaccttaattctgctcttgcagctatcataaatacgataactttgtcatttaatccctctgattctgattttcctcatctgtgaagaaggtgttggaggaacaatggagtatcttacggtgtatctgtggagatgaaaacatgtatatatgtgtttgtttctacataatgtttgcatgagagagagaggcacattcagatcatctgaaatgtttgagttcagtgcataaatgtgaggtattattactctggtcgttttattagtgagctaaatgcagaatattacagcatcataagggcccccattatcatttcattttgtaccactttataattaatgagtatattcattatcattctgaaggagatcaggattgcaattagtaagttatacttagaaaatatagttccattagcatcacggcattcatcctagacaaaatcaggaatcttgcaatttaccactcctcaccattgccatccaagggaataaaaagcaatttatctgtaaactgtacaaccctgagactgagcagtttcttccatccttccctccccggaactacctgcatctcctgccctgtcatttaaagtcagtgctgaaaactcagccccagggggaattcggtcctgcagcacagagcagtagagaaggccttgctgtaaagcggtgtctgtgaaaacgccttggtggtgccaggttgtactcattatgcgctcttaggggggaattgttgcctgaaatgccaattcaatcctgaccttttgaacagatgggtgtcatccagctgagagattggctccagtgagatgtactgtgttcacctgtggctgctgtattcttagtagacataggagggtgggagctttcagaaccagatcataggtggaatggttaacagacctgagggtgtttaggattgggaggaaaaactaagagaaacatcacgcttgttagatggaagaagggattagatttttctgggttcatattatggg

SEQ ID NO: 67447 - DNA, 2073 bp, Homo sapiens
actgtgctggactgacctgggtatcagtctcttcacaacctgagcttctgaaaaagtcatgaaatacctggacctgggattttctgtgatgggagagaattatttttgtgcagaaagactgtattgctacttgaagaacatggctttctgaggggatcagaaacatgtccatttcagaaaacattgaaagcataggaatcaaattttaggagaaaatagtacttacttgcttctacttcaacctgaagtagaaacagaaatgacaagttataaggaaatgcttctcaacacagccttcatgatccctgttcctggattgtggcccgccaaattcatttgttttttgtgttgctgaaccaaatacatgttcgtgctcatttcattagctcactgctgggtcaagcctcaggtagagtctgaaacaaaagccatcattagcaaagacagggtaaaaggctttcacctgctgccagaactctctggatacctctgcacggtcattagattcctcctggtcccgcgctgtctgcattgtatttgaactcgcttgttaacctgcttcctgagctgtggttctgcttcagtcccaaatgaatcactggcaaggtagcacatcatttcatccaaagttcagtgtaatggcatctctgccctggacatgaaaccctgatcctttccatctgctactggaatgctgctgccttggcagtcttttatctgcttacctcagcccataaacatctctttctgatcatcaggtcacaagagtaggtgttagcttctaaccccgatgctgtcttaggcattccttatcaatagcttgttctttctttctgtaagattctggctgtgttccagttgagcagtggggtctttgaaggtaatccatatgattcctctttcattaggaggttgggtgagtgctgctgctctgagaagttgattttcacagtaggtgaccttatttgttgaccaggtacgtgcaggatctcaaggcccacattccttaagaatttgttgtctccatcccaggatcagaagtcttcattttcccccaccccaatcgccaccttctattttctgtcacagaacctatgagttctaggccagacctttgaccacaaaactgactgttgtttccctctggccatacggagatcattgctcagggaaaactttggctcaaatggtgaatttaaggtttctaaaggcactagatagacatatgattataaaagcaagagcttctgtacagtctggcctggaggatattgagaagcttttctctctggcctagtgtatttataagaactggatgtacttgatctcgggacctcaccaggcttggaaagtaagccaaccgaaggtaagtagaaatggaagatgtacacctggagccctctaaagggaagcaggctagggaaacgactgatgtctggaaatggcatgaaagtggcataatatgcagggctacctgggcagccagccgtctttatgttcatctggaacagcagtccctgtgtgatttggtcaaagcccctgagtcctagcctctaaccttctcttcccatatattcagctctacctacaaggactccaacactctgcacctccctacggagcgtttctcccctgtgcgccggttctcagatggggctgcgagcatccaggccttcaaagctcacctggaaaaaatgggcaacaacagcagcatcaaacagctgcagcaggtaatggaagaggtggcaggcatccctggaggagcatgggtgacagaggccaggattgcaggaggactggggtggtaaacgtaccccttttatgtcagcaacattgcagttttataggttaaaaaagtatagctttctgggccgggcgcagtggatcccgcctataatcccagcactttgggaggccaacgtgggaggattgcttgagccctgaagttctagaccagcctaggcaacgtggcaaaccctttctcccccaaaagattaaaaattagcatagtcccagctactcctgaggctgagatgggaggatcacttgaacctgggaggtagaggttgtagt

SEQ ID NO: 67448 - DNA, 1077 bp, Homo sapiens
tgccatcagttttgggatataagcacttttgagtaagaatgttaactaaacttctctgtcattctgttttgtatcagcacggaagttatggaagatctgcagaagctcctacctggctttcctggagtcaacccccaggctccattcctgcaggtggcccctaatgtgaacttcatgcacaacctgttgcctatgcaaaacttgcaaccaaccgggcaacttgagtacaaggtacctagacatggaagagggctggctccagaagaaacaaacttgagcttcctttgagaggctatgaggcaccttccctaggacttaagggtttacttatagagaaagatgatttatcttgcaaagtagctcgggtgagcgggaagcgtcctctagtctctgtcatgacccatggctcccttaatttccatagatgagtggcttgcccctttctccccgccttcccctcatctcatggtccgtcctccccactctgttcctggcaggagcagtctctcctacagccgcccacgctacagctgttgaatggaatgggcccccttggccggagggcatcagatggaggagccaacatccaactgcatgcccagcagctgctgaagcgcccacggggaccctctccgcttgtcaccatgacaccagtgagtagcagcacagagcccaattcactgtctcagaggcttttgataaaaaggttgtgagcctggggttgggaacccagggccaacctacatgtctgaatttcctttttctccaaacttaggatgctccagcccattttcttcaggccagtagagttttccacactttatttttggcgaacttacttacttagccaagttatttctacattgaactccactcctggagagctttttcctcaatgggcgctcacaggtaccctggttaagtccagctgcactcctgccagcttggggcaggtagcagcctaactcagagccttctcccaggcaacctttccctgccagaaggccaaagtgcccttaaattaattggtttctagactggcttccaaaattgccttttcactaatgctttctccat

SEQ ID NO: 67449 - DNA, 1192 bp, Homo sapiens
tgctacagttgtggctctagccttactactctggaaatgtaattttaataaagcgtactgttgtagatggcatttactttattctataggaatgtagaagtctttgagatgtacactgcatttgaatatagttttaattgtaaagcaacaacaaattgatgcctgatgtaagaaatcattttgatataggaactttgttgtattatcttttgaagttagagtaaattaaaataagagtaatttatcttagttacttgtagtattcttttcacaacagtaatatagaatggtgtttgccaaatggtatagaaattgaagagttgaattcaccctagaaaagtagatcaatttatatccatgtggagatgtataatagggtagtcaagagcacagcttagaagtcccaactttaccatttctttgccatgttgaatatgttaactttcaaaatcttgtttcttcttcatttataagtggagctaattatagtctctaagttaaggttgttgtgaaggttaaatgtaataaagttggtaagcacagtgcttggtatatcaaaagtagttttttgtaataatgtcttactgttgttgttattttcactggccagttttgttttcaggacggttgtgattaaatagaagcagaaaatttaaaaacctatagaaaattttattttaaaaaaattttcacaattacaatctcatttgattaaatactcaacaaatatttatttacatattcagtagatatttatgcagctcctaagtgtctagatataataaccattttaggtactggagagttgatactgggtacaacagaaagaaagacatgggccttgcattgcagtggaggagtcagacaataagtaaatacataaacaagatggtttcccaaagaaatcatttgcgtgaagacaatgaatgtgatgtaatagagagtgactggaggcccatcttagagtagatggttaaagaagagctttctgaggaagtgacgtttaaactcttacctgaatgacaaggagccaatcatatgaagatctgaggaatggccatttccactaaaggaaaaaacaaacaaaaaaacacatgtaaaggccattggatgagagtgtgttaaacatgtgcaaaaactagaaatgtgcatagtggcaggaaaccaggtcagagagggaagtagggggcca

SEQ ID NO: 67450 - DNA, 1046 bp, Homo sapiens
ctaactctggctggcttcttagcaaaagaaggtatcttggcagaaaacacccctggtttcttattgatttactttttaattatttctgcagggatcatagcactgcaagatagtcacactgttctgtccatgttataacaagatcaggacattataacagactttattttcttttcatgaggaaaaacagcatgttttgtgtgcagtttgtcttttaggaaaaggcaggcagcattaaagaggtgctctgagacaaacattttttaaatccagaacatctaaaatacagggatagactcttatcaaagccatgtggctccatcctgagattgctgttgcaggccatccattggtcttgttctgtttgctataatagcatcacttctcccccagggctggtacccgagctggacaaagtgagtggataacagcatcaagcagtgtattgcatagcatccttgttctgaaaactttaagactttaatgtcatttaacttttaaaaggtttttgtcaagtaattcattttccatagaaacatgtttcagagatttaatcgccaatttatttttgtttcctttttagattttgaaatttagaaaaaatagaaccctctttgaagtgagaattgtgccagaagcaattcattactaagaagtaaacatttttaagaagtttgtttaaattattgaaaatatagaactcttgggctgggtgctttagaattacctttgaacacacctaccattgactggaccaagtacataagaaactagatcatccccttcttctgagcacctgtaagcagcatgcactttcttgcctgcaagaaagcctttctgtgccttctggtacacagatgtcttctgtttccaccagctcaaagcagctttatgtggtcagaaagaatccatgactcagtttcttctatgccattgctcaccacagagctggaaaggattgttttgccatgttctgttctttggtgtcacatgcagggtttcagggacaaatggctttccctccttcataggatcagcctgaagag

SEQ ID NO: 67451 - DNA, 1024 bp, Homo sapiens
agagtcctttttctgcttacgcctcgtgtttctgggcacagttgtatctcagtagacctggagcatagtcttctgatggaggcgagtgctggctgcttttcagcctgtgaggccagctgctattgctgtattacgggagatagcgtgattgagagaattccttatgcacaagatccttccttttctcagctgttgtcataggcttgagctgagtttatctgtttttcttcctgaagggtctagaaactccagcagagctggtatagtgttctaaatgatcacttggaagaccagagggcaaagcctctaccatgtagctgcttctagccaagttgaattccagagtagctacatacagctgtgtgggaggccatgctctgcaaatggatatagttagctcaagaattctaagctgctctctattgtcagtaatgtgtggaatgaagtatcctcacaattcatgtatatttctatgcctggtgttgtttgtttgacacaagtttcctttcataggcatcctgagatgtactaaagacatatattttcaagttggaatgacagtggcatacatttaaaagaggatttatttgaggctaggttgattgtataccacctagtttttataattatgtatgtgtcttcctcctctccccactagaatgtaagcctcttgattatcagagctgtgttttacactcaataccttccataaaacctgacagcccctggtaagacataagcattcagtaagtgtttttgaatgaaaaactgagtcatcactacttaactatggaatcttatatcagactcttgtttttttttttttttgggagacagattttgccgcccaggctggagtgcagtggtgcgacctcagctcacggcaacttccgcctcctgggttcaagtgattctcttgcctcagcctcctgggtggctgggactacaggtgcgtgccaccacacccagctaatttttgtatttttagtggagacggggtctcgtcatgttggccaggctggtc

SEQ ID NO: 67452 - DNA, 1047 bp, Homo sapiens
gtcttgaattcctaaccttaagcgatcctccctccttgacctccatgagccactgcgcccagccagcaaacaatttttttaaaaaagcaaaacttaccttactatgtacagtgcatttcaatatattttattctattccattttaaaaaatgctgatttcgacttactaaattgatctcctatctgctatttcagaaacaatgacatagaaatacctttataacctgactcctgcctagctcttcagccccagctcccactctcccaccagtcaccctaattttcttctcgttccctgaacaagttctgttttctggagcatttcccactgccgagaatacatcttccctatcccaccccactccacccactcctgtattctagaattcagaataaaaaaaattagattggatagaaataagaatctagataatttctattcactcttcatgtctctaaactttctcttatcgtggtgcttaccaagctttatattgtaactacttctttcattgtatgtcttccacaccagactgaacttagtgaaagtacagacgaaacatgtctttttcacaactgtcaataacctaccacaggatctggtgtgtagtaggacttagtaaatatgaaatctgaatcagaaccaccccatccccagtggcatttgtttacattcagaataaaattcaaggagtcattattactatggcctacaaggcacagctgtcattgccccttctttggtctcatttcctgttactgttcacctccggttctgagctccagtcacagggccttccttgctgtttctcagacttgccaaacacatacattcccctcagagaggagtcataggtcccctcagagaggcctgtcctggctacccccatcattctctttctgtaattctgctttttcttcatagcacttactttattgtctcctcacctcctatcaccacttgaccataataagcatttggtttttgtttactgttatgttcccagggctttggacggtgcctgagttctagtaggcactcagtaa

SEQ ID NO: 67453 - DNA, 1100 bp, Homo sapiens
gtgccccaccagagtggtatgtttgttacaatcaatgaacatgcattgacacattatcacccaaagtccatagcttacatttgggttttctctcagtgttacacattctgtgggttttggtaaatgtatagtgacatgtattcaccactataatacatataaaattgtttcactgcccccaaatcctctgtgctctgcctgtttatccatttctccctaaccccctgcaactactgatcctttcactgtctccacaagtttttccttttccagaatgtcatatgggtagaaacatacaggatgcagccttttcagattggtgtttttcaaatagtaatatgcaataaggttcctccatgtctcttcatggcttgagagcccgtttctttttagcactgaataatatttccttgcctggatgtaccaccctttatcctttcacctacggatgacttggttgcttccaaattttgacaattatgaataaagctactgtaacatctttgtgcaggtttttgtgtggacataaatttttaattcatttggttaaacactaaggagcacaattcctggatcatatggtaagagcatggatagttttgtaggaaactgccaaactgtcttccaaagtggctatgctattttgcattcctgccagcaatgagtgagagcttctgctgcgccacatccttgtcagcatttggtggtgtcagcattttggattttggccactctaataggtatatagtgatatttcattgttgttttaatttttaattctctaatgatgtatgaggatgagcatcttttcttatgcttatttgccatctatatatctttgttgaggtgtctcttcaggtctattggtcgtttttaacttcaggttgttttattttcttattgttgagtcactcattacattttaaaacactttttctcattgcttctgagacgccatattctccagttttcctcctgtcctctggaagcaccttctccatcttctctaccagacttatttttctctgctcatcctttagatcttttcatctttacaacatctttctggagccatgttatttactgctgtagcttcactg

SEQ ID NO: 67454 - DNA, 1110 bp, Homo sapiens
aaagggatttaagttgccatttcagcctgcggacaaatgctaaccaactagggtgttgggggttggaaagcaacttaacaaattatattgagagccacttgcgagtggagaaataaatgaccatggccacatgaagagaccaacttcgctccactcatatggcttctgttgtgtaggtgtgcgtatccatcttaaccagcttcttctgtttctccctgttcttccgtaactctttagaatattcatcattttaatgttgactctgtaggtcatacatctttcccattgccagtaaataagcagtaagggatatcaagtattttatcggcatcagtacctgagaattacataaaactaactgctcagtgtttttgttcttattgttcaagatgatgtcttaaagtctttatacttaaaataaaaattttagttatagaataatgtaagcatactatagaaaatttaaacagcaacaaaaccgttttaaatattcaagctgcaatcccacctctgaaaccattgttaacattttgaatgcattttcttttgtctttttactatgcatgtttttcatacttataatcagtgtatttacaattttatatttcccatgttgctccatatagtcatcattttttttttttgagacagagtctggctctgtcttgcccaggctggagttcagtgccaccatctcgggtcactgcagcctccgcctcccgggttcaagcagttctcctgtctcagcctcccaagtagctgggactacaggcatgtgccaccacacccagctaattttgtatttttagtagagatggtgtttcaccgtgttgaccaggctggtctcgaactcctgacctcaggtgatccacctgcctcggcctcccaaagtgctgggattacaggcatgagccactgcacctggcctcatcatttttaatgagtgcacatcaagtagatgtaccataatttacctgatctaccccatattgtttttgttttgttttgttttgttttaaaagacagggtttcgctctgtcacccaggttggagtgcagtggcatgatcatggttcactgcaccttgaactcctgggctccagggatcctc

SEQ ID NO: 67455 - DNA, 1015 bp, Homo sapiens
ttagattgaaatcatttgaatataagatataaggcttaattaatccaattcagtatggagacggcaaaaagctggaagctgagggaagggaagggcctcctggtaataggaaggccagttaaaggctgtgaatggtaaaatcccgcatgagggtgatggtggcagtaaacatgcaaaggaagaaaacggcaacaaattcaagagagaaagcaagcgagaatttctaggaccagataaccaatcatatgtcttgaccaggaagagggaattttgaaagatatgtttagaaataaagaaatgaaattttcttactgatggattatattaagctatcaaaaaaatggtgttttgaaaatggttaatgtattgctattcgaaagtaattttaatgtccttgtccccaaagattaagtagcaaggtgtctatatttaaaatagattgcctgagaaaaaactgaaatgtagctggcttactccctgaagaaaagttctttcaaatgcttagacgttataagaatgttctgaaaattgtggaaacattttttttaaacctaaggaagttggaaacttttgtctttaaatgtcgactcccagaatggtctccatgagatagtttccactctcgtgttattgttttagttggcaatcagtagacagcaaagatcagaaatgcaactatagaaaggccaatatcctggaaagaattttcagagcatggatttaaggtaccatggaaaattttgaccttaatgcagtgagagctagaccattttattattttttagggagaaattaaaacatttcctaactcaattgacctttcacccttagtatgaatatactgagataccatcatatagaaaagaaaggttggaaaccttggatttttgagtacccttccacagtgtgttgactgacagtgcctctgactggtcacaggaagtagttatgcaatactcattatatcaatctaaattgtatttcatgattctaatgccctctttttaggctatca

SEQ ID NO: 67456 - DNA, 1081 bp, Homo sapiens
cagtgacgaatttctgtccaccctttccttaaatgatttaatattggggccttgcttttttacctcctctttaacacaggaaatatttctgatacttatcttcatgtgtgtgtttgctcatgtctgtgcagtcttctgcagtgaggatatgaaaagaaaggtagtgagttctatgacccttgaaaaacaccagaactctcttttcctaatgaaagtacaagtgtgttcttatgcatacttttgtataacaggatttatacttaaaatagtttggatacttattactaatgaattttgatagatgcaaaccaggactatcaatgtgttgttctctcattgctcattttgcctctttaactcactcgagagggccccttgtagccctccttaagtctaccttttgaaattacacaagtgtccaaaatgaaaactgactgtattcttcttcaacacagaccacctggtggcccatggtagaatggcagaaaaggaggcacgtcggaagttcaaacagatcgtcacagctgtctatttttgtcactgtcggaacattgttcatcgtgatttaaaagctgaaaatttacttctggatgccaatctgaatatcaaaatagcaggtgagaactgtactgaggatgtcagatagggacaaaggagcttttccttggggttctataagcaagggattatctgtttccatctcttcagaaagaactattgtgaaagtaaggacaatttaagatgaaaaaaaaaatagcctgaaaattgataaactttaaaagtacttcccctcccctgccctttttttttttttttcgagactgagtctcattgtcgcccaggctggagtgcagtggtgcagtcttgactcactgcagcctccatctcccaggttcaagcgattctcctgcctcagcctcccaagtagctaggattacaggtgcgcatcaccacgcctggctaatttttatacttttagtagagttggggttttgccatgttgggcaggctggtcttgaactcctgacctcaagtgatctgcctgccttggtctcccaaagtgctgggattacaggcgtga

SEQ ID NO: 67457 - DNA, 1400 bp, Homo sapiens
taaagactttcttaataaaagaaatcacttattttggaaattgtgaaattaatcattctgcagcatttaagaagcactttgatgtgttctggtaattagtatttactgccagacaaatgtctcttgggcattttaattaatgggtagcttggccaaatgagcttctgatggtaaaccttcataagggtttatttttatgtttctcaagaatagctgtctcttcaaagctctttaattagacaaggtttagcaactaaaacatattattagaataattaggccttgggttaagagaaatagggggtcagaggagcaggtactgttagaaaatggcctcttaaaacatagcattctacctctgatggatggccagttctttcacagcttctgttaagttactctccctagtttggacttcgtgttgtttaaagttcatagcagacctcaccggaagcctaaacacacccgagtgggagcttacttatccccacctctgacctcccagggaaagcttgattctagtccttttaactgctaagtggaagacttcttattttctcctttttcttctattaaatcgataatcttggctataacaatgacttgtatttttgagggagatgcttcaaaagccttgtgtgtggcgaacaaaaattacaataattcctttgaggatctttcttaatgatttatattatctacatataagatatgttcttaaagtgactacagtatttgcattccagaatgttatatttcttgtggtcagaatgcagtttgaattattttgcaatctgctctgtagatgggctggcatctaactccccttcttcaaccttctcccctaccatttcttgccacaagcgctcagtcttggcagttattgctagtaaatatgtgctaccctgaacttcctctttgtggtgaaggaaagatacacctgactggtcctgtgagggagtgagatgtcaccaaaacaattgtgtattctaccaaaactgttgataaatcacaatatatttatctatattccctcatttttcactttcctactgtctcaggatgcttaggatggcaaatatgtccttttcccagctagatcagttgattaaaggacagtgctcatgagactattagacatttctaacagaacaactgtatcatagctgacatttctaatcccactagctgtcatgacctatatgtgttgttggtttgataaagaactgagtcaaagatatgtatgttgttggtttggtataaacctactgctattattagaaagttcttaaagaacctgctaatccatcaaatcatttttgaatattgaggatagcctgctttatagtattatgattttatcacatgtaaattcttttgatataccttagttaacaaca

SEQ ID NO: 67458 - DNA, 1650 bp, Homo sapiens
actcttattaacctgcttagggggagctgagttatcttggcctcgccctgcttttttggaaagaagcgtttgtttgataaacaggaagtcgtttccatgggtgtaggaagaagaaatgatagaactgagtggcaaagcaaagaactactagctgtggttagtttggaattggcagaagttttttcaggtagtcacctaagatgaagatgagcacacatactgccttttcccttttctaggctgggttcattcttcactgaaatgtggtatttctgcctattgcttgtcctgctgtcagggtatgttcattttcagctagtgttttgcatcaactatgagttgtagacttagcagacaaatggagacactgtctgtttagagtggaaaagtgacttattttaagaaatgttggctccgcaccactatcccattagtggcatacctctgacactccattgaagctggcctagggaaggtaagactggcttctgtgtatttttgctctttgaaaggtcagaacctaaatgtaccacaagatattttcttcctgagtaagattgggacaaaattacaaacagtgaattctgaagcaaacttacgtgctggtgctctaatactttagaaaattcaaaatcgatttcctgtacttctaacaatattactcttcgtcgggtatgtaaatctcttagtgtcacttacttcttttcattttgcaaggaagggcagaccaaaaagattaaagaagaccaatgccaagtcatggtcatgggaaagtgagaaagagaatttaaaagtactttttacttttttttactttgttttactttttacttttgaaaagcacttgaaacaggagaaccattttttttccttttaaccgagagtcacctcatccctgtctgggtacatgtttggagtgaaattgtggtcaaagaaaactttaaatttgtcccagacctataatggcaactaaatagataagtagttgattgatggtgaaaaaagcttagtgtgatggacttgactttatgcagcaggtgtctacttgaggtttgtttagattggtgggggtggggagggggcaggactctagctaggggcatggctgcagtgtggatgattgggatgaggatatgggtagtatttgtgtctcagtatttaggagaggtagttcactgaattgcctggaagaagcagaacaactctggagttccttgcaattggagtttatcctgacaaggttcaacgtacattttactttgcgtattgagtggattcaggagccatttggtttcatttgccttctgaaagtactgcagtatttgtaaaaatgctgtgactatgtgttaagtccaggctggtctacagctctggatttcttcactgaaagttaaatatcacatttgaacttgaagaatgtttgctgcctgcctctagagcatatacgaatataaagcagctatttgtcagcaggcagctgaaaggcgattttcagcagggagtgaaaaccactgcaggctgctggcttcctggcacacccactagacctcgtaggtttacagtgaaagcaaaccaatgggagtaggggttggggggataagatgggcaaaaatcagggcagaggctgaggtctgaatgcgattgagccac

SEQ ID NO: 67459 - DNA, 1022 bp, Homo sapiens
tttgaacactactatgtactggtttgttgtggctttttttttttttttacatgtttttatttaatccgcagcatcctttatgtcttcacaactaaactaccattttcccactagtttatttactcctttgattattaaaaaaggtattttcggccaggcgcggtggctcacgcctgtaatcccagcactttgggaggctgaggcgggcggatcacgaggtcaggagattgagaccatcctggctaacatggtgaaagcccgtctctaccgaaaatacaaaaaattagccgagcatggtggtgggcacctgtggtcccaactacttgggaggctgaggcaggaaaatggcctgaacccaggaggcggagcttgcagtgagccgagattgcgccactgcactccagcctgggggacagagcgaggctccgtctcaaaaaaatcaaaacaaaacaaacaaacaaacaaacaaaaacttagctattttctaagggtctcctaacaagcaagtaaccatgctactgaactttagtcactctgaatcaaaataattgacttgtatttatttccctaattaatttcccatttattattattcattttttgttctgttttcttaatatcagatatgactaacatttattttatttatttatccttttttttttttaatgcccccaccaggagtgtgcaagtggagagatgcatggatgaaggaggggagctggcgggggtgggtctgtgaccagcatttatattgtaactggccaagatgtatgaggaagccacctgtgctttgacctcactttacactaaaacattcatttatagtctgatcatccagtcatttctaccatgacataaaaataagagccccagagaacaaatcaaattatttttgctgtattgagtatatataaatcccaaagggccaggcatggtggctcacttctgtaatcccagcactttgggaggctgagatgggcagatcacttgagatcaggagttcaagaccagcctggcca

SEQ ID NO: 67460 - DNA, 1018 bp, Homo sapiens
aaaacgaaaaatgcccccaaatcttaaactctttgagtgccaacatgacaccatgtggaaaattctatgcataagcacttaatacaaacttgtttttaatgcacaagattatttaaaatattgtgtaaaattaccttcaagctatgtgtataaggtgtatatgaaacataacgttttggataagggatattcaacctgtattgttattcttattatttttattgttttattttttgaaatggggtctccctctcgcccaggctggagtgcagtggcgtgatcacagcccactatagccttgagctcttggactcaaatgatcttcccacctcagtctcctgagtactaggactacaggcatatgccatcatggctggataatttttaaaaaattttttgtagagttgggggtcttgctgtgttgcccaggccggtctcgaactcctgggattacagcatgagccaccaggccggcctattttgtcattatgccactttcttagacagtgttctttggttgccattttgaactattagaactgccttgttaaaccatttagcttttgcccttttcttccccagatccctaatacttttctgcccaatcctttctctctattcagagtgtttcctgtttgtcctacattctctttctgtcctccttctttcctgctcttccctctttttttttttgagacggagtcttgctctgtcacccaggctggcatgtagtggtgtcatctcggctcactgcaacctccacctcccaggttcaggcgattctcctgccttagtctcccaagtagctgggactacaggcatacaccaccatgtttggctaatttatatatatatatatatatatatatatatatatatatatatatatatattttagcagagacgggttttcaccatgttagagaggctggtcttgaactcctgacttcaagtgatctgcccgcctcagcctcccaaagtgctaggattacaggtgtgagccctgcacctggcctct

SEQ ID NO: 67461 - DNA, 1032 bp, Homo sapiens
ggagtgcggtggtgccatctcggctcactgcaagctccgcctcctgggttcacgccattcttctgcctcagcctcccgagtagctgggactacaggcgcctgccactacgcccagctaattttttgtattttcagtagagacgaggtttcaccgtgttagccaggatggtctcaatctcctgaccttgtgatccacccgcctcggcctcccaaaatgctgggattacaggcatgagccaccgcgtcggccgtctgtctatcttaaatgaaactatttctgatatctggagattcttttggatctcattggcaatgaattaggggtcatgttaattggcttaaaagtagtattgtcataagacataaaagaggggctaatagtataatagttgggttttacttaaattgtggatgcttttaatgatttttaaaaacccacaatgttattaactatactcaatactttaatgaattgatacacagttacgacaatttcctttacataaaatccttggttctaccttagcatctttttgaaattctacacttgtactctaatgcaaatttaggaccatcagagaaggtcagtatttaggatgtctgtaatcctgctacaggaaaacacaaagaatcttgttaaatgttaactctgttatattaagcatatacttcatgtagctgtcttttgacatctgttgtggctatgtttaacctatataataattttatatttcagtggaatcattctcagttttttctatggcaatgttgtttatcagttgtccgcttaccacctttaaaataaatatcagaaatttggccaggcacggtggctcacacctgtcatcccagccctttgggaggccaaggtgtgtggatcacaaggttaggagtttgagaccagcctggccagcatggtgaaaccccatctctactaaaaatacaaaaaattagccgggcatggtggtgcgcgcctgtagtcccagctacttgggaggctgaggcaggagaattgcccgaacccaggaggtg

SEQ ID NO: 67462 - DNA, 1254 bp, Homo sapiens
ttgttcttcagagaaaggaggaagagtgggctgaagtaaacgctatatgtctaaaatatcacaattatgttgacttttttttgccaccagaatgattgatgcccttgatgggtcatttcactaaataaagtgagttaccacagcccagtagaaacccagatctggttgtgtgaccttaatagaggtatctgaaattataaattgattttcttccaatagcccgcatctgaaataactggattgaggttcatgtcagtaaattcttcaatttctatgtagggaaaaatgaggacctttttgtttgtaattattctatttattgaacagttattagttgtacttctaatctgtactagaagactatattacaaagtgtttattttccctaaacaatggcttctcttgattcgtgttcattattgccctaaataaattgaaatttagaaaaagaaaaacccagttttcttagtatcatacatgcaagcttaagttttcttatttgtttgtttttatttgacatacatgaaggttatttccaaagatacaaatggaggccaaaacagtttgacataaagcagaccaaaacagattgaattatactgtacctctacactgactagcattttgatgtctagatggataagtaagcatagtgctaatttacaagcgcaaactcaactagtaagattaactaatttctaggctgtaatgaatttatataaatattcttgttattcagatgggaaacctcataactgtgctgtagattagacttgcattgcctaaaactggagaatgtaactttttttgtttttttgacaaacccacagccagcatcatagagaatgtaactttgcctcccaaatctgtgtatgtcagatcacttataattggagctgcacagttccctcttctaggtttgactctttaaacttggtaacatctcattaggctaaatgaattctccatgccctattgtctgtcttgctatgttgcctaacactttgattttaacattaggaaaacaactaccaataaacatgagataaaacacaaaatagatgaataccactagcttggtaatataaaccattatataacagggatttgctgcagactcttttcacacatagaaaacttttccaaaagacatttttgaagtttcgctatgaagaaagtttgccagtgactgaaagaaccttttgtaggtccctatttgggagtgcggtaactggtgcttctggactctataca

SEQ ID NO: 67463 - DNA, 1019 bp, Homo sapiens
gaacactgactgcttttcattgctggcaaatccggacttcatcagtactggctacctgtaaggaatgtgagcatgttggattttagaacaggaaaaacacaacttccacctcatttcacagtagagttcacttagggatacagactttttggtgacagtaactgttactttctgcttattaattcagatacttgcataatgctaacctggtagatattgtcagatgacaagccttcctcctacatgttctctataaaagaactgctagtgacaagcattttattatattaaaaattctacttcatactgttttaagttaaaatgtatttattatgaagccaatattgtgaaatgtttttttctttttccagaatgtggtttttttttcttgtaatggactaagatgcaggcttattgtgtagaatgaggagctattgcccagatggaccttagtgaaagtaacttaaataagcaagtagattttgcttctgtttgggaaaatgatctaagacggatgctggtattttgggcaggtggagactaatgttttatctcaatgtttgcaacttaagttcagcctacttaagggctgtcccttaagggtgtccaattgtttggcttccctggccacactggaagaattgtgttgggccacatataaaaatacactaacactaacaatagctgatgagctaaaaaaaaaaaattgcaaaaaagtgtgataatgttttaagaaagtttatgaatttgtgttgggccacattcaaagccgtcctgggacgcatgtagcccacaggctgggttggacaagcttggtctagaagttttctagattttactacaatgttcaaatggcaaactttaaaagtggggaaaggaattttgggtgagataaaaagacaggtttgaaaaagcatacaagttcagggaactgcaaatggtttcttaagaccaaagcgcaatgtcagtgtgaagaagtggcaggcaatgggaaaggataaatcagtggagcccagaca

SEQ ID NO: 67464 - DNA, 1464 bp, Homo sapiens
tgcagttgtgtcttgcttttttcacaatactcaatatcatgagtatttttatcacttaaaattatccatgaatatagattttaaatggctcataatctttgttgtatggatgtacagtaatttatttaaccattcctttcatatgtttaaagtagttccattttgttgctattgcaaataatgctgtgagaaacatttttgtatgtaaacttctgtcaggatttctgattccttccttacaatacattcttagaggtagaattactgtgtcacgacgtgggcatcttagaggcctttgttaactatacattgccaaaatactttgcagaaatatagtttcgatttatgccccttttatattcttacatttctcctttctctaggaaaataaatgttcatgttactcaccttcactcaaggtttccaaacactttttcttggctctcctcctacaactctgttctcagctttccaaaattgtttctctttactccttagatatctgggtttccttaggttctgtgctctccctcttctctctatgtatattcttctttgagctaatcagaaccagccccttgccttcaactacagtttacatcataatgactcctaaatcccatatctctgctgagttttgggaaccagttctaacaccatactagatatttttaccttatgctacatagccatcacaaatgtaactcccttatccaaaactgaactcattatccaaccacactaacttcatctccactgatggcagtatgacccatccagtggtagaagccagaagtttgggagttagcctagatttctccttgaattttgtgtaccactggtcaatcattacattttaagattctgcttccaaaatagctctctaatttgttacctcccctttccactgccttaatttaggccctcatattttttgtactgctgcattggtgtcttaactgatacgcccatttctgacctagttccatccctcagtttcatccttcacattaaaaccattttgtcttttaatttttaattttatttttgagacagggtctggctctgttgctcaggctagagtgcagtggtgcaatcttggctcactgcagcctctgcctcctgggttcaattcatccttccacctcagcctcctaagtagctgggactataggtgcttgccaccatgcccagctaattttttgtagatccagggtttcaccatgttgcccaggctagtctcaaactcctgagctcaagtgatccacctgcatctgccttccaaagtgctgggataggctgggcacagtgggtcacacctgtaatcccagcactttgggagaccgaggttggcggatcacttgaggtcaagagttcgagaccagcctggccagcatggtgaaaccttgtctccactaaaaataccaaaattagccgggcgtagtggcgggtgcctgtaatttc

SEQ ID NO: 67465 - DNA, 1034 bp, Homo sapiens
ccatagtacacaacaaaaaagaggcattataaaacttttcagaactactaaagtggtatgattttatgatttcttgttgaattcagcatttgaaaacagaagaaatgtgaaaacagaggaaaggtgcttagcataggaattaacttgtttcttggcaaggaaaccagggtcaggtgtttgaatcacttggctttgtggtggttctgttggtttttgtgtgtgtgtttttcttcttctgctggattatcatctctttttttctgccttggaaactgttgctttatctagggcaatcaccccacttacacaggaggcaaattcaaagctggttgccttatgttgttaaaagctgtcagattcacatcctttgccatatccttcttcaggagtcaggacaatgaagacaggagtctaaacatggggccagagtgagctgccccgtcctcagtactaacacctattcctgacagcttaagttgcttctcagccttagtgaagctttctcagctattctggctcatgatgatcattccctcctttgaactgaaatagcctaattgtctctgagtcatgtggcaattagtcttgttttgctttctgatatctcttgtagttgacttttattgttaatgtatgctgcttgaaggcaagggctgttgtgaatttattatattgctatatattttacagagactcttgatttttccctggtttaccttgggaagttttcctgcctcttaaatggcgagaggatcctttagaagatttcctaactctcagaatcttttagatttttcatgtcatgctgtgtttgctatggccttgaaaaagcagtttttcccttttttgcagcagacacaaccaagattctggataaagaccaggcaacacaattttcctagagtaatacttaccttgagtagtttcttatggggaaaaaagcccccaatattcttaggcttaatttctatgatcaaatattttaaagatagaaacaaatgatatatagtagttaggtatgggggcaggcaaac

SEQ ID NO: 67466 - DNA, 2697 bp, Homo sapiens
aaattttagatgtcaacctaagaatattcaaggagacacctttttccccccattaaatttgttttagcaggtatgtgagcaaaacttttgaatagtgccgcaaaggatatagagatcaagaagaaataatttttgccctcaagatgcttgttagttaaatggtgaagcaggggcatagatacatggtttggcttaaataaagccttaattgtgtcatggtattttgctgtttgcttaacatgggcattgtgcctcagtgttgtgtcatgcttgttaaaatgacccttgagtggtagtttagctcatatgtgctgtgttaccacataggctattgtgcagaacagtgaggaattgtatattgtgaaagacagatggataggaacagtgcccactgcacttaccaccaatgaatggtagggctttctctcattgtctagttgatgtgatcataaaaaacattagactggaagtcaggacaccctaattctcatcctgagtctgccacagaacgtatgaccttggctaaatcatttaacgcatttgaactctagtttcctcatataaaaaaagtttaaactggatgattttctacctgtgaagtttagagttcatacatttttacacagtatatgcgttttagaagggataggtgcagcagattttaagaaacagatgccaaaataatggagtagattacttactgtaatatgcggagaagagtagcttactaattatttatctaagtgtgattaggacagtctgttatatggcttgtcgtaagtgttgtgggtctcaccactgccctttttatttaaaaagagaatttcctctacttttgagaattagaacaaatactacacaggattagtaagcgagaataccaatttcagcttcatgccagtgcctctagtgaaaaccacatttttgcagtgttctagcagaatattaaaatggcttatggattacagacagctcaggctttggtctttataggtcagaggtggaaaccaacggagcaattaccgttcactcttatgggcggggcttcttaggttccttatggagctaaagtgaaactctggaacagttccactagaatggctttcctgggagcttatgaggcttacattctgaaactgatactcttgtagtacaagaataactacaaactgatgtggaattaggaggccagagaggggagaagccacatgtagctctcattctcacaagtcctttggctggcgaacagaggtttttcccgtcactaagcagatatttggttatatattgacaaatcctctctaaacaattcttagaatagaagactgattctgtcttgtgctttggaggtgaaggggaagagcaatgttgaaatgagtgaaattagcttgtgatggtttaacatctgcaaatatcatctatctaaccagtctttatctcctatgtgtgttcttaaatatggtccccattgtttgaagccaagaaagataactgaggaaattctatggctgatttgccgatgttattaccaattatttattagccttagtatcggatagtttgactgatttgccatgttgttttttagaaatgggggtcttgctctgttgcccaggctggagtgcagtgacgcaatcctagctcactgcagcctcgaactcctgtgctcaagtgatcctcctgcctcacctgtgagtagctgggacaacaagcgtataccaccacttctggctaatttctttttttactttttataaagacggggtctccctatgttgcccaaaggctgatgatttgccttttttaggtagaaaacctggactgggccctcaagtttttaactttttttttttttcttggtgatacaaaatgtggggtgaagaggtctgttaaagtgaccaggcttggtgctatttaaagccgaggagggaaatactgtttcctggcaggctttattgtgtttttgtattattaaatctcttaagtcagcagtttactttttgtctagttgtatgtcttggcttgtctaaatgaatcataattaaaatttagtcactgggactcttaatcttgtctaagcaggaattatagtttagagatactataccttgctgtgtatagaataagaaaagtataagtctgctatgatcactgagatgggtttttataagtactaaacttttttagaagcatagttttctttatcacctgtcccccagaaagtttagaaagtgaaaattaaaaagtaagtaaaaataatggtattggagttataatttggaaatttgtttcattcacttgcattttaatatttattatgtaaacatgaaatgataaatttgtttcctttgaaaagattcaagaaatagaatagttttaaaagtagtcttttacattcctttgcttattgacaaaatcatcatcaggaacatcgattcagggaatgaggcttctgatccatctcaaaacgaacattactaatatttgctatggtcatttgacataagtttttattgagtcagaactatactggggcagtagccttcaagccagttaaacatgaattaagaacttgtgtgccaggtactgcactaaatgttaatggcataaaggtgaataaaacatcgtttatactgtgttttgtttcacacaggatttgagatggctgacagaaagtaactaaagtgagattgtaaa

SEQ ID NO: 67467 - DNA, 1050 bp, Homo sapiens
atgcctttaatgtccatgttgattacttgtccagcatcttaatctcatctgacttggtctttcttctcccagctatctgttcttccacttctctgtagcaatttatttctgtggccaaacgtccacttctggaattacaaatctgtaaatttttctctttgaacacaatttcctgtcttttcagttcttccatttgctgagtttattttctcatttcactgaggccgccagccccttaaatctccattgtctcccaatttgtgacattcttcctggcatcactttatcccatatggatgccataattggtcactttcaatgagtcatcagtatccgcagttctcctgcatctttgttcttctttcccacatgccatgcagatctccagctgtggattaacagtactgccctttttctgtgttcccgctctagggcctgaagaaatgatttcatcatattaatttgttcttttgctaatccatgggttttagcctcatctgtgcttattattctctttagtagttttctcacttgtttggagttgatttcatttctccttcaccagaatgacagttctttctaaatctttccacattttcctttggttcgtgtcaccttcctccattgcagctgattctacacttcagcagagtgacctttaaaaagagagaaaacaacaaatctattatgttatttcctgtacaatactgttcattataaagatggaggtaatttttttttttttttttgagatggagtctcgctctgttgcccgggctggagtgcagtggtgtgatctcggctcactgcagcttccgcctcctgggttcaagcgattctcctgcctcagcctcctgagtagctgggattacaggtgcatgccaccatgcctcgctactttctgtatttttagcagagatggggtttcaccatgttggtcaggctggtcttgaactcctgacctcatgatctgcctgcctcagcctgccaaagtgctgggattacaggtgtgagccactgcacctggccagaggtaaaattcttaagttt

SEQ ID NO: 67468 - DNA, 1089 bp, Homo sapiens
ctggctaatttttgtatttttagtagagatggggtttcaccatgttggccaggctggtcttgaactcctgacctcaaatgatctgcctacctacgcctcccaaagtgctgggattacaggcgtgaaccactgtgcctggcttgacttttttatttaaaaaaaaaaaatctatacccaattgccctatcagtttatcatttactcacttatttgaaacggtcatattaacatacactctttatttatttatgtgcctatactttgttttaattactgtatctttagaatatgtttcaaaatttcattaactattataattgattctctttttttgtaacgtatcatcagcaaataataatttggactcttctaatatttctgcttatttattgacattttcaaagaatagcttatgattgataataatcataccagcgaatacagtgcttttcaacttaaatatgcacagcaattacctgaggatcttattaaaatgaagactcagtagggctggagtggcctgagagtctgcattttgacaagctcccaggtaatgttgacttatgggttcatagaccttatgttgagttacagggaactaagatttattgagtacttaatttgttctggtcagtgcttttacatctgtgaactcgtttaatctttaaaactccatgatgattattatccccaatttgccagtgaagaaactgacacttagagaagtttataacttacccaaagtgacgcaaccattaagtggaagagccagactgagcccaagcagagtttgcactctgaacctctcgaatatattgctttaccacatgcgtgttcgctcacacacacacacaacagacattatcttctcttgtgtgactcaaatggtaataccttaaaattttttttttaatgaataggctttattttatctattttttgagatggggtcttgctctgttgcccaggagtgcagtggtatgatcgcagcttaccacagccctgaacttctgggctcaagccatcttcctgcctcagcctcctgagtagctgggactaccggtgtgtgccaccatgcccaactaattt

SEQ ID NO: 67469 - DNA, 1252 bp, Homo sapiens
cgaatcacttgagatcaggagttcgagaacagcctggccaaggtgaaaccccgtctctactaaaaatacaaaaaattagccaggcgtagtggtggatgcctgtaattccagctacttgggaggctgaggcccgggagacagaggttgcagtgagccgagatcatgccattacactccagcctgggcaacagggtgagattccatctaaaaaaaaaaaaaaaaaagaaacttcattaagaagttaaagcctgggtatgctctccttgataatttctttttactcacatctttattggtaaatcaggccagaaggattatttaccttttcagaaagggaaactaggttctacggtttggttacagatagcctggcagctgactttacattgggcagaggagactgccgtacttagtggttctgagaaaccaagagagtattgcctgctacagctatgagaaaaggtattgaatcttccccctcctttgtgggggaattccaatctcactaatttatggtttcagtgtagttatggtcatagcttctgagacgtgggtactcattgaagctaacagttttagagaaaggggagggtgtttaattccaataactggtagtttatatcactttaataatttagacccaatgatatgaagattagttagtataaggcagatatacatgtaatacattcttttaaatattgtacaaggagtaagaaacccctttaagtagtcatgtaattcattatagcagctgaacatttctaagtgcaacattataggaaaccagtaaagctgatttctgatttatctgcagcaaaagaatttaatattccaacttcagcaaaaggcaattaaaaacaaacttaaatcacattgtgtgcttttaatacgtatgtttttttccatgctgtctgatgtattttagttcttagtcatttacttccattagtttccaaattggttgagggaattaaattggtagccaagttacctatacaagattttcctactgtgtatgtgaaccactctttctgggaaaatcctcccgttggcacttttcttgaaggcatgcactttttccacacttagtgatttggggactgaagcctgcatttagcctgtatttagtcagaggtgacaaatggctaaattttttttttccagtttagagattgagaaatgattcagaattgaaactaaagtgaatttggacttactgtatttctttgcaattacttttaaacaattg

SEQ ID NO: 67470 - DNA, 1069 bp, Homo sapiens
ggaggattccttgagttctagaccagcctggtcaacatagggagattctctctctcctgaaaaaaaaaaaaaaaaaaaaaaattaaccaagcatggtggcacacatctgtagtcccagctactcaataggcaaagtgagaggattgcttgagcctgggaggttgaggctgcagtgaacatgatcaaaccactgcattccagcctggaggacagagcgagaccctgtcttacaaaacaaaacaacaactcttggaatttctcttttcccctcccttcttcttccccttcttccttctatttatccttctgtttcatctacaaatatttgagtgtcactgtgttctaggcactgtgccagacattgggattcgttggtaagcaagagagagaggcatggcctctgtccttatgagcttgcagtttatcctagtgttacttatctagtctgccctgccttcaaggttcagtggaagcccgatcttcatgtagtcctttgacttctttggcccttgcaaacctatccctttgacctatgctactttaaatctgattcatacaatttagcatttattgatataatttcttatactgtgggctaattgtttaaatatcttgttttactggctagagtatagttccttaaggacagagactgtcatgttattttttttttttttgcaatactgagcccaaaggttttgatttcagtctgccctgctgaatgttgaagttactagtagctcttgggacttagaagtagtgatgagataatgccttgctttttagtttattttctattttgttttattttatgtttcttttttgaaatggtattgggctggccgcagtggctcacgcttgtaatctcagcactttgggaggccgacgtgggtggatcacctggccaacatggtgaaaccccgtctctactaaaaagacaaaaagttagccaggtgtggtggcgggggcctgtaatcccagctactagggaggctgagacaggagaattgctcgaacccgggaggcggaggttgtggtgagctgagatcgcaccattgtactccagtgt

SEQ ID NO: 67471 - DNA, 1095 bp, Homo sapiens
tgtatttttagtagagacagggtttcaccatgttggctagactggtcccaaactcctgacctcagggaatcctcctgcctgggcctcccaaagtgctgggattacaggcgtgagccaccacgcctggccttgagttgtttctaagctgttgctaataaaacaatgctagaggatttaaaaaaatatgttagggttttatattgacaagtaaatattgtcataatagaaacttgctatacttataataataatacatctatagaacatgttcataaatgtctatttgagccttcctgtaaggtaagtacaacattttatcacttcataactagtaaagtggcagaagtagaggtagaaccaaggtcttctgactcctatttgagtatctgtctactttacccaaaatacatatactgttgtggggctgtagggaagtgggggtgggaaaataagaggaagtagacctaggtggggcaagcttgagatagggatgtatctgtcattctagaaattgggatcctgtttgctaggagtaagtggaactggacatcagcctgttacagggacataaaggcacttaggcactggcagagcactatggtttgattgccatcttggagtacagtagtatggtaagccaaagagtggtagttctggagaagctggggactgtcagagctccctagaatagactgagagtgaaacagcattcacgatttgctaaggaggctgggctactaggaaggataaggtaggagcccaggagttcagggctgcagtgaattatgattgtgccactgcattctagccttggcaacagagcaagaccctgtctcttaaaaatattggtcaagaccataaaacaagaacataggccatagtgaaaacataaaattttcttagcagctgtggtagcaaacatgttaatggtaaggagataactgtaatgttagtcaattttggcttaagactgaggactgagaaacagccttcttcctccggaggagcagttaagtcatcttacaactgggagtagagagacaaggacgtgtgaagctgattcatgctttcattatatagttaatactatttgga

SEQ ID NO: 67472 - DNA, 2054 bp, Homo sapiens
ggggcattggttgctttactgagacaaggagaagcattgattattttggcaggttggttgagtgaaggtgggctaagagagcttctgcgttaatttaaaatgataaagaagtcaaagctgttagaaatttgaggacaagttattttatagaatcttttattatttatagtgtgtacttcgaggtggtatttttgtccacttatgttagaatttgtgtgaactgagctgaatttggtaatgagtcagtggtattaaaaacttggtgaagaaactggccaaactctttagtttaagaggtttatatctgttcactgctagtgtagtgttctgtggaacaagttgacattttcttgtagtaagttgttttctgtttctggcggaagcaatcttggttcatatgctgcaagaaacagaactgtttttattgtggaagacaggagcagagctgtgtgtttcttattaggatgagttggacacctgcaggatttcttctctctttctgcttcttgcctcctgttgtcttttccttctgttagaatgttctaatattgcataagcagcattccgacaatagttgaatttttttggtacttcatttttttaaactctcaaaataatgtttttagtgattgtatgttcttggcttactttccatttctacatcaacagggatattgttattctagtcaaatggggtagttgtattctggcaatgatctttgggtccaagtcagctgcagaaacaacactttcatatattatacctaaatatcttacatgtgtatggtaattctgggaggtaattaaatgttgggatggtactttaggatctctttaaaggatttcacagttctcaggaataaaataacttgtttgaagcatgttactcattggcctttgaccatgcaaaagggtagccagtgattttagcctactgcctcttccgatctcattttcctcctttcttttgaggcagcagctgcatccagtgccctgctctaattgagctcttagtaaaaggggtattgttataccaagtcacaacctcgtatagcagtgaggttacatcaatggttgttagatttttaggccacgcatccattttggagtcacattaaattttgaaaaccaaaatttagttgcattacctaaatttctcttccttttcttatcctgataccaggataagaataggttttctgtttttccagctctttgtggaacctttttggcccatcagagttgcttgcgacaatctgtagttaaagaactgagactggtgcgggaatcgggatgtttctggttccagtttttactagccagcagtttgactttgggcaaattacttaacctcagggggcttccagtttctctttaatttataattttttcaactgctttattgaggtacatttcacagaccatacagttcacccaattttttttaagtgtattcatggagctgtgcgaccatcactataatacattttagaacattttcattatccttaaaagaagcatggtacccattagcagtcactgcttatttcttcaacctctcttctcagccctaagcaaccacaaattaatttttatcgatttacgtcatctggacacttcatataaatagaattatgcagtgggtgtcctgttgtattttacttctttcacttggtgtaatgccttcaaggttcatgcatgttcttacatatgttggaatctcattatttttttatggctgaataatattatgttgtatggatacgccacatttttaaaatcaattcatgaattggtgggcattgtttctacttattggcgattatgaataatatggtcttgaacatttgtgtacaaatttctgtgtgatcatgttttcatttttttcttgggcatatacctaggagtggaatcgcttggtcatgtggtgactccttgtttaaggttttgagcaacttccaaactgttttccacagtagctgccccattttatattcttacctgcaatgtatgagggtttctgttctgtctacatccaaaacttattttctttt

SEQ ID NO: 67473 - DNA, 1051 bp, Homo sapiens
catagatctcgctcaagccagaggtgcccagactagttatttctgtgccagaagtgctgttttcatttttcaggcttcagtctggctaatgttttctagttcatcgcgtaaaagagaacaaaatggatgctttgaaaagaaaaagaaatgctttctactcaccagagccactgtaactgtaaaacaacacctaagacatctgcatagagatggaacctttcccttaatcatttattcattcaacacatttattgaatgaaaattttttgtcaggttccattctagggtctggagtgcaccaatgaacaagggagacaaaaagcatctgcctttctggagctttctagtagaaggagacagacaagggacatgtaaaaaaattaaaaatttcatataggaatgaataccaggaagaaaataaacggactagagaatccctggggggggctgctgcctcagatagagtggtcagggaagacctttctttccaagatgatgatatttgagctgagacctgagtgatgagaaaaagccaacctgggaagatttggaagacagaagattccttacagaaggaatggcatgtgcaaaggccatggggcagaagtgagtttggtttggtcaaagattagacacaaggtcatgatgccatggtaccttagcaaacaagtggaaggatgggaaaagatgaggccagacatgtaggaggggccagatcatctgggtcttatggccattttatggaattgggtgtgacacgggggtgacatcagagagtatcaagcagaacactaatatcacctaatttatgtttttaaaacgtggctggatgtggtggctcatgcctgtaattccagtgctttgggggggcatgaggcaggaggatcacttgaggccaggagttcaagaccagcctgggcaacatagtgagatcccatctctacaaacaatttaaaaattagctgggtgtggtggtgcgcacctgtagcctcagctacttgggaggtggaggcgggaggatcacttgatcctgggagtctgaggctgtggt

SEQ ID NO: 67474 - DNA, 1477 bp, Homo sapiens
tctctgaatccactttggaaggggttctcaaatgcggacagcttagatgtgcctaacagctgtcgacatacagtacgatggcctattaaggttatggtttggttatataacaatggtgaaggtgcataggtactagaagttgccgaagctgctgcttcagttaactcaggttgattttttttctccccatgcactgcagcctttatcttacttctgcagaggggtcatttggaaacagagagttatttttttcccccatctgtctccagaatgtgtcatttgttgttttgtcttttagaggtgtgtgatttttttttccccttgtaggaaatggtctgggttttcttataaccatatataacagtcagacagaggtaattcagatgatacttgtgttggctgaaggaggttaggtaataggtattttctgaacattagaaataattatgatccccctcctttttttttttttttttttttttaaacacacatgacccattccaagaactaagagactaaagtaaacctcatttattgagtaggatactgcactccatccaatactgcgtggttaagctggccctttcccaaattctgttaactctcaaaccgtctagagtgggatcctgggatgaataaaatcagtagagaaaagtgaagcttttcctatttggttgttggttacttttgcagcacggcattcatgagctcagacttcatattggcagcactgcagtgcttagagcggcactgcagaacagttaccaggagagaatgttcagctgtgacatactttggttagtagctcaccctggctgtctttgtcctacctgctttgatttccttttctttggaagagccttacttagcctgaggttctctggctctgtttttttttttggtaggaaactataaagtattacagatatttttaaaaaagaatgttttctgctctcaaattgcaggtagtctgttgcctgtgcctaattataccttcactagttggatgattgggaacaaagagtagatagattttgtatgcattttttttccttttttaaaatattggggcagggtcttactctgtcacccaggctagagtgcagtgacactgccagagttcactgtaacctccaactcccaggctcaagagatcctcctgcctcagcttcctaagtagctgggactacaggcttataccaccacaccaggttaatttttaaattttttttgtagagatgggggtctcattatgttgcccaggctggtcttgaacttctggactcaagtgatcctcctgcttcagcctcccaaagtgctgggattacaggcatgagtctgtaacccaaatgcttggcccatatgcattttttaaagtatgcatgactataaaagcctttggccaaatacgtttaaactatatttcaacaaatatatatcacttgcctgttattggtttgtggtaagagttccagct

SEQ ID NO: 67475 - DNA, 1948 bp, Homo sapiens
gatggggaaaaacaagggtgaagtggcagacccgggcttgtaaggggacccaggacggctggggcacggactgggaatgtgcacgtctgcagggcgctgggaggtcccaggatcctggtgccttaagacagagacaggaatccgcatttgatcatctaagactgatagatggtgcgaaggggatcccgaggagacacgattagtggaggaggcaatgaggaaaatggggaaataagggggaaattgctttgcttgtccacaggaaggggcccagggaatgggggagtgaggtgggggtgggggctgtcccaggtttatgatggcactaggtagtcaggggttaaacaatttgggagagctgattgctggttatttttagttgttggagggtcgggaattgtgggctttgtagaacccagggtgggcttttactggttggggggaagcttgtgattgaagaacccagacaccgggagattacactcatcgagcccttagttctcaaagggatttgaggcgctataggagtgaaattggccaaggtcaattaggaagctatatatgtatgcatgtaaaattctttgaggaaatatggtagcactttcatgtagccttcgttgggaggactggaatctaagacatcaggaggaatcttttggttttggtggaacccgcaaagcccatttttactctaaaattttctttgctcaatatcttacttgaatgaatacttttaatgtagtcattcattatgtttagaactgcagcttgtgttttccctcagcctgaggaatgaagaacccttacagctgctgccgcctcctaccaaagccacatcaattcccctcacctcctcagcctagcctctggttgtcatgacctaccttgtttttgcttttttggcagtggcttgttttctgaagccagtgacttatctaggccttctctcctgatcacttgcaacctgaagttccttccccaccatctttctgcctgaggctacaaggggcccttcttaccagggtgtcagggtgggtggctgtggcgaattgattggtcagtttcacttcctctggagggccctcttcagcctttttgtccgtttttatcacagggcctccagtctgcaggtcagagctgaatgagataccaaagtccagggctccctcagaccctgaggggaagtcaggggaagtcgattgagccaagactttggtgtgctcctcacttgccaccccagcccctcaccgtgtttccagtctagttgactattagccaaggcaaacttacatttacaaacaatatgccttgttccttgttttgctatttctttcctttttttctgcctattttctgtgtaatcactttgtgctcctgtggttattttgctctgacctctgggggatagtctccatgaacttaattggttgcctggtttatggtttcatgatttaaagaattttgaatcttccagcccttggatacaccaaaatattgataaaatctgttacagacagggttgaatgttttcgtaaatgtaattgcaaacagttgattcttggctttaatataaaagagacatttctatcttcagtagtcagcaaagccagtgcctaattatggctggtctgcccgctttctaattttcatgtgtgtgtatatgtgcgtgcgtgtgtttttcatagtttttctctgagaccttggtatcctttaggactgcagcattttaaacactggcttgtttacaaacgggtgtcactgtttatgttggtttttatctttgatcatttgtggtatgcagttgtgcaattcctatgtatggaaatattcaaagtcttgaatgagactgaaatggcttggacaatgagttgcatgtgtgaaggagccacaccagcattcatttgtgtttctgtagcagtgtgcaatttcctagttacagttacaagtg

SEQ ID NO: 67476 - DNA, 1862 bp, Homo sapiens
caacctccgtctcccaggttcaggcgattctcctcccttagcctcctgagtagctgggactacaggcacccgccaccacacctggctaatttttgtattattattagaggcggggtttcaccatgttggctgggctggtctcgaactcccaacctcaggtgatctgcccaccctggcctcccaaagtgctgggattaccggcgtgagccaccgcaccatttggttttataagaggatgttcttactcttaggagatgcttgctgattagggtgaagaatcataatgtttgcattctacttcacaagtggtccagcaaacatgcacacatacatagaaacaaagcaaacatgggaaaatactattagttgttgaatacaagaggcagatgtatatgtgttcattgtaatatgtcaactttctgtgtatctacaattttcttaataaaagtttgaggaaaagataaacttctaaacagcatgttacatgtatttttctattctggtttcagtagaattctgggtttcttgagagtactagaatgctctgtatggtaagggtgagaagaaagttcaaacagtaatttatagaatgagaggaataagctttggggatagactaaaaaaaatgttcaacaacagtaactggttgaacagctgttctttctaggccaagaagtctcacagggaaagaaatatcagtttctttttttattaaaaaaatttttttttggctagatgtgtggctcacacctgtaatcccagcactttggaaggctaaggtgggcagattgcttgagctcaggagttcaagaccagcctgggcaacatggtaaaacctcgtctctacaaaaaaatagaaaaaattagccaggcatggtggcatgagcctataatcccagctattcaggtgactgaggtgggaagatgacttgagcccctgaagcagaagttgcagtgagccaagatcacgccactgtactccagcctgggtgagagagccagacgctgtcttagaaaaaaaaaaaaaaagaaagaaaaaagttgtttttgtagagatgggatcttgatatattacccaggctgatctcaaactcctgacctcaagttattctcctgtcctggcctcccaaaatgttgagagttcaagcatgggccaccacacccagccagaagtgccagttaataatttttttttttcttcttcaaaccagcacaacagatttgttttggactgtaaagacaaagagcctgatgtactgttcgtgggagactccatggtgcagttaatgcagcaatatgaggtaaaggtggaagggatgagcgtggttcttggctactcatgtatatccattcattactaacagactttcattctgagctgaacttacttatttgtgactcttagagaagccctaattgaggttataagagaatcaaagctacctaaagggattttcttttctttcttttaacttggccatgttctgatctgaagcattgtttataatgaaacttcctcttctactctggtttccaagaggcttgatgttatatttgtttatatttgctctactcagattgtcaagttattatttgtatcttagtatttcctatttgtatttgctaataacatttatcctagtcatgattcttacttatattttgccattttcctatttcatatatttttgtagtaagctattgccaatcttcttttagggtttaggcattcttccatgggaaatttattagtttttttattttttaatttatttttttgagacagtcccgctccatcgtcgaggctggagtgcagtggcacaatctcaggctcaagagattctcatacctcagcccctgag

SEQ ID NO: 67477 - DNA, 1017 bp, Homo sapiens
taggcatgggccactgtgcccagccccaagggaaatttaaaagatagcttttttttttttttttaagctctagcactctaaatttcttcatctcttgtttctacttcaccctgtttctgtagttcaataagtggaaaggagggtttgttgagttgacagcttaattattaatgttgataccttttagggggcatcagattgagttgtgactcatttcttgagctgagacctaaggctgcattaagaactgagttacacaatggtatcttaaaagcccttaaacagtgtcacaccattacagtgttatctttgaatacagaaaaaggaaattaatgccttgcaacacattgcagtcgaaagattaaactttcccctagttttaggtacactaaatcaagtttttctttttttagatatggcgagagcttttttccccacttcatgcactgaattttggaattgggggagatacaacaagacatgttttgtggagactaaagaatggagaactggagaatattaagcctaaggtgaaatgaaagttacttgtcaatgtcattaatcttaagtctgttttggatagttaaattgtctgaaactgtaaaaaaaaattgcttctttaaagacctatttcactatttttttcgtgcctctttaaggtaaatgatactgtcattgcttgagaatatgccaaaatatataattaagaaactagtgaattgtttgcctattgggttgtatttatagttgttataattactttcttaagttgaaggaagagttttttttttttttgagatggagtcttgctttgtcacccaggctagagtgcagtggtgtgatctcagctcactgcaacctccgcctcctgggttcaagcgattctcctgcctcagcctcccgagtagctgggattacaggcgccgccactgtgcccagctaatttttgtatttttggtagagatggggtttcaccatcttggccaggctggtcttgaactcatgaccttgtgatcc

SEQ ID NO: 67478 - DNA, 1898 bp, Homo sapiens
gaagctctaggaagagatctggctaaagtatttagagtagtgggccagaggacaggtccttgaagaataccaacagttaagggacaggaggaagggaacccatgaaaaaactaagaagaaatggttagctttcattcaaaacagtattttccaatgtttcacaactcaaaggtgtagaaagtgccaaatggagatgttccaggaatatctgaagttataaataataagtagagaaaaataagtgaatcttctaatttaatgttttccactgtgccccagggtttgttacctcgaggtgagaaacccaatcctttgaggcaaaagaacgccaaggtgaaccaactcctcaaggtttcgctgccgaagcttgccaacgtgcagctcctggataccgacgggggttttgtgcactcggacggtgccatctcctgccacgacatgtttgattttctgcatctgacaggagggggctatgcaaagatctgcaaacccctgcatgaactgatcatgcagttgttggaggaaacacctgaggagaaacaaaccaccattgcctgactggctcttatcagtgttaatagcatctcagcttcctcagatcagttctatcactggcactacagaatccttctctttcttaaggcactttgcattgtagaatgttcctggatgttcatatctagtgtttgaaggggaggagggatttaaactggtcctgtacatagaaggtttgtttgacagaggagaaaaattagccaaggaagattgttgtttaaattcatttgaaaccagaaggggactttttagttgtatgtgtaacacattcattgaattattatcactgttttcttgggacaacatcaagcctaaatactgaacaatatgaagattcttttcttggcctttctgtggattatgtcatatataataattatcagaatcattctacttggctttaaaacatgttttctccaatttttttaaggttcataatttagccttttgtttttatgttgcttagattcttatgtatactgaatattttattaacatgtagcatcaggttgaacatgcttgtcattgatatatggaagatgctatagttagaagtgaatttgttctgctttcttaatcttttccatgcttagcagtgaaaaacaggttttgccccagtagagggattctttggagggtattattttttatgctgctgaatatcatgtctataatagacccgtgcatgcagcctttcctccttattccccttcatgcccccctttccccttcattccccccgccaccccgtttttttttttttttttttttttttggttcttgttgacattacaagcttttaacacatttttgacctaggagccctgttgctggaagtatagtctccagccagttactctcatgatagtactgctataaaactcattcttgtgtggtgttctgtgctatagattctgtgtattgctgttcatattcggagttctggttttgtttttcccttaaaacctgttaacagttttttttgggggtggggggattcagaactcttgtttcccattccatagcacctgacattatttcaagttttataatatcttaaggtgtatattttattttttttattggcttagttgttttttgttttgttttgtttgagatggagtttcactgttgcccaggctggggtgcaatggtgtgatcttggctcactgcagcctccacctcccgagttcaaatgattctcctgcctcagcttcctgagtagctgggattacaggtgcatgccaccatgcccggctaatttttatatttttattagagacgggatttcgccatgttaaccaggctggtctcgaactcctgacctcaggtgatctgcccgc

SEQ ID NO: 67479 - DNA, 2110 bp, Homo sapiens
ttatatctaccagagctattcaagcaatagtatttgaaccactagccttttaaataaaattctgccccattactgatgtgcagatattgagttcactttcattttttgccagatttctttgcactactttaggtaaaaatagttaatctatttttctttgacatcctagtttgcgtcagtgacagaacttactgcttagtctttgtactttttaaaaaatctataaatttaatgcactgtccaagtgaaatgtcctagttgtcattgtgattaaggggccaactttccaggcagctagcagagatactattctcttcctctcccagcaaatttgtattccttcgcccacgcattcctgctatactagatggcagccagtgatggaactataaagatgtctgtggtcatatgttgaatgtggcagcttgaagatgtactgccacgggtgatctagggcaggctgtcttccagtccatgtgttctcggtcgccgtagacagcgctctggctaccaccgtgaggctacttgaactgtcaggggcatctgcctaaaccagaatcttttgtcagaaaccttaacccaacaaaacaaatcttgagtagctcatgcccggctcttaggaattttgtctgtttaaaaaaaaaaaaaaaaaaaaagtccaacttactttattttatttttttaacctagtcactgtttacaattgtatgctaaagcctgaaatattgtctgtgctgtggtgtatgagcattgccaactttatatttattgcagtgaagaagaaactaaaaatatatggaaatgaggagcatgtccaagctcctaaatccgtgtgggtgcatgtgggagaagtgagttagggcctcttgaaaggaggctttttggagaggggtcccccaggtttcttggtgttcctgcttggggatcactgctgctagctgactggacctccccattggaagtttgtgattttgctttggcaaagtttcattgactagtagaactcattctgttttagtgtatatttcaatataaatgtaaacattttgctcaatttgctggtgtctttctgtctcctttatcatagtttggattctaatgaaaaaaagggatggtttttccctgccttatcataaggaaattggatacttagatgatcctgcttctttactgtggaactgaatgcaccaggctgactcatcacttaccttctcgggcatgtagattggtagggtgggatgagtaggtataaggacccctcagaaagcacaactgccatccttgaagtctactcttttccattagattggaatagttttgcagataggttagtctggattataggctgtggaccacctcatctgaactgggtgaatgtcatcagtcagtataatacagtgttattggccgggctcacgcctgtaatcccagctactcaggaggctgaggtgggagaattgcttgaacccaggaggcggaggttaccgtgagacgagattgcgccattgcactccagcctgggcaacagagcgagactcttgtctcggaaaaaaaaaaaaatacagtgttactacagcatagaggacatgaaccttgagcacggactcatttatcacccttacgtccccagggtaaagcagccgcctccaaatactctatctcagagatagtgagactagaacaagggtcggttaactggtcgatcgggacctatcctgatgacacaccagcaactaccaggccagcaatattacagtgagttggtatgccggtatgatgttccttggcagctaaaagtttctgtgatctttgtatcatttgctttatcactgttcacctcagtggtatactgttggattaaaatgatttgctgctttaggaggaaaaatttggaggtaaattgagacattttgtttttctagctgcccttcccccctccccagtatctcatcacaccaagttcctctccacccacactcctggaggcctttgtcagctgcttgcaggccacacagcagcagtgaaagcagcctggatcttgaagctttgctttactgtatgtggattaccccatgtgaacctcttaaatggcccagaacaagtggaagtg

SEQ ID NO: 67480 - DNA, 1010 bp, Homo sapiens
ccaggctcccggcaaccagccgccctccttctcacggccctggcccggggctccagggtctcaggtcgtactcagcccctcgcgagctgggaccccttcccgtagccagcatcccctccctccccgccccctcccggccgccccctcccctgcggggaccctgggagcctcttcggggctcttgggaggggacatttcctaatctcaggccggggttaaagttctggtcctggtgagatgctggaagctgcggccgcagccgcaacccgtcccggaggtgtcctgtctcctgtcgccgccgccgccgccaccaccgctgccactgccgccctgccggggccatgttcgctctgggcttgcccttcttggtgctcttggtggcctcggtcgagagccatctgggggttctggggcccaagaacgtctcgcagaaagacgccgagtttgagcgcacctacgtggacgaggtcaacagcgagctggtcaacatctacaccttcaaccatactgtgacccgcaacagggtgagggctgggggcttaggggccagaggcgagtggggaagccgacgagggctaggcgattctgccgccccgctacccttttgggaggccccaggaacgagctgtcctgctaggttcccagttcccagaaccacactggagcctcttgaccagtcctccttcctttgccaccaatgtttctctgaagctccagctgggcagtttttgaagttggctcattcccatcttctcttccgcccccattcttccatcagttgtggtctgagcacacatggcttgctctctaccctaaaccccagaatctgacagctctgtggggtctcggtgggagaggaaacaggcttattactgggcttgcccagaaaacctcaggggaatgagactggcccagaactgaaaagctctgtgcaggcaagttacatctcagactccccagggagatgaatgcagggcttcccagccctcttcctgcctgggagagccagc

SEQ ID NO: 67481 - DNA, 1144 bp, Homo sapiens
ccagccgggagcttgtgcacctcgcagggaggtggtggagaccagacggggcgaggtggggcctcgctcctctggaggggcaggccggctgggacagtgctcacatcctatctccctgcttcgggccataggtttcagcgcaagtacctctaccaaaaagtggaacgaaccctgtgtcagccccccaccaagaatgagtcggagattcagttcttctacgtggatgtgtccaccctgtcaccagtcaacaccacataccagctccgggtcagccgcatggacgattttgtgctcaggtctgcagggtagagtgaggggaccacgggggctggttcttccccaggctccgggggtgactggtgggggctcttctctgccctgcaggactggggagcagttcagcttcaataccacagcagcacagccccaggtaacatctccctgttgattgctcgagaggagaaatgggggagcttgaatatgagaatgggagtggccagcggtctttgcttggccttttgaattggctgttttctccatggagggctctctggaaacaggagctctggccctgacatggtgagggacagacagcatgggactgtacagagacatggagtctggttgcctctctggcattctgctgagtgccctgctgaggttgaagggaatggtatacagagaaaggggctgctgtgatcaaggcctgtctcctcggagagcctccactgcccacccctcagaggattctgggtcctcgcttataggggactattcccttctagaggggccaagagagcatcctcatgagatggggctctcccttccttcctgcaccctcagtacttcaagtatgagttccctgaaggcgtggactcggtaattgtcaaggtgacctccaacaaggccttcccctgctcagtcatctccattcaggatgtgctggtgagttgcctgcccttttgctcttccccagcaggcagcagggctgctaaagagaggggcaggccaggttcccatccatctgcctctcccgcccctctgcagtgtcctgtctatgacctggacaacaacgtagccttcatcggcatgtaccagacgatgaccaagaaggcggccatcaccgtacaggtaggaaatgcat

SEQ ID NO: 67482 - DNA, 1047 bp, Homo sapiens
catgagccaccgtgcccagccagagggtgcctctctctctctctcttttttttttttttttccgagatggagtcttgctctgttgcccaggctggagtgcagtggcgcaatctcggcttactgcaagctccacctcccaggttcacgccattctcctgcctcagcctaccgagtagctgggactacaggtgcccgccaccacgcccggctaattttttgtatttttagtagagaaggagtttcaccgtgttagccaggatggtctcaatctcctgacctcgtgatccacctgccccggctcccaaagtgctgagattacaggcgtgagccaccgcgcccggccagggtgcctctcttacatggattatttattcagcaaatatttatggagcacctcctatatgccaggtggtatgctaaggcagcagtccttggtgggggcggggtcctgtctagaggaacaggaggcagttaagagctgtggtgagcaaggaacaggtcactgtggaaatacaggacagagaaagcttcctagaggacacagtccctgagctgtggtttgagggttaagtcaaggtggaatttttgagaggccaggcacggtggctcacgcctataatcccagaactttgggaggctgaggcagggaaattgcttgaagccaggaattcaagaccagcctgagcaacatagcgagacccaatctctataaaaaataaaaaaatgagccaggcgtggtggcacacatctgtagtcccagctactcaggaggctgaggtggaaggatggagcctaggagttggaggctgcagtgagctatgatcgtgccactgcactccagcatgggtaacagagtgagcccgtctcaaaaaaaaaaaaaaaaaaaaaaaagtagaagagaaagttctagcccagggagcaacatgagcaaaaataggagtgtgtcagagtttggtgtattagaggaactgccagttgttcatactggctaggcagggccttacatttgaggggagaagggtgagagattgagctgggtggaggagg

SEQ ID NO: 67483 - DNA, 1364 bp, Homo sapiens
atgcctgtaatctcagctactcagggggctgaggcaggagaattgcttgagcccaggaagcggaggttgcagtgagccgagatcccaccattgcacgccagcctgggcgacagagtgagactccgtctccaaaaaaataaaagggagtccctgatctcagggtgctcacagactaagacacagaccaagttgtccctgttttcaggagatgtcagactctgggtgacagccagtggggtggcagtgtggtgtggcaggtacaactaaggaactgaagttcaagtgccaccctgccaccagctcacaccatggccgtggtggggcaccagggctctctcttcctctgggattgttggggccaggagttctctgctggggcttggtggccatttctgcagctcccttccgtgtccctcatcctagacacatcgttcatgtacatgatcgccggactctgcatgctgaagctctaccagaagcggcacccggacatcaacgccagcgcctacagtgcctacgcctgcctggccattgtcatcttcttctctgtgctgggcgtggtgagggcctgacctgctctgctcagcctgtatgataggaaaggtgcacgtgcgttcagacacgtagtgcacaccctccgccacctcctgcatgagagattcctgctccttccctgagatgccttcctgggcccctctcagagtcccagcctggctgagcagccagccccaggaagggtgggccatccgagccacttccctctccaccctcaccgctgcccttggtggcctcccgacaggtctttggcaaagggaacacggcgttctggatcgtcttctccatcattcacatcatcgccaccctgctcctcagcacgcagctctattacatgggccggtggaaactgggtaagggcacgcccggggcagggcctgggggaggggtctggggggccttgggaacccggacgcacgggagacgctcaggttctgtcttgggggccctggagtcactgggtgaggaattagatcaggcctgggctcctcagctggcacatcccaggggtccagcaaaggagggtgccccgtgcctgtcagcaccactcccttctcttcgcagactcggggatcttccgccgcatcctccacgtgctctacacagactgcatccggcagtgcagcgggccgctctacgtggtacctgcctggttcccctgctccattctccacatctcctttcttccctctgatgggggagtggggctgggctgaggacccaggggagagtggggaccagctggctgggccttcttccaccaccctccctgcccctgccctcagtccctgtgtccctgcttccctcca

SEQ ID NO: 67484 - DNA, 1973 bp, Homo sapiens
tcgggtccttcctggtaagcgggcctcccggccgagccgggtgggtacgtgaaggtagcagctgcctccttctctgtggctgatctggcgtccacaccccaggtgttgctgacactggatgacgacctggatactgtgcagcgggacaagatctatgtcttctagcaggagctgggcccttcgcttcacctcaaggggccctgagctcctttgtgtcatagaccggtcactctgtcgtgctgtggggatgagtcccagcaccgctgcccagcactggatggcagcaggacagccaggtctagcttaggcttggcctgggacagccatggggtggcatggaaccttgcagctgccctctgccgaggagcaggcctgctcccctggaacccccagatgttggccaaattgctgctttcttctcagtgttggggccttccatgggcccctgtcctttggctctccatttgtccctttgcaagaggaaggatggaagggacaccctccccatttcatgccttgcattttgcccgtcctcctccccacaatgccccagcctgggacctaaggcctctttttcctcccatactcccactccagggcctagtctggggcctgaatctctgtcctgtatcagggccccagttctctttgggctgtccctggctgccatcactgcccattccagtcagccaggatggatgggggtatgagattttgggggttggccagctggtgccagacttttggtgctaaggcctgcaaggggcctggggcagtgcgtattctcttccctctgacctgtgctcagggctggctctttagcaatgcgctcagcccaatttgagaaccgccttctgattcaagaggctgaattcagaggtcacctcttcatcccatcagctcccagactgatgccagcaccaggactggagggagaagcgcctcaccccttcccttccttctttccaggcccttagtcttgccaaaccccagctggtggcctttcagtgccattgacactgcccaagaatgtccaggggcaaaggagggatgatacagagttcagcccgttctgcctccacagctgtgggcaccccagtgcctaccttagaaaggggcttcaggaagggatgtgctgtttccctctacgtgcccagtcctagcctcgctctaggacccagggctggcttctaagtttccgtccagtcttcaggcaagttctgtgttagtcatgcacacacatacctatgaaaccttggagtttacaaagaattgccccagctctgggcaccctggccaccctggtccttggatccccttcgtcccacctggtccaccccagatgctgaggatgggggagctcaggcggggcctctgctttggggatgggaatgtgtttttctcccaaacttgtttttatagctctgcttgaagggctgggagatgaggtgggtctggatcttttctcagagcgtctccatgctatggttgcatttccgttttctatgaatgaatttgcattcaataaacaaccagactcagttcttggggcccttgtttgcactccctctgggtggagctgttgaggatgaggggagaggcggaggtcttccatttccccattcttcaagccatggccctactgggaactgcaattccttgattctcccgtttttcctgtccctccagcaacagcattaattcagtaaacatttaccggggcactgtgctggacagaggccagttcctggaaaagcctttcccacgccatcccactgcagacatccctccttacctccccaggaacagcagtctctgcccacctggccccgcccaccagactgaggctcacttcacctctgacctgagcggcccccagctcaccaagccacaggcccaagcagtgctccctgatgcggcgtttataatccgctcagcgtgcaggccgaggcaggagggtgatgaaagctggg

SEQ ID NO: 67485 - DNA, 1021 bp, Homo sapiens
taaagttttattggaacaaagccatgttcatttgttacatattgtctatggctgctttcacactgcaacagcagagaccatgtgtcctgcaaagcctaaaatatgttctgtcttatcctttacaaaaacagtttactgacccctgctctagacctccaaagacctggtatcctctttcctggtgttcaagttcagagaggtgtctggagtaggggctgagcctggcctggatgggcagtgctgtgacaagtgtctaggatggccgggtatcctgcacagagctagaaggctgcctggcacgggtgaaagcagagctgctccctgaccctctgcccctccctcctccaccctggcctgctttagctttccccagacatggccaacaagggtccttcctatggcatgagccgcgaagtgcagtccaaaatcgagaagaagtatgacgaggagctggaggagcggctggtggagtggatcatagtgcagtgtggccctgatgtgggccgcccagaccgtgggcgcttgggcttccaggtctggctgaagaatggcgtggtgagtggcaccctgggctagggcgctggggggctggggtgtgccaccctgtgagtcctgggccaatccctgagctgactgctaagctgcgtcctatgccctatgcctggtagattctgagcaagctggtgaacagcctgtaccctgatggctccaagccggtgaaggtgcccgagaacccaccctccatggtcttcaagcagatggagcaggtggctcagttcctgaaggcggctgaggactatggggtcatcaagactgacatgttccagactgttgacctctttgaaggtagagaggaagaggctgggggaggaggtgggcaggaggacagggtgctgggacagggagagggaatgaccagaatatgccacaactaggggtgtgcttgcccgcacacagcagggatgggatatgccgagaataacacgccacgctcacagggcccactgagaggcctcccttg

SEQ ID NO: 67486 - DNA, 1040 bp, Homo sapiens
ggagttcaagaccagcctgggcaacaaagtgagaccctgtctctacaaaaaatttaaagattagctgagcatggtggtacatgcctgtagtcccagctactcaggagactgaggtgggaggatcacttgaacccaggaagtcaaggctgcagtgagctgtgatcatgccactgcactccagcttggataacagagtgagaccctgtctccaaaaaaaaaaagaaagaaaaagaaaacaagtcatggagctagtaagtgcccaagagaacaagaataaacctagatccgtgggactccaagcctgtgcgcgctccatgcttgctttttccaccacaccacgttaacacaatttcctccttccatgagaccccaggggaaaggggcacctgagaagccctcgtggcaccctcccaggttgtttccacggctactacagtaagaaagtgttgctgggggaaggtcagctctctggcccacgccttccacctgtttctgctgtgttctttcctcagggatcccaacggcttcaatgactggaccttctccactgtgcgatgctggggggagagagcccgagggacctacaggcttgtcatcagggatgtcggtgagtctcgtgccctcacaccaggccctacctttcctgcttgttatctggtccctctgcatctcagagtccccacagaaagtgtcccgtgtgcaatatatagggttgccattggaccaagagagttgatgccaagagtgtgcccatccgtgaaatgggcattgctctctgcaactgttcatttatactacctctcatattccctggaggagtgacccatccatctttcctcaggatagcaacaaaaagtccttgtcgaaaccacatttcaagtccttttacgtataaccatccttcggccagccccggtaggcaggtaagggcaggactcatttcaccattttttttaaactggcccagaggtttgaggtgacttgtggaaggtcaccatatcagtgaaggccacaatatccatgaattgtgaatatcttta

SEQ ID NO: 67487 - DNA, 1013 bp, Homo sapiens
atcgcttgaacccagaaggcagaggttgcagtgagccaagatcatgccactgcactccagcctggcaacagagagagactctgtctcaaaaaaaaaaaaaaaaagaatcgttctcattacagcctaatttcttaatagtccccagttgagtcttcctcttcagtagttttttgtttttgtttttgttttaataattgtagatttacaggaggtttcaaagaaatgtacaagagaagtcccgtgcacccttctcccaatcttaatgtttcacacaattaaagtataatatcaaaaccaagaaattgacattggtacaatccatagagcttatttggagttcaccagatacacatgctgtcaatatttgtgtatgcgcgtgtgtagctgtatgcaattgtatcacatgtagccttgcataactaccaccacaaccaagatccagaacaattccattatcacaagactcctttgtgttacccctttctggccacacccatcccctcccctgtccctggcccctggcacccatttatctgttatgtatcactgcaggtacttcaattaacatcacctaaatggaattgtgtgctacgcatcctttttctttttttttttttctttgagacagggtcttgttctgttgcccaggctggagtgtggtagcatgagcatggctcactgcaatctccacctcccaggctcaagcgatcctcccacctcaccctccccggtagtgggaccacaggtgcacaccaccacacctggctatatgcttcttttgagattgcttttttcactcacataatttgcttgaaatttatccaccagcattttttaaaaattaactgtgcatcatcttcagtgagatgtgtgcatttcgtctttgttcatgccttttccactgcctagaatgccctctaccaaccctgtctaccgatctgtattcatttccttcagtgtgtctcactgctgtgtgcctaaacccatctgacttatttctcttcccttatcaa

SEQ ID NO: 67488 - DNA, 1132 bp, Homo sapiens
cagcttgccttggggaatccattcccagtagccatagtgggagagcgtggactggatcagccagcagggcaagcagggaaaccagagtcagattgttgagactacactggcaatgcaagagactaaccaggacctctgtcctttcagtatgaggatcgccgtgcagagtgggtcaccaacgaggcaggcttcagccatagccaccagcacggtttcggcctcctcaacgcctggaggctcgtgaatgcagccaaggtgaacaggtgttggcagggcagggtgccctgtgtggagtgaccaagggtcggagctgaatgccccaaactgcctgggatatcataggtgcctagtaaatgttcattcagttcattgatttaacaacttcaaccttcatcccagctgatatccattttacaaatgagaaagcaggctcaatgctatcactgaagtttccaaactactaatagagtaaatgggacctgagtatgtgtgggactcaggatgctctggttcccctcctccaccctggacacagctgtttcctctggttccttagctgggggctgtacggagcattccagcgagcaagcaggagctgagggctgaaggaagatgatgaggagtggaaaaataaagacagctaaaccttcaagatcgtattgacaagggcgtgtgtgtttgtgagaatgtgggtgtgatcattcttgtttgttgatttgccatcccctcctttcctttcatagatctggacatctgtcccttacttagcatcctacgtcagtcccgtgttaaaagaaaacaaggcgattccgcagtccccccgttccctggaggtcctgtggaatggtaagtaatcagcacaaagggggttaatcttaggcctgaggtttggggccgggtgacaaggaagttaaactcgtcctccctgccagattctaccccctttcggagctgagctccagccaaacctgtggagttttctttgaccattttaggacatgttactgcttctgagttggctcccccagctgcttaaacaagacctttctcctgggttcctagtagtgaaaaggagcagcagagcaactgaggaggagggcgggtgggaggcatgggactggggcttggggag

SEQ ID NO: 67489 - DNA, 1031 bp, Homo sapiens
tgtcttaaggcatgccacccttggagtagtagactcggggactctgaatacatcttgggaatgcttttatcttagaaatttggatttaggacgaatatacatatttttagaaactaagtgtcacatggggccaaacatggtggctcactcctgtaatcccagcactttgggaggccaaggcggatggatcacttgaggtcaggagttcaagaccagcctggccaacatggtgaaaccctgtctctactaaaaatacaaaaattagcctggtgtggtggcgggcatctgtaatcccagctacttgggaggctgaggcaggagaatcgcttgaaacaaggaggcggaggttacagtgagccaagattgcaccactgtactccagcctgggtgacagaacaagactccttctcaaaaaaaaaaaagaaactaagtgtcacatggattaaacaactttttcacactcaaggaaatgcacaaacaacttctttgcagtgtcttcctttggtaaaatttgggcttttgctaatttctgtggacttaaaaaaaactcctaattccattgcccttcagctcttaggtaaatactgtgagttctggtcatgtgcatcttcaggaggaaagctagtctggttgtcgtttttatgggatgagtgggaagaggagtgggggaatgtctcatgtcaacaccagagagagctctttctctggagctataattggagccatagcaaatgaaattcgagcagggtcatggagcttctctaacctgtggaacccatttaaagaatttgaagacgatcgcctacacccagctgggcttagcgccatcccagcaggtttaaggcaggcctctagaccatcttcctagagctccctgcctgtccctgttgcccgcaaccatatagtgtgggcataggaggctctaggcaggagctgggctggagccaggtggtatcaaatttctccagtggctgagtcgggagatctctctggggccattgggaattaggctgctttgtcttcctgctggg

SEQ ID NO: 67490 - DNA, 1089 bp, Homo sapiens
ctatctgccctatgcgctcttcagtgttccgggggggaatacgtgtgatgctgttaaaataaaagcaagaatgcaaactaacccgatgttcatccccacctcccaagtattttgattttcttttctcctcataaggtcataagtttgctctgcggcataaaagatgaccttttgatttttaaaaaaggcgtccgtcccagttcccttacttgtgttaccatgttttttaccttgactttttcacgctagagaacccaggattcttttttgcaccactagtcactctgaagagtctgttctttgctcagttagtgggtatcaggcctttcccatctgtggggagcacgctgacagtaaaatatgcaccctggattgcccagtattgcattacttgttgacttacaggcagacacctccaaaaacttcccttaaattaatggagaatgctttgaatgtaacagccataaagtgatttaaaaacatgagatctgattgatactaggccgaaaagtacgtcttttattaaaaatgatagcagacaaggtaggcctgggaccacttggaagatcctggcagactaagatgtattgtttgaaatgactacatttctgccaaaagtgaaaataagatctttgcacagactcctagatatttatgtaaatacagtgactcctgaggattgctgcccactaggacactaggactttgcatacaatgtctcttttagtactcttaagtattttctcccggagcccaggtttttgtgtttctttactgcgacagctctgttgtgtggacattctgaggggggagagatacatttgttttaaactttggaaacttgtagcctgtaatttgtttctgaatgtacagagcataatggcagcgtctgaggttgctggtgttgtggccaatgcccccagtcctccggaatcttctagtttatgtgcttccaaatcagacgaaggtctcccagatggtctaaggtaatgtgtggactcctgactgggaagattcatttgggtaaagggtttttgagatggtcttgtgtagctggtctttctttttggctctgatggcactgcacta

SEQ ID NO: 67491 - DNA, 1134 bp, Homo sapiens
tccttgttaattctctgagtcacatcttaagaagtacagtgtatcctgccttctagtgacgggtgtgctttgttgtaggagaaagtatgggcacaacagactgtagagggcagacgtctcatctcagacttgaggctttctctcagtcagtcattgggtcttgtttgggttattttgtgggaccgatgattaatgcagcgtggatgttggtgtccgtttgccagaactacattgcttagcttgcttggaagctggtaaggggaaagagtaaaaagttagttacctgtggcggaattctaggtgttagtgattctgcctcttttaaagtgtctctgaacgattctaaatataacttttttcctttatagactgactttaagacagctgattcagaggtaaacacagatcaagatattgaaaagaatttggtaagtatttaaactgtccttgttatatgaagccattatcaaatagaagatctagaggcatatcatctcagttggaaaaggtgcaggagtccctttcataaaattcctgacagatggtcaggtgacttttccttgatcacttccaaagatgggaagcttactacctcacaaagcaaccagttacgtttaaaaaaaaaaatagctcttattggccaggcacagtggctcacacccataatcctaacattttgggaagccgaagtgggtggatcgcttgagccctggagtttgagaccagcctgggcaacacagtgaaacaccatgtctacaaaaaatacaaaaattagccaggtgtggtggtgcatgcctatagtcctagctactcaggagtcctagctactcaggagacaggtgggaggatcacctgttcacctgagccaaggaggtcgaggctgtgtgagccgtgattgtgcgattgtactgcagcctgggtgacagagtgagaccctgtctcaaaaaaaattaaaaaaaaaaaaaaaaaaaaaggccgggcacagtggctcacgcctgtaatcccagcactttgggaggccaaggcaggtggatcacctgaggttgagagtttgagaccaagctggccaacgtggtgaaaccccatctctactaaaaatacaaaaattagccgggcgtggtggtgtgtgcctgt

SEQ ID NO: 67492 - DNA, 1076 bp, Homo sapiens
ccttttgttttcctgataatggatggtgctgtctttctagagagcctgagtcagttcagcagtaaaaataatcctttttttttttaggaccaatttaatagtcatatccagttagtgaggaacggagccaagctgagcagccttcctcaaatccctactcccactttacctccacccccatcagaggtaagagagtggctttggggggaagttcacctttctgtgttggtagcagcagcagagtcttctgcgtgttctttttatgaagatattgggaccatccctattcagtgcaagagttgttcattgatgtcttctccagtttcctaaactttctttttcttcctttctctctcgtcctctacctcttctcctctgcagacagacttcatgcttcaggtgtttcaacccagtccctctctggctcctcggatgcccttctccattgggcaggtcacaatgcccatggttatgcccagtgcagatccccgctccttgtctttcccaatcctgaaccctgccctttcccagcccagccagccttcctcaccccttcctggctcccatggcagaaatagccctggcttgggttcccttgtcagcccccacggtccacacatgccccctgccgcctccatcccacctcccccaggcttgggcggtgttaaggcttctgctgaaactccccggccccaaccagtagacaaactggagaagatcctggagaagctgctgacccggttcccacagtgcaataagtaagtaccttcaaggactgattcagatgtctctatcagagaaatgcttatgggttaaaacagaggaggttacatgggtgttccccgtgggtatagcataggctttctctccctcaacattttttttcctcagggcccagatgaccaacattcttcagcagatcaagacagcacgtaccaccatggcaggcctgaccatggaggaacttatccagttggttgctgcacgactggcagaacatgagcgggtggcagcaagtactcaggtgagaaaagccacttgggagagaacttaggcatgttgagggctggggaaga

SEQ ID NO: 67493 - DNA, 1085 bp, Homo sapiens
ctctgacaatgtttctacctacagccacttggtcgcatccgggccttgttccctgctccactggcccaaatcagtaccccaatgttcttgccttctgcccaagtttcatatcctggaaggtcttcacatgtaagactctttttctttgaacactgtgatatggagaagctggaggtgaggaaggagtgggtttacaggtggagtgcaggaagaaaccatcagttgggttatttgcagccctactgggaaaatgcaaatattttaggcaagaatctatatttggatttttgtttcttttgatataaatctttttgctgcatggaattatgggcataaaaggcaaggagacccagaggttccttaccttttgatcatgccgcctctgttctacaggctccagccacctgtaagctatgtctaatgtgccagaaactcgtccagcccagtgagctgcatccaatggcgtgtacccatgtattgcacaaggaggtaggtgttacagaccttcctcattttctacactttttcttctgacagctaaaataatttttctttctcattttctactcttttttttccctgacagctaaaataacttttcttttactgtgttggtgctcatcattaatatcttttttgttttgttttgttttgttttagacagagtctcgctctgttgcccaggctggagtgcagtggtgtgatctcagctcaccgcaacctccacctctcaggttcaagtgattctcctgcctcagcctcctgagtagctgggactacaggcgcctgccaacatgcctggctaatttttgtatttttagtagagacagggtttcaccatattggccaggctggtctcgaactcctgaccttgtgatccgcccatctcagcctcccaaagtgttgggagtacaggcgtgagccaccgtgcccagccttttttttgttttgttttttgagatagggtttctttctgttgcccagactggaatgcagtggcacgattatagctcactatagcctcaatcccctaggctcaaggtgcttcagtctcttgagtagctgagattacaggcacatgccat

SEQ ID NO: 67494 - DNA, 1270 bp, Homo sapiens
tcttttagggtaagagccattgaatagcccttcttggggccaggcgcggtggctcacacctgtaatcccagcactttgggaggctgaggcaggcagatcacttgaggccaggagttcgagaccagcctggccaacaaagtgaaaccccatccctactaaaaatacaaaaattagccaggaacggtggtgaacgcctgtaatcccagctactcgggaggctgaggcaggagaatagcttgaacccaggaagcagaggttccagtgagctgagatcacaccactgcacgccagcctgggcaatagagtgagactgggtctcaaaaaaagaaaaaagaacagcaacaaaaaaagcccctcttgtacctcagtgtaagaacttttctgacttaggccttgttgaaccttattggcattctctccttccttccctttgtttttccagataaacctgaggtgtgtctttctttctttccagtgtatcaaattctgggcccagaccaacacaaatgacacttgtcccttttgtccaactcttaaatgacggacctgactggggaggaagaagaagagaaactgatgtgaacaggaagcgcgggttcaagatttctaaaactctatatttatacagtgacatatactcatgccatgtacatttttattatataggtaatgtgtgtatagaaagtctgtattccaatgttcgtaaatgaaactatgtatattatgcagaaacagtctgttccccctcatcttgcaattcctttgggggatgcagattgtagggaagatgatgtttagtttggccttgaaattatgatatccctgcccagggctgttttcaaatacaatataaaaaccacctaggaacctgctgttgctctaaggccattctgctttggtttggctcagcctctagtccatttccttaaggctcatgtatgcagatttaaagcctggtgctcacccactgtccaaccagatgccttgcttaccgaaagcctccagaagcctcagtattgttttagccactctactccaaatggataaaatgagactctgattgaggaaaaaaaagtaaccctagtagtttgacttcttattgaatattttactgtgttaacgctcattatttatacagacattaggtttacagaatattctgttttacatcaccaaaattcacagtccgagaataacaacataaccaggtcccaattcctccatgtaccccacaagcttctgtccaccctattttctggacagaaattag

SEQ ID NO: 67495 - DNA, 1377 bp, Homo sapiens
tttttgaagcaagaaagttagggggggacatatttcctgtcctgggaaaaatggagaccaaagtgatattaagaaagtagtttggatttcaaatttataaatcacttgctctgtgggtagctatcaggaactagatcattttccacctctgcttattgtacttcttaattttaggttttatacctgggaaagctgtgactctattagagctttgaatcttttcctatccttttatctttactcctacagggaatggcctcagctcccttctcttttagaattaaacaagtaaaaactaagagttaactttttaaaaaaactgactccagggaaaggacattattatattaccaatagctgatttttttttccattctgggacctaaaatgcttacaggtactagcagtacatgtcggatagcaaagacttttcctttcagacccaactaaatgatctcctttctgcctttgatactcttttccttctttgtctttcatccttgcctatcacctcacagatggattcttcctcatttctcttgcctcacttgcccaggtttattgactagcgtcagtttaaggagctggacttcctgggacctccttggcatcttgtagggtgattggagtggcctgagtactcagctcttcagaggtcaggtgacccactttctttggttaatgaaatgttactgtctccaggttagtagctgtcatgaacaggaaaggtggcaaaatggaagaccagttctattgttctttttgtttaggggattcgttttttatcttgtaatcttaagatttcctctcccctcaactttacagcagccttaggccacctgccgtatttttcagtatcccctgcaaatttagaaattgaaaatgagtgtaaagcatattgtttcttttccaaaatcctttgaagccaaaggagtaaagaaagaaaaaaggaaggggtgaggagggggcttaactgcttcccagtaaagaccctggaaagcccactcttgcaggaggataagtgttttggagagttgtgcatgggagcgagcgcctcagtgttactctttcttgttcaggatcagtcagaaagcaacacaagtgttggcgacccctgttctcccttctccctctgtccactggcctgcaatgataaaagacatgcagaccaatgggaaaggccccaaatgcagtgagtggagaatgggacagtcatttttcaggagcagaatttaaaaatacagatgtataatacatatttttacaagcaagaagctgttgttaagacttttttttacacttagagtttataattttggggcaggaaggaagtaactgtaaaaagaaaaacaagtgcaagttttctttaaaaaaata

SEQ ID NO: 67496 - DNA, 1048 bp, Homo sapiens
aacctctgttggaaacccagagcagcaagagttacctgggtaccttgggaagctcttgatgcaagggtagcagactgagtctatagtgaccctgtcagctgccacatggtgaggctgaatgctacttcagaaaggtggcagggttttgcagttggatttcagcagcagaaagttaagtttactagatttggcttttggtcaagggggtggcttttggtcaactcagaactactgacttttagttatcactcctaccagctgggtatacaaggaagggctgctgctcccagtgacttgggaagggagacaggcctctacctggtgctggcttcccagcctgctcctaaatatctcctgggaaggagattagataacttctgcatgggctaatttcaaggcctcactatcaggaagttctttttgttaactcctctatgacaatgagagctgtccattcacatttgccctctccccagtgcacgatgagttcaggacggcagcggtggaaggcccttttgtcaccttggacatggaagactgtggctacaacattccacagacagatgagtcaaccctcatgaccatagcctatgtcatggctgccatctgcgccctcttcatgctgccactctgcctcatggtgtgtcagtggtgctgcctccgctgcctgcgccagcagcatgatgactttgctgatgacatctccctgctgaagtgaggaggcccatgggcagaagatagagattcccctggaccacacctccgtggttcactttggtcacaagtaggagacacagatggcacctgtggccagagcacctcaggaccctccccacccaccaaatgcctctgccttgatggagaaggaaaaggctggcaaggtgggttccagggactgtacctgtaggaaacagaaaagagaagaaagaagcactctgctggcgggaatactcttggtcacctcaaatttaagtcgggaaattctgctgcttgaaacttcagccctgaacctttgtccaccattcctttaaattctccaacccaaagt

SEQ ID NO: 67497 - DNA, 1005 bp, Homo sapiens
gttgcccaggctggagtgcagtggcgcaatcatggctcaccgcaacctccaccgtcctgagttaaagtgattctcctgtctcagccccctgagtagctaggattacaggcgtgcgccaccacacccagctaatttttgtacttttagtagagatgggatttcaccctgttggtcaggctggtcttgaactcctgacctagtgatctgcccaccttggcctcccaaagtgctgggattacaggcgtgagccaccacgcctggctaggggaagagtgttttaagagctctgagtagaagggtctaagtgcagacatcttggctgttgctgaagaatgtgactctcaccgcctccctctgacactgtaccatctcttttacccccatccttagtccactcacggaggaggctgccttgatggatttgactgcagcttcaaacactttcttgggcaaacgaaggttggtggtgccactgtccacaatgctcttgtcatagttgtactaagagggaaaagagagagttaaaagagtcaaaaggtttttgatgctgggctctgggcagtagggggttactgctggggccccagctgggttggcatcttggctttggcacctcctaagtgtacctgcttggacaagttaacctctgtgcctcagttccttcatctctaaagtgaggataaaaatagcacctacctcaaagggttattgtaaggattaaataaatcagcaatgtaaagcacttagaatcgtgcccagcagagagaaggcacttggtaaatgtttattcttgttaatcttgggtgggcaggtagtctccaaacttgaaaataaaaataccttgtttagtgcttttaacttttcttttcttttttttttttttttttttttttttgagatggagtattagctctgtcacccaggctggagtacagtggcgtgatctcggctcactctaacctctgcctcctggattcaaaccattcttttgcctcagcctcccaa

SEQ ID NO: 67498 - DNA, 1049 bp, Homo sapiens
cagccctccatgtggggtgctgtggctgacctctgtgtgcatctgccgcctctgtggggcagtccgggcccgggcagccctgtggttctgtgtatgctggtgcgtgtcaccttgaatctgatcctgcacatctgtgagccacctccggatctgtgtctgggaagtctgtccttgggagggtctgtgaaggtgggagtgtgtttggggtgggcggaggggacagccacactttcctgaacttctcagacagctggatctgggagaaacacaaacccccacctcccaattactttacagaagccagccttcctaggtgcgtgctccccagccctacctctcagctagtcgaaagcctggtcttccccactttctcatcctctttcctgtgcaccataacttccccagcagtagtctccagtgggaatttgggagggcaggacagaagccaaatccaggccctgagcaaacagaacgctagatgatatcgtcagggagcagcaggtatgcagagacctgggacctactcctgtttctgcgactgacatgctgtgcacactgtgcatggaccccatggcacgatgcaggacggggctgcagaacccacacaagctttgaggtcagacagtccacgaatcccagctctaccacccacagcttttcctcttctcagctgtgtggccttgggcaaattgcataacctctctgaaactactgtcatatctttaaaatgagtaggaaatgagacctcctttgcaaggtaattgtgaggattaagttgtgagggttaattgttctaggtgctttcacccagaacaatacaccagcatataaaactgacctccaacaaatatgaagtcactttatccttgtctggcctgttctgcctcttcaattctatgcaatgaggcataaaaactcggatgtcctgggcctccacgttttacatgtataaaactggggtatcctgtaatcccagcactttggggggccaaggtgggcagatcacctgaggtcaggagttcgagaccagcttggctaacatagcaaaa

SEQ ID NO: 67499 - DNA, 1461 bp, Homo sapiens
caaaagttcgctggtgagtcagtggatgcctcctcccagagaggccagggctgaaatctggagggatgttgggaacctctaggtgtctgcagctgggaggttgaagacaacagtcagaatatggtaaattcttgatagtatatcatctaaactttgcctgtcttctggttgatttttctttcagcttctggtattctggaagttgttgccatgtctacacatttcctttctccccacttgggaagtgcatgttacctaataggattgatgagagagagtgctcttctgagaatggttttttgcagtagtagtagcagtaatggcatctgctgctctggagagtggggactgaaagcagttggcagaggccagtgagctgagtgaagtgtcctttctctttattcagagtcaggcctccctagtgtgggttccttttttgtcttaaagtggtgtgaattcctagatgtcagatgtagccataatttagttgtcaaaacaccagtgcgttcaagatttgaaagaaaagccttgggctttatctactcatctagattgttgccagtgtcttcagtgagtggtgggtaactgaagtttaactgcaatgtgatttccttgttgttgttttttttgagacagagtctcactctgtcacccaggctggagtacagtggcgtgatctcagctcactgcaaccactgcctttcaggctcaagcaattctcctgcctcagcctcctgagtagttgggattacaggcatccgccaccacgcctggctaatttttgtatttttagtagagttggggtttcaccatgttggccaggctggtctcaaactcctgacctcaagtgatccacccgcctcagcctcccaaagtgctgggattactggtatgagctaccacgcccagcctgatttccttggttataagtagcttttgtatttcagttcaaagtgttcatattaattattgttttatttgtccctttagtacaactgagtctaggaggtggagttattgcccacatgatttaggtggagcaactaagacctggagccataccaaagtgaggcccaggctctcccagaacgctgtggtggtccctttccccaggcctggggcaggtggggcatgctgaagagagggagggacataggaactcagctcagccagtggggagcactgggaacatcgtttcaaccctcttcagttgtccagttgttttgctcttttgtttatagtttttgtttccctccagagccttgtgcttcctcttgtccaagctccacagacacttcttttttccctcccctccctgacatgttactcacggttctgagaaacatggtaacaagcccattcctccagatggagaaaagagggcagataatttccagctaggctggattttccaatgtcatgtgtttgaatggcaaaaggtggccacagggcttttcatgg

SEQ ID NO: 67500 - DNA, 1005 bp, Homo sapiens
cacaatatagtaccccgaggtactgaacttcccaggttccatggagcaaggtttgcaaaccattgatctagtcgaacctcctctttgtagataaggaaactggagcctagaaaacaacatattttcagcccaagggagtttttatcttttcttccctcttcagtttgtgttttacttcattttttagttttttaattttttaaattattatttttttttgctattgattttatttatttatttatttatttatttattatttattatactttaagttttagggtttaaatagagggtgggtttttgctgagggcttgcccagggctgaggtagcaagtgtaaatcagaagtgctttgtcttcgttttctctgcatgtttatatacccatctaggaaacgcagcctgaggagggacttctgcctccttcatcctttctctgcagcttgtctcctccgtcagcacctgggcttgctgatctggacctagatcaagagatgcaggctataagtgagggatcctataacaaaggaaagagcccaggcatgctgggtgacactccctggcgtttcatgggtgcccttcccagaaagctgcagccactctccaaaggccaaccttcccaaatccaccaggtctttgctgacatggagaaaatcttaggcagggccccagcccaatgcaggagagaattaggtgatcagcagggtctggagaaactccagaaggcgacagagaaaatctacctggggttttcagatcctgaaacagaagagctggaaatgagaagcaggcagcagaaactgggcactccagcccctcagaacactgggcttctccaaaatatgcaggatgtggtagaaagcaggaaccaggcctctgtccactcaaagctttctgaagccatcaaaggcctgccactgaaaggggagcagcacagccacagcttagccaaactgagccccactggccctggaggggacaagggccaaagccccattcccatg

SEQ ID NO: 67501 - DNA, 2163 bp, Homo sapiens
ctgcttcagtctcccaaagtcctgggattacaggtgtgaactgccgtgcctgggctgagagctaatattcttatgagagacggaggccagaacctttctctgccatccagtgagctgcttctgctctttgcctcctagggtccccagaaaaccacatggataacctgtgtcaggcttgtgtagaccatatttgtgacgtcactcttgagttcacttcctcctctactgggatttatcaaatggctgaccttgccctatcattctacctttgtccctttaaagagtcactatattcttcattcagaagtcaagttggatcagagaccatggggatcaatctgaatttctccagctattcttttgttgttgcccagctgtggctttatccagttgttccctctgcttcctaattgctggcttgcactggttctctgttagctttaataactactgtagcactataaatatcggataagctgcagattatcctgaaagttttaattagcccagtggcagtaagtctatctgctctgaaggacaactccacgcatagccccatactcagagttaatggccatctatagaagatgatcagctaggagccaggaatgtataatttctccactaatcgctgatttggtcaaggcctgggagaacaaagccctcagcatgcttgtctccctccctcaagcccccagcatgttagcaaattagccagccatgttaggagtctgtatttccataaatacagtgtggggataattttgcttgctgatacataggctggtttgaagggctgaaaccaggaggggcatgcctggtttgcctagttaaccttgaagaagctttcttgggctcttcccctcccccggccttttttttttttttttttaagagaccagagttttgctctgttgtccatgctggagttcaatggtgtgatcgtagctcattgcagccttgagctcctgggcttaagcaatcctcccgagtagctgggactacagatgtgtaccactatacccagctaattaaaaattatttttttgtagacatggggtcttactgtgttgcccagactggtcttgtacccctggcctaaaagtgatcctcctgccttggcttccgaaagtactggggttataggtgtcagggaccatgtatgtcctaggctcttctttctgccacagccagagctggtataaagtactgtcttagagatagccttgggttccaatcccatctctgcccctcactggctctgtgactttgggcagggttcttttttttttttttgagacagggtctcactctgtaacccaggctggagtgaaatggcatgatgtcacctcactgcaacctctatctcccaggttcaagtgattctcctgccttagcctcctcagtagctgggattacaggcacctgccaccatgcccggctaatttttgtattttagtagagacagggttttaccatattggtcaggctggtcttgaattcctgaccttaggtaatccgcctgcctcagcctctcaaagtgctgggattacaggcgtgagccaccacgcccagcctgggcagggttcttgacctcaccaacctccgtttgctcgtatggggactgtggataatggcagagccagtctcaggtggttgtgagagtaaaataagacattgtacggaaggtgtttagccagtgcactgctggctggtgttacgattatcagctcgttttctccttcacaaacatgttctacaacaggccagatgattgtggacctgcagaagctcaggagtgtctctcaccttactttcctgatgagcatctgatgcagaaatgggccctgctgggaacccacccaccggtctggcccctaggctgaggctacaggtgagaagatggatcttctgaacctcagcctgaccgcctctgggtttccttttctctcttcagtctttgtgggattagggaggattggaatttttgtgtcatcttagacattttaagtttgagaaatgaattttgaaggggtctttgtaaattgtcaccagattgccatccttgcttctgataagcctaaattattgtaatgtgaatccctgtgatggtggcaattttataatgctggtgtagccctgggccactcacaaaggccccta

SEQ ID NO: 67502 - DNA, 1041 bp, Homo sapiens
gcgtgcaggatttagatgttttatttttatatctgtctccgacactcccagagccacctggtttcttgagttgtaacaagatgttttctgttgcacaggccttgggttcctcattagccccagttcatgttcctcttgggggcctggctcctttacgaggtcttgtggataccccaccctctgctcttcgtggatctcaaagcgtgagcctggggagctcagtggagtctggacgtcagcttggagaactcatgctggtaagtacgttctcttgcgttcagtgtctgtagttcctgtggggcctcccgtgtgccataccaggaactatggcctaggggtgagaaatagacagaatcggtggagtcctcagagttcgtaatccagttgggaaaatgtaattcgcacctgtatgaatgtggactctgggctgtggaggatagacccatgctgtagggacatcagtgctgatttccaagtctctgcagccaaggcagtaggagtaggcaaagggagtcattgatgtgagctgcagtcgccaggtcagcttcatggacatggtggcacttgatctgggagacattgacatagagagtggggaggagcattctaaaggtcattccaaaggtcttccaagtgagtcctttgactgtccttctctattttgaagccttcacagggtctcaagacctctgcttatacaaagggtctcttgggctccatatatgaggacaagactgctctcagcctcttgggtttaggagaagaaaccaatgaggaggatgaggaggaaagtgacaaccaggtaatgatgaagtcctctccctggcctggaaaccctctgtgccatattttttccttttgaaaatgtttttgctgtgatagaaaaaatatgtaacataaaatttgcccttttaaccattttaaagttaaaattcagtggtattaattaccttcacaatgtgtgcacccaacaccactatccatttctttttttttctgcactcccccgccgccactattcatttctagaacttgttcatc

SEQ ID NO: 67503 - DNA, 1434 bp, Homo sapiens
agttccctgaaatgacaactttattttcttctccaccaccagtaagacctatattgatcaaaggagatgctcaggctttgtgcctagaaggttgaccatgtataggactaggggtgtcagaggacttatttgcttgtggaggaagaagacaatctctatgagaatgagcaagttgaggctggagattctgccctattcatttctgtatggccaggaagcaactagcctgctgcctctgaaacataggaagtgcttgggtatgttttgttcaacaatcgagagagtgaacttgtgaatgagtgaatgagccacctcgggacagagagagtgtccaggcaggttgtgtcatatttttttcttcacttggcttttccagtttctggatagagtgggtacttggtccctgctgtcagctggtggatggaagatcctgatgtggattgatcatgatttactttgaccttgggcttgttaacatttacttcataatggattgtaaatgtcaacaaaaaaggctttttcttctttgaaaggtggatttctttctttctttctttcttttttttagatgaagtctctcactcttgtcccccaggctgtagtgcaatggcatgatcttggctcactgcagcctccacctcctgggctcaagggattctcctgccttagcctcctgagtagctgggattacaggcgcccgccaccatgcctggctaatttttgtatttttagtagatacggggtttcaccatgttggccaggctggtctcgaactcctgacctcaggtgatctgcacgccacggcttcccaaggtgctgggattacaggtgtgagccatcgtgcccagcctgaagggtggatttctaaaagctttccttctgatgactatgtgcttctttggggggagtggggacttttaaacatttttataacctctttaatataaataggcaccccagtgtgatgaggggaaatgtctggagtgggtggtgttaaatacacctcctacccctgtctctagcatccccgcagatttagttctttttgtcacatggagtgttggattcctatgttctaacttaaggcaggaatcagggcttttcctgttgggagtgttagtggtgggggtaaatggggggtttcaggatagccagtgctgcctctgcttggtccctgctctttgaaaatggcttttgtctcagtttacagtctttggattctctgaactgcccacctttccccactcctgagtgtcccagacagcttacgatggagatggacttctgaggttagttctagcctgtctcactgagcagtcactttgctcatgattccatgagagggcagtaggatggcaagaatgcatctcttctcgtctcctccctcctctcctgctttccaacttaaacccacttcaagtctattacagactg

SEQ ID NO: 67504 - DNA, 1020 bp, Homo sapiens
tattcagtctggcagcccaagtgttagcacagatgttttctaggaggaaggcttctcagcccaagcccagcagagattattggctgtatttccaagggagggttttatttttctcttttgactgactctaaggaatttagtggaagcagccttgggtttttactagtctttaaagtgaggtttgtatgtgaggagcagggcttggccactgtagagacgcactgctcagaccctgccaaggggagcttagcagattgacagcctccagcactgacctttctatccaccctgcttcatggaagtgtttcctactggtgatgggcacaacaggggtctgaaagcagagccatttctgcagatatgggactcctctaatggcagcctactaggcgactctgctgggctgaccaagactttcccagaactagagaaagtctggaggctctgctcacttcctttatcctttatagacatctcccttaaatctcttgtacatctaaccctaacttggcatctgcttctcagagggacccaagtcggcagtgctcggtgaggatgctgtctccgaggctgctgctgatcagcatgtacccaggaggctttaggggcgaagaggactctcctgatagtttttcccctgttgcctattaaacatgaaaaatagaaaattgagactttgctgcctttctgtcacatgatgttccatcatcatcttgaataaacactggctttggagtctgcagtcttctgatgtggccaatggggctggagcaagacagatttattacttgaggacatgacaggtggtgacagagttgtatcgtccagtgtagtgacttccaggcccaccagtggatggggatcagcttgggtatatccaaatcactatagaaattctgattctgtagatctggggtggagtcaggaatctgtgttttaaaaagctgggtgggctgggtgtggtggctcacgcctgtaatcccagcactttgggaggctgaggcgggtggattgcttgag

SEQ ID NO: 67505 - DNA, 1051 bp, Homo sapiens
cttcgcagcatgtgtcatggaaagagcttgggctttggagtcagtgcggggccccatctgacccccaggccccttgcttatcagctgtgtgaccctgggcgagttatatgtgctctccaacctgcttccttatctgtgggatgagggaaagagttttagtctcacagggttattttttccccataattttcttatgaaaagtttcaaatatatggaacaattaaaaaaattgtacagtgaatacccacatactcaccatctataggccacaattaacattttaccatacttgcttgacatatctttccattgagtcacagtgtcattttgaagatgaaattagtagatgttgaaatgtttggcacagagctgggcacataatagacatctttctggaaagtggagttggggtagtgaagaggcctggtgggtgttgactgtgacagaggcagagttgacctttgcatctccactgtctccaggacttcggttttcgcagccggatctcggagcacctgctggatgttgatgtgctttccccagtcctgggtggagcttgtcggcaggtgagtttctgtgggtggtgggctgagctggggcctcattttccctcacaactttttcggatgacccagaactgagccctgcccatcacagggtgcatttctgtaagtcctctcccttctaattcattaaggcatggtcctgactgcctttcacggggcttctgaccattcctgcattgttgctataaattaaagccctcttccaccatgtatttatccatttatccactcattcagcagctgaagagtggactgtctgctcatgtgcaaagcgctgtgtagattgtagatttcaaggcacttcccatcctggcccattcatcctctttacatgcccagcccacctgctgctcaccagctggatctgctgctcgctattgctggggcacactccacctccgccacgcctctgcctgccactctgctttcccatttttcccagcaagctcttttttggtcctggaggttcacctctgacacctcct

SEQ ID NO: 67506 - DNA, 1025 bp, Homo sapiens
gcttgcctgtggcccccgattctgccctcgtaatttcagcacgcttgtcattcactggcactgctaatctgggcctctgtggatttggggtactcatggatttctctgctttctctgcacagctcacagtgcaggcttccagcagcaggaggcaggattttctttttcttgtgtgttctccttcagcctctggctcctgactctctgtgtagtggctgtggtcttctgccacatcttccccaggcctcaaggctgacccagggagcagctgtgaacctagccaaagcttggggaagcttcactgtgcagtagatcaaccttctgttctacgtcccgtatggtcccatcttctggagagcaacttctcagtgctttcgtctaagcttgagagccagcaggaggatggagggacccaaatgcagtccctccaacacaaactttttattgcttctctcctacaggcccagcaaccactgggaatagaagacaaggatgacagccagtccagccaagatgagctgcagagcaagcagtccaaaggcctggaggagaggtaccataggtgggaggctatccccagcgctgtgccttcagggtggtgtggacttgggcagaattcttggctttggtggccggcctggctcagtgtacagttgcttggcagcaggtgatgaactggctggatggccttgcagggtctgtgtgtgcacatgcgtgtgtatatgtgtgtgcacgtgtgtgtactggcaatgtgtgtatatgtttgcatgcatgagcagaccctttgtttcttcaccaagatgggaatgtgaagtgccactgggtacaattggcaggactctgggcaccattgtggggccagggctgatgaagctgtgtgtgtgcctggttatgggccagggctgaagaaaccttgtggaggtctggaggagtcgcattggagggttggtactgcagctcaagagttctgagccagggccctgccacatcagaaatggctgtagctatctgtgagagtgcaactg

SEQ ID NO: 67507 - DNA, 1109 bp, Homo sapiens
atgctttatcctgctcatggtttcctcatgctttatcctgctcatgctttatcctgctcagaatgttctcaggattcctctttgggcatttcgttgaagaaccagaaaacaagcaaaataacagtccttattactttatacacatctttttaatggataccattattcctgatctcaccaccctcctatgtatccaggtcagctctgaattccttttattcatttctaaacatttaattaactctaagcagacgaaaacgtgcccccatgggtagacggggaacatggcactcatgtgcatgcttgctacattttttggcttaggggagcatctcctcctggcccccttggtggtgtgataggggagcttcctattcctgggccttcctggactgttgtagttctcagagctgggatacctgctgctgcttctttcatgggcccatatacattggccactactcagtttgggaggcagaaagcaatctctggggactgttcacaaattgctggcatgagccttaagtagcaggcagagctctagcggggaggtggtaacggggctgtgagccattctaggaaggaatccattagggacagagcttcactctctccctgctgctgccagctcttgagccgcagcttcagattttgatcttgggccataacctcgtaagtctgctgagagcctgctatgggctacccttctccctaggctcttggggccttaaacagccacaatggggcttgtcctatggaacaagcattgactgtatctcttggcctgcccttgggtgacctctttgactcctgattgtgggccctccattaggattccatctgtgatgttccgtatccattctaacctggatgcagaggtgggtggacattaaccctgtgatgatatgccattccccacccatggtaggcgatccacagagcctgtggctcccccagagcagctctcagaggctgcactaaaggccatggaagaggcagtggcccaagtactcgagcaagaccagaggcacctgctggaatccaagcaagagaagatgcagcaactgcgggagaagctgtgccaagaggaggaagaggagatcctccgg

SEQ ID NO: 67508 - DNA, 1050 bp, Homo sapiens
acagctgggaccctgcagggtgttaagactactgctccagtaactggaaccagtatcccagactctttctaggatctttcccagggcagaaatagcagtcccatgatgaaatttgccatatcccttcccccaaccaattatgaccttgctgaagaatagtgataatttatcagtgacctctcattccttacagaggaaaagttgtatatggtggagccatagggagagccagaaagggaatctgtcgtggtgtctgaccagcctctgcttcagctctagagggctgcaggcttgctggggccagggccggtgctgtgcttgtaaccctcctcttctccaagagctggctttagggagccgatggtgtccctgatcttactgatgcaaggctgcagggctaggggagctgtgatttttgtggtagaaggggctgccgcagcttcccaccggtgggcccaccctccttgcaggagaggaagcagcgggctgagcttctggggcacctgaccggagagctggagcgcctgcagagggcccatgaacgagaactggagactgtgaggcaggagcaacacaagcgtcttgaggacttgcggcgccggcacagggagcaggtgaggggcctggggcagggtgagcccactgtgacccctccatgcacagtaggaaggtgctgggagcagacgcatggccccagcaggatgcagcctgacagcttctggagtgagagtctctcactggccatctccaagctggggcatccttgttactttgttttctgggccagggaacacactcaggattagaactagaggtcagcccctgtaaggcattggggttggcacctttgcgtctccttgccccagcaggaagtaaacaaggtgtggagccttcctgggaggctgcaggggcacacagcgaggaagcctgagcccagagtggaggttgtggtgtggcatggtgggttctggaaccccctcctgcccctcagctaatgccttacactctttctatgcttatgtgtttccctttctgggcaggaaaggaagc

SEQ ID NO: 67509 - DNA, 1015 bp, Homo sapiens
tagatgtctgaggcttaggtgtagcgggggaggcttaggtggagtaacactgcagggagagcttactgggaagggtggtgggggtctgtgtggacctgatggcactgttgtctctgtctcaggcatttgggacatatgctgagccttgcctccctcccaccctgctgtgaggcagcctgtgtgatttgcttcgcccagggtacctggtggaactctgggccccagaggagtctactcaccaagtcctcagttcccacacatcacaagggcgacagcctacataccaccttgaatttgtagcaacaaaattgctaggagaacaaatggagatggccatatttcatggatttgcgtaagaaaaccagcttaaagacaaaacataaagaagaacctagctcagtgtcccagccacttcctaggaaggaaaaaggaagggtagaaagcacgtgggagaggtgggtcataactgctgactttaccccacaggcctcagatgagggcactctgggaggatcccccaccaagaaggcagtaaccttcgacctcagtgacatggacagcctgagcagtgaaagttctgaatctttttccccgcctcaccgtgagtggtggcggcagcagaggagtgagtgggggagatgcggggtgaggaccatggtatccatggaatgggaggaacttggggaatagaagaagagctctcttccctcagccctgcagagggaggcctctgtgagccggtgtctggactaggtgctcggtcagtgctgggaaggaatcacaccatctaggtttgccagcacgtggggctgaaaggtcagggaagccctctgaatgctgcagagcactctacggtgtgaccactggccttgctggcctcttctcttccagggcctccttgaggaggcttttctctctcagctgccctggcctgtatgtgacagaagggccctctccccttccttctctctggggtcctgggcccttcacccagcaccttgccctggaaacctgt

SEQ ID NO: 67510 - DNA, 1034 bp, Homo sapiens
gccacaggcgaacacacacgcacacaccccatagcacgcttagctccattgtgggttagaaagtccatgtcttacattgagtagaaccccagctcttggttttggggtcatattacactgtccccatcaaacttatcaccctgattgttgtcagtgcttttagaagatgtagtagcatttcttctagagagggtgtaggagtctccttgcccagcagccctcaaagtcctgatcccccttccctatggggccctatgaaggcacactccctggagagttcaatagtttcttctctccctttccagggtctctgaggctagtgtgactgttgagaggctcccagccatgctctctgtgaccctcaggcttgggttgggatcccagcgctccttgaaatagagcaaaaggtgatgggttgcatagtgtctgtggaggtgctggtgcctgagagcataacaatagaacaggctcctgcacataacctttgggatggacccatgaccccagtttggaggcgagggttaggacaagatggccctgaaggaaggattgcctcccatcttccttggttgggtcaaatcagctggttaatgtcctctcccttttgttttttcttgaaagacccatatcactttcatccaaatccatatgtcagttgtttccccctggccctgacctctgatcagatagggggactggatctggatcattgggatgattgatctggaggtgagagacagctgctgtttcattaagtcagctcagccatagcccccaccctggaaaccttactctctctccagcagccttctaactctacagggagggccctttggtctgtgatgaaatggtttgtgggtgggcagcacgcctgggaggggctgcctccatctccaggaagcacagttcctctcccggctcgggcaggatggggtgcaggtagtgctctcctagttttaaaaattctaggataggagacgtcagtctgcctcatggcttttgctctgtggggtagagcagagggcattggagac

SEQ ID NO: 67511 - DNA, 1005 bp, Homo sapiens
ccaccccgtgaggcctccatccggaacctggctcgaacctaccacacccaggctcgccacctgaccctggaccctgccagcaagtccttgggccttccccacccaggggcccccgctgccgcctccacagccaccttacctcagaggactctggccatgccagcccccccagccggcacagcccccccagcccccggccccacccctgctgagccacccaccgcccccagcgctgcccctccggcccccagcaccgagcctccacgagccgggggcccacacaccaaaatggggggctccagggactcgcttctcgagatgagcacatcgggggtagggaggtctcagaagcagggggccggggcctactccaaatcctacaccctggtgtagggcccgcaggaagagcagccacgcctggaccgcgccgcgccgcagccccacacgccagctcggctgtttttctgcattatttatattcaactgacagacaaaaaccaaccaacgacaaaacaaaaacccccaatcatgaacgcctgtacatagaactcttttgtacaaatgaaactattttcttcttctccatgaagccagggcacaaagaatttgacagtacaagtcaaatcccccaccccacaaaatatgtgtggagatatatatacatatatagacagacaggaacgcgtccacgagctatatatctatatatttctctcaccctattttgagacagaggcacaaagactcagcaatttttttccctcctcctcaccttccccccagtctaggtggttttgacaaagaccaaaatcccaactcagagacactgcatgcgattttactgttccaagaaaaccaggagttgcttcaatttgcagatgcttatgtgttaatacctttttctatgaaaaaagacccagcgccgtgtgcaataaaggttatgtttctatgtggtggcttttttcccatctggcgaaggccagcggggagggaggagagagcccg

SEQ ID NO: 67512 - DNA, 1070 bp, Homo sapiens
aacatggttggtctgggcttggaggtgctgttggagctctgccctgcataagcgcctccacatggagcaagctgagggaggaggaaagacgggggaaagccgagagaaggcacaggcgtctctcgaccagggcctgggctcaggcgagaggagaggattgagaggctgcgatatctgccctaaccctgggagcagagggggcagcccccaggcaggacatagggcaaggggctagccgcccttccactgatgctctgaggggccccacagagagggaagggaggatggggatgggtgcagtgggatatgcacctatatcccatcatatgtattttcccctctgcctctttcatcatctccagccagtcaaccaccaagtcctgctgagtgactactatagagaatgcctgttctaggtacgggagcaggagcagatacctgccctcaaggggcttccagtctagtggaggtggatggcagaggggagcacactagaggggcaggagtactgtcaggaagatgtgcccagggctggaagcaaggaacggaagcaaggagcagaagcaggagcaggaggcctgctcctccctccatcaacaactgggcatcagcctgagatctgcagataagcttatggccaccaggaaagctgccctgaaattgctcagtaattgtgtcatcatctcctcctatactctctgctttcctgtggtctttctgaattaccctctgagtggtaggtggcccagctccccgccagtgagaccagagttctattaccagaggggaagcccactgactgcggccccccactccatcctcacggccactacctcacatgcagcaaagtgcacaaacgtcatcactgtagacctccgcgaattttcacaacccacccaagcagcagcgcccagagcacagaacaggacattacaacaccctgaatccccatgcccccttccagctcccgcctgcccctcctcccaggtaaccatcatcctgacctcaatagcatagattagtgctgcttctttttgtactttgtgtaaatggaatcataccatttgtcc

SEQ ID NO: 67513 - DNA, 1042 bp, Homo sapiens
tgaagggaccactatccactcctaagcaaaatttaggattttagattactccatctcagacgccatttactgaacaagggtgggggagacctggcttctgatcttagctccatgttgtgatcccaggcaggtccctgtacgtcgctggtctcagcatcctcatctctttgtgcctcaagctccctaagccagctctataattccacaagtctatacagttctgcaatgtggatttctatccagaaaaatcagactactcgcctgcccatgcctgagtgccccattcatcctccctagacatttatggttcagcagcctggggagatacagcagcggtttaacgctgccttgaggagctcggtcttccaggtgctgactgcccttggaaggggcagtgctgatgggggctgcctctggagagtcacgtggggtggcagagggcaggagggtggggagatggggagactccctttatgacatgctcttctatactttctgaagttttgccaagtccatatgttatctattttatctgttaaaacacttttaaagcttgtattagtattagtatcatcattatttttgagacaagatcttgctctgttgcccaggatggagtacagtagcacaatcatagctcactgcagcctcacatctctggctcaattgatcctcccacctcagcctcctgagtagccaggaccacaggcttgtgccaccacacctggcactatagtcatgtgtgtgtgtatggttttgtttgtttgcttggtagacatgggatctcactgtgttgcccgggctggtctccaactcctgggctcaagtgatcttcccacctcagcctcccaaagtgctgagattacaggcatgagctactatgcctgacctattattaaaacatttattttaaaagaaggggaagttctgagctgggcacggtggctcatgcctgtaatctcagcactttgggaagccgaggcgggtggatcacaaggtcaggagttcaagaccagcctggccaagatggtgaaactccgtc

SEQ ID NO: 67514 - DNA, 1049 bp, Homo sapiens
atctggtatgggtctttaaatataggcagaagtgaattttgaggagataggatgagatcagggacaagaagcatttctggaaatgaaggtagaatctgtgtaaacaattgagtaaatttgctgatattggtttctagaagggcgtgcatggactttgggttagaaactctgagcttaaatcgtggcttcatcacttaccagctgcatgaccttaatcaagttaacatttctaagcctcagttgcttcatctataaaacggggataataatagtccctgactcagaggtgtcttgagaatgagaagagataacatatgcatgtaaaagtaacgcatggatcttacctgtgttcatcacaatgcttaatgttcagatgcattgtactaagtgaaagaagccagacttgaatggctactcactgtatcatttcataaatatagtgttctagaaaagccaaaactgaaggtaaaggaaacagatcagtggttgccaggagctggggttggggagaggggccgacaacagggacacgaaggggtttggcaggggatggaactgttctgtatcttgattgcggtggtggtatgtcagacctttcagaattgtacactaaaatgggtgagatttactatatgcaaattctatctcaataaatctgacccctccataaaaaagacataatacattcatgtaaaagccttaatgcatggtgtttactagataattacactttgatagtgagcaggtgatccatggtaacttatattattatcattaccgtggggagacccttcctgcctcaaagtgcacaggcacggcaatttttcacaggggcaaaagggccacagtgctcctcaaaggaggaggcttcggctcagtgacctgcagcggtcccttccagcctatgacatttgttgaaaacattctacctcgttggctcaccaagtcatttttgcataagaatgactgcgaggttttgttctggcttgaacaccttggcaggctggcagacctgggtcccatcctcagagcttaatagccactttctc

SEQ ID NO: 67515 - DNA, 1034 bp, Homo sapiens
ggtcagaccacgaagcctaaactgtcagatttagacattggctagtgttctataggtgaaggggagctgaggaaggatcttgagcagaggggtacaagccatgtttaagacctgcctggcagaggagtgtgcagggaggacttggaagggggaacaccagaggcaaggggtcttcagtgcaagtggctggtaagggaagctgcactgacaatgggtagggaagaagaggccaggggagagggtcccagacctgtccaggccccgcccatcagcatgcggaggggaaaggccatggtttcttgaactagataaccacctggttactgggtgaccttgcataaatgtcttcacctctctgggcctcaatgttctcatctctaaaatgggaatgctagtgctacaataataataataataataataataatatccctgtctcctatgccacattgtgagaataaaatgggatcatgttatgaaaacactttgaaagcatgaagtgctgttagcattcttttgtcctctttccctcttggaaatcaatactgaaatcattccatgtttctcccactcaggcttcttgtgcttcaactttatttacttcagggcacagcctgagaactgaggggtcaatatccctacgcagacaccacagcccgtggactggggcacacagtaggagcactcaggcccagccttccccggagctggaggggcccggcttcctggcagggccctgcggatattcccctctcccttacagcctggcactctctggtttgcacttggcaggcctgagggtccccttcactgtccatccaagcatgagtaactctctctctttctcccccatgcttacccaggcatccttaggcataagcatttaatttatttatatttatgaaacctccaactaggtcaatgcacttttatgcacatcttgacaattattgatactgtgagcggaagaagaggaccatgtgggctggaggaaccggcttatccctctctcaaccagccaagatccttggaga

SEQ ID NO: 67516 - DNA, 1012 bp, Homo sapiens
aggaaaagtaactataaatatttaaaagtagcccctccttcacccagagagcccccaaatttccccacacccctgccccaccccagcagccagatcaggatacagccgctaggcttcagtggccctccttccagacccctacatttaggcaaggggaggggtggctgggaggctgcttgcagccaagacctctgagctctgcaggggtctgctcccacacccccaaccctgcataccctccctgggctctggcaggaggtagctgggaagagcagcctcagtctccgaccccctggggccagttatatttggatgttaaaagtaatgacacatctcctcaaagtcctgcctccccgcctgcctaacgcggtaaagtctcctggcagggagggggctggcttatatttaggtctggcattccctggtaggcatcctgttctgaaatggaaattcttttaatagctagccagccccgagtatttaatgagctggtgttgactttttgatttcttgttctcggtagaggactgtgagcagcttcagctagttagggggtctcctctcacaaagtgtattgttttttgagcatggagaagaggagagcgcaccctattattcctcaaggccccccttcacctttcccctttaagcttctgcctcacctttgttgtcataattcacctcttccagggagtcttcccagatttatcccacctgcttcctaccatgtctttactattactccaagagcacccttgtgtctttttctggggtgcctggtgtgcgtccccagcaacatcagcagtcctgcaagaacacttgtctcctgtttgtttggagtcacagaatgctcggtctgagttgaccatggtgggggatggacatcaagggtccctttaagaatctgatattaagaaggtggggtggggggagcatggaccctctaccccagaaaaaaatatacatatacacaaaattggaagaaatttcagaggtacatggacactcataa

SEQ ID NO: 67517 - DNA, 1013 bp, Homo sapiens
aacacctggggggtgagagacctgcctgtacctctccctaaaactgcccctgaagaccaacaggctaagaggctagggtcagtgggactccctccctgcacttgcttcttatagtcatgtctgcttccatgaaatcttccccaacttcaagaaaataaactggttctggtcagaagttcatgcagtgagggtcacaagtaggatttgcagccaaaagctacttcctctagcaggcccagcatccaggacctcaggatgtgatagaggctcaggagtgcaaaagaagacagctcaggccaacccctcttcctcaggtaggagggcacacaaagagtgttttcttttattttcaacattattgtcacctccgttttctcatttcaccttcgcagcagccagcgagtagggtactattatcttcattctccagatgggaaaactgagccaccagggactcaactggccctcccagggtcaacagctcttcaattccaagtctattgtttttagaaggacatgtggtccagaggcagcctaagatggactattccactgttagattctttaccggctttttttctgtgcaaaattatctggtgccaaactgtgccctctgattatctattggcatcagaggtccccgccctgccctgggcttgtctgcagcctaactcagcctcaggtcaggctgcctgcaggggcagtgttggccacactgtgagggggcagatgctggatcttgcatagtgaccattacttctcctccctccattcaagaaatgagctgcattgttgcaggtcaacttccctacatgtcaagaccctgctccaggcttcccactgaagcagggaagtcagactgcgttgggcactgtgaggactggaccgttccaatttaactgctgattggctgcatgaccttgggcaagtcgtttaaccacattaagccttggtttcttaagtcccacaggggaccacaggggataatgacccctgccatacttttctcataa

SEQ ID NO: 67518 - DNA, 1101 bp, Homo sapiens
atccaaccctgcctccccaactcttgttctgtctctcctctgccaagccacaaattaatctgtgcccctgccagagaaatctttgctagatgtcttctcttcccaatgggctggctcctgaagcaatgattctagctgggggttgcatttgaccccagggcttaccaggtctctccgtgggagtgaggaaggagcttttgaaggagaataacatctaggagggagaagagtgctcctggggccaggcttaggagtgaacaagttaaagggccaggtgatgacttccaggctctcatctggggccacgagtgcgcatgtgagtgcctatcataataaaggactatctcacccatactcaagccataaaaaaaggccaaaacacaaaacccaaaagggccaaatccaagtgcacctgatgctttaaacttgtaatgcactgactttccaaccttcgccccctcaaagcttatttacagacaggttttgagctcccaagtccccttctatttgcagattaatagtgcctttccattcactactctatcaagagccacaaggtcaggaatgactccagtcattcttaggggcctaaagaataaacacctcctgttgcaggcctcgctgaggtggcccctcctggctctgctccccatccttccccctgatctctgtgaacgcctgtgatgctgtcattccgattcagctgatttcaatcaagttgaagctggtgggtggctttgcaagttggctagacttattttaatttgaaaccaacaaatggtaaaaagaaagttaatcatttagtgaaggtaacctgttctattttttcactgctcctcctgcacagagagctctccctcccacctgtcctttatggtacctgggtgcccattattattctctttgcactaaaggcttgacagctcctgtgaaattgtaactatgtttttatgcaggggaacagcaagccattatcctccaatagtgtcttaacacatgttattcagatgagtcagcattctgtgatggaagtacctaactggtctcagtgtcagaagacttgggttcaagtctcaggtgtgtgatcttgggctacctcgt

SEQ ID NO: 67519 - DNA, 1041 bp, Homo sapiens
acaatctccccactcctaccttccttagattttcctaaggatgaaagcaggtcacataggtcagggtgtcagggttctcccagcacgtcatgaggattaccacagagggctggctcagcgatggaacgggctgccttggcagacacagagcccttggtccatgagagggctgtggggcgggtttgccaggtgggagtggcaagtgggatgaggaagaacggaggaaggaggaaggagagtgctgcttccacagcccaagcactgagacctgagctggggctttgctgtgtatttgggaactgtcactgcagaacaagacggggctgctgcatctgaggaagcttcagttgcagctcccaagctccagaggaccattccacgagcccacccacccaagtcacagcacccacacaagtctgctcacttctcctccatgagagaacattcctggggagttgaaaagtccctcctgtggggcttggatggcaagacagaaacataaaggccaggcattggcgtcatggggaggaagaacagatgggcggtgagccttgcaggaagggagcgggaggcatggggtgggcagggcagggaggccaccagagttcccggggcctctgcagccactaccagttctctcatactgggcagcagcgtgggcccagccaaagcacctgagtccactctgctgcccacacaagcccgtggcagaatggcaacgaagacaagcctaccgtctgcatcctccttccctcctcccctcagttcctcttcactccaaggatgggggacctcttcaggatgtccccccaccctcaagccttcccccaatccacccagccccaagattaggaaggcagagccaaagacttttagatctcttttcatccagcctcctacccatccagcctcccacccatccagcttcccatccattcagcctcccacccatccagcctcccacccatccagcttcccatccattcagcctcctacccatccagcctcccatccatccagcctcctacccatccggcctcc

SEQ ID NO: 67520 - DNA, 1049 bp, Homo sapiens
tggtgaaacctcgtctctactaaaaatacaaaaattagcctggtgtgggggtgcacgcctgtaatcctagctgctggggtggctgaggcaggaggcttgctttaaccctgggaggcggaggttgcagtgagccgagatcatgccattgcactcaagcctgggtgacaagagcgaaattctgtctaaaaatacacacacacacacacacacacacacacacacacacacacacacacatatatatggagagagagagagcgagagggagagagagataagtaaagcattcagaacaatcctggccagagtagatgcttaagatttagttgttatttgctgttctacattaggcctgagctggtgggaatgtcacattcctcatctttggtctgattctctgtggcaggcacttgccttcccaggaagcactaagcatttggctttgcagagattttacctcctatctctggagaaggcgccgccttggattctgggccacctggattgctaaagcctggggttaggtgctggagaggagaataaacatttatggagcagctaccaggaggcagagtgtgcaccaggtgtctggctgtgtgttctttccaactctgcacaaccaaggggtgaggtattaccgctgttcccatcttgcagaggaagtgaattgctctgtgacccatgatgaaagggctgagacagccacacacacaggtcagtctgaccccaaagcctgtgctcttccccttatagggcccactgcttccacgttctagaatcctttctccttttctttgatcacgttttatttcttctgacacacaaggaattgaacttggctgctgcgtgatccaaggggggcagaggtgaactgcgtggaagcgggtcctgcgttgctttcattcaccttcataaagggctttggcgctcaggaaattgttacaactcaaccttgagccggcccctgctggggagacccaggagcaccctggacaccaccctcaccccttcccctgggtttccagagtggaagtaattcaccccatgga

SEQ ID NO: 67521 - DNA, 1070 bp, Homo sapiens
ctgtttctgtttcttgtcccatccctgagctgaggctggagctgcagaccctggtccagtagccatggacagaggcagcagctgtttcaggctgtaagagcaaagcgccctggattgaggcttcggtcaaaatgtgggccttagtctgtgcccacaaatcaggccatgtccatgtcccccatggtcacaggcatgacctccaaggtcccacccagggttgctttccaggctacaaaggcacggaagacaaattaggcacacaggagacatccctgtcctctccctggaggttgccctggaaactcttactacctgtactctcccaggttgatcaactggcagaggcctggggcctgtttgggtgattctgaaccaactcaggcccaggcaccacagggttccctttgggctcagcaccagatctcaccacagtggaaagctgggcaattagctgccgagtcctgagcagccctcaaccacccctgaccatctgaatcatcctagcaagccacccactgggaaccccaatccccaccacacacacacacgcacacacacacacacacacacacacacacacacagatagacacacacactttaaacagaatgactcagatggactccaagggcagcctcagatcaccagctcggtactgtgaccttccaccaagtgtgtgttcagactggcagaggctctgacagcctctttgcacgaggctgcgtgtgatctcttctgactttctacctaattgtcctggaaaagagctggagaggacagtttctcagagaaccgcagctgcatctcttcagggcattcattcattcattcattcatttcttcaactaacatctgtggagtatcttctgaatcccataactggatcctggcaacatgcagaagaaacccgggccctatcctcttcagcctgagggcctgcaaagcctttgacacgaggcagtccatacgtgaagcatctctagctgaggtcctgccaaacctggcagcacctcagaatcatgtggggagtgggcagacacaaattcctgggccgcaccctggagatccag

SEQ ID NO: 67522 - DNA, 1052 bp, Homo sapiens
aatctcagggctaaaagggggccttcaaaggtcactaatccaagtctctcttaatgctataataaaatctccctctgtaatccagcatccatctctaatgtgtgtcctaccagcttccaaaagggagaatttgggctgttgatcattttaaataaagtcagaaaagcagatccccatgtagatgaaagcatgggggtgaggaggagatggtttggccagggacctaggattagatagtcactgacacggagcattaaattcaactctgagctttttgacagcaaaagcaaaaatggaaatatgattgttacatgagtgtctgacaaaaggacttgtggcaggagagacacgctttttcctgattctgaattttgaagcaagccacattcatttactggccagggaaggtggctctggaggctgtggatttgtttctgtttccctgttcttactctgatgctcttctgttccaagagtctgtcttgtggactcaaggctctctctggctggctcatttttctttgtttctttctcaggagcccattgggttatggttttggcctcaagtcctagggagatggggcccttttgcaaatttcaagggctttgcgaatctggaaggaagttacctgatgggatgtggatgttgatggacagggcagaggtgtcaccttccaggactagctgctgttggcctgggagtgtgccatctctgtcacctgtggagcgccctgcagcccacatagaccaccttagagccgatgggttttactagccttcagtaaccagtgtgaagaccccttatataactcaacatgtaagctccttatttttatttctcttagagcaataggtccatttctagttttccatttaagcagtcaatgacatagccagatgacatagcactgccacctcttagtaagcttccagttcctcaggggtgcctgggcatttgagggctacagctaccaagtatgtgtccctaccttccacaggccctggcctgggcatggactggacactgttgctaaacccttcatgtgtgttct

SEQ ID NO: 67523 - DNA, 1062 bp, Homo sapiens
tttcctcatctggatcgtaagctcctatgaggacagagaccacatctgtctcattcctcactgtattcctgctgccttacttggcatatagtagacatttcagaatatttttaaaagagtgaatcaatgaaaaatgaaagaaaatgggaataatagtacccacctcccagggttgttgtaggaataaaggggaccatgtgtataaaaccctcagtgcataataatgcgaatggtgtttggctgttatattgttctcagagtcaggtcaacttgctttctctgacatcgggcacctaatgagcagtagtagatcatctggcactagattccatatccctcccttcttctccactgcaagaattacaaacacaaatctgccttcgatgtgttcggatacagggtggctcatgggacaggaaaaagtactggatactgaatgggaagcagcatttcctcttgggagtaaggatgctgccaagcctccaaccacctttttctgggtgctataatcaacgatcaactctgaaggttggattctgtttcaggtcaggaggtggcttttgaggcacttaaaacagaggaggaagtcaggctgaggggctagtgggaaactgagtcctggatgcaaagaggaaggaagagttgggaagaagcagaaaggagttaactatctggaaccagtctcagtgtctgggctggctcttcagtgcccaaggagatgagcaccgcccccagccccggccaccctggcaagctggcccattagagagtgaggggctagtcagaccccgggcagaaccattaccaatgttgacttatttatttactttttatgagacggagtctctgtcacccaggctggagtgcagtggtgccatcttggctcactacaacctctgcctcccgggttcaagcaattatcgtgcctcaacctcccgagtagctaggattataggcatgcaccaccacgcccagctgatttttgtatttttagtagagacagggtttcaccatgttggccaggctggtctcgaactcctgacctcaagtgatccacccacc

SEQ ID NO: 67524 - DNA, 1038 bp, Homo sapiens
actgcacagccgcagctccgaccgccgcaccagctgcctggttcatgaatcctggtgtctgctaggtctctgcctgggcctctagggcagagaggctctatggttaagccacaagcctgctgggcccaggggatctaagaccactttcagctctccctctgctccgtgcctaacacgcatcgtcccacagtggccagacccaaagtcagcctctggagtggcagtgagccctggcctctgctctggcccaggccgacctgaagtggccttccattcagcggaaggcaatgaggccgctgagcctgggaggagcccctcccccatatgtgtgccatcactttggctgcagatgttctccgcttgaacctgcctctggcactcatttgcagacaatccagtagcatttctgctctctcactctgtagtattgaaaactctttacaatcctattcaaaaccctctcttggctgttgccccattccgagtagaagccaaagtcctcgcctacaaggccctgctcagcctggccctacgccctgctcctctttgtcctcatctcctgccacttctccccatccgccttctggcgcatgccattgtcctgaaagacgccaacctgtgctggcccctggccttggaacttgctatcccccgttctgcttcctggagtgttcttccactaggtacccatgtggcacactcactcactaccttcaggactctcaggaatgtcaccttttcggaaatgctttccctgaccctctctcaaatacagctgccccccaaccttccctgctcaacgccccttccatggtacctaactacttaacaccatttgacctacaaggtattttcttgtttgtttagtttacccctccactgtaaactccaagagggcaaagattttgtccattttattctttgccatatcctcatgtcctaaaacagtttctgcacatagtagacactcagtaaatacttgttcacaaatctaaatcaaaactgcaaaccctcatctatcaaggcttctcctcccgc

SEQ ID NO: 67525 - DNA, 1008 bp, Homo sapiens
aggtgcctcgatgtcacggaaggccttggttactctccaggcctggtccagctctgcccttgggcctcaggcctcctgggacaggggcctcaacaggagacctcctctattgccaagttttcccatgacaggctcagagcaccggctggaccggccctggcatctccactggggcccactttggctacttgaagaagggactttggaaccttcctccctctgtggagcaattagtcaggcaaactccagtctctccctttggctaaagatctgagcactgggcaaagccccagcaatatatgaagaaaggggtcagactccactcaacacctcatgttctatttgttctcaagcacacacaaacacctttcaattttacattcttggcttaaaagtgtttaacattcagcaatacattttacattagacagacacatcagaacagaagaactagcacaaagacaggaggggccacctccatccatatctgtcttttctttttttaatgaaactccgtcatctccttctctctctctctctctgctctttgctaactctgcatctctgtatataattgagttaaatggttttgatatcctagcgtcttcaccccacacaccctcttcctctttttttctttttttttttttttttttttttttagttaatgaaatgtgtgaacagtttgttcccagctaaaaacaagcgctgatgggtttcatacctttctgtgtaggaggaagaggtaggttctgagcaaggcactggctggcagtgggagaggccactggtgggaggtgaggtggggagaaagaaggagaagggaaagatccatacaaaacatcacgtgtgatctgtccctcttttgctctccctgtgcacaaaccctgctggggtccctgtgattggcacatgggcacagggacttgggaaggctccaccctttgggaagtgagtcagtacatccatgggtcaggagaaagggactgatgcttggaatggcagtag

SEQ ID NO: 67526 - DNA, 1667 bp, Homo sapiens
cctctgtctctccgaagtagcctcctgtttgaaaactcgaggcagctgtaccccgtgcgaagcttcttgctcccgtctccccatgtcttccaggattttccttcatagttggggattactcgctaacctttccttcctcacctacttccccttttccttcagctttcaccgtgtttaaatcttctaataattctttttatgacatcttgtttttcaagctcttctccagtgatccctccacttctccaatggcccttttcactaaacctccaaatttgtctttgctgacatttattgagctgctattacatgttctaaatgctttacttgtcgtatttaatcctaacaacaacctacaaggtaggccttgctattatctccattttatagttgaagaaactgaggctgcttgaattaataactcacccagcatcacatggctgtaagtgttggcaccaggatttaaatcgaggctcatggcaagcacccggttttccaaccaggaaagaagtctctccatcgtccccactgactccctcaatgccgcttcttggagtgctcatcctttggatctctctgtacaccctcaaaactgtagcatttggaattcacgttttggggttccatgataccactccgccagctctcctctaacccctcctcaggttgtcttagtgagctcttccctgcatctacctgctgcatgttggcttctcacttgctctggcctgagctctcttgtcttgttctacgtgtgctctctggacaagcttacctgctctgattctaaccacccccggaacactggtgacccaacatacacatctgcagttcctaccatgctcagcatgtcttgaaatgagctcatggccacctttttcatttcaaatctattctgcaggttggttagcaaaaaaaaaaaaaaaaaaagaaaaagaaagaaagaaaagaaaaaaaagatctgccctgttatttaggacagagatcatggaaaacatcatctgtgatgtctttgcctttctcgcatccctaattctcatagataaccaagtcctcttgagtctaccttctcagtagctgtggactctctttctctcccttttttcctactgtcactgcttttctttaggaccttgtaatatctcccttgagcacttattgtgttgcttctgttgtcttccctctaatccatccaccatacggctgccaagcatctttctaaagtcctttctgtcatgctgtgtacatcccctgtcttccagtcacctaaaggctgaaggtcaagtccttagcaggcatccaaagccagcacagcctggctccagtgcacttccggcctcatctttgattacatacttcacttgccacccacctgcaccctgggctttattcatattaactattcacaagtccctggaaggaaatcatacattcatatctgcaccaaagagcaggcagttcaagatctgtctgttccacgatgctttccttaacccccaaccaggatggctccttcccctgggttctcatctaagttagttcaagccaccaacgtgccacttagcacaccatattatggcttaatgtttaagtgtacacctccttggctagatggtccagagacctagcttttctcacctccttggctagatggggcagagacctag

SEQ ID NO: 67527 - DNA, 1023 bp, Homo sapiens
aatgggtacagagtttcatctgcaagatgaagagttctggaaatggataacgatggttattgcacaacaatataaatgtacttaacactgctgaatggtacacttaaaaacgggttggtaaattttatattatgcatattttgccataataaaaaaaatgtggaaaaaaagtcaaggactaccataagagaagaaagagacaaatagatccattccaggtttgcctgagaatctttatgttggatcttcccatcagtgtatgcgacagggcaggaccaatatcctgaacacagaggttagaaaccagaaaactgtcaaagggaacccttacaaaagaaggagctatgtgaggcaggtggccttgtgcaggagtctgagcacaagagtcagccaaatttaagtttgatcctagtgctgctgactcaatgctgtgtgatgttggacaggtgatctaacccctctgagccatggttcccttattgataaaacgagatgacaatactaacactaccagagccgttacaaagctaaaagcaatctgtgatgtgccaaaggaagttcctagcaaatagaaggtccttgttaaatgttagctcccatattagtccctgaagagtctgtggaggaggtggggttttcaggctgcttaaatgccagcagctgcctcagatgacaagggaggttgtactattaatgggcgagcatgggagatgtccttttccaaggtgttgggcagggattgaacatgttggaagtgagctgaatagtgagcactaagctcgtggttgtaactatgggagattagcatttccagcccccatgtgaagccagataatggaagggagagcaattaaatagacgcttgggaaactctccactgtatcaggcaccctgctaagcactggggaagcacagacaaggggagacgggtcctgaccagctgctgctcccaggccaggcagcaagatgagtgtccctgggatctacacccaccctggggggcctgcagggaagagaagtgcg

SEQ ID NO: 67528 - DNA, 1123 bp, Homo sapiens
ctttgccgtctctccgttccttgcaacaccaacccctctgctctggggtgacatcgttaagcccaaagttcctattcacattctcatttctgagccactcgcctggacctaactcctcttcacattcgagacccagccgtgtgctacagccccgtccctgtgtaataattcctcccgggggcagccaccaaggccagagctccccaccacaggctctgcttccctgccaccttgggtagctcctgcctttgtctgctcaaaccctgttggccaaatccatatgcttgctgtctggtcccttctcctcccttcattgctgggtgtcaccagggccagcctctctctcatcaggacctgcctgtcctgtgcctcttttctggagggatgtaacccaggcagctacacagatttaggaattcaagctaaagttctgtgagtcatactgacttgatgaattacctcttccgggtaatattacaggttcacagaggtttgcagtgccgtagccctagagtacggtgttgtgcgtaagtgtcatgtgcgttggcaaaactagttggatggggcagagcaatggaataccttcttctccctcagagcatcccgctgtctgggctgccagtgaactctcctgggaatatgtgtggggctgtggtatacagggcagagggtcagggtttctaaaaacatcatggtttaaaacaaccagattccgaaatggatggaatagacatttctccaaagaagatatacatgtagccgataagcacatgaaaagatgctcagcatcggtcattaggtgatgattacattcaaattaaaatcacgatgagatgccacttcacacccattaaaatgactactatttaaagaaaaaaaaataataataacaagagatcaaacccccaggtggatgtggagaaattgggacccttgtgcactattgatgggaatgtaaaattgtgtagccattctggaaaacagtatgatagttcccaaaaagttttgtttaatatttatagattgaggatgtacaagtgcagtgcagttcttttttacatgtatctgttgcatggcagtgaagtctgggcctttagtggagctgctaaaggcccagacatca

SEQ ID NO: 67529 - DNA, 1125 bp, Homo sapiens
aactgaagctcagagtttaaacttcttgcccaagttaaagagccagtgtgtgcacttggaggcacgttctcagctctgacaggctctgactctggggcaggacccagccttaaatgaacttgagatgatttaatgggcagcatgtaatgggagcctacatctgacatcccaccccccactttgtactctgccatgtgtctggctctctggagtgagaaggagagaacgtttggccataggtccacgcaatggtatcgcttcacttgtgtgtaatgtaccacctcttacacaaaagccctgcctgtgtctccagagctcttggggaacaccctttctcaggacagtttgagtcccgaaaatgaacataccaggaatgccttaggtgtgaaggaagttatctgttcctcaaaacacaaaatattagccactaacatttcttgagggcttgctgtgtgccaagtactgtgtgtttaatgtttcctgtgatcctcacaacagactttgagatgggtattattgttgttatttccactttacaggagagaaaattgaggcttaggttaagaaacttacccaaagtcaaacaatttaattggtttgggaagaccaggaagactttaagttcctaagatcgtttgagattctgcatcagggaacacttgacagcaggtttatacaaagacagatttggtatctttggagggaatgagtttccagtcattgcaggtggtccagcagagagggccactctcctaatggggatgaggatgctgtgacagagctgtagcttcggatggcagggttcaactagacaggtttaaagtcccttcagcccgagtctccttgactccacagaattaatgtgagaagacagagggtcatactgtcctatggtgtgtggggggtacaggaagtatagggcacagagagggaggcaggaggtgttgaagacatggtgttgtcctgagcagctggttgaagctagttgcagctagcttcactttgccattgccctaatgcagtcttcatgtcttggtaagtctagaatgggcatccagtctctgcttcaacctctgagggatagagaggacactcacttctccaagataagaacaaggaccttat

SEQ ID NO: 67530 - DNA, 1033 bp, Homo sapiens
ccagttgctagggggcatttcaaaggggctggtttcagggcatcatcaattacagcaaccccccagatgtgcctcgaggacagctgtgtgccaggcactgggcttggcattgtgggagcgtgagtatggggtgaatgtggccactacctaccagaagcttacagctcaccagggcgtcattactgttcaccagcctagaacacggcatggcgccaggaagtcaggatgcccaggacgggcctttaccctgtcccacgcccagtacagccactgctggttgatcgtcagggtcttttatttctgagctcccaaagagcctcacaatccttatccacacaggaagccaccgccagtcagttggaacctgcctgagatgaaaccaatttgttgtccctggtggaggaaatgatgagtgatacaggaggagttctgatgaagagttgagggagcgtcaaggggagtgggcaccctttgaggcaggggcggggagaggtgaggctccatgaaggaggtggccttcgagggtgggtaggatggaatacttgaggggggcagggcagtgcaggtgcagggaggggaccggtagggtgggcacaggagccccaggcggtgtccttggccgctctcgggccctaccaagtgaccggaggcagcctgatcgaccatcttcggcgtggcactggattctgcctctttggctttgtcccagggtggtttctatagctgatgaaaacctcagatctttcttccccctagaagtctctagaaaggcctgcgccctcccaaacaaaacagaaagcagatgacacagcctggtgctggggtgcatctggggtgcatctgggatgggaatttctggcaacaccaaccatctagcctaagggtcgccagactttctgtaagagaccagagagtaaatatttcaggccgtgcaagccacaaggtctctgtggcaaccacctcagctctgccgtggcagcgcacaagcagctgtggacaatacatgggtgagcgggcatggctgtgttccaaa

SEQ ID NO: 67531 - DNA, 1010 bp, Homo sapiens
aggcagtcaggattggtggggaggcaagggaagtgcttggggaagcaaatccctcctatttttagtgctttccagaaagcatcttagccatttcctttttccagttagtactgggcccacctctgccagtctagcctttgggggtgtccagagaatttatgcattccctctgccctcccatttccttccagtgtcttgccccttggaatgagttcaggtctaacctggggtcctcctgctgcacttctaggcctttcccccatgcctcttgtggagtagtggatgatggttgacatattccaggctccttgtttcctgagcagggctcaagtgcagagagtgtcaggggggtgtggagaagggcaatgattctcagaggcctggcattcaggagaagacagcttaggtgatgcaggaatatctattccaattcactaagggttatctgctctggcaagttataaaataccatttccactgaggctgtagaattacttacaggagccacaatgcaaccagacaacctttcaatcaagctgcctgttgttcccgcttcaaggctggtgaaataaatactgagcaaataaagttagccggcatctgagcattttaatgaataaagagtagcaagagggctggggatctgggagcttctgtacatcccagtggacagaccacaggagactggtgtgctagctccaggcagggtgcctcctacctcccaccctcaccttccacagcccagccccctcttcctggcgggtcttcctcattcttctttcccgctccagtccataattccatcccttgtctcatgtggtgcctggcggtgctgcctatggacgaggacccaatcagaccaggggacccagtgacttctcctatggcctcagcgaagtgcatgctgcccctgagtgattgacattctcaacacactggaaggcctttggggtcagcttattgctctctataaggccagggtcagaaaggctaaactccagatgaggtga

SEQ ID NO: 67532 - DNA, 1041 bp, Homo sapiens
aatctgctgcagtgccaccctggcttactcagcagatggcttgaacactagatcttgcgaagaaagagtggaggtcttgcttggtcttcttccttccggaagcctcttgagtttctcaaatgcatggctctacctccctcatggtcacatacacctggggtagggcagcctttccaaacagagacagcatcctgaagggccctttgcttaggtcaggagttacccactgaccttatatttatataaacattaaagtatactatgaaataaatataaatgttacctaagggattttttcctatactaacaacaacaaattgccccaaggtgatgtccctcctctcccttcccccacacagaatatctggcttaatggtttaaatgccacttcctaaagcatccagtcacatacacacacacacacacacacacacacgcacacacacacacagagatacacacacaacctcattcaatctttacaaagtagcgattattaccctttttctagatgaggaaactgaggctcaaagaagctgagcaatctgcccaagcatttcaggcccagaactagtactcttgattcccacttcgtcctgcttctcgtgggtggtgtcctatggctgcggtgccctctggggatgatccatcagggaggatggccagcctggctgcctgacctgggctgaggatgtcaggcactggtgaacttcttctgtcactcaatatggtggggagtgcatgggacctgtgggtagggcccagctggagaggctgcaggggctcaactggaacaggtggggaatgtggctgcctctgctgggacctgctgcctgctgcctccctacctttttgttttgttttgttttgttttgttttgttttgttttgttttgttttgtgtagcataaccatggcctgtttcctctgcaggggctcccaaagcctccggacaattcccccaacccctggaagatggggttcaggggccagccctgtgtctaggccctgggaggcccggcctccctcctcctgcagacct

SEQ ID NO: 67533 - DNA, 1154 bp, Homo sapiens
tcctctctctcaccactttctccctggcttgtgctcctcgtctgtgctatgtaagaccatgctgtcactgcttattgacttctctgtctcccctatggactagaagtgcctcgagggcaagaaagcatgtcttattttctctgtattctctctcctagcacagaggttggctcaaagcagattctctgtacctgctgaatggattgatggatggacggatgggtggatggatggatggatggatggatgaaagtggagtgagcatctccatagctatactcccagaagggacacatgggagacagggagaggccacctgaggccacaacatcacaagtaacccagcgacctcatgttaatcgccatttcctgacataggtctctgggtatgtcaaggctggattctccatagcccattctcagagacaagaccacaccctccccaaaccctcagcagccttctcctccaaatatttttctctgattcgagtatgttgactctctgaagacagaataggatctgaggagagtaaactggtccaaatgctgtgtgcgtttgttgataaaccaattacctggaactcagtgtgtgcacagtccaaggaccctggatgctgacccggctctccaagtccccagcttgactccctgtatggagctgccctgctttgtctctgccctgggcatgctcctcaccgcccagtcacctccacctcctccaagctcagagtgttaccagatggacttgatcctattattttttagagcatttgagattcctgcattagtgaataggagggtcccacagccagccatggggtggggccccaggacagacccagtaccaccagcgtcccaaaatgggcctctggctcaacctagggatttagctctgtctgtaaattgcaccatgtttgtcctgtcatcactagattgggagttaggagctctgggtttgacctcaggcttcctctctaaggtagcaccgtctacagtcttgggttaagtcatttcaccactatgggcctcctcagtgtctcagtctgtgaagtgagggcctgaactcaggattgggtttcgcaattcctcctccatgcatccctgagactttcctagacccagtttctataggtgagtccctatgagatgatgtg

SEQ ID NO: 67534 - DNA, 1051 bp, Homo sapiens
agcataacgaggcaggcagataagctgttcaagaactggcctgtgaagggagggagccattccggaggaggatggacatgccaggacacctgtctcacatggagtgacatgagtctgtctgggtgctgacatcccatagcccccagccccagtgaacagggcatgctgtaggtcggtgagactaggagggccgggaagaccccagtgctgaccacctgcatgggaagggcagagggccagagggttatgtgctgcccatccctgtcccccgccccaccctgtcttggcctcaaggggagaaaagctcccttggggtggaacagcttcagctccctcggtagcctgccctggttttgtttttgttttgcagtcaggtgttgttttttcttaattgactttttaatgaagtttaacacacatacaggaaagtacactgaccttaagtgaatgtttatgaaatgaacatgctcacgcagccacccccgccccaggtagcctcaccagccctccgtgagcctcccacgtgcccctcccagctgtcatcccccccacccagatgaccaccctcctgaggcctgtcaccatggattagtgttgcctggctttgaacttcatacaaaatggaagcgttctcttatgcctggcttcccccactcaatgttgcatctgtgcggttcgctcaggaggtgtgctggttgtcttggtaatcactgcggctgtcaggtagccccttgtcctggccacctaccctctgggcagcacgtcctctgggttggcccgccctccctgctggggtgagacaggccctggcatgcaggggaaggttggggcccctgtacatctcagagctgacatgcttctttttgtgacttccttcccctttgcctgtagttttgggaaccttctgtgccccctgtggtctcccgtgggtctccaggtctagaatcaaagccaggcatgctggatggagagtccccttcctgccctctggctcaggccagaataggttgcacagacccaggccaaaggcaaggttggtgtggactttgcc

SEQ ID NO: 67535 - DNA, 1060 bp, Homo sapiens
tctgcggtgcttgatttgttatggagagaacaccggttaggggaaaggtcaaggtcagcaggcagaggccgcaagaggaagcatcagtagaagcaataaaggctggggtggtgaagactcaggaagggcaagggagggagagggcggtgaaggccagagggtggcaaggagtctggctgctgggctcaggggtggcagttagatggcaagctcttggtagactggattcattcttcattcattcatctaccacttatggagggctctcggggagccgctgtccagaggcaggacaaatctcgctgacccatactttctaacccagtgttattttgtgctgtgttggaggcatgtccaaagctctaagggagcccaggcttcccagggaggttccatggaagacctgagatttcagccgagtcctgaagcctgagcaggagtttctcaggcgaagagtgggactggagagccattctaagccatgggaacagtgtgttgcaaaggcctggaggagtaacagagccctgtgtgtttggggagcaccctagggtccctgggtcagggcatggcaggaaaggttgtcgtcccaggttgccagtagcacactggaagctgggagtgtcagcagctgctaggggtctgaggaggaggccacgttggcaggtgtgtacaccagaaagatgcccccaatggcagcgcggagggaggcttggatctgaggagactggcccctctcctgagggcttcaagcacttccccaggtaccactggacttctcttggcctcctgggtccaagagaagacgagaggcagagaggaagccacagagcagcgtgccaaggcactgcacctcaaccacactaccagctggggacagctctaccatcaggtctcaggtcccaatctcctaaccctggtctgcttccaaatgcccatatccaaggcacctaacacatttgcaaaatgctggattataataataaaaattcacttatatagcactatgtgccaggcacttttttttttttttttttttttttgagacagagtctcgctctga

SEQ ID NO: 67536 - DNA, 1062 bp, Homo sapiens
tgcgggaccactcagccccaggcctctgctgttttcacaccacctctttctaaaatgatgccgcccatattcctctccttcgtcaccatcatcatttattgaggctttactcaatgcactttctttatgcactgtgctaagtgctctgtagatcatttaatcccaacaacaaccctgggaggtgcattttaaatgtattttcatttccctttcaaggaaacagaggcttagagaggttacattgtctgaagttgagagctaataagcggcttaggcaggactcagccaggtctgtctaccctccaagtccgtgcagttacttgctgtgtccccaccactcccgtgctcccacccctgccaccatcctggggccacagctcccctgggacagccatgggcaaagtgacagggcagacctagagactcgtttttgctggctcactgggcacccctgtgcgcaggctctgtgctgggccctgggagagcctgctcagtggtcctgggtgtcctcgccgcaccacagggccctcgtgctgcagcctcatccctgacactagaatttgcaaggtttcccaacggtgacagaaataggcttcttctccctcattttcagactgggaaactgaagtccagagaagaaacagttcttagcagaatctcacagatcctttagcaaacctcagcatcctgactccagacccattgtttccccggggcaccctgctgaataggcccaagttccaaccaaccaccaaagaagacattctcgggctgcctcaaagatgtcttctttatccagtgacctgctagtgcccctttctgcaaagtgcactggcctggaggagttctggattaagcttcttaggggatctagcatcctctcctgacctccagggctctctcttaactcacctttgagtaaaatgatgtgctgtgagatacacttaaaattgtgtgttccccagcccctccctctctattggtgggattattaatgagaccctaacatgagtcacctgagtaaataaacataaattgtcgttccacccctaggctttggct

SEQ ID NO: 67537 - DNA, 1060 bp, Homo sapiens
aaacaccatattcagggtagcgcttacctctgaggaggaggcgatgggctggtggagggaaatacaactgttttcagaatgtcttctttcttaaaatgttccttctaaaaacgatctgaagaaaatatgccaaaagaaacatgggtctctttccattatttttatgcttttctgtatgcatgatatgttatcattagaaaacaaaccatttcaacaccatgtgcaaagttctaggatggtggaggtggacttcgcatcccactatgataatctagggctgggggaatgggagtgcggagataggaggttgttggtgaaagcgaggtctgggggctgattctggagggctattgttgatggagatgggaggggtcaggtgctcagcagtgccctctttgccctatttatttcctgccccctcttccagggccaccttgagcagggcttggtgctctcaactgttgtaaaataacaattaaaagtggtataaatacaggaggggaagaaatgtgtctgcctcgggatcctgttgtaatctgtttcccagtttaatgagggcctggagactcagcatgaggccactgaaaattaagaatactgggagtatttatggggctgcgaggccttcttttttcactgctccctgtagctgggggtgcaggagtgacccagcagccctctgtcctcccgtccagagagggagtcagtcagtatctgcagcctgtagacaagagagtgggcctgcggggcagggatgggtggcctcaagaggcccggatgatcgccctcatggagaagcctactcccaactccagctcacattacaagagaaagttgggagtcgaggtcatagccaatagggaaacttgagagagaaatgtgatcccctgcttgccttccagccctggggacgaggcccccctcagggtcggagaacagagggtgtcctgggcagagggcggggcagggtcaacagctgctgccttcttgctttagctcttaaaagcacctaggtttgttccaatgtatcctgaaacaatgatctcccctgtcctgcccc

SEQ ID NO: 67538 - DNA, 1030 bp, Homo sapiens
tagtctttgctgtgcggcctgggaggtctctgtgaggaatgagaacataggtgtgatcgtaggtgtgagcatttaggagggcagacactgctgctcttacacagagggtcacaggctcatgggaccttcagggctaaaggcctgagggctagatggggaggatccagaccctcatggtgggacagagaggcagggacgcccttaatgttaccccctaaggccaaagcccaagcctcccattacgctcttggcttttgtggtcctggcatcttgctgtgtgcagaagcctctggaacttaaatacgggtctctgtagctgccaagctcgactttcacagtggaatagcaagccggttggagccaggcacagagcttctgcatcccagtatggagggcaggaggggccctgggcctggacaaaggcctctaaggttgaggtgtttcctctcacacttagtgactcctcctcttcacctttggctcagagcagtttggggctcaaagtatgtctgaatacccaagcctttagggtcacaggatctgccagaatcctgaagagaccgctgagaagcagacaacggaatgggagaagggcctgtcgaagtgggtggccatgaaggcggccgtgcatgtgggtggagtctggggctctgccaggtgtggagtgagcttcattctatgtgagagtctgggggcttctctgagactttgtaacaaaggaatcccttctaagagcgtgtggctggggtccctcttcaccacccctcatagtgggacacagggaaaagacttgcactgagaatgttccagatcctgctgctactgcccaggcctaggaaagccattttgcaaagcctgatggagcatggttgtaccccagggcctgcgcccaggaagggacacaaaaccacagcttctggttccgtcagcctgtagctgtgccagccatgtctgacatcgatgtcatcccctaaatctatctaaatgcctaggttggcataagcaacaatccgttgattggatttttagt

SEQ ID NO: 67539 - DNA, 1502 bp, Homo sapiens
tataaaatgggaatgataaaacctattgcacatagaatccttgaaataaaaattgggcctctgaggagactcaaattcttagatgggaaaggagtcacctaaatgcatcagagaaattgcccatctagcttcatgcagttgtccaaccttagacctcacctccctcgccctgtcttctccatcatctggcatcattactcaccacctgtgctcccctttctgggtgctgggctagaggtggtaagctaggggctgcagccacccaaagaggtggtggtcctggagtcacagatggagagtgaatccacctaactatgatcttgagaaagctacaaaggactgtgcaagatggatcaccaccatcatgtttttatctcaaatattccatgataataactgaatagaatgacagaaacaaagtgcctaggatgtagtattaatctctagattcactagtaccttgcagggtacctgataaacattttctgttgagggaaggaatggaggtgcggttttgtaccaacatagtaaataactccacaaactgcggggtgtctaatttgctccaagtgcttaagccctggttcaataataactattgtctctcaaatgatacagtttataaagtgctttcagatgatgtcactggctcctcaaaacagcccccgttaccttgcccattttacaggtgaggacacagaggcagtgtggcttagtgacttgtgcaggcagaagaggagtgagaggggaggcaatagacatgtatgagtccataagtgtatgtagggtcccgcggcaggcacctgcatgtcatctcatttaatcatgcttggaaccctcggagggaaacatgctacccccattcttagatgtaaagaaaatgagattcagagaggctgagcaatttgctccaggtcacacagattccaagtggcaaggcttgggcatggaccagagcttctgtacccaaagtgcaaccttcttccttgtaacagtgactccaggcagagcgctgtcctaggaactcccagcaattactgtttccctcatcaaggcagtcagagagtggaaaaggcagctggtccttaatttggctgttgtttgtttgttgtttgctttggtgagaaaggaagcctcggactcagacatcttgtattcttccttgaagtgtggagaaaatcctaccttccaaagctgttaagcgtacgttgcaggttagtgattacaagaaagcactcggaggcagcaatgggattctctccctaaactgagatgatactcatagtggcaagaatggtttgtaggaaaataagtgatcagttattgagctcgtccgtgataagtgcttttctccatcattttatttaagcttcacaggtgccctatgtagtccgtattattattattcccattttgcagatgtggggcctgaggcacagagaggtcagccttcccaaggccataccctgaggaaatgacgaggcagaatctgagcccagggc

SEQ ID NO: 67540 - DNA, 1070 bp, Homo sapiens
tctgtatcactacgtgtgatggttaaatgagttggtgctcatttaaatgaggtgctcacttcagcccccttgacttatagaaaacccgcagtgaggtttccttgaagccttttattgaaaaataatatataaaggaaagtgcacacattacaagtatgtagcttgatgaaattttacaaacttcaactaacactgagattgagaaatacaacatcagcaccttagaagcgttcctcaagcttcttttgtgacactattcccctaagagccaccactattctgatttctaacaatgtagatattttgcttatttatgaactttatacaaatggtgtccaacggtgtatattgtctagaccttttgctcaccattctgcttatgggatttacccctgctgctgtgtgtggtgggaggttggttgttctcactgctgcctagtgttctatcatgcaactagaccacactttctttgtccattctactgctgaggggatgtctgaggatgacatatctcatgagaaaaggcaatttggtaaaattcacgatgaaagacttttagcagtgaaggattttggtctttggaagagtaggtggaggcaaggaggtagggtttctcaggtggtctattttaagaaaaaagaaagtcttatttctctggattatgtcgggaggccaaggggacagctaagatcagccattcttcactaggacaccagggtacactggtgtctcacaatcaatggtaaggtgggtctcggatcattataaagcactgacgttttgggaatggttttcaacttagaagagcttttcaacttaaagacccagcccactgcaatggtgccaggcctaggtcacaccatcttttccagggactgtgttgggccaaccagggagagtggttctgggaaaggcctcccaaccagcatgtggtgacagaccctctctgacttcttggggtccttttcccttaggtacacctctcataagagcaaggtttaaagtagctgggaacgggagtgtgtaggggtgaggtggggtgagagctgtccttcattccattggttgg

SEQ ID NO: 67541 - DNA, 1290 bp, Homo sapiens
gaaacggtgccttgcacacagagtttaaaaatgtagccatcaactagctttccctattgcttcctattcatctatctattgatcgatctatcatccatatctatctatctatctatctatctatctatctatctatctatctatctatctctctatttatctatctatccatccatctgttggtgcctccccatgcacctcctcccccccgcagtgggagcccttccatccacactgcagctttgtttgtgaccagggtaaatattacctggcactgttaatgtttaatgcccccacctcatccccagccaccccaccaaggagcaaagacagcaggaagaggcaagtggagacagtccatttgggtggggaaatgactgggttgtcaatggatagatagatagatagacagatagatagatagatagatagatagatagatagatagatagatagacagacagacagacagacagacagatgaatttatttaacttcccacttatttttacatctcttattattcccgaaagactccatggaggcttacaaatacagaccaaatgcaataagataacacaatcctgtataataaagggagcacccttgtcttgtgtggagatggcagtagctttggtagcacatcttggaggatctgggctttctacctccagtttgccattaactgtgtgtttcaggcaagtcccttcaccttcctgccctcgttttttctggtgtacccagtgccctggccacgtccaggggctattgtggaaagcaaatgagcagcctcaagtttctttatctgtaaaacgccattagtaggaattaagtgatgcagtgcattccaagagcctggcacgtggtccatcttcaccaaacgctggctctgctgtgatgtttgcacgaatatatatttcttggctccagaagcagaagggagctgaacgggtattgcagcgcctgatctgcagggccatgccattctctccgtctcactcattcgtgcccattttcattggagggtggctggcttttccatgtccaacagcaaacatttgccaaaggctaatgcttgtcatttcttcaatcaacacacatataacagtaaaaatgatgccactcaccgtgtgccaggccctgggatatgctctttgcatgcattatctcacttcccctcaccaccaccctaggagctgggtactgcgcccattttacagatgaggagactgaggcacagagaggtgaagtcattgactgagaccacaccattagcaagtgagagggcca

SEQ ID NO: 67542 - DNA, 1877 bp, Homo sapiens
agactgagaatctgggaaggctcagaggaggcagcctggaaatgaaatgtcttttcattttttttttcccaaactagttctttctcagaaaccttttatcctaaggctcaggactgtgagcaaccactggggaggtcctgggtttaacaatttcctttccatgtctgccaggctccagcccacctgggagaggcttcttctgaggttcacccctcccctgtgtctttgtctcctttctctgcgtctcagacgaggctgtcataccgggaatttcagtgggcaggtgctcaaggaagggagagaagcagataaggataccagaggcagccgaagtgtttttaatttaaattatcctcctcctcagcctctggaacctgaggcggctgcttgaacctttggatgcaaatgtcgatgcttaagaaaaccggccacttcagcaacagccctttccccaggagaagccaagaacttgtgtgtcccccaccctatcccctctaacaccattcctccacctgatgatgcaactaacacttgcctccccactgcagcctgcggtcctgcccacctcccgtgatgtgtgtgtgtgtgtgtgtgtgtgtgactgtgtgtgtttgctaactgtggtctttgtggctacttgtttgtggatggtattgtgtttgttagtgaactgtggactcgctttcccaggcaggggctgagccacatggccatctgctcctccctgcccccgtggccctccatcaccttctgctcctaggaggctgcttgttgcccgagaccagccccctcccctgatttagggatgcgtagggtaagagcacgggcagtggtcttcagtcgtcttgggacctgggaaggtttgcagcactttgtcatcattcttcatggactcctttcactcctttaacaaaaaccttgcttccttatcccacctgatcccagtctgaaggtctcttagcaactggagatacaaagcaaggagctggtgagcccagcgttgacgtcaggcaggctatgcccttccgtggttaatttcttcccaggggcttccacgaggagtccccatctgccccgccccttcacagagcgcccggggattccaggcccagggcttctactctgcccctggggaatgtgtcccctgcatatcttctcagcaataactccatgggctctgggaccctaccccttccaaccttccctgcttctgagacttcaatctacagcccagctcatccagatgcagactacagtccctgcaattgggtctctggcaggcaatagttgaaggactcctgttccgttggggccagcacaccgggatggatggagggagagcagaggcctttgcttctctgcctacgtccccttagatgggcagcagaggcaactcccgcatcctttgctctgcctgtcagtggtcagagcggtgagcgaggtgggttggagactcagcaggctccgtgcagcccttgggaacagtgagaggttgaaggtcataacgagagtgggaactcaacccagatcccgcccctcctgtcctctgtgttcccgcggaaaccaaccaaaccgtgcgctgtgacccattgctgttctctgtatcgtgatctatcctcaacaacaacagaaaaaaggaataaaatatcctttgtttcctagtggctcggaggtgctttcctttctgtgaaagaacttgagtgtttgtagggtctgtggaacttaaagggctagagggagtccgtccatggtcagagggaagaggaaggactggatagccacccaggcaggcacagagccccgtcagctgctgtcactgttgcctcctccccgcttctcttccctcctttccttttcttccttcactttcctctcct

SEQ ID NO: 67543 - DNA, 1189 bp, Homo sapiens
ggcagggagtagtttttaagccccgcaagctcactgcgcctctgtggatttgtggcctgaaccctgggattcagacctgcacatcagtctctagaccatattagcaagtgctggcctcgtgcaagtcatatgtccttccttggtctcggtttctccgtgtgtcacaagaggaaaactgaccctgccttctggggatgatgtaagaatacaaaggggcaatgaatgtgggtgttgcatgactcagagcctcactgagtttcgatgccttcactgacctcggcccttagggttcccctaaccccctaactggcaggcccgccctaccgtgcacctctaggcatctctgtttaatgggccctgctcctctggaattcctttgtggagactgaggtctgtgaggcaaggttagatatttgggaaccagtttgtgtagctttctttctcttgaccaactgtttgtttttgcagcagctgaaaaggagaaggaaatggacccttttcattatggtgagcgatggcaaccctgggtgcaggggtcagggggaatgcagccctgcctggcaggaggggtagggggaacagacaccctctccctggccccttcctctctcacccttggttcctttggcagattaccagaccctgaggattgggggactggtgttcgctgtggtcctcttctcggttgggatcctccttatcctaagtaagtttgttcttttgctcactctgttaagagcaatgactgaggctgctaagcaggtggggacagtgtgagagcctggttggtccctctcctggagaggaaaggaggctgcctgccctccgtgttatcttcacgacccagtagagtgctgggcacatagtaagtgctcagtaaaacagtgacacgggaacaaagaaaatgtcatatgacaatgagcatagataggaacgagcagggtggcttcccagtgctgtgtctatagggcatgaatggggcagtcacggaggaaggagacaggtgctgccctagtgtgcgagggatgtgcctccgagtttgttgttcccacatgagcctgatctgcacagatccctctttactcacatgatcaagagggctgtgggggtgtagccattccagctatagaatgtatttcctttgccccagaagaagctaccccatccgagggccactgtgtgcagctgt

SEQ ID NO: 67544 - DNA, 2141 bp, Homo sapiens
ctattcccagggggcaggaagagccctattgccaacactgcactccctcttccggctagagctggtcaagaggccactgtgggaagcctggtccatttgtccttccctctctcacctcacatccaatattcacaccatggcccctaagatttgaaggccttaatgtgttgtttcatctaccttccacatcttgactccagtctccctcctcactggctaagcaaggagcaggtgtaatttggagatgggacttgggctaggaagcagcagtaaactggagaaagaaagagaaggagagagggagggagggaggtgttttacagatagcagatgctcaaaacttaccttatttcatactttgattgaagatattttaggactgtatgactgcctgaatcataaggggactttccactttaaaataattaatcccaggtttactattacacagcttggtttaaagaaggaatgaaaatcatccaatcttaagtcaccgttactctccccacaccaaacactaccaaaaagacaaaacaaaacaaaaaccccatgagataactgggccaggcatggtggctcatgcctgaaatcccaacacttaaggaggccgagccagaaggatcacttgaggtcaggatttcgagacccagcctggccaacatggtgaaaccctgtctctactaaaaatacaaaaattagctgggcatggtggtgcatgcttgtagttccagctactagggaggctgaggcaggaggatcactcaggaggcagaggttgcaatgagccgagattgtgccactatactccagcctgagtgacacagtgagactctatctcaaacaaaacaaaacaaaacaaaaactagcactggagtatgtgaagcttagccagaacttaagccatagttactcttagaatgcaccctcattgacattactgcattctgtaggctaatcagcattgagtccagcaaggttgggaagccaaacctgagactacctgcatgaagccaagaacccttgagaggggctaaagtgatctcaggttggtatctgctgcccccagcctccatgaaaaagcaaagcaaatgctctctgaaagaaagtgtcccattttaggactaccaatttcccacagattaaaatctagcaaatatgagctcacaatcgaatatattaccaaacacaggaaaaaacaagtcactgtgattgaaaggcacagaaacaaaaagtagattttgacccccaaggatttaagagtttggaattatcagatacagaatataaaataactgtaagaaatgttgaaagaataagagatgagaacacaaaatgagtgaacaacaaagactaacacaaatgcccaggcaatttcaaaaagaaccagatagaacctttagaaattaataatatgaccattgaaacacaaaagtaaatgagtgggttaagcagcaaataaaaacagttaaaaaggaagtcagaaaatggaaaacaaatatgaaataattacctggaatgtagcatagagaaggaagtggaaaatatgaaagagcagttaagcgatatggagaatagaatgaggatgtctaacctgcttctagtcacagtctcagaaagagaaagtggggagaatggaggagaggccatatttgaagagataagaatttttcataacgatgaaaaggatgaacctataggtaaaggactttcaagtctgatgaaactcacgacaatcagttctatgttgtgtttcagacttgtgatgaaacccacaacagcaaacacaaaaagaagaaaataaaaggaggcagagaagaaagataggacatctataaaggaatgatgatataagcagcagacttctcaacagcaatcatggaagccagatagcagtggaataacatcttaaaagtgcagagcaaaaataattatcagcctagaattgtgtacatagccaaactacctttcaaggttaggattgtattagttttctattgctgcataacaaacgatcacagacccagcagcttaaagcaacacatgtttattatgtaatggtttctttaggtcagaggtctggcacagcttagctgaattttctgcttcagcatcataccgaactacagtctaggtgctggcta

SEQ ID NO: 67545 - DNA, 2152 bp, Homo sapiens
atccctcaccttccctgaagccagcactgtcacctcccatctccaatccaaggaggctatcagtggcagtggcttccctcctgccctctcatgtccctggccaccccattcctgcagggcctcgccctcttccctggctccagccaggctaccccccttccctttggcattggggtgggctcagccttccttccctctgttcctcctggccactgctctgccagccctgttctgcccacctcccaatcccagcacatcaaaacagcagtcaagagtgggaaatgcatgttctgagccctgccctgcccctaaataactggatgaatcaggtacctcatctctctttgggccccaattttcacaaataaaaagcaggagcccaatcactgtaaccaactgtgatgaattctgtgatgctaactccatctggtagacctcacatcttggttatactcaatatatacacagtcgaatctttttttaatagacttcttggttgcaaagatctagatacgtcataggctaaatcatatccctttgcatataataatagtctagggtaaccatttagactaaactgtggggcccaggcattctgcggcctcataaaaggccccattccgggacgttctgtatgaagtgagacctcatctttcttagcagggcatcctgctaagacccaggcccggtgacccctcagagcttgtcatccgtgggctgagcctgcaggaaggcaagcaggtgggatgccaggggaggcgagtgaagcttcgggagcagggggagggagggatgaggatgagataatgaagtttcactgtaatttggagcctctgcattttcaagggaggttgtttctgagttattttcacaatggaactgggtattctgatctacctcactgctgcgtggaatcaaaaataatagagcatgttgctatatcatcaactagtggcttctctttctgagcagtttttacccagcaattaagtgaaattatgtgactcagtatgggaagataattgccggagaaactcttctgattgctttctcccgcacatgcagccagcaaccaagcaggaggatcagagaggaaaattaacatggaagtgctgcttccacccagaacctcagctgcttgccaatatggagataaacaagagcacagaaaggagaggaaaaatgagcggaaacagaattcgttctcataatacaccctagaggaggcagcaacgtgtgattggttccattctccagatggggagagtggtccaaatggtctagaggggaagagttggggagcaagagagtgaagcagccagggagtcccccactccagcagtgatgatttctcaggccccctgtgctggcgagccaggtcctcaggcccccaggcaaaggtccagggcccagtgcgcaggtggcggtgcatgccctgttcctgtgccctctccgctcacttcagccttggatctccttcccccagtgactcctccttcctgtcttccatctactccttagaatctctcgcccggaactgagatttttcaccacccagcctcttaccctccccaccccagccagcctccagcagcccagcttcctctctggaaggagggagaaaggaatgtgtggtcactgggagggtgggaggtgcagaggggtggtatatgagatggaagggaagccaagctgggtgcagcagtgagacaaaggcattctgtggcccttcaaaagttctgtgtatgtacttggccactcgactcaggggcagtgccaacgtaccaccgatgagatttttaaaaatgggtttaggcccccctcctccccgctcccgccaccccgaggggcccatgctgaggtgtggttgatgtagcccaggctgggacagcagcttgcaggagtagagaatgggtcacttttcaaatttgtgacagtatttcttttcacactgtcacttgatcagaaatgttttctttagaatacaaaggcaggtcttaactctttagcttggcactcaagagcctctgcaatctgattccaaccatcttatctgagttctcaccacccaccccatcatgctttagtccaactgggttgttcactgttttggaagatatcttacactagaaatggcagctatttggtaggt

SEQ ID NO: 67546 - DNA, 2973 bp, Homo sapiens
ttggggcctccaattttatttcccttagttcctgcccatttccacatgtgccagggaggcagcaagaaagagtggaaggtgcatggcaccagcagaattagtgacagttccaggtatgcttttgttagctgttgggccttgggcaatagcataagcctgagcctctccttttctaatctgtaaaatagcagtaataaccaacatcccatggagttgtgatgtttctttgagctaatgcttgtaatgttatctggtgaataaggtgtcttataaatgactggtgtataacatcatcacatcatcatcatcatcatcatcatcatcccctttgaccaatgtgggcagggaacaggaatatgcaacatgtaagacacagcagctcccctttctcttttgacagtcacagatacactgaagggcccaggcctgagggacaagagttcctatcttgatacatcttgccgtgacctcctcaacccaaggaggagggaggaacagggccatcttaggaacagcaccttggttttgcagaagtccatttggccctgcctgtgtgtctcagggcccaacccttctagagagataccctgaaggggccctttgtgggaggcagtggcttctccttgaatgaccttggtgaaggaagaagattgggcatggtgaccagaggaggtggctgaggaccttgtgggctgggcctcggtctgggatagccgcagctcctggtctctttccagcagagacactgtgtcttctgggcagcggccctgtagccagggaagggcgtgagttgttttctcccaggaacagcagctgtctgttgacttttccttctcataccctgccctggtgcattttcctgtctctgcttttaggtgcatctgtgtgagtggggcacgcagggcatggtggaggcacctagggcatggtggaggcacccagggcagccgaggcctcagaaggaggaggatgacgtgagggcttgcttgatgcttcctctaaagccaattctcttctctcagcagcctccacctctcctggcttcaccacctgtgtccctccttcccattttccagctcagtttctgcggggacttggcccctgggccagcctctcccgtctcgaagcctctttctttctctttcctttgcctgcctctcccacttcctctggggcatcgccttttcagtttctcctcctccgggttttctctcctctcctgctgcctcatgtcctctgtctgtcttgcttctgtgtctctcgtgggggtgccctcagtttgggcctgggaagatgtgtcccttgctttagctgtcccagccagatgtgtcctccctgggccacatatctgcagctctggatgacataggatgtttgtcttgaggcaggaaaaggcagtggccgggagccagtgtcagctgtgggccgaggcccctccacatcctgtgacctcacgaggaccctccacgtcctgtgaccacacgaggaccctggagccttccagtggttggaggacaatgttaaaaggaagggaagggggaggaagtaactgggccctctccctagcccctatctctgtttatctttccattttcctggaaaaggtagaaatgaaggaggaagccaaggacagagttgggcagtgatacagtaatgatactaacaggtgatgcttcaccagcagttactattcgccaggctgcactcagctccgtccacaggccgtctcttttcattgcaaatgacagcaacagaactccatctaatttagttgaagcaggggtatcagtttacagagccagactcgggaagggtggggccctctggtgtgggaacacaggagcctgaggcacagctaggaagctctctgggcccctcctccctgcctctctcccctgccagctctgtacctgtcagctattggccgacttctcccccaacagactcctcctcctttcatccggcaggatgctgaggtctttcctaccatgtcttttagctacagggaaggagctgagattggcaggctcccatagaccagcagggttcgagtggggacagagcaggctcccttccaaaaggggatgtcattcacagaagaggggactgatgtgggcacaaagaccacctcatctgaccctcactgatcccgagatgcatgctgttaggcccatcttgcagttgcagaagccaagactctgagaagccaagtaacgctcccgaggccacagagccactgagtggcagagaggagggagagctgagtgctcagagcaaggaccctggagccaggttgcttgggattgaatctaggctctgctactttctagctctggaatttggggcagcttacttaatctttctcacctcagtctgcccgtctgtgtaaagggaatgatcgtaataatagttgcttcttaggactattgtaagggtagaatgagttatataactatttagaacaacacttggtatggcatgagcaccttacgaatgttacatgttgttatcagggtgttttacagtttacaaagaaccttcacacctattatctcacttgaccttgatcatagccttggaaagtggacaagggaacggactggcagattctgcactgattctgcgctgcccgcaccccatgctctcaccctcggcctaatcagcttcagggttccgtagcctgtttttaaaaatcccccacccgagtaaacagctctctgttcaacaagtgagtatcaatgctttctcaggggtgagctggcaggattgtacattctgctgtctctctagcgcacgaatatgtatgaagctagagatgctggaagcttggtaaatgttcatccagatgcgggagcccctgcattgtggctctctgcgcagagctctctcaggtacctgtatctcgctgcctcagcctgctggactgggatgggaatgagaaaacagggtggcagctacctagaaaaggtgggc

SEQ ID NO: 67547 - DNA, 1266 bp, Homo sapiens
gcctggatttgtgatttgtgaattctgtttctgtttctaaggaagaggccttatttcttttcacagtcagttattttctgtctctctctcttcttcttcttcttcttctttttcctctgtccaagtttctcttccctagaaagaacttcatgttttcatgttaaagataaaggtgcctccaggttaaaaataagtcccctgctatatgacaagagagttttgcctctcccgctccaccctgtgcagccgggctgggttgggtctgggccggttgagtccagggtacctgacgactcagcctccagcaccctcgcagtgggagtgcccctcttccatgaatgagggttggaggggcagcattcgagccgttgggctactgaaggcgcctgacaggagagggaaaggccaccctgggaggtgtcagccacagtgatgcgctgggcggaggtgccctgtcctgctcctagactgtccagctgccttcctggcagcttgggaaattcagcagtgtctgcagcctccttgagccatggactgctggaatttcaccaccctctgctctgtcctttcccttgccagtctctgagtccagtctcctcctcgactcctctctggaacattgctggctgggcggggcgggcaatcatttcaagttaggtgatttaacaataattgatgcttaattgtttatttgatgggcatttaaaatgcaaattgagggaactggttgcattttccactgatggatctgtggcctctggtcgacccaaagcacttgttttaaaaggcagctttaaaagcccttgatggttgtttgtttgctctgaggctctgaaccagagaagcccagctcctgttacagattcatcaaatgccggaaaggtgagcaggagccggagtgctgggatggggttgaggattgcttttaactgaatttttgaatttttattatttttctacgaatagactatctttttagaacagttagatttacagaaaacttgggcagattgtatgagttccaattttctcccctggcatgcagtttctgctattattacgatcttacattagggtggtacatttgttacaattaatgaacaaatattggtacaataatattgactaacattgacactttattaaaatgtcgttcgtttgtaccttatgtcctttttctgttctaggatcccatccaggataccacactccattgagtcgtgcctcttttggtgcctctgggtggtgaccttttctcaggcttcc

SEQ ID NO: 67548 - DNA, 1266 bp, Homo sapiens; identical to SEQ ID NO: 67547

SEQ ID NO: 67549 - DNA, 1266 bp, Homo sapiens; identical to SEQ ID NO: 67547

SEQ ID NO: 67550 - DNA, 1266 bp, Homo sapiens; identical to SEQ ID NO: 67547

SEQ ID NO: 67551 - DNA, 3480 bp, Homo sapiens
cggagctccaggtgttaacgagagccattcccaggtgctgggctccagaagctgggcactgaccagaatttcaatctctccactgccgctgctcttttccctgacccagagaaagcctgaggctctgggagtcatcctcaccagcagaggatcaggccagctctgggaccatcggaggctctgagccctaacaaaggagagaaggaaaagtggttactgtcccaggaaagccaaggaggccaggccagggaggcaggaaggggagggaaaccagaaagagggaaggagaggggccacaggagtcaagaaagcgaaagttagggctacccgccgttgcctggggttcaggccaccctctcttcctggcacgttttcctgcttcccccctggctcctccaaacagatctgtgcatctaggagaggaagcgggtgtgcaaagggctctaggcttgccagggttctcccaagacgtgtggcttctatggttgacagacggtaggcgcctgggggaagcgtttccttcctggcttccatcggatcttcagactgacctgaggaccgatttcattcaatcattcaaagaactgttttaagtgtctactgtgtattaattgctggggacatgaaggtgaggagggagacacaatccctgacatcggaatcctaggtttctcagagccggaagaggccttgagggagcatccagtgggaacacagtgggggaaactgaggctcagcagtcacgtggccagtagtcgctgaggccttctaactcctcggccaggattttggccttcacactgcctgtcctgcaacccttgctttcttttctcagtcaccatcagagatggtgggttgatggaaacctatggagggagagcctttggtcggctggtgactgggacgcccttccaaagtgagggtcccttagtgggcgggtacaaccgaggagcctgcttcactatgttttcttggaaggcgaggctggaagctgtggcaaggagatgggggagaaagggcagtttcctagaccctggaaatttcccgacagcctcgggggagtccacccaccgaaatctcccctaaataagagcacctcctctcttcctcccaaccttgttggacttagtcggccgccatctggatggcagactgtgccaggcagccccccaatattcaccttcgaacaaatcaccttctgagcaccctaagggaagcaaaccagtcaagaaaggcacagccccaaggaggcagggagcctgctgtggaaaggccgggttctagccccagctctccccctgagcttccgtgctaccgaaaggcaaatgcgttcattgcacaaatatccctttggatgcaaactgggcttctggtgaaatccagaaatggcttggactgctcttcagcaactgaaagcctttcggattttagacctttgtttccgcatctgtcaatagtggggtttagactcatgatttccaaggcatgtcttcctctaaatttgtgtggattatacaatcttgaaagagatcccttttctctccaggtaccaaatagtactcattatttcataatacagggctgcagctgagctgagctgagcaggaaggggctgggctctggttaccctggagaaagtttccttttcacccagtgtggcagaaggtgccctagaagctgaaaccaagtttttttctttagggctgagggagccacctcctcctggatgctgtggtctacctggccttttctaccaggctgcacactggaggcgggcggcggttggggggggttctttaaagagttgttctctggaagagacaactggagaggactgggctgtcattttggaggtccatgaaatcttctgcagggagaacccctggccagctggagagttgcaacgagaggggccggtcgggaacacagtgctctgacaccgtccctgatgagaggcaggacatctccggccgaaacaaaagcatggaaccaatttggcagcatcatctctgctccagaatccggggagggagaggtcccgacctgggaagggatgaagccagcttgtaggctgcgcaggaacatgtttgttacaaagatgtgggagggagcacacagcctgggaaaggggctgggcccccacggaccaggctggggccatgggaatggggctgccccagctcagaatatctgatgtgggcagagagggccaaggatgaaggggtgtagttagaataacagtgacccccacgcagctggaggacaaagccaggcccacactgagagaccagaggctaaggtttcaaactccctcgttcatccttttaataaatgttcccctcatatgtcaggcaggccctgtgggcttctgaggtttctcctttgctggagccctcctgctcaggtagatcaatgggcttgtcctgttccttcctctcccctactgtccacctcatgtccacatcctaccaggaggccctgcgactttcttcctccataggaagagcccctccatgcaatcacgggtgcacttacactctcacacacgttcccttcctcacacatatataatctcccacacccgacagggaggcagtggctcacacattctcacacgccctgtcacctctcccgaagagctgcagtctctcagaccatggtgatggcctgtgaacgtccaccctctcagcccattccattttacccactgatgttacagctcaggtccaggtttgccactcctctgctcaaaaacctccccaggctcaccagtgcctattaataagcacaggtacatggtgtaggcactccaggctcagcgtgacctggctgcagccacctctgcaggcaccttctccagatggtcatccgaagcctggtactgtctcaccctctgcctgagctcaagccgttgctggaatgtgccgagtagagggtggcagtctttgtagacacacaaacttggattctaaactgcattctgatgcttcctggatttcttcactttgctaaacctcagtttccttacctgtcaaatgagtgtgaggacagtatgaggcgagctgtgtaaagggctcagcatgctgcctagcatggagtaaacactcaggagatatcagctgctgtaataatgatagtaatgacacattattaggattattagaatggcattattattgttatatcatccttcgtggctcctcccaagtgtttattctttcaagtaattattccatattcccaataaacaggcattaaaattcccaataaacatactcatataccgtgaatgtcctgtcagttcttccttgagagcacacacctgcattttagctgcagagggacacgccccgcctcccaccccgcccgctccactgcaccgcctctcaatggcaggtctgttctccccacggtgcctggcacagtgtcagacacgtggagaaagcccagtgaacagcgtgtgtgctgtgacacgcatgg

SEQ ID NO: 67552 - DNA, 3480 bp, Homo sapiens; identical to SEQ ID NO: 67551

SEQ ID NO: 67553 - DNA, 3480 bp, Homo sapiens; identical to SEQ ID NO: 67551

SEQ ID NO: 67554 - DNA, 3480 bp, Homo sapiens; identical to SEQ ID NO: 67551

SEQ ID NO: 67555 - DNA, 1052 bp, Homo sapiens
ctgtttcctttccggggggccctggggtccgccattgccccctttccccagcagggctggccctggcagagcctcccctattgtgtctcccgggcttccgtggagagttgggtgtgcagcctggagctcccagcgctggcttctggctcttacaagtggtggctggtagaggaggcacccgagggtgggagctgggagcagcctcgctggaaacatgggtctgccgcgtcacctgctgcaagcctgcacgctcgcgggaccgtggctactggaggcttctccccaccagtgtgctctctgccactacttcctttgtctctgtggcttcgtgctgtctggctgggctaagatttccagctttgaagatggatcagtgggcatctcaggccctctctgaaaggagccccctttggggatccagccaccctcatattatggatgtgtatgtctacgtccgcaacttagccttttgcacgtgacttgcctggtcgttgccatggaaactcctccatttctcagcctccctctttctcctgcccattcctcacctccatatctcctcccctccccccagtatggttgcctagatactggttatccctggctaggagacctagatatctggctcctacacccaattgcagtggccccttactcacaccacccacttcacacacactgcacatcaccaacaccacaaacacatacagacatataccacactacgcaatcaacacaccctcacactcacaccacacatacatatacatcatacctatacacacatacacaccaaacacaccgcatatataccgcaccaccacacaccagctacaatgctacactgacaccctacatgcgcactgtgcatgcacacacacacacacagtacatctaaataagtctcaggctgggctgaggcaggggagagagagggcagtttccttccttatccagccacctccctaggggtgtggaggggaagagatggaggctcaggaagcccagaaggaaaaccctaacatctccctgggaaccctgcagaggaaggt

SEQ ID NO: 67556 - DNA, 1052 bp, Homo sapiens; identical to SEQ ID NO: 67555

SEQ ID NO: 67557 - DNA, 1052 bp, Homo sapiens; identical to SEQ ID NO: 67555

SEQ ID NO: 67558 - DNA, 1052 bp, Homo sapiens; identical to SEQ ID NO: 67555

SEQ ID NO: 67559 - DNA, 1094 bp, Homo sapiens
ggggtggtactgctcctggcagggccagaggtggatggggcttgaaaagggggttcaaggcagcagatctatggttcaggtaaggaccatccccccagctccccacctggctctagctgaaaatgacaactacaactggagctggctcctgcgcccacgacacagccattcatgcttttggtgcacattccccttaattaccaaggctcccaattaacgtgggctgctgtgtctggtgctgggttattttctcctatttttccgttcctcggggtttactattgcagagagacaccaggtctgtcattgtgcctgtcttgctcccttcccaccctaaccagagggaaaccgaaaagcaacagctgatggcaaatccgctccggcgcttgcacgcctcctcggcggcagtctcctgttgcttctcggagcttgactgccctttggaaaaatctctccgcccctcgagaggagagaggagcagaggacgcgcgcgagcacagagcgggaggacggacagggagaggaggagagggggtctgcgcgcggccgctacccagaagccagcggacggcagcacggagtgggctgtccccgagcccagccccgagcgagccccccccccgcccccgcaggacgcgcctcccagccagcccgactcctaggaggaggggaggcgggaaagcagctcaagcctcacccaccgccctgcccccagccccgccactcccaggctcctcgggactcggcgggtcctcctgggagtctcggaggggaccggctgtgcaggtaggcggctggggaggtgggcaaagttggctcctttttccgaggaggggcgaggctcggtggggaccgatctctggagcgccgggagcgccgggttttgtgtgttcagtgggtgtgtgcggtcctccgcggtcagctgcgccgcggtccccgcctgggcagcgggaaaccgggctggggatgtaaacaaggagatcggcgtcggaagagagaggagcctctaggggaggcaggctgtggcgctgggggtgacgctggtggctgggaattgctctcggtgctgccttgagcttggggtcagggttttc

SEQ ID NO: 67560 - DNA, 1052 bp, Homo sapiens
aactgggatggcctcgatgaggggcagaggaacaggtctggctagttctgtgttgtttatactggggattacttcacacgtcccaaccggcttccccgccccatttggtgggggctggcccttggccctccaactcctttaccctacatgcctgagaagccagggaccaagatggatcttctcctcgacatcagctaagcctggaggactcttcccctcagagaccatggagagggacagccacggggtgagtgtgacctcaggcctcgggccagattctcccagcgctgaggaagcagggctgaggctgggagacaggtgggacagctacctctgtgtttcaggtttgggggaaactggctgtgcctcttctagtttgaagctacttacgatcaagatctcttggtctccttttaacgtggttctagaaaaagcccctgggaggagaagctgctgggatttggggtctggctggtgagcaccccagggctatgtggctgagtcgtgggtttcctgctctgtggtctgtgagcactcctgccgggcatccatagtgttacagcaccaactttgccgattgggaatccaggctaatctactttaatctcatttttgctggttggaaaatcaaaagcattctaactgcaattcaggggcatcttgtctaaacccctcactacactcctaaaccttcccagaaaactgtgactttctgggtgcattcaagattttcaaggggatgtttcaacctccgttggtcacttctttttggacttaataactttcatgcttgggaagtgcttcttgatgtttaaccacaagtcctgctaccactcaacttcctttcttctgctgctcttggggtaggagaaagcagctggcctgtcctctgtgggaaagccagtcatacacacatgaaggcttccaaagatcttgttctgctgtgcctccactttcttttcctccaggaaatcccttttgtgctctcatttctcctttaggtcttgttttctgccccctccaaattctctgtaccttaccgacatggtaga

SEQ ID NO: 67561 - DNA, 1010 bp, Homo sapiens
tgacccttacagatctagatatacccttaccagagagagaactctgatgaggaaatgctggtaaattaccatttttctaattgctggtgagtctgacacttggtgagttttcagccagtttgttaaacttttaattaagttttgtttataataaaaatataaatggatttgaaagtttccatttttttaagttacctttgttttacaaaggtattttctaaacacatctttaatggactatttaactgaatttaaggaattcacacatgacagctgacaggtcttcatgcaggctgattggtaacgtgctgccagcacagggctgggtgatgcatacaccctaagctgggggtgcctggggagaagggcgctccttggagtgcccctccagctgcagggcagtgaggtgccacttgtgtgagccatcagggaggcagctggccatgggggcagagggtagcaggagcatcatggggcctttccatctgggctggttctctgcgatggtggtgtcatgcttgcctctgctcctttttttcttttttttctttttgcaattgcaagatttaatagagtgaaaacagagctcccatacaaagggaggggacccaaagaaggtagccattgctggctcgaatgcttgggtttatatctcgatcattgtctcttctgctgtgctctcaggcaatagatgattggctatttctttacctcctgtttttgcctaattagcattttagtgagctctccttactggttgggtgtgagctaagttgcaagccccatgtttaaaggtggatgtggtcaccttcccaggtaggcttagggattcttagttggcttaggaaatccagctagtcctgtctctcagtcccccctctcaacaggaaaacccaagtgctgttggggaggttggccagcgaccactctaactgcttcctgctgaactggggtgtagtagcggttgtgcagttgagattttctcaggaggatgccttcgatgtcattaa

SEQ ID NO: 67562 - DNA, 1050 bp, Homo sapiens
agggatggcagggaaaagtggtaacaagcctctctgcccatctacttccaatccctctctcccttactgattttttgatgccctgtcttctgggcccctaggagggatgagagaggagtagccccctttttcagagagtttggggtctacctcagagctctccctgtcaaaaagcagctgcaagcctcgcaagggtggagtggggggagactgaggaccagtagtacctgcagggtgcccgtggctgtggccagtgtcccttagccaacctgctgggctcaccagttccccgtctgatctgcctgtgcgcctcccattcttctctacccagaacctgtcatgggctggggctcagattttcctggctttgggagcagacagaccagagccaccagccattcagaaaacttcttatagctaccttcatgcaaaactgttttcttcttccttctcaatggtgacatttgaagaggcagagcaccttggggctcctccttctgtcttaagagaaagccaaggcacgtagagtagggagaagaagggcaccatcctctctttcctccccagggtctactgctgatttctagatggatcatgcagcttctctcagctcagctctttccatctaccaaatgggtgtaataatacttacctacctcacaggactgttgtgaggcttggcaagttttgtctaaaaacatctttttggcttggaaagggatctgggaagccaggtattaattgcagggatagttccaagtctgtcctgtcttcatctctgtgtcccatctctacaacccacatacagacacacacactctctctctctttctttccatcccaccccccttggaattatttagtctttgcaatattagaaaccttgactctgatgcttaaagcttcttgtccatggcttttgtttgatggttttcaatagaggtgactgagattgtagggggggcatttttggttgcccccatgcgtgggggcactactaagaatgctaaacttagtccccacaacaaagaatcatcctgtcccatgtca

SEQ ID NO: 67563 - DNA, 1132 bp, Homo sapiens
aaagggtattattaggagatcaggggaaatggatgttgagctggcaacaaacaaatgtttaccgcattcgatttgaggtcctgtgggggtgatattcaagagagtatatccggtaacacttgaacactcagaggcagatcatggctagtaatatagattgggaaatcattatcctgttagtggttgttaaatctacaagtgaataggattgtccaaggaaaacatgttgaatgactgtatattcaggctggagctctgaggaacaccagtgtttaaagaatggttaagaaaagaatagcattagatatttgatacatactgtcagagatgtggggagacagagatagagtgagtatgtgtgtgtgtatgtgtaacacagtcagtggtggagttggttggagggaaactaaagagattctaatcttaaattgtaacccatatctctttgttctaaaccaagggttgacaaacattttctgtaaagggccagagagtattttagactttgtgggctacatggtctctgggggcaactattcaattctgcaaaaaatgcagccacagataatacatcaacaaatgaacatggctgtgttctaataaaactttgttttaaaagacattgtaaatgttttttagctgtttaccaaaagaccactggatgtcataattgatttaggccaatctggtcacacccagagctagcggcaaggtcagttgctagttgtttttagtttgttccctttccactagatccatttgcttccatttagctcatgggccataatttgctcacctttgccctaaaccaactgctcccttgacattatcccttgggtatctcagaagcaccttaaatgcatccagaatcaaactcctgttcccctgccaagcctagtacttttctagtcttcctgtctcagtgaatgacatcagcaagtcggaaacctgacagtcatccttgatacctccctttccctaacattccacagccatacttagttcaaacttcccttctttcttaatggactatcgtagtagcctcctcagtaatttccccatattcactcattcactttttcttttttttctttaagagatgaagtcttgctctattgcccaagctggagtg

SEQ ID NO: 67564 - DNA, 1092 bp, Homo sapiens
aagatacagaagcatttgttcaaaggatagaaagcatctaaaagtttaggctcaagatcaatctttacagattgatattttcagtttttaatcgactggactgcagatgttttttcttttaacaaactggaattttcaaacagattatctgtatttaaatgtatagaccttgatatttttccaatactattttttaaaaaattgtatgatttacatatgaacctcagttctgaaattcattacatatctgtctcattctgccttttatactgtctaaaaaagcaaagttttaaagtgcaattttaaaactgtaaattacatctgaaggctatatatcctttaatcacattttatattttttcttcacaattctaacctttgaaaatattataactggatatttcttcaaacagatgtcctggatgatggtccataagaataatgaagaagtagttaaaaatgtatggacagtttttccggcaaaatttgtagcttatgtcttggctaaatagtcaaggggtaatatgggcctgttgtttagtgtctccttcctaaagagcacttttgtattgtaatttattttttattatgctttaaacactatgtaaataaacctttagtaataaagaattatcagttatataatttgtgtatatacatatctagaagttctacattgcaggaaaaacagatggatatatatttaatctttaccaaaaagttttcttagtagagacaacctgcaagtcaataatggatacagttagtttctaatgggtaaacagaagtatacggatttccacagaattttcacactgttttggatagctgggaattgggcataacaacactacttagtttgagggctctttcaaagaaaagtatcaaagattctatttagtactttgcattacacttttaatagggaaaactactggctttcaagtctagtaaaggaatggaaattgaaaaatggaaacttattaattcttccccaaagcgaaagcatacttttattctcctcctgctttcattgacatgtggcaatttccagggaagaggcttactgattattaaagcagtgtacttatt

SEQ ID NO: 67565 - DNA, 1010 bp, Homo sapiens
cacccctctggagccagcacagtgctcctccatatcaccagtcatacacagcctcattattaaggtcttatttaatttcagagtgtaaattttttcaagtgctcattaggttttataaacaagaagctacatttttgcccttaagacactacttacagtgttatgacttgtatacacatatattggtatcaaaagggataaaagccaatttgtctgttacatttcctttcacgtatttcttttagcagcacttctgctactaaagttaatgtgtttactctctttccttcccacattctcaattaaaaggtgagctaagcctcctcggtgtttctgattaacagtaaatcctaaattcaaactgttaaatgacatttttatttttatgtctctccttaactatgagacacatcttgttttactgaatttctttcaatattccaggtgatagatttttgttgttttgttaattaatccaagatttacaatagcacaacgctaaatcacacagtaactacaaaaggttacatagatatgaaaagattggcagaggccattgcaggatgaatcacttgtcacttttcttctgtgctgggaaaaataatcaacaatgtgggtctttcatgagcagtgacggatagtttagcttactatgtttcccccccaattcaatgatctataacaacagagcaaagtctatgctcatttgcagactggaatcattaagtaatttaataaaaaaattgtgaaacagcatattacaagtttgaaaattcagggctggtgaaaaaaatcaactctaaatgatgataattttgtacagttttatataaaactctgagaactagaagaaattattaactttttttcttttttaattctaattcacttgtttattttgggggaggaagactttggtatggagcaaagaaataccaaaactactttaaatggaataaaaccaactttattctttttttcccccatactggtagataaagcaaacttta

SEQ ID NO: 67566 - DNA, 1050 bp, Homo sapiens
ttctttttcattgcagctctttggcctatagcagctgtggaaatttatacctcccgggtgctggaggctgttaatgggacagatgctcggttaaaatgcactttctccagctttgcccctgtgggtgatgctctaacagtgacctggaattttcgtcctctagacgggggacctgagcagtttgtaagtagattatcatcattttccagggtactcttgtttagggaaataataagccagtccatttctcctttcccttccagtatttttcttagcagcaagcacaaggttaagctcggaaacaattcttgggacagagactgagaggccgttgaaggggaaagcaagtgacagagctgcagacaggacagttgggtttgctggtgtttcacttccgctcccaccatcttggcctccttgcctgggtgctgagtaagaagaccttttgccatttcccctctctaggtattctactaccacatagatcccttccaacccatgagtgggcggtttaaggaccgggtgtcttgggatgggaatcctgagcggtacgatgcctccatccttctctggaaactgcagttcgacgacaatgggacatacacctgccaggtgaagaacccacctgatgttgatggggtgataggggagatccggctcagcgtcgtgcacactggtaggttatgcagggaacagtggttttggaaaggatgagagcttgtagaaaagaaaggggcaatctttgttaaggctgagagagagggacaatcttttgtgatggatagagagagggactagcccttcagaactgggagcctcagagggagaccgaagagttctggggtaaaaagagaaaggctttgtttggctgtggaaagaaacagaaagtaaagcaaaggaactcagagaatccgttacaaaaatggcattgagattgtgaaagggagagggagcaattctttgatgaaaggcttacaacaggtctgttcactcactcatttattcgagatacttattgagtacctactctaatgctaggcaccgtcaaaa

SEQ ID NO: 67567 - DNA, 1051 bp, Homo sapiens
gctcgttcgtgtagagggcgggagagaggaaaggaaggagggcattgggagctgaggccccacctttcatttcagaaaagtgcacaggcagagcgggctgagtcacaggcacaggtgaggaactcaactcaaactcctctctctgggaaaacgcggtgcttgctcctcccggagtggccttggcagggtgttggagccctcggtctgccccgtccggtctctggggccaaggctgggtttccctcatgtatggcaagagctctactcgtgcggtgcttcttctccttggcatacagctcacaggtaagagccggcgggcttctctcagagtttcctccttcactgctcactctataaagttagctaattgtcttagaagttgcaagacttttgtttgggagcctgagccacagatacagtttgttttactttgggttttactgaaaccaaagttggtggactgtttttggagaactgctctcggacaaacaggtttaggtgtgttcagctgccagtgattcaggcacagagagggctttctaatctcaggttacatgccatttttttgtgtgtggctgttctcaacctcccactgctggcaggacttggcatttggatttctgtgtgtgggtcttgtctgtgactctcagcaacaccaggaaagtggagattgttagagagagacctactgtgattttgaaagtgccccaacacacacattctaaatgtaaatatcaagtttaaaaaaatgccacgtggtacaaaggttctaggggtgcaggcaaacataagctgtctggagttgattaattcagtttctgcaatagactagtaacagtatgaaatccacctaaggacccatctggaaaacttacctgctaggagaccactttacatacaacacataatgcttaaccttaatacataatgtaatgtctaatcaatgttatgattcattttaattttttgtttatgctttcaattctatttgcggatgtttgtagtttgttataacagttttgaagtcagtaccacgaggcgaggctttaat

SEQ ID NO: 67568 - DNA, 1031 bp, Homo sapiens
cactctgcttcatgtttccttgggtttagaagacacttctaaaattgagtgaccatgcctcatgaccttatatttgatgagccttccttttaggatcagttttatgccctgacagcaagcatgtgtttagtctcgctgtcatttactgttttggtctcacgtggaagcccacctgcgataaaatgggatccaagaaggactgctgtctgctttttgacttgagatccttctaggctgcagatagatgtgttgatggaatttgttgccacattagcatggcctgatagtgttaggtgaaacatacgacaacgaaaattgtttcttaatttctattttaaattgatattttaatttctattttatattgatatatgtattatttgccaggacacagaccttatgggagtatgatttgatagagcttgattttgacgatcccagttttacaaagtgttccagatatttctgttgaaaaacaataccaagtctgatgttaacacacttgtgtgttcatgagagctgacagtggtcttaaaggattagtggtactattcataaacaaaagcttgtattaggaggaagtgacagaattttgtaggacagctattatagatatagatctttgcagcaagtgtatcagagtgaaacttgttttcaaggaggatatattttaaaagaatcaaatccaaaagcttctaaggttggtagctgtaccatcccaaagtgtctgacaacaggatagtgttgtatctctgtatggcagttgaaaataggaaaaaaaatacatacatatatgtatgtatatatgtgtgtgtgtgtgtgtgtgtatttttttttttttttttttgagacagagtctggctctgtcacccaggctctgctctggagtgcagtggcacgatctcagctcacggcaacctccatctcccagtttaaaagtgattctcctgcctcagcctcccaagtagtgggattacagcctggctaaggtgtggtggtatgcgcctgtaatcgcttttagtggagacggg

SEQ ID NO: 67569 - DNA, 1027 bp, Homo sapiens
acctactgcgcccggcgctgaaaataggagattataaatcccgaatgacattattgaatattaaacaaaatatttaggtttcattttatcggacctttagagtgggtgattatctgggtactcttactttggtaagtccattgaacaaatctaaactggcatctccacaaaggttctcatcaagtgatcagtcctcctttttcctgtaaaatttttctataagtgactacacagttttagcccttttttaatgaaaaaaagtttgtgcacagatttgacatacgtgtgaaaaagatgagcttagtgaaagataggtgagaacctttttgttttttacagatagtagagatgacaacagagacttatttccatccaccattctacacatgccaagataccaaagaaccagtgtctagcctggtagcttgaccttccactgcaacctaagacaagtagtaaagcccttaccttgaagtagggtcatgggtgatgctgttgattacaaggagttcagaaagaactacatgtaagattgaagccattcaataactacttatttaggattttgtgattgtgatgtataatgccagacacagaagaaagaataatcagatatgaacatgtaatcagaagagcttacagcctagcaatgtagaagatctgcttagaaatacaatgcagaaagtttaaaatcctagtaaaaatagaggtaaaatgtagaaagctagtttctttatacagtgcaacagtatagtattgagaaagaaggaagtaatgcagtttatggtgataaattctttttgtttctcttgatagtctttttgtttgtttgtttgtttgagacagtttccctctgttgcccaggctggagtgcagtggcaacgatcttgtctcactgcaacctccgcctcccaggttcaagcaattctcctgcctcagcctcctgagtagctgagattccaggtgcacgccaccatgcctggctaattttttgtgtgttttaagtagagatggggtttctccatgt

SEQ ID NO: 67570 - DNA, 1021 bp, Homo sapiens
ataaaagtatatcaacagattaatgcattccagctgaacgttttagcctttttagtttcagctatccacaaatcaagccaccgagtccagctggtaggtttgtaaccattttgccaaaaatgtcttgagtttggggacaggaattggaaaatcttaacccaaagtattttaaaatgtattgtatttgagaaatgggaaaagaaacaaccacaggtatattacagctattgtgtcatctgccctcttgtgtctaatacctgtcctttgaacagcctctcccactaggtctggatggaggataccttaaagtgaaatgacagaccaggagaataacaacaacatctcaagtaacccctttgctgctctttttggctccctggctgatgccaaacagtttgcggcaatccaaaaagagcagctgaagcaacaatctggtaagtggaggagccaatagcagcaaataagatgacctagaatggggtcttcccaaattaagtattctttgagtccttaattgcaattggaatttaagtttggaacaaaagttggtttttgtttgtttgttgagagcagaaattggggttttttgtttgtttgcttttattgttggttttgttgtgagtccctcccctccgctgtcctctccactgtacaaaaagagaccaggtaacaggtggttccatagtaacagatgccagtcgtgatcccaaagctgtcaggctgttttctttaaaagaaaaaaaaaatcacctagtaaaagctatttaaataaatgtttttaacatgggacacagaggtggtaagtgtaggtgtagaaagcaagtcatgtgcagctatagaaagcagatgtaaaaggaagaactataaaagctttttgacctgtaggcaaatgagacttgttcttaagctcagcacttcaaaggccctcccaagcaaagtgcttcttctgttccgatgagtggcatcatttgtagcttagtcctgttaggacagacttttttaaaaaatctgatccttagcc

SEQ ID NO: 67571 - DNA, 1094 bp, Homo sapiens
gagcaactcaacatcaatcacatgatccaaaggatcttccttattactctggacaacagtgagttacaaacttatagcattattctacccttcctatttgagcttgggctaggggcttgctctttgaaactggttacagctaatggttagatacaaacctactcactgcactccctggaactcagggtttatatttcagtgaaccttttggtatgacctaaaaacagtatttagatgcagatctaacttttgttcccatttcaatactgactgcactatatagctacttgcctttactaccttaaaaaggaaatgggaagggtagccaaacccattttcttctcagaggtaacctaaatattcagatggaagccttcagaggcatcagagagtgtttgccctctgtgccctgtctgtgtttaaaccccaaggttggtactaatgtctgggatttactctttaaatgtcatgatgctaggtttataacaaatcccattctctgtgactagagggggaaaaaaaaagatttgaatctttagatgttgctttgtgtatcaggatcattctggtattacttgagtcagatttgcagttcaagagtgatgctgtcaagatcagttgtctgtataaaacagaagcattatccttaacctatcatattaaaaccatttcccaggtgatcccagcttgaaaagcgggaatggcatccctagccgttgtgtgtatttggaagaaatggcagtagagctagaagatcaagactggcttgatatgagcaatgttgagcaggtaatattcttacgttcctaatgtgtgcccttagcaaaaattagctatgcggctgaattctgctcactgttctccaacttatgcttgtgtccatatgtccatccctctctctttttttttttttttttttaccagtagaaggccaagtaacctggatgtgcatctctaacattgtggtgttcctcttttggaatcttttcatctaccatggccacatgcccaaatctacccatcctctaagaaccagttaaaatgccttcttaattacaaagccttggccaggcacattgactcacgcctgtaat

SEQ ID NO: 67572 - DNA, 1050 bp, Homo sapiens
tctaataccgtgtaatgccatctgcagttgggcagctgatcagaaaatctcttataagtgcccagaaatatattttaaaatcaaattaggggatgaggcacagagagtgaggggaaagattaggattagcatatttttggaaactgccagttgctaaggtttgggaataaaaactattaggattgtgaaacgttctgtggttgtgttttctggttgaacagttcatggctcagttccacgaaaagatctaccagatgctgaagaacttactccagctctctccagaaaccaaacactgtatcttgtcctggcttggaaactgtttgcatgcaaatgcaggccgcaccaagatttgggccaatcagatgccagaaatctttttccaaatgtatgcctcagatgctttctttctgaatctgggtgctgctctcctgaagctatgccagccattttgcaaacccagatcctctcggctcctcacctttaatcccacatactgtgccctcaaggagttgaatgatgaagaacgaaaaattaaaaatgtacacatgagaggtaggagagaaccaggcttctcaaaactgtgtgtgtgtgtgtgtgtaacgtgtaaagcattcactcccttatcctttttcacagagttcctttctcaaaaaaagatgaggcagaaacgagctatttcgatttttttttctttttttttgagatggagtcttactctgtcactcaggctgtagtgcagtgacgctatcttggctcaccgcaatctctgcctcccgtgttccagcgattctcctgcctcagcctcccgagtagctgggactacaggcacgcgccaccacgcccagctaattttgtgtatttttaatagagacggagtttcaccatgttggccaggatagtctcgatctcttgacctcatgatccatccgcctcagcctctcaaagtgctgggattacaggcgtgagccaccacgcccagccagaatttttaaaagacagatgtttgagagaaaaaaaaaaacacctggtagcttttaaatgttgtac

SEQ ID NO: 67573 - DNA, 1049 bp, Homo sapiens
caaagtatgatcattgcccttgtgtgatgtaaaactatcctgctggccttcttgtactttgcctaataattattttatgtaataacaacccattctacaccctactcaaccaagctgcctttctttggatagtgcatttcaactgaaggctgctatttgcaattagcttcaattatgttgaatacttggcagcattttcccattgctgtgcaccctgcctgtgtcctgtcaaaaacttttgtgagtgccttctgtgtcattgcaactgcaactccctactatccttaaagagaaggctagataaataattgaggatttgtttttttgtgactttctgttttccctgacccagtctcttctgctttcttgggggcaggttgcatgatcagatggtaaaaatcaaccaaaatctgcatcggctgcaggttgcctggcgggatgctcagcaaagttctagccctgctgctgacaatcttcgtgagcagtttgaacgactgatgaccatctatctttctaccaagactgccatgacagagccacaaatgctacaaaactgcctaaacttgcaggtgtccatggctgttctactggttcaactggccataggcaatgagggctcacagccaatagagctaacctttcctttgccagatggctacagctctttggcttatgtgccaggtaagcaggctctcccttgggaatgtcctgtttatagccttctgagtttaagtgggtcactttggaagtttaatcctcaaaataccctttcttcgttatcattcagttgtttttggagaaacaactcaaacttagataatatctactggtcaaagtattaggggactaacagtttgttccctcaaccttgtgtccccctgctatgcatatcagaaaatcatcttcaaaggattaagtgtaatcagagttttcagagctgttagtttctatcattaatatttgttcaacttacacattcatctaactttccctgtcctttttgtagaaaaaaaattagctcctgctggttaactcagaagggaaagagt

SEQ ID NO: 67574 - DNA, 1011 bp, Homo sapiens
ctgttttttgtttggttttggttttttgcttgtctatattttctgcagtgaaaatgaattacttagttttttaaaaaagtagttccttcaaaatgtttagaaataaaataacagtagttcccagaggtctccaaataaactatacctaataaggaaaagagtgctaatggattgagttttcagagactttggattcttttccagagatcaagtcactctttgtgcatcccttcctggctgagcgcatcatctccatgttgaactacttcctgcaacacctggttggccccaagatgggtgccttaaaagtcaaggacttcagcgaatttgacttcaaaccccagcagcttgtatcagatatctgcactatctacttaaatcttgggtacctgagattgaaatctgtcaagccagaggggatgctgttttgatttagggttttgatagtagaatgactggttggtaattatgtgaaaatagaaaagaaatggttaattcctagttgcttgatgaaggaatcttctgtagttttaaataaggagattttatctgggcaaggtgtcgtgtgcctgtggtccaagctacttgggaggctgaagtgggaggattgcttaaggccaggagtttgagaccagcctgggcaacacagcaggactctgtctctaaaaactagtaagattttgtgtgacccatgggacattgagatttccagtattctgctttgatctgtgcaaagagaaactttactggttgtaccactgtttagaaaagtagcattcttttaaggtcacatgatacttgatagacttcctagaaagtctttctgtatcaaaaagtatatatattaaatatataatatatttaatatatattatttataatttattattatattttatataatataattttatataattataataaaatatatattatattttattattataaataataaataataaaataatatttatatattataaataatatatattgaaataagtc

SEQ ID NO: 67575 - DNA, 3269 bp, Homo sapiens
ctggtggatcacttgaggccaggagtttgagagcagcctggccaacatggtgaaactctgtttctactgaaaatacaaaaattagctgagtgtcatggtgcaggcctgtaatcccagctacttgggaggctgaggtcagagaatagctttcacccaggaggcagaggttgcagtgagcagagataacgccactgcactccatcctgggtgccactgcaccagcctgggcgacagggcaagactgtctccaaaaaaaaaaaaaaaagaaagaaagaaatagacaaagtagctacaaaaactcctgaatcatcttgttctcactctttctaaccccaactcggcatttgactcaaagttataatgcactctggcttcattcttaagatgcgacgcccaggtgttctgtttttggcttagaatgttagaacttatggaaataaccctatttccctttctctctttgtcccagtgaccaaacagatccctttaaccgtagtcccctcaccatggaccagatccggccaaacacagaactaaaagaaaaaatccaacggtggcttgcagagaggaaacaacaaaaggagcaacttgaatagatactgtgaactaaccaaaccaaaaccaaccccagagtgcagataaacaattgtttgtggtttctctctttctggttctgttccttttctttcttcttttctttttcttttttttttttttttttactaaattagagaactgctcttgctgaaattatgatagttaagattcctaagaacttgacaatgctcccctggcttgcaggaaattatacttattatagcatcaccaagtttagaaatcatcactaattttcaccctctgttgtctcttcatattcttcttccttttcctaaatgaaattatattatttcaactactaaaacttcccgccaccctgctatttctcttccaattactgttcaaacatttttggtgagtgctgcttttataaatatgtgatgtcacatatttcagtgacagctgatgttatcagaaaaatcctgttatcctgtgtatttactagtcctcatgatctagacttaaccccttttctgtgttacagagtaacttcacataaaagcagatacctttaagtttgtgtagacttctgaataagatgatagacgagaattttttttaaaaaaggaatttaaaggaatcttgtgcaacttctgttgatagctcttaattttgttatacagtctttttaatgaggattggtagggcaatcctaccaattgatgggggtgaggagactgttgggcccttattctcttatgaaaatctgtttctacaaggactaggcctaagtagatttaggcaacgggtatcatatccatgaaaaatgtcattttaagacactaatatcaacagtatatctcagtgtgtgagatatataaatacacatacaccccatgtgcttttttgttggtttagtgtaaactgagtaccactttatattttctcttccatagtgagatgtatgcagtatgtggccatgtttactaacatactcattcttcacaaaattctgagattataaaatgtatatagttaatatttgtttgagcttgtgacctgacttctaagagctacttctaacacagccttaggtcttcaattaacaaagtaggaagttgagcacaaccttgtccacagccattttaaatatccacttagccctgtgtagttggtaggtggacaccactttcataagtgaacttgagctcactactcaattgtgcagcttaatatgctgactagggacattcccctatggattatctttatatcactgtctttctaagcccagagatgtcataagtgacaagaaaagtgataggatcaagaaatgggtgtcactgcttcatttggaacatgttattaactatggtctctttcaaataaatagtagttttatatttcaacacaagttgctataagcagtccttgatgggtttttgattgcatcagctggaaagcctcaaatctaagagggcttcccatcctagatataaaataggtgttgcctattgctgtgcttataaaatgaaaaaggaaattgaggacacttttgcaaatgccagaatgtaagattcattcagtgtgctccctgggcctttatggcatgggttgacaggatttgtttattttctaaaattagcttcattcaatatttatcatcctcctttccctctctgagaatgaactatgtataaaataagcttctgcctatttgcatttatcttccaaacccaatctagtaggatgttctcattttaaaaacgaggggaaaagaccagagtttttcaggagaaaactggaggaaaatgggcacaaaaactcagaaggcagctattcccagcagcttcctagttaacaacccccatgctgcctccagtctttgtctgtattcttctgtatttaaccttcagattgtaagccttttctggcaagcttttcttctttttttaaactcttttcctgaaactttttatgaatggctatggcaccattaatgctgctgaatatctttaaactctgcacaagcaagtgtgtagcttaaggccactactggtaaggaaaccaagtgtcctctgtgccttttttctttctgtgaagtaatttaagaatatccaaaaaaattagactttaaaaagttatcttggtacaacaccgtgtgtatatacacttggaagcttaaaaaggtgttttgtctggaacttagaagcagctctaaatctagtagagcagactttctaacatacctagttttgtgtattggctttgctggagtatgatagcaaaatgaagactcttttactcagctctggtattgctcataacttaccaagaggctaatactaaacttggaaaattgtttaagtatgttttatcaagcagtctgggttttgttttttaatatactttttaatggatatgtgaaaactgaaggaaatgttaaaggttttttaatggtgcaagtgaaggtgccagttgctatttgatatcacactctacaaaagcttcattactttatttgatggtggttgctaagcagccattgcacagagcataagtctactgggtgcctttacatgccagaggctgatgctgcactgttgatgtcatgtgaggaaataatgcacatgctctaactgctcaacaggaaatgaacctagaaacagaaaatgaaaaggttgattgaaataaaacttgatcaacgcgac

SEQ ID NO: 67576 - DNA, 1001 bp, Homo sapiens
agcacatattgatgaggataccaaaatgggtaccagttgttttaattccatctggatttgtggataatattatgataacttttcatcttgttcttaagagtgccattctaaatccttcatccctttcttcacctctttcttcaaatttgctggtctctctccaagaaaatatgaataaattgactgttctcttgtttttaaatccaattcctagcatctttacagttagctagatttgccattcataaatgaagtacagtactagctggccactagtgaagtactggcataattgaatgtgcttatagcatcctgcctgattgaacatccctgtggcacaggtgttctgcatctttaaaagcctcttgttaccagggagcagctttgacttttcacaccgggtgcacatttggtacaagcagtgaatgaaggtgatgcatgaataaatatttgtgtccagcccacacatctgcttctttcggtctctagtgagttcatcctggttttttgttttgttttgttttgttttccagctgctgtgacttactcgaagcctcgattggccacattttggtactacgccaaggttgagctggttcctcccacccctgctgagatccctagagctattcagagcctgaaaaaaatagtcaatagtgctcagactggtagcttcaaacagctcacagttaaggtaaccacgggctaaatgaaaacggatgtgcataacagaaaatgtcttcccttgggatttttctgattgttttgattaatatatatgtttccaatgaggctgaatccagcataatgaggaaaaaaattttgactgctgaggaagatacttacttttctaattttgtcacctgggtagaaataattagcccattttatgtcttagtttcctaagagtcttaaacctagcaaaaaagtgaccatttttattgggaaattttttttcctttcctatattagatagtatactaaaatatgatggcttgctt

SEQ ID NO: 67577 - DNA, 1143 bp, Homo sapiens
tacagcagtctcttcccccccccgccccgtcttacagggctacagtttctagcctattggtagccgggaattactctaccttcactccaccctttccctcctttagaatgaaggattagtggcatcttggaggggaaaatagtccactgtcccctaggcttagagaagagcagctttccaccactccccttggagaggaggcaggctttccctccagctctggggaagggggcccctgtgaggggaggtgtttgttgggggactgaggcagcatcctcccaggggaagcagctgctctcctaccccacccactgcgcctgagagcacgcagtctccaacccgagctccctcccgcccttctcttctcgtcatttcattattgatccaccttttcctaggccaatcctggggcttggaaggggtgggggaagccaggttggggtgaggagagtagataagggacagttatactttagtgtggtggcggtggttgctttgggatgggagaaaaaggattatcaagcaaagttattccttagaaaggacttggggttgtctctgattcttgtaaggggacccaaggtggatgaagggtcagagcgttgccccttccccattagtactggggcaagaacggagttgcttctataaacattattcggcccccttcagcaaaaaggaaagttgcccaaggaagggaagttgagttcaggttcagccagtggcgttgcgcatttgttttccattggatgcagaaggggggagttcgaattgtagaggggggaggatggcatgggggatgctaggaggaggaagagcagctgctaggggctgaagcgaaggggggtagggggttgctgctctggagtgctcttgattgaaacagaaagggaaagataacaaccagccgtttcctgcgtgctctgccgttggtgcacacaaaatatcctgggcaaaccccttgtcccctattgtgccccgcacccctttagatttacggaaagatcctgggaagaaggggagggaggagatcccaaggaccctggcccctcctttcaaggagctggcattttttagttgttagtcttcctgcctccttttttttaatcgtttctaaggcagcctgatcaggagactgacaac

SEQ ID NO: 67578 - DNA, 1540 bp, Homo sapiens
cgaagcctccgagtagaagtcagtggatgtgggctctcatctccgttactgaacagttatgagaccctgggcaaattcacttttaaccttaaatttctgatctgtaaaatgaaaagtttggactaaatagctcatgaatctgttctgtgtcagtattatgattcctttctgttgtattaaacttttggtcaaatcagaatttcttattctgagtttatttcaaaagtcagagtcaagtgagacgatttgataatttttgttttttttttgagtcagggtctcactatgttgcccaggtgcatcttgaactcctgatcctcctgccttagcctcctgagtagctgggattctgtttggtaatttttaatatcagattatacatttgcctatataactggcattattattaggaggagaaatttcaacttggaaagttttcgttgtgtggaaaaaacataaggactttggggaagttgaccagtttcatttataagaaaaatgaggataaagtttttacacatagttctgagaacctacagaatcccaggcattatctggtgtttagaggccctcttgtttggctaaatgtgttgtcattgttgtgaattccagactatccaaaagagaagttattttcagtctaggtggtatattcctgtaggtgtatgaattttgaatgaaaagaaaaatccaatacatcaatgtatttataaatctgaagtgatagtacctacttcataggatgtagttattaatatgttctgaaatggtttatactgagcattagaaattcagtctttagaacttttcttcctctgtgactgaaaaccagatgacatgtccccatctttcacttccatttaattatcttaaggcacatactcctggaggaaatcatcattcacacaatagtgatccatcttcttattggaagttgagagaaactattcccatcttgacttaattctcatctctttgctcaccttagagctgtccttccgtggggcagctgtgcagactctataccaattgcctcccttaccctgtggctagagggggtggcaacagtgctttgcttgctcagaggcataacagactgcagtgcctctctcttttggaaactcgctgtgttttaattgtaggtctcctaattaagatctctttgtgcctgcccacattccactagtgttggcacagagcttcagcttccttctagcacttaactgaaggccttcaatcgggccttttgtgaatatcttgtctctttccattcttcctctgccaaggtggagagcccagtggcatagacctttgagaagggggaagctttgtgactatcactactttgggaggaatttattcgaggattgctgggatgggaccttcctttgtttgcatatgttattttcagggattaagaaaggttaaattactaatgagtctggcatgatgtacctacattttaatcagattcttaaccctgtaggcactagtaggaaagaggatgccacagagttcactgttacaaagtatttccttg

SEQ ID NO: 67579 - DNA, 1800 bp, Homo sapiens
tgaaatgtgtctgtctttgtcccattagatagtgactcccttaagacacgggccatttctaagtcatcatttatgttttatgttttttataatggtgactttttatatagtatttgttgaattgaaaatttgatgtccatacaacttttaggaatactttgctgggacacattacataaactaggagaacttaagactacgaacagaatatttggactaatcattaagaaatactaatttaagtatggcaaaggaaagcacaggtgccatgatgcgacatttttgtaaaggtattgattggggttttgaaagcgatgttagggtatcctgatgggatggcattatcttttatgtagataatacttagcactgatcatccccttacttgagtgttgtttccatttctaggttcctcaacttaaaagggatgaggagaccttggagacggttctgaggagactcaaaagatgattatatgattggaagtcagtcctatgaggaaaggttgagagaatgaaaggttaagaggcaacttaataactcttcaaaaaacatgaatggatccattattaggaatggtaaccagcggtttcccagctccactgacagcagaataagagaaaataggtttaaaccgaaatcaggagtagttgtgtaaagaacttattggtaatgatggttgtcattacagtcatggtaaaaaggttaccaaaataattttattatcttctctggaagtatattttaaaagtacagtcctgcctacatatgtataaaatgacctcttaagctaccttttccttctgtgaatcagtaaataaattcttattcagctcctcgaagcaataattactttccagtaggaagcttccagagatatttctttaggaagtaatggtttttgtagtggctttataggagaatacaaatttttaagtggagctaagagagaaatcttaaacatcaagagaaaccaaggaaaacagtaggtgtggtatcaatataggaaacaaataagtatttgtagcttttatgtccattttcagttgtcatttaaagaggtatagttcagaatagctcttgttaaggctgtcactgcttgtggatacattgtaacaaatgcttataaatcatttccaaactaatagaagtttgcttcatgttagttagtattataaaagcctctgacccttggcttttgaggctgtgtagagggcttgcatcactcagaatgaaacctttttagatatgttgggttgcagaaagcatttcctgtacagtcagaatgaaaacttgaattgggattattcatatagattaccaaaagtctgggcagagctgatattaccaccagccagttttcctactaactcttaactccaaaaccttcattgggttattgaagctttaggacttttgaatttcctactggaattgtgtatgaattccttctttcaagtgaactgatactagatttatttaagattagttatacatcttaagtattttttaagtggcatataatgaatggtctctacttttaaccagtctcataaaatgcctggggttcataggtgaagctggattgttgcaggaattctgcaattgttggcaaagcgaagggcagtttgactccttaattataaagttggatgtcatttgagaaactctgggaattggaagtagaacaaattcatactttccctataacttttaatttcttgtcatacattcagaaaacaagagatgtaaaattcataaaactgcttgtataaattcagaaaacgggattataaaagc

SEQ ID NO: 67580 - DNA, 1161 bp, Homo sapiens
aaatttcttataataaaaagaactatatctgaaaataaagttggtgtttgtttaatttttctagcctattcaaatcaatctggtcatttatggtactttcctattagagaaaaataaaccctgtgattgtgatgcttaacttaattttctacagtgaatcagttaagtgggcttattttttctgctttagcaagtagataaaccagttcagacttggaacctgaggattctggaaatacacctttcttgagtttttggtttttttttttaaagattctgcagaataatttgggacattgccaggaatcagaatagtttactatctgaagtagtgcattcattttgctgttttttgtttttttgtttttaagacagataagctactttatgactacctctttttctgaagcagggtgggtggaggtcacctgtctcatttgctttgctgttttcagcatctttgctgcttattcttgttgacatggagtggggatgaggggtactacctatttctctagttacaaagtgagtagcatttgtgtttcttaggtgacagttgctaggtagaattgaattaaatatttgaaaactggacttcattcttgtgtgggtgaaatttttaccttctgttgttattgaagaacagagaattattgtcttagcgctctttaatcccaagtgacctttttgtgttaacatttctcaatatcaggcagagatcatatttaaacagtttcaatctcttcctatctgttatgcattcaaataatcattgttctcttgatgcaccaataaccagagagaatctgcccttgttcctgcccctgacaatctgttcacaagagaatatgatgtcagttcaataacagcatacatttcttgactggttgaatttcattaactatttggcttaagaagtttgccccttgatgtctgtgtatttgactgtgcttgggtatattatacttttcttactgattgagcagcattatttttatattctgcttttggaaatgatttacaggtgtcactacattttttttctactacaaataatgaaaaagtacctgcaaagaggctcatcttcctaaaaatggctatcataaatattgcattacaaagtaagaaatagaaattgaaaaatcgaattcatttatcaaa

SEQ ID NO: 67581 - DNA, 1163 bp, Homo sapiens
gtttattgtgggccaggctatattctgagcacttcacatgaattatctcacctaaccttcatgaccattgtctgaagtatcactagtattcccatttcataggcaaggaaacacatatacattgaagcacttggatacctaataggtatctcttacttaccatatctaaaaagtcttgactttcttcctcaaaccttttccattcccagtctctttgtttcttaattattccaccaaaaatccagttgctcaggcctaacatgtaagatttatcgtcgatttatctcttttattcacatctcacatctatcccatcagcaaattctgtctgtattacatccaaaataagccctaaattcaactacctctcaacaactttgctaccaaaacctcagactctcccattatagtctcttggttggagttgcttatgttattacctcactaaagtttgtttctcacatagcaacagtaaactctggtatcaaatcctattccttcactttaaacctatctgtgtctccccacactgctaggataaatccagattccttactatggccaacaaagccacacgtaagctggcctctggtcaagcctacttctcgagcattgtctcttctcatctcatccattctgctatatagccacactagcctttttctgtctgtcatgcatgctgtgcctgttgctgtcttggggcctttgcacttgctctcaggctagaacactactccaccaaggtctttatatgtctgactttttctcatttaggcctaaccaggtttggcaagtttttttctgcaaagggccagatggcctctgttgaaactactccactctgttgttgtaagtgcaaaagcaaccataggcaatacagatgctccccaacttacgaaggggctacatcctgaaaaacccatacatcaaaaatgtcataagtcaaagatacgtttaatacacttacaagctcgtcgtaaagtcaaaaattgtaagtcagaccattgtaagtcagggactgtctgtccattaacaactgaacgtggccatgttccaatacaattttatttatgaacactgaaatttgaatttcatatagttttcatgtacacaaaatattcttttgactttaaaaaaatggttaattttttttttttttaatt

SEQ ID NO: 67582 - DNA, 2756 bp, Homo sapiens
tgtctttgaagaggagaatttcagccttttcttaaatagtccaatactttaatcttagcaatctcagagcaaaagcctttttagatgccagtaagacttttctctcagttgcctagtatgcaaaggctgggccttaaatgttttgctcctctaaagcatttaaatttaagagatgaacctgctaatttgtcctaaaagttatatatgtcttttaatatagtcatggctgaaaaatggctaagacagttagcacctgactctagttttaaattaactgagaaaataatccttcagaaaatcattgatgttgtccacatacatgtgttcttacctctcgagaggaaaatgttaatgcttttgtcattggaactcagtttgggacttaccactataaattggaggttccagaatgtctgttcttcattccttattttgttcttgttttatgtggattttgtttctggaatctgaaattctatcattctgtgtctgtctctggaaagaactcaatctctgaatcattgaatttctattaatcagtttgtttaaatagaccatctttcttgagaacttgtgcaaaataggttaaacaaatcctttttttttttatagagcaggttaaaattagaggtaagcagaagcttttgctttttgtcctttccaactataactgaaaataggatgcttccctaagttttagtaaaggatttcatcctatatgcagtcaattcatgatccctttcacaaacgctgctgcccaccattaagtctcttatcacaggcatttttaaaattataccataaaatgcatgttgagactctctggatctcaaatgtacagaaatcacatctaaatgtcaattcctgagttaaggaactgacaattatggcactttcagtctctattaatatttagaaggcaagagattattatattgtttatattactccttatgtgtctgtagacttaaatactttttgaaaagcatttgtttgttgtattggggctgtatgtttctgccattatacttatttgcttacctgatttaaagttgtcctttaattgttttgggctgtatctatagtttgaaattaggactatcctctgtgtactatgcaccaaagatgacatttcaatgcattgttcagttactacacagctcctatttgtctgtaataaagctgtatggctgggtccatttatttcaatattagttattttatagtatccattggaatgatgataattaatatataaaggcaacttttccaaattcatttgtgtctcctctgggcatttctttgggatgtgtttgtatgcacgtttttgcttctgattttaaaataattttcctttgttgtaggatgagcaattcttaggttttggctcagatgaagaagtcagagtgcgaagtcccacaaggtctccttcaggtacggccaattaagtgcatggtgccttttaagttttgtttgttaggagattgtggcttcctcttgccttctttacatgtaaaggatgctctaccatacttgggttaggaaatggctgatgagctagacttctttttatttatttatttatttattattgttatactttaagttttagggtacatgtgcacaatgtgcaagttagttacatatgtatacatgtgccatgctggtgcgctgcacccactaactcgtcatctagcattaggtatatctcccaatgctatccctcccccctccccccagctagacttctttatgggactcttatctatcaggccacattgggtttattctttctctctgggaactacttggggcatgggaagtaggtttccacagaattactgggaaatctggtaggcaaagtgaaggtaacctagtaagagtatcctcagatttacacattttgtgttatgtggtagtgtatatgtctttgggaataatttggccattattttttttggatgaaatttggtccactattgtcaaagaaccaaaaacaaaatattggcattatgtgaaacatttttacctgattcttgaaaggctgtattaaaataaaaaaatggaaaattagcaatatttgtcattattctcaccaacaaaatatctagaatatcttgaaattctagacttacaagcagtttcctaagagaagaccctcaatggaaataacatttaatggcttgcctaattcagttctgtataggagaaagctatgtatcttttgatgaaaatgcattccccatctgtgctgccattctgacttcatatatggttttctttgattttatgtggatagacactccagctaaatatgatattgttagctgtttctgctttttgacattgacttagcttgtgatgtgtgctagcattagggtctcacttaagagtcatcatatattatcatctaattcaaacatccaagttgacagtttttcttttcttaaagaggagtggtattgtcattctagttgggggcagttggccagtagtgtcccagtatctgtgctattcagacagtagcagtgttctctttaacatgtgatgaagtcttaaaacttcatataggaaaggaattagagagatcatctgggatttttgtttgtttgtttatagatgaaaaaatgaggtccatgaaatacatgagtaatgatttataaccagtttgagagttctttggatatgttgtggatcagggaagttagcagcagtgctgggactcttctctgttctgctgcttctacttatctacc

SEQ ID NO: 67583 - DNA, 1006 bp, Homo sapiens
ggcgaggaagttcagatgttttttctttacaattcctttgaattcagaaaaaaccttcttgctcatctaaaattgtaagaaaatcagttttgtggattaattgttcaactgaaaactttttattatctttttgtatcaaaaaagtaattaaatgttctttcaggtggaatgttatttgctgacttctttgaggcaaattttgggtgaaaagaaactaagcacaattaagatgtttgattgactcattagactcaagttgaactcagtacaaaatggccagtgctaagttatattcagcttagttaaaacctaaactacacagctaaatatatgctcttcattgtttaatttctatacacagttaaaactagtcctcgaaaacctcgtgggagacctagaagtggctctgaccgaaattcagctatcctctcagatccatctgtgttttcccctctaaataaatcagagaccaaatctggagataagatcaagaagaaagattctaaaagtatagaaaagaagagaggaagacctcccaccttccctggagtaaaaatcaaaataacacatggaaaggacatttcagagttaccaaagggaaacaaagaagatagcctgaaaaaaattaaaaggacaccttctgctacgtttcagcaagccacaaagattaaaaaattaagagcaggtaaactctctcctctcaagtctaagtttaagacagggaagcttcaaataggaaggaagggggtacaaattgtacgacggagaggaaggcctccatcaacagaaaggataaagaccccttcgggtctcctcattaattctgaactggaaaagccccagaaagtccggaaagacaaggaaggaacacctccacttacaaaagaagataagacagttgtcagacaaagccctcgaaggattaagccagttaggattattccttcttcaaaaaggacagatgcaaccattgctaagcaactcttacagagggcaaaaaaggggg

SEQ ID NO: 67584 - DNA, 2253 bp, Homo sapiens
agattcagtgccccgtcctgtggatcttctgaaaaatcaagtgcagcttctcagcactcctctcaaatgtcttcagactcctctcgatctagtagccccagtgttgatacctccacagactctcaggcttctgaggagattcaggtacttcctgaggagcggagcgatacccctgaagttcatcctccactgcccatttcccagtccccagaaaatgagagtaatgataggagaagcagaaggtattcagtgtcggagagaagttttggatctagaacgacgaaaaaattatcaactctacaaagtgccccccagcagcagacctcctcgtctccacctccacctctgctgactccaccgccaccactgcagccagcctccagtatctctgaccacacaccttggcttatgcctccaacaatccccttagcatcaccatttttgcctgcttccactgctcctatgcaagggaagcgaaaatctattttgcgagaaccgacatttaggtggacttctttaaagcattctaggtcagagccacaatacttttcctcagcaaagtatgccaaagaaggtcttattcgcaaaccaatatttgataatttccgaccccctccactaactcccgaggacgttggctttgcatctggtttttctgcatctggtaccgctgcttcagcccgattgttttcgccactccattctggaacaaggtttgatatgcacaaaaggagccctcttctgagagctccaagatttactccaagtgaggctcactctagaatatttgagtctgtaaccttgcctagtaatcgaacttctgctggaacatcttcttcaggagtatccaatagaaaaaggaaaagaaaagtgtttagtcctattcgatctgaaccaagatctccttctcactccatgaggacaagaagtggaaggcttagtagttctgagctctcacctctcacccccccgtcttctgtctcttcctcgttaagcatttctgttagtcctcttgccactagtgccttaaacccaacttttacttttccttctcattccctgactcagtctggggaatctgcagagaaaaatcagagaccaaggaagcagactagtgctccggcagagccattttcatcaagtagtcctactcctctcttcccttggtttaccccaggctctcagactgaaagagggagaaataaagacaaggcccccgaggagctgtccaaagatcgagatgctgacaagagcgtggagaaggacaagagtagagagagagaccgggagagagaaaaggagaataagcgggagtcaaggaaagagaaaaggaaaaagggatcagaaattcagagtagttctgctttgtatcctgtgggtagggtttccaaagagaaggttgttggtgaagatgttgccacttcatcttctgccaaaaaagcaacagggcggaagaagtcttcatcacatgattctgggactgatattacttctgtgactcttggggatacaacagctgtcaaaaccaaaatacttataaagaaagggagaggaaatctggaaaaaaccaacttggacctcggcccaactgccccatccctggagaaggagaaaaccctctgcctttccactccttcatctagcactgttaaacattccacttcctccataggctccatgttggctcaggcagacaagcttccaatgactgacaagagggttgccagcctcctaaaaaaggccaaagctcagctctgcaagattgagaagagtaagagtcttaaacaaaccgaccagcccaaagcacaggtactcttttccaccttgcctattaaaactaacagtttattgagccctttctatgggcaagttttaggctaagtggttcaattacatccagttatgagaaccaagaaaagtatggtggaggcagtggtatttgcagtagtccttcaaggaccagtaggattttgataggtagaaagtggcaggacataacattctaagtagagggaacagtgtgggtagaaatggaaaagtaagaaatatatttgaggaatactggatagctggattggcatctgtggaaaactggtgaactaaggctgaatgaactaaggttgggactatatcacagaggatgctgagttgtttgtaccttataagtttgatgtaattaaaccagggacttaattgtaaaggtacattttaatagtcaaattgttttactatccccgatagaatagaaaaccg

SEQ ID NO: 67585 - DNA, 1064 bp, Homo sapiens
gttttgttttaatttttatgggtacatagtaggtatatatatttatggtatacataagatgttttgatacaggcatgcaatgcatcataatcatatcatgcagagtggggtatccattcccttaagcatttatcctttgtattacaaacaatccaattatactctttcagtcatttttaaatgtacaattaaattattatttactacaatcaccctgttgtgctatcaaatgctaagtcttattcattctttctgattatttttttgtacccattagccatcccctaatatggaattttttatgtggaaatttttattactctactttttctcctcttttttagtcagtttgtggaggtactttctgccatctggcatactttatttaaaatagatcgagatagtagcataaacagaaattttggtgattaagcatcttgtaaactactggcacaaataataggtgtcaatagatatttgctgaatgagtgagtcacatgcaagtgattaatataaagaacagttgggagaaatgctacattatttacttcaggggagataatttctaggagacaagaagtagttctgtgctttggtttggtctgaccttaaacaagaatcttgtctcagtcctgttagtggaaagaagtaaactaattcacagatcacaaaaaagtacatgatagcaagataaagttgcattaaatttaagagttaaagtggattcagtgcaattgtagacttcagattacatttgaattttattaaatctaaatttaggggtgaagtatatatcaaagccaccagatttaattatagcattatagtggtagacaaaggagttgtttgataattttagtctgttttgtgttaagattacttgatggatattaacatcgtaagagagtaggactgatgcgactacaagaaatactgactgatcattttctgtgtggtgctagtcagtgttggattacaagaaatttgagtcccatttcaaaaataatttgatatttgctccttttagatcctaaaggtaggtgaaattgctgatccagggattc

SEQ ID NO: 67586 - DNA, 1021 bp, Homo sapiens
tcccagccagcactggtcatcccgcctcagccacctactacaggaccgccaagaaaagaagttcccaaaaccactcctagtgagcccaagaaaaagcagcctccaccaccagaatcaggtgagtgaggagggcaagaaggaattgctgaaccacaagtactaacaaaaaagcactgatgtctcaaacagcatttgaaagcaggaaatgtatgatttgaagtcttcagttcaagaaaatcagctctctttctaactattatgtttaataataaagaaacagaaacaaaaaaaacagttaaattggaggtattgttttaatttcctgttcgaagcctagagtttaaatagttttttttttttttttctaatggccctttcttcacaggtcagtcagtactaaagtagtcgttgccagcatctgactgcaatttattctgaattttttaggtccagagcagagcaaacagaaaaaagtggctccccgcccaagtatccctgtaaaacaaaaaccaaaagaaaaggtgaggagagatttgtttctctgccatttctcagggatgtattctattttgtagggaaaagccttatccttgacttctatgtagatggcagtggaatttcttaaaattaagaaacttcaagtttaggcttttagctgggcacggtggctcacgctggtaatcccaacacttagtgaggctgaggtgggaggattgcttgaggccagcagttcaagaccagcctgggcaacatagcaagaccctgtctttatttaaacaaaaaaaaaaaaaagaagaagaagaagaagttagccaggcatggtggcagttgcgtgtagtcccaggtactcaggaggctgagatagaaggattgtcttgagcccaggaattcaaggctgtagtgagctatgattgtaccactgcagtccagcctgggtgacaaagcaaaacactgtctccaaaaaaaatttaggcttggcaaggcgcagcggctcacgcctgtgatcccagcactttgggaa

SEQ ID NO: 67587 - DNA, 1117 bp, Homo sapiens
ttagcaattatttgtctgtaaaaatcacccttccctgtattcactatttttatttattatggataaagagatagtgtggtggctcacatctataatcccagcactttggggggccaaggcgggaggatcacttgagggcaggagctggagaccagcctgggcagcacagtgacacacagttgctataaaaaatttaaaaatcaactaggcatggtggcatgcacctgtagtcccagctactcttgagaagctgaggcaggaggatcacgagcccacaaggtctaggctgcagtgagctgtgactgtgccactgtattgcagcctaggcaacaaagcaagacccagtctcttttaaaaaaaaattcaaagattatttgtttatgttggaaacatgttttttagatctattaataaaatttgtcatttgcattattatctgttgcaaatgtgaaggcaaatagggtgtgattttgttctatattcatcttttgtctccttaggaaaaaccacctccggtcaataagcaggagaatgcaggcactttgaacatcctcagcactctctccaatggcaatagttctaagcaaaaaattccagcagatggagtccacaggatcagagtggactttaaggtaaaggtgttcagtgatcataaagtatattgagtgtcaaagactttaaataaagaaaatgctactaccaaaggtgttgaaagaggaaatcagcaccaactgggggaatgaataagaactcccattagcaggtgggtttagcgctgggagagctttggtcagtgttgttaggtcactgtttgtgaactgactgcagaacatacataatgaaacattcctatccatcctgagcagtatcagaggaagtaattccttcacatggaaagtatcaaaccatgatgattccttgagtcagcaaaactgtaagagaaattcaatcccagtgtattttcgcaatatattcaatatgaattgaacaactaggtgagccttttaatagtccgtgtctgagattaaaactttttaaagcagcagttatttttggactcattgaaatgaaatactctgacattgtgatgtcacactaattttatgcttttcatcct

SEQ ID NO: 67588 - DNA, 1737 bp, Homo sapiens
tgggaggctgagggaggaaaatcgcttgaactttggaggcagaggttgcagtgagccactccagcctgtggtgcagtctgtcactccagcctgggtgacacagtgagactccatctcaaaaaaaaaaaaaaaaaaaaactatatgggaggatgtgcattttgttatatgcaaatgctgcaccattttgtctagggacttgggcatccatggactttggtatcctctgggggtcctggaaccaatcccccatggaaaccaaggatgactgtgcttagagtattgctttctttcttgatttgtatttctgtcttccagttaagattttgtatctatattatttctctttttacttagtctgtctttagcatttaattgggtgtaatcagttgcctattttgtgttttaattttgggactatagcagaaaacatgatgttgaataaaattccaaaaataagtcaaatctacctaatatgaatactcatcactgagtgcctttggcaggaaataaatctatctcaatgctttaattgggagtaaataatgtatgaggaaatttaaactcataattgtgtgctgtacttacttgccagtaaatgtgaaatggggtactaagtaataggtgttgggtgaaggtaatatgatgcttatctttttgccattatattttcttacagcagctgctggagtgtaataagtgccgaaacagctatcaccctgagtgcctgggaccaaactaccccaccaaacccacaaagaagaagaaagtctgggtgagttatacacatgatgctcttttatagagaaccaccatgtgactattggacttatgtaacttgtattacaaatatctatgcttgaggatgtcagtatgacaatctttttgcctcattactaggaaatcatctcagcagagaaattaaatctataaatggatgcatttaagatctttttagttaagtaaagatattaaaaacaagaaattcctattgaatttcttttcttcttttctagatctgtaccaagtgtgttcgctgtaagagctgtggatccacaactccaggcaaagggtgggatgcacagtggtctcatgatttctcactgtgtcatgattgcgccaagctctttgctaaaggtacccaaaaaagccagttttgccagctttcggaggttgtacttggtgttctggaggtgaactagactctagtgaaatgaaataaaaagtctcacacattatgtcaaggataccatttagacacatttcctaagttcctgtttagaacttagcaactagaaatgtcttgttagtttatacgggaagtgttaaggggacttttcattataactaaccacaaagaaatcctctaagctagtatttcccaaagtgtgatatatatattatatatttgattatttcagacattattttagttgctacccaaacattttctttcagtagttatattagaaaaaaatattaatataactaatacattaaacctgttatattactgacttaggataatcatataaagttcactgttttaagtaagataagcagatcagtttgaagaagttcattaagtaaaaaataatataggagatctctgtatataaagaaaatttatgaaggttatacagagtactgaatcttaggaagtgctcctctaagctctaatgtaaatgccctagaaataaggaaaaagcttacatgtactgtttctgacttccatattg

SEQ ID NO: 67589 - DNA, 1022 bp, Homo sapiens
ctacatttattagcctctagagcactttaaacctaaaattatggttgtgttgttatttgaaatctctaaatttattttttagtctctagaataagcagcattgtattatttgtgctcacttatcttgaatatatgcctttaaagtatttatttgctgtcctttgtgtgttccataacctgattctcaataaccaaattcaggattagtgttaattaataatgccactttttgagatcaatatgtgtcatatccatgaggacattaaaatcttaatgtggttcccaacatatggctttatagtaagttcagtggaatagtttcctcttcttcctctctctcattcttcagaggacctcatcatggtaggtttttgttttcttagatgagatgtatgagattctatctaatctgccagaaagtgtggcctacacttgtgtgaactgtactgagcggcaccctgcagagtggcgactggcccttgaaaaagagctgcagatttctctgaagcaagttctgacagctttgttgaattctcggactaccagccatttgctacgctaccggcaggtaggccaagtctcatttttttctgagagcttgttcttaggtagtctttacctagtgtttttcttttgttttacttcattctcctcacttaatttttagttacttgttttggctataaccattaggaaaatatttagagccaagaataggaccttctttagcgtaagaaataggaaggagctgtatcttcaaaggtcttgctgttacaatgagaaatttggactttatactctgaaggtgatagggagccagtgaagcacttcacccaagacagtaacctgatcagagttgcttcttagaaaaaatattgttctgactgagtggagaggaaggactggagacacctgagcctagaggcaggattcgtagttaggggacagttatagtaatcaactggaaaaacactttctgtttatgtaagttgtgaactttacacatttataaagtagtcatt

SEQ ID NO: 67590 - DNA, 1085 bp, Homo sapiens
tttttggcggagattgggtttcaccatgttggctaggctggtcatgaactcctgaccttaagtgatccacccacatcagcctcccaaagtgctgggattacaggcgtgagccactgtttatttattttaatccaaaataaaaactgtggacctgcttggataatttatcatgatacagccaatttgtttgcattcttacctcattagcctggcatctcttaattgccacaggttaatcgtgaattgaatctcaaaggtctcagccaaagagtattataccacattaaaatagggtgtgagttttctgttggatctctgtgctggatgattaaggagggaagaggaaatggttttcagagcacactgttttaagaataattaacattttgtttttgtatacagttggagttcagtgatgatattgtgaagatcattcaagcagccattaattcagatggaggacagccagaaattaaaaaagccaacagcatggtcaagtccttcttcattcgggtgaatgatattactaattcatgtttttaatgcttacctataagtaattaccctgtgaatacaatgaacttgttctcttctactttttgctttgtggtgtgtataaaacatctttggtttaatttgatcccctgattctttgagaggaacttggtgaggttgccagagtggatggatctttctcttggtggcctgaaattatcctcgtattaacagagaagctggtttgaagatttttcatgtggtatctaaatgagtgtttacatatttacattttgtttgtgttttcttttagcaaatggaacgtgtttttccatggttcagtgtcaaaaagtccaggttttgggagccaaataaagtatcaagcaagtaagtgaatttagcataacttttttttctcctcatcggctagaaatctgagagttctcatatttctagattgcagttttccaaaaggttttaatactagaaatgaattggttgaaatgccttttcggtgtggttttgaggactacatttaatgtttgttataagcaattgcctttttgttctttacttttatatttgtttta

SEQ ID NO: 67591 - DNA, 2382 bp, Homo sapiens
tgtttgaagatgatgacggatcactaaagaatgtgcatatggctgtgatcaggggcaagcagctggtaagaccttatgggtaaattttatgaaagagattccctctcagtttccagatattcttcctgtgggtgaatatggcctccctgatatttttcacagtgccatcagggtagttagccaacaagtattgatatacataattcaacagataaaatgataaattttatctgttttcaatttatcaatagataaaatgaattgtaggaactgtagaatgggatgagtctatagaggagacggtaaacgtcttaaaacatatgaaagtctgaataggactctgttctttttggatttttagagatgtgaattctgccaaaagccaggagccaccgtgggttgctgtctcacatcctgcaccagcaactatcacttcatgtgttcccgagccaagaactgtgtctttctggatgataaaaaagtatattgccaacgacatcgggatttgatcaaaggcgaagtgagagagctttagttgctttaaaaaaaaaaaaaaagacttttttagagcagttttaggttcacagcaaaattgactggaaggtacagagatttcccatatgccccctgcacccacatatgcacagcctcccccatgatcagcatcccccaccagagtggtgcatttgttacagtggataaacctacactggacacatggttatcaccctgactcctgtagtttacatcagcattcactcttggtgttgtacattctgtgggtttggacaaatgtataatgatgtatatccaccattataccatcatatggagtattttcgctgccttaaacatcctctgtgctctgcctattcatccctgcctctccccaaccctgggcaaccactgatgtttttactatctccatagtcttgccatttgcagagtttcacatagttggaatcatatagtacatagccttttcagactggcttcttctgcatagcatttaagtttccttcaagtcttttcatggcttatttagttgctttttgaattatttcgaaatgcaaaagaaaaacaaaaatacagcaagatgataaactgttttgcttttctacttggtgttcctagaggcaccacctcttttgggaaatacagaagtgtcctgctaagtgaaacagaaggatgcttttgagatatgctatgtgccttccactctgagacagtcaggatcataagtataatgtgcaaagggacagcctattaacagctaccatgggttttatttaaggtggttcctgagaatggatttgaagttttcagaagagtgtttgtggactttgaaggaatcagcttgagaaggaagtttctcaatggcttggaaccagaaaatatccacatgatgattggtatgacctagccttggttattggggaaggctgtatatatcattggggaaatttctggtcctcagttataaaatgaccctcagccaggtgtggtgtctcacgcctgtaatcccagcactttgggaggctgaggcgggcagatcactggaggttcaggagttggagaacagcctggccaatgtggtgaaaccctgtctctactaaaaaaaattagctgggagtggtggtacatccctataatcccagctacttgggaggctgaggcacaggaatcacttgaaccccggaggcagaggctgcagtgagctgagattgcgccactgcattccagcctgggcgacagagtgagactctctcaaaaaaataaaatgacgctcataatcttctctaatcggttcttctttccttggtcagggtctatgacaatcgactgcttaggaattctaaatgatctctccgactgtgaagataagctctttcctattggatatcagtaagtagcactataaagagaagagagcagccccacaacctgaacacactgaagccatgtgcaggtcattaaatgtagaggcatacctgttagctactttaaactgctactaaaaattaatcacttattttgctagttctcggattcgtctgcttgtagattgggactatgttagcggaatccagttatagaaggaaagtattattgacataatttcagaattacttaaaaataaaaccttagtagaaaacacaaggtcagtctcttaagattcctccaaattccattcatctccatgcagaagtgcagattgtttttatggataaaacagctcatgccctgttcccaactttacagtttataagtccttctaaaactataaatccacacaataatgatcaaatttttcaataagaatttataatcttacctatatgaagtaagttgttaaaatgtctaacaagctaacaatataag

SEQ ID NO: 67592 - DNA, 1156 bp, Homo sapiens
acttgaggctgggcacagtggctcacgcctgtaatcgcagcactttgggaggctgaggcaggtgaatcacttgaggccaggagttcaagaacagcctggccaacatggtgaaaccccatctctactaaaaatacaaaaaaattagccaggcatggtggcaggcacctgtaatcccagtaatcccagccactcaggaggcagaggcacaagaatcacttgaaccagggaggcagatgttgcagtcagccaagatcacgccactgccctccagcctgggtgacagagtgagactgtgtctcaaagaaaaaaaaaaaaagatgtgatggaacttgaattcgattcagggagtactatgattgaaagctgggggaaaagtcatttacttgggaagtctcatttgcttctagttttacatttacctgatagctgactttttattggttaatttgtttgatattttaattgggcctttttagttaagagtttttatttcctgccacagaaagttcatcaaaagagagtcaaaacacagctgaaattataagtcctccatcaccagaccgacctcctcattcacaaacctctggctcctgttattatcatgtcatctcaaaggtccccaggattcgaacacccagttattctccaacacagagatcccctggctgtcgaccgttgccttctgcaggtaaaagactttattgacctacttgacctaagaagatcagcccaaagactaatttgtaattctttcaggcaactttatcttggtgacttttactgattgaaaatgtagattccgggtgggtgaggtggctcatgcctgtaatcctagcactttgggaggccagggcaggtggatcacctgaggtcaggagttcaagaccagcctggccaacatggtgaaaccctatctctactaaaaattcaaaaattagccaggtgtggcggtgcatgcctgtaatcccagctacccaggaggctaaggcaggagaatcgctggaacccaggaggtggaggttgcagtaagccgagatcgcaccactgcactccagcttgggtgacagagtgagacactgtctcaaaaaagtaataataaataaatagaaaatgtagatttccagttacctataaatatatatatatatagtcaaat

SEQ ID NO: 67593 - DNA, 4634 bp, Homo sapiens
acccatgcaagtagaaggatctgccaaggaattacaggcaccacggaaacgcacagtcaaagtgacactgacacctctaaaaatggaaaatgagagtcaatccaaaaatgccctgaaagaaagtagtcctgcttcccctttgcaaatagagtcaacatctcccacagaaccaatttcagcctctgaaaatccaggagatggtccagtggcccaaccaagccccaataatacctcatgccaggattctcaaagtaacaactatcagaatcttccagtacaggacagaaacctaatgcttccagatggccccaaacctcaggaggatggctcttttaaaaggaggtatccccgtcgcagtgcccgtgcacgttctaacatgttttttgggcttaccccactctatggagtaagatcctatggtgaagaagacattccattctacagcagctcaactgggaagaagcgaggcaagagatcagctgaaggacaggtggatggggccgatgacttaagcacttcagatgaagacgacttatactattacaacttcactagaacagtgatttcttcaggtggagaggaacgactggcatcccataatttatttcgggaggaggaacagtgtgatcttccaaaaatctcacagttggatggtgttgatgatgggacagagagtgatactagtgtcacagccacaacaaggaaaagcagccagattccaaaaagaaatggtaaagaaaatggaacagagaacttaaagattgatagacctgaagatgctggggagaaagaacatgtcactaagagttctgttggccacaaaaatgagccaaagatggataactgccattctgtaagcagagttaaaacacagggacaagattccttggaagctcagctcagctcattggagtcaagccgcagagtccacacaagtaccccctccgacaaaaatttactggacacctataatactgagctcctgaaatcagattcagacaataacaacagtgatgactgtgggaatatcctgccttcagacattatggactttgtactaaagaatactccatccatgcaggctttgggtgagagcccagagtcatcttcatcagaactcctgaatcttggtgaaggattgggtcttgacagtaatcgtgaaaaagacatgggtctttttgaagtattttctcagcagctgcctacaacagaacctgtggatagtagtgtctcttcctctatctcagcagaggaacagtttgagttgcctctagagctaccatctgatctgtctgtcttgaccacccggagtcccactgtccccagccagaatcccagtagactagctgttatctcagactcaggggagaagagagtaaccatcacagaaaaatctgtagcctcctctgaaagtgacccagcactgctgagcccaggagtagatccaactcctgaaggccacatgactcctgatcattttatccaaggacacatggatgcagaccacatctctagccctccttgtggttcagtagagcaaggtcatggcaacaatcaggatttaactaggaacagtagcacccctggccttcaggtacctgtttccccaactgttcccatccagaaccagaagtatgtgcccaattctactgatagtcctggcccgtctcagatttccaatgcagctgtccagaccactccaccccacctgaagccagccactgagaaactcatagttgttaaccagaacatgcagccactttatgttctccaaactcttccaaatggagtgacccaaaaaatccaattgacctcttctgttagttctacacccagtgtgatggagacaaatacttcagtattgggacccatgggaggtggtctcacccttaccacaggactaaatccaagcttgccaacttctcaatctttgttcccttctgctagcaaaggattgctacccatgtctcatcaccagcacttacattccttccctgcagctactcaaagtagtttcccaccaaacatcagcaatcctccttcaggcctgcttattggggttcagcctcctccggatccccaacttttggtttcagaatccagccagaggacagacctcagtaccacagtagccactccatcctctggactcaagaaaagacccatatctcgtctacagacccgaaagaataaaaaacttgctccctctagtaccccttcaaacattgccccttctgatgtggtttctaatatgacattgattaacttcacaccctcccagcttcctaatcatccaagtctgttagatttggggtcacttaatacttcatctcaccgaactgtccccaacatcataaaaagatctaaatctagcatcatgtattttgaaccggcacccctgttaccacagagtgtgggaggaactgctgccacagcggcaggcacatcaacaataagccaggatactagccacctcacatcagggtctgtgtctggcttggcatccagttcctctgtcttgaatgttgtatccatgcaaactaccacaacccctacaagtagtgcgtcagttccaggacacgtcaccttaaccaacccaaggttgcttggtaccccagatattggctcaataagcaatcttttaatcaaagctagccagcagagcctggggattcaggaccagcctgtggctttaccgccaagttcaggaatgtttccacaactggggacatcacagaccccctctactgctgcaataacagcggcatctagcatctgtgtgctcccctccactcagactacgggcataacagccgcttcaccttctggggaagcagacgaacactatcagcttcagcatgtgaaccagctccttgccagcaaaactgggattcattcttcccagcgtgatcttgattctgcttcagggccccaggtatccaactttacccagacggtagacgctcctaatagcatgggactggagcagaacaaggctttatcctcagctgtgcaagccagccccacctctcctgggggttctccatcctctccatcttctggacagcggtcagcaagcccttcagtgccgggtcccactaaacccaaaccaaaaaccaaacggtttcagctgcctctagacaaagggaatggcaagaagcacaaagtttcccatttgcggaccagttcttctgaagcacacattccagaccaagaaacgacatccctgacctcaggcacagggtgagagatccaaatactagctaggctgggtctgtgggatttcatgttgtaaattaggggctgttgatgtggtagtccgggagagacactcttctgttcaagttgcattacctgggagttttccgggttttgactttttttctctctgagtggtgatttatgtaacaaaatgtagttccatccatgggcagtttgtctcttgaatagaaccacatctaatcactttttgctctgatttcaaacagtgttgctgtttgttcctgtttcttttttactgaggcttatactagaatgattattcttatcttgagggcaaagctccctcttgtagatccacagagtcctttttttaaaactttatcattgaaagccaagcacagtggctcatgtctgtaatcccagcactttggaaggctgaggcagaaggattgctggagctcaggagttcaagatcagtctgtgcaacatagtaagaccctgtctctacaaaaaattttttaaaacagctgggtgtggtgttgcacacctgtagccccagctattcaggaggctgaggtgggaggattgcttgagcccaagagttagaggctaaatgatccatggtcatgtcactgcactccagcctaggtggagtgcacctatgtagccaccactcggatcaagatacagaacatttctagcaacccacaagggtgtcttctcttataaggtcagtgccccctcaaagtaaccattattctaacctttatgaccttaggtcagttttgctggcttatagactttatcagatcctgatagagccatttctttcgactcacctccacattcagtacatatttactggtggtttgtcttgaaaagatacaaatgcctgtgttccaggactccaggagcagaggctgagcagcaggatacagctagcgtggagcagtcctcccagaaggagtgtgggcaacctgcagggtaagctgaagaattcgtcttttaagactaagctctcagttttgtccacctcatttaaaaaatagttcttccaggccgggcgcagtggctcacgcctgtaatcctagtagtctgggaggccgaggcaggtggatcacgaggttagatcgagaccatcctggctaacatggtgaaaccccgtctctactaaaaatacaaaaagaattagccgggcgtgatggcgggcgcctgtagtcccagccactcaggaggctgaggcaggagaagggcgtgaacccaggaggcggagcttgcagtgagctgagatcgcgccactgcactccagcctgggcgatagagcaagactccgtttccaaaaaaaaggtaaaaaatagttcttcctgattcacattgatttttgttttcttgccaaagttttttaaatgaga

SEQ ID NO: 67594 - DNA, 3151 bp, Homo sapiens
tttgattaggaaacaaatggtcacttcaagattagagagttctgggtataactctattgaggacagttgcttattgaaaaactatcagatcgtcatactagaaattctaccacagagagcataacttcatgtaaaaaaaaatctggttttagtcaccactttctagcaatgacctaggcaagctctttgagtcttgggtttgttatctataaatgggaataataaaccaactgtggaatgttgttaggcttagagatcatttatgtaaagtactctacatgtagtcagtgctcagtgagcatttgttactgcaaccactatctattttctccctattagaacctaaaacagtggaagaagaggaaagtaatttcagctccccactgatgctttggcttcagcaagaacaaaagcggaaggaaagcattactgagaaaaaacccaagaaaggacttgtttttgaaatttccagtgatgatggctttcagatctgtgcagaaagtattgaaggtgagtggattaaatcaggttgacccatcagcagaagccctgtttcagctagagcttcattttctgagtattagcaccatttaggtggctgttttatgctagatggtagggggatacctggaggcatcatacattttccttgtccttgagaagtttgtcttattggagaaatagccatattttacatgaaaagttaatgatacagattatgttttcaacattgcacacaccttagcggagcccctgagaactctgcttccccctccagccttgttttttgccattccctcatgcgccttctgtgcccttctctctcccttgtgtgccttcacacgtgctttctcctctgcctggagttctctccctgccctcaatcacctggtgagctccagctcacccttcaagatccagctcagacggtcttccctgaccttctgaggtagctaagccctccctctccctccttttgaatcttacatgttcttctctcatagcttacattttgttttgtccgtgtttgtttacttttatcactcactcaacagcgagctctccataagggctggaattttattttcttattcatctttgtatcgcaagcatctaagtgttcatccacctttgaaggactagtaaatgttctctaggctgtaagtactagaagagttcaaagaagagaaaggtcaccatgggtgagttagggttatcaaaaacccatgaagataaatagaagattctattaaaggagaaaatggaatttgggttaggcaaagaagaatgcagggctctctaggaagaagaagggaggtaagcaaagttagaaaggcaggactgcatttggtgggtttagagtagtgtcaggtgagatggcattgaaatccatgtgaggtaatagtgaaagagaaaattgggaaggtggatagggcacaggttttagagggctttcagtgccaaaccttgaggactttgaaaacttgagggagtgaatagaagcagaatttcaggaaacataatgtgataagctctctatatgagacagattgagcatgaactggagatgctcaaagacgagagtttactaatgagagtattgctagagtagagatgtctggtaataaagcccacattcggtgggaaaagaaaggaaaggaaagaagaatgagtacacttggtggaatatggagaggggagagtcaaagatgaccctaaagattcaggcctgggtgactaaaacaaaagataatgcatggagaacaaaggagataagtaaggagtatgggggttccacagaagacattgatgtggagtgatgtaagaaatccatgtggaaatgcctagcagacaggaaaagatcacagaatcttgggttagagctggaaggaactgtaaggattttctagttctgcctcttaactttaaggaacagagaggttatgatcttcccacagtcctgcttaaatcattattactagtgctgttttgattaggggtacagggaacataaaaataccaaacattcaggtgtgagacccagacttccatcaagggatgtgaatgcgttggggattcagagttcatttcagaaggtctgactttccttagtgcttctgtgtcctccaacagaaagaagccctgctggggagtgtaccttttcggctcctttcacatgtaatgaactgacttaaactctaagaaaaataacaaaacactgctctaggagggcaagtgttcacactgtagggattctaagcagtgcttgtgcacatcattggtattaagaagggtttacgtgcatattttctggcttacgggttttctttatttcctttcagatgcctggaagtcattgacagataaagtccaggaagctcgatcaaatgcccgcctaaagcagctctcatttgcaggtaatggctggaggtgttattccactcctgtctcagaatattatggtaaattgttcgcctaaggcagagttgattctgtgaaaaaaaaatcagttaaaaatttttttcacagctttattgagatttaattcatataccatacagttcacccatctaaagcatacaattcagtggtttttaatatattcagagttgtataaccaccactactctataattctagaacattctcatcatccctaaaagaaaccccctattcattagcagtcattcctcagcccctggccaccacaaatctactttctgtctctatgtatttgattattctggacatttcatataaatgaaatcagacaatatgtagccttttgtgaccgtcttctttcactcaacagaatactttccaggttcttcccttctgttacatcttcccttccacatcagtacttcattcctttttattgccaaatattccattgtgtagatataccatatgttgcttatccattcattagtcagtggacatttgggttttttctattttctgctacgaataatgttgccacaaatattcatgttcaagttattgtgtagacatgtttttattttttttcagtatatacctcagagtggaatggctgggtcatatggtaactctttaactttttgaagtactgccaggttttttttccaaagtggctataccattttacatttccacctgcaatgcacga

SEQ ID NO: 67595 - DNA, 2071 bp, Homo sapiens
aatagtccatagtttggtggcatgcttttttcacttagccgtctatcacaaacattttccatattgatagatctgtatcagcatcattttaatggctatctgatgctaatttcgagctaatatgtactataattcaccctggagcagcctctggcagagtgactatagcataggcatttctgtaggaccatgctgtttcctgttgactgcgctcctcacttccctggtgcttctgattcttctaggtgttaacggtttgaggatgctggggattctccatgatgcagttgtgttcctcattgagcagctgtctggtgccaagcactgtcgaaattacaaattccgtttccacaagccagaggaggccaatgaaccccccttgaaccctcacggctcagccagggctgaagtccacctcaggcaagttcccttcttttctgtcagcagttttgggtctcgattttcttatctcatgacactgtcatcttcccacataccctttgagatttccagttttaatgccatcatcctttactgctttattaaagcatttctctaaatatgttttaatcttttggccccaggaagtcagcatttgacatgtttaacttcctggcttctaaacatcgtcagcctcctgaatacaaccccaatgatgaagaagaggaggaggtacagctgaagtcagctcggtaagtcttgagtggggagcagtcattagaaactgctttccctctcctccagctggtcagggcactacgtaggaatttgtttgcatcagaatttcctggataagatttaaaaggactgaaaaccatttgtgttgaagtagcagtaggtgcctggtaaggagtgaggaatataaggtacagaggagaaattcaaagaactgtaagatgcctgttttctttaatgatagtatactctgtcagctttggttgtaccaccatagttgtcatggtcagaaagtactatatatactaaaaatgggactcattggccaggcacagtggctcatgcctgtaattccagcactttggaagtccgaggcggacagatcatgaggtcaggagttcgagaccagcctgaccaacatagtgaaaccctatctctactaaaaatacaaaaattagcccggcgtggtggcgcgcgcctgtagtcccacctactcagcaggctgaggcaagagaatcgcttgaacccaggaggcggaggttacagtgagccgagatcgcaccactggactccagcctgggcgacagagcgaaactccatctcaaaaaaaaaaggggggcgctcattttataaggcactcgttcagtttggcattaaacaaagagtgtactaattgtctctaggaaccttcgattcaagactcaaaacattatttcctgaaaaaaattcgttaatagtatgtcttatctcttaggagggcaactagcatggatctgccaatgcccatgcgcttccggcacttaaaaaagacttctaaggaggcagttggtgtctacaggtatgactaaaattctagaaagaattacagaaaacgaatgcagtttttcaaaatcaaagcagaccaaatgctggagtgaccttcctcactcagtaagtgaggattttacggacactatttattgaccctcatatcctgggatcctgcacctccttgtgttgaacaaggactttaacataataagcattaaaatattactgcttccagcgggtcacagaatggaaataactttcatctttggccatgtgttagatggccaaatcaagtgggtccaaatttttattttctcaagtatatgtccctcctggggaactaacagaccaggagaacttattcatgtattcacgcacttaaccttacttgcaaaatttgtgtctgacctcttttccatctttgtcctaggtctcccatccatggccggggtcttttctgtaagagaaacattgatgcaggtgagatggtgattgagtatgccggcaacgtcatccgctccatccagactgacaagcgggaaaagtattacgacagcaaggtaagtctcccacttgcactcacaca

SEQ ID NO: 67596 - DNA, 2617 bp, Homo sapiens
tcttaaaaaaataaactctgaaatttgtgaggggcccagtaaaaatacagaatccactctgaggattagtacagaaagttgctcttagaaggtttgtctgagtggctcctagtatcagaagcaaatagctatacaagttttaggtttctctctcctgcagagacattagaaacctctagactagtggcctgtaatctaggaaatcctcgtggaagcatcttgaaagatagtactgggagaaatctggaaattttactagaagaaactttctcagccgctataggtaacatcaagagaagattgggacatgttcttaaagctgagtttataagaaatgacaagttcttctcccttcttctgcatgtgcagggcattggttgctatatgttccgaattgatgactcagaggtagtggatgccaccatgcatggaaatgctgcacgcttcatcaatcactcgtgtgagcctaactgctattctcgggtcatcaatattgatgggcagaagcacattgtcatctttgccatgcgtaagatctaccgaggagaggaactcacttacgactataagttccccattgaggatgccagcaacaagctgccctgcaactgtggcgccaagaaatgccggaagttcctaaactaaagctgctcttctcccccagtgttggagtgcaaggaggcggggccatccaaagcaacgctgaaggccttttccagcagctgggagctcccggattgcgtggcacagctgaggggcctctgtgatggctgagctctcttatgtcctatactcacatcagacatgtgatcatagtcccagagacagagttgaggtctcgaagaaaagatccatgatcggctttctcctggggcccctccaattgtttactgttagaaagtgggaatggggtccctagcagacttgcctggaaggagcctattatagagggttggttatgttgggagattgggcctgaatttctccacagaaataagttgccatcctcaggttggccctttcccaagcactgtaagtgagtgggtcaggcaaagccccaaatggagggttggttagattcctgacagtttgccagccaggccccacctacagcgtctgtcgaacaaacagaggtctggtggttttccctactatcctcccactcgagagttcacttctggttgggagacaggattcctagcacctccggtgtcaaaaggctgtcatggggttgtgccaattaattaccaaacattgagcctgcaggctttgagtgggagtgttgcccccaggagccttatctcagccaattacctttcttgacagtaggagcggcttccctctcccattccctcttcactcccttttcttcctttcccctgtcttcatgccactgctttcccatgcttctttcgggttgtaggggagactgactgcctgctcaaggacactccctgctgggcataggatgtgcctgcaaaaagttccctgagcctgtaagcactccaggtggggaagtggacaggagccattggtcataaccagacagaatttggaaacattttcataaagctccatggagagttttaaagaaacatatgtagcatgattttgtaggagaggaaaaagattatttaaataggatttaaatcatgcaacaacgagagtatcacagccaggatgacccttgggtcccattcctaagacatggttactttattttccccttgttaagacataggaagacttaatttttaaacggtcagtgtccagttgaaggcagaacactaatcagatttcaaggcccacaacttggggactagaccaccttatgttgagggaactctgccacctgcgtgcaacccacagctaaagtaaattcaatgacactactgccctgattactccttaggatgtggtcaaaacagcatcaaatgtttcttctcttcctttccccaagacagagtcctgaacctgttaaattaagtcattggattttactctgttctgtttacagtttactatttaaggttttataaatgtaaatatattttgtatatttttctatgagaagcacttcatagggagaagcacttatgacaaggctattttttaaaccgcggtattatcctaatttaaaagaagatcggtttttaataattttttattttcataggatgaagttagagaaaatattcagctgtacacacaaagtctggtttttcctgcccaacttccccctggaaggtgtactttttgttgtttaatgtgtagcttgtttgtgccctgttgacataaatgtttcctgggtttgctctttgacaataaatggagaaggaaggtcacccaactccattgggccactcccctccttcccctattgaagctcctcaaaaggctacagtaatatcttgatacaacagattctcttctttcccgcctctctcctttccggcgcaacttccagagtggtgggagacggcaatctttacatttccctcatctttcttacttcagagttagcaaacaacaagttgaatggcaacttgacatttttgcatcaccatctgcctcataggccactctttcctttccctctgcccaccaagtcctcata

SEQ ID NO: 67597 - DNA, 2885 bp, Homo sapiens
tgattaatgcactgatgggtcctgaattcaccttgagaaagacccaaaggccagtcagggggtggggggaactcagctaaatagacctagttactgccctgctaggccatgctgtactgtgagcccctcctcactctctaccaaccctaaaccctgaggacaggggaggaacccacagcttccttctcctgccagctgcagatggtttgccttgcctttccaccccctaattgtcaaccacaaaaatgagaaattcctcttctagctcagccttgagtccattgccaaattttcagcacacctgccagcaacttgggggaataagcgaaggtttccctacaagagggaaagaaggcaaaaacggcacagctatctccaaacacatctgagttcatttcaaaagtgaccaagggaatctccgcacaaaagtgcagattgaggaattgtgatgggtcattcccaagaatcccccaaggggcatcccaaatccctgaggagtaacagctgcaaacctggtcagttctcagtgagagccagctcacttatagctttgctgctagaacctgttgtggctgcatttcctggtggccagtgacaactgtgtaaccagaatagctgcatggcgctgaccctttggccggaacttggtctcttggctccctccttggccacccaccacctctcgcacagcccctctgtttttacaccaataacaagaattaagggggaagccctggcagctatacgttttcaaccagactcctttgccgggacccagcccgccaccctgctcgcctccgtcaaacccccggccaatgcagtgagcaccatgtagctcccttgatttaaaaaaaataaaaaataaaaaaaaaaggaaaaaaaaatacaacacacacacaaaaataaaaaaaatattctaatgaatgtatctttctaaaggactgacgttcaatcaaatatctgaaaatactaaaggtcaaaaccttgtcagatgttaacttctaagttcggtttgggattttttttttttaatagaaatcaagttgtttttgtttttaaggaaaagcgggtcattgcaaagggctgggtgtaattttatgtttcatttccttcattttaaagcaatacaaggttatggagcagatggttttgtgccgaatcatgaatactagtcaagtcacacactctggaaacttgcaactttttgtttgttttggttttcaaataaatataaatatgatatatataggaactaatatagtaatgcaccatgtaacaaagcctagttcagtccatggcttttaattctcttaacactatagataaggattgtgttacagttgctagtagcggcaggaagatgtcaggctcactttcctctgattcccgaaatggggggaacctctaaccataaaggaatggtagaacagtccattcctcggatcagagaaaaatgcagacatggtgtcacctggatttttttctgcccatgaatgttgccagtcagtacctgtcctccttgtttctctatttttggttatgaatgttggggttaccacctgcatttaggggaaaattgtgttctgtgctttcctggtatcttgttccgaggtactctagttctgtctttcaaccaagaaaatagaattgtggtgtttcttttattgaacttttaacagtctctttagtaaatacaggtagttgaataattgtttcaagagctcaacagatgacaagcttcttttctagaaataagacattttttgacaactttatcatgtataacagatctgttttttttccttgtgttcttccaagcttctggttagagaaaaagagaaaaaaaaaaaaggaaaatgtgtctaaagtccatcagtgttaactccctgtgacagggatgaaggaaaatactttaatagttcaaaaaataataatgctgaaagctctctacgaaagactgaatgtaaaagtaaaaagtgtacatagttgtaaaaaaaaggagtttttaaacatgtttattttctatgcacttttttttatttaagtgatagtttaattaataaacatgtcaagtttattgctgcacatggttaagcttccttttggctttggttggagagggtggagaaaagcgggaggggcatggcctgtgacctggtcacaaagtaccttccacagtcctttactttaaggtggcatcactaaattattccctgtagcccaccttcaggtccactccacactggctctcttgactattttcttcctttattcatcagtgatgtatgttcaggacctaattaattgtggatatgaggcagggtcaagaggacaaaggaacagggcctttaccttctacatagctcccctgtttcatccaaggaggttaagtattgatttttatcggttttctcaactgtgaatataataaactgaaagcatttcagggagaagctggagaacaccttctctagctgcactccaccttaaggctgaagctggatttgtttactgtttctcctgggggcaggggcagttgagaaataaccaagtagtctgccaagccagggtcaaccctccaggccacaggttgagcaaatgctacagccatggacagggagacactcctcacgaaggggtggtcctcatcctttcagatcaacttcctgctggaggctccaccctcaccacgtccctccctcttctctcatctggagtcaccttttgggattttggagttgagcaccatggggactccaaatgatcaggcagtgctgcaggccatcttcaaccctgacaccccatttggagacattgttggattggacctcggagaggaagcagaaaaggaagaacgagaagaaggtgggcatttgatctggagt

SEQ ID NO: 67598 - DNA, 1036 bp, Homo sapiens
gcagggccctccctgtcccccacacaggcacgcccccatgcctactgtacaaggtgctgtggagtactggggtggggtatacagcaggccatgccacacttggatgctggatgacatctgaacacccctggccaaagagctccctctggaagggcccagtcatcacatgcagggcccaccctgagtcagcatgaggggcttacgtccaactggtagccttgccaaagatacctgtgcccctgcgggttacagcccagtgaaatgcatcacgtgcatgacatggagggcaccccagccaggagggcaagcaaaagtggcagtggcataacttcttcacgttggtgacctagctaggtagaggatgccttggaggaacgggagggtgtccagaggccaagagaatactcctgtctcgccctcggctcagagccagatctcatcactgctcacgctggacactcgatagatatagcccagcactgggaggcggatgaaacctgcgggatcaaagaagcccgcggggactcagtaacgcttgttccttggaatttggagagctctctctgcctcctgggcacttggaggcctctggcataagcacagggctggggggcagaggaggagggtggcaggccccttccccagtaccttggctggtgaggaggccgccgggctccgggtccagaagctctggccggctgttgttctgagccatctgccggtctgctggtttcactgctggttgacaaagagggcagtgttcaggacgaggagtgtgcctgatgaggcctcgcccctcccaagcaccaagttctttttctcagaagcacttctggagattaagcaggggcaaagagcagggccctagatatacctctggaatctggagtgaggtcattgagctgaaggttggacgggagggacatgttctcccgtggcaggcgcacgttgttgagttttaggttgttggagtcactacagggaggacaaagttcgggatggatatgagtcccggcacaggcactcatggctgcct

SEQ ID NO: 67599 - DNA, 2002 bp, Homo sapiens
gctgaaattaaggaactcttccagtacatcagtaggtgagtactaggacctcccaccataccccactatccctaccttgccccaaacctttcctatctctagtctgaaacagggccattccccttagatttttttttagcctgaatagtaaagtaactttttctgactgtctccaccttcccttggcaatatctcctaggtacacacctcagttgattgacctggaccacaaactgaagcctttcattcctgattttatcccagctgtcggggatattgatgcattcttaaaggtatagtcagtacatcctgaaaatgactccttaagtgtttcttctgatgcccctgttactcttaacagtttccctaatttctttgactagcattggctagtcatgttcatttcattggagttcttaaccttgctctcaactccaaattacactcattgctcttaagtaatacttaatatctcattacacattaacagtttgtcatgtatttgcttcctaattatctatgacaacaggttcatatttaagctgctatggataatattttttttctggatagtattgcgtacagcatgataagcatgcttttaatactagtaataatgatgaaccagaagtgttcttcctcttaacttattggaaacattttcctttctgctttcttacctttttcttaaccaggtcccacgtcctgatggaaagcctgacaaccttggcctattggtattggatgaaccttctacaaagcagtcagaccctacggtgctctcactctggttaacagagaattctaagcagcacaacatcacagtaagatactagcttagtataggccccagctggagagggccaagagtggaggaggccttgctggcactcatacagttgacttactgcctgtcaaaagagatgggcctgggtgcggtggctcacgcctgtaatcccagcactttgggaggccgaggcgggtggatcatgaggtcaggagatcgagaccatcctggcttaacatggtgaaaccccgtctctactaaaaatacaaaaaaaaaaattagcagggtgtagtggcgggcgcctgtagtcccagctactcaggaggctgagacaggagaatggtgtgaacccgggaggcggagcttgcagtgagtcgagatcatgccactgcactccagcctgggcaacagagctagactccatctcaaaaaaaaaaaaaaaagagatggttattgctttgggccagctctatttttaaatgacagctttatttatatataacttaaataccagcaagtttagccttttaaattgtacaacttattagttttaatataatcacagttttgtagccatcaccactacctaatttagaatatttcatcacctcaaaaagaaacttcatacccattactattcactcctcattctcccacttcctcctagaccctggtaattatttcattcctttgttatggctgaataatatccactgtatggatttaccagatttgctttattcattctctagttctgtccactcttattaataatggtgctttgaatatttgtatacaagtttttgtgtaggtatatattgttattctgttgggtatatacataggagtagaattgctgggccatatggaaactctatgtttagccatttgaagaactaccaaactgttttccaaagtggctgtaccattttacattcccaccagcaatgaatgagagttccagtttctctacatcctcatcaatactttttgtttgtatttttcattctaaccatcctagtaggtgtgaaatggtatttctttttttttttttttgagacagttttactcttgttgcccaggctggagtgcaatggcgtgatcttggctcaccacaacctccacctcccgggttcaagcgattttcctgcctcagcctcccgagtagctgggattacaggcatgcaccaccacgcccagctgattttgtatttt

SEQ ID NO: 67600 - DNA, 1040 bp, Homo sapiens
aatatactttatgtataataaatttgttattcttagagcaaaatgtgactaaaagcagtttttggtgtcctgtaacgtgtcacaattttgtgtgccaatagctgctttaccataaaaacaaattaattttaaacaactggaatcaaacgtgttaacctcagtataagccatacggtatatagaaaccaagttttgaaaacctacttttaaagggggccaattggtcatccttcaggtcctaagggagggcatgccacaggctccaggccacagaggcaaagacatggaccctgttccacctgcccctgcaagtctcaagtgccaccagaccccttctcatgtacttgagagggtgggatggtacagagagagccagaagcacagaaaggtaggttataatgtcaagaacaaaagagctgtttatcttgagagagaatgtgtagtcattttatgtaatttatggggtaagggaagggaaatacagataggtcagatactccatgaagagaaatatcactgaacaaaaatggaaagtccatagtccctgggactgctggtttgatgggcacaaggttgattttgaactttcttcttttgatagtttcaagcagcttatgctgggcagtcttgcaaattaagtattagatttcctctctatggtctttgtgagtattaagacccctaaaatttctattcccacttcatattccctgattttcttccaaaataactagagttgccatcctcttctttgaaagtccatagcttttcgggccgaagctgtctaaagtgtacacagggccctgaagatctaagtaatatgtacaatagataaaattagaatttataccccagcctcaagtagagaaatggaatagggttctagaaagtggagtccccatttgtagctgagcaggggcagaagaaggctctcaagccccttctgggaagtgcccccttctctttctggtgacgaggtgccaggtggttggtgtattggttagagcaatagagaactgggcataggtacatttgatttt

SEQ ID NO: 67601 - DNA, 1044 bp, Homo sapiens
ccacacccagctaattttagtatttttagtagagacggggtttcaccatgttggccaggctggtctcgaactcctgaccccaactgatccacctgcctcggcctcccaaagtgctgggattacaggtatgagccaccgtacctggccagaaacccacttttgatagggtggtcagggaagacctaaaggggtgacatgtaagactgatagatggcagggatccagacactgaggaaaagtagaccaggaagaggaaacagtatgtgagatgtgaaaaaccttgaagcctgaaagaacttggcttagtttgaggacctgaaagagaccagcttatggtagaggggacactaccgtatgatatggtcagatcagagaggtagggcaggaagcacaataagcagagctttggaggctgtgttgctgtcgtgtgtggaatggactgttgtgatggctgagttgagatgatagtggcttggcctctggtgaggaagctgagaataaagaaaagaggcaaatacggtataagacattgtcgcagaatcactaagacttggtgatggattggatttgactcgagttaggaatcaaggatgacatccagggtttctgtttgtttattgtggtaaaatatacataacataaaatttgccattttaacaatttttaagtgtgcaattaaataacattaagtacattcacaatgttgtttaaccatcgccactatttccagatcatcctgaacagaaaatccatacccttcaaaacaatagttccctattgcttgcttccactcctccctggtaaccactattctactgtctgtatgagtttgcttattctgggaaccacataagtgaaatcatactgtatttatccttttgtggctgacttacttcacttattgtgatgttcttaaggttcatctgtgttgttgaatgtagactttctttttaaggctgagtaatattccattgcatgtatattgcacttttttttttttttgagactgaatttcgctctgtcacccaggctggagtgcagtgg

SEQ ID NO: 67602 - DNA, 1056 bp, Homo sapiens
cccaaggaataatttattgctataagtatgttccattccatggcaccctgtggaggggaaagactatagtgtaatatagtgctagaaaaggacttacagagtgctgcgaaatttcccctggaatgtgtctacatcctggtaagactgatctgggagcaactgcatccccagagattgttgtcctaggggaacaaacgcacaccttgtttccagattgaagggctaactctacaccagcccgaaatttatcagccgcgttgccacccatagccgctagatgccgcaacagacgtatttactgaaaccatagacaaacaggcgacttggccgcccagagaggctttatccgtgactccttgatcttcttcctgcgtggagagccttcgcgggtgaggcttaacgcgcaggaggtctcacgagagtggaagcaactctcgcgaattttaaaatttatctttttgcctagcgactgacaacaggctggttgcttggcgtggaatcctaaagtggcctggctttgagactggagtgagaccccagccctaggctggggttctttccattatagaggagacggattcagaagggctacaggtaattagtactcatcccagcaaaaagggaactgtctttctagagaggcttaagaggactcccctttaccccattcccggttacctcttccaatctccgtggtaactgttccttcgtcacctcaccaccaaccgtcctgcttcctttattcccccaagaaacttaggtgggatcctatctgcaagataagggtgaaagtggaggtgatgattttgggattatcggatgggactgagagactggagtttcccctctcttcggggaccctcccaccctaccccgcctcagcccaccccaccccaccccaccccaccccaccccaccccaccccagaggtgactccagagacagaactctttctagaacctctacagccttccctgagaaacctcaacagccttggccatctacatacaaatagtgttctgcccttgcgcgtggtcgtacagctttgggaagctg

SEQ ID NO: 67603 - DNA, 1317 bp, Homo sapiens
tacattttctgtcactgtagttgtttttttttttttctgttactgtagttttcaaatgcttagacttacagaactttaaagacacagagcactttggatttcatgtaaactaacctcctatgttagggatatttcaataatcaattaagtgacttatccaaggtcacataattagtggcaaaggcagaacagaaacctaattctccaggtttttttacttgaggcacttaacaattcatgtagttaagtctgtgtaggagagagttgttatttagtccaaagatagtgtactcaaaccatgtaagaattattaaaagttgtttggcaaagctcaactttatgagggaattttttttttttttaaccgtcctggagagatcatctaacttatgggccctcagttttcacatctgtaagacaatcaagggctcttgcaagttccttttagatctggaatgttttttccaaaaatgttaaaaaaaaaaaaaaaaaaaaaaaccaaaaactttgtaatcatatttattaattcttcctcagagaaaatcagatcaaatttcaatagggaaaattgttaacttaccttttagtatatgctatattttaataattgttaaaccagtaaacattaatgtaaagaggtttattatttcaagaactttaagaagacaaatgttaatttaggataggataaatttatcatgtttagaggtgaccataccttctagccatattagtagctgtaacagagagacctgtgtcaactgcctggaacctgtaatttgtggtgtcctgggtgttcggagatttatgctatacttagtatggggaactatggtcctattttggaagccttgttttgcttgtatctggataatggaatgactcaaagagagacatatgattttaccctacttctttcttcatcttgacgtactgaaagcctggaattctggccaggtgtggcggctcatgcctgtaatcccagcactttgggaggctcaggcgggcagatcacttgaggttgggagtttgagaccagcctgggcaacatggcaaaaccctgtctctacagaaaaatacaaaaaattagccaggtgtggtggcctgtgcctgtagtcccagatacttgggaggctgaggtgggagaatcacctgagcccagaaggttgaggctgcactgagccaagatcacgccactgcactacagcttgggcaatagagcaagactctgtttcaaaacaaacaaatcctggaattcatcaaagcatgatctaaattctgtttctttctttctttctttcttttttttttttgagg

SEQ ID NO: 67604 - DNA, 1381 bp, Homo sapiens
tggtctcgaactcctgacctcaagtaatccactcgctttggcctcccaaagtgctgagtttacaggtgtgagccactgtgcccgtgaaagtcagtattctattacttgtcatgtcagctggtcgtggtagttcacgcctataatcccagcactttgggaggccaaggcaggaggatcgcttgaacccaggagttcaagaccagcctgggaaacatagcgagatactgtctctactaaaagctttttaaaaattagcgaggcttggtggcacacacttgtagtcccagccactcaggatttcttgagcccaggagtttgaggttgtagtgagctgtggtcttgccattgcactccggcatgggtgacagagtgagaccctgtcttaaaaataatactactactagtcatgtcactaaataaatatgtcattctatggaacatttcctgagatgctgagaaaacagatgtgaagaaataattagtacttacttatgcatatgttcctggcaggtgctgttggcagcagcggtctgcacaaaagcaggaaaggctattgtttctcgacagtttgtggaaatgacccgaactcggattgagggcttattagcagcttttccaaagctcatgaacactggaaaacaacatacgtttgttgaaacagagagtgtaagatatgtctaccagcctatggagaaactgtatatggtactgatcactaccaaaaacagcaacattttagaagatttggagaccctaaggctcttctcaagagtggtaagagtactgctataatactgggttccactttttgttttacattttatgtgaaactagtttttcctccaaagcagctgatgctaaccagtttgcaggttcctactccgcaccccagcgacttattgctgcagcaccttgtttattcagcagacatttattgggtgtcctcttagactatagatgtctcaaaagaatatgggaactactgtttcatttcccagttcttaagcagttgttctaatctgccgttctagttctgacacttgtttggctatgctttttaggtaatgttttttaggtaagacttactgatccagagacagacacacacacacacacccctcttctaagactttatgccaaagtcttgcttaaaatgaagacttaggtaagacttactgatccagagacagacagacagacagacacacacacacacacacacacacacacaccttttaagactttatgccaaagtcttgcttaaaatgaaggctaaggccaggtgcggtagcatgtgcctgtagtccaagctactcaggaggctgaggcagaaggattgcttgaggccaggagttcaagtgcacaggcattatactttagt

SEQ ID NO: 67605 - DNA, 1798 bp, Homo sapiens
gagatcgtgccactgcactccagaccgggtgacagagttagactttgtcttaaaaaaaaaaaaaaaaaaaaaatcagggagttaggctgggcgcagtggctcacgcctgtaatcccagcagtttgggagactgaggcaagcggatcacctgaggtcaggagttcaacaccagcctggccaacatggtgaaaccccgtctctactaaaaatacaaaaattagctgggcgtggtggtacacacctgtagtcccagctactccggaagctgaggcaggagaatcacttaaacccaggagatggaggttgcagtgagccgagatggcaccactgcactccagcgtgggcagcagagcgagactctgtcccaaaaaataaaataaagactagaagtagctaataaagggatttaggttattgaaatttatgtactctaaaggataagacttggaaatatagctgctgataaattctaaatctttcttttttattggtgtccacgcttagatccctgaatattgccgagccttagaagagaatgaaatatctgagcactgttttgatttgatttttgcttttgatgaaattgtcgcactgggataccgggagaatgttaacttggcacagatcagaaccttcacagaaatggattctcatgaggagaaggtgttcagagccgtcagagaggtaaataggatcttctctgggactacctgtttgtatgtctttctcttaggcttcactaatctcattttcctatttttacttactaatgtagactgtattcaaaactatgtccaggctaggcacagtggctcatgtctgtaatctcagcactttgggaggcggaagtgggagtatcacttgagtccaggagttcaagaccagactggacagcgtagtgagaccctgtctctataaaaagtaaaaaaaaaattagccaggcatggtagcacgtgcatgtgggtcccagctacttgggaggctgagatgggaggatcacttgagcccaggaagttgaggctgcagtgagctgtgattgtgccacttgcactccagcctgggtcacagagtgagaccctgtctcaacaaaaacccaaaaaaaaaagctacattaatgtatgtctttttctgtagactcaagaacgtgaagctaaggctgagatgcgtcgtaaagcaaaggaattacaacaggcccgaagagatgcagagagacagggcaaaaaagcaccaggatttggcggatttggcagctctgcagtatctggaggcagcacagctgccatgatcacagagaccatcattgaaactgataaaccaaaagtggcacctgcaccagccaggtataatccagtgtactttagaataccaggtgaagggtgtatatgtgtctatctttgaagtcataatctgatttcttggaaagctgtaaataaagaaggacttgatgaagtaagatatgatgttacatttggccacatacaatatgaggataaagaagaaatctgaatgtggtgtttttccttttgtataaaagagagttataaattatgtcatgacctcagtttcctatgagagttgccttattgtggggaggaaagggctatttaatgctttatggaatgtagatttttaatcttgatgttcattgattgattttaggggaaatctgtgaattacccaaaattatatacaaaattttgtgcacaggtgtatttctctggacgggagatacaaaattttcatcagatcatgtgtgcttgtaaaaataaacctttgggtaatgaatttcaaattcttc

SEQ ID NO: 67606 - DNA, 1112 bp, Homo sapiens
gttctgtatgaaatgaacagggttacattgggataaatttcttgattcactaaagccgctgtgctcttcctagtggttgctttgagtgagacagaggcttcacacttttaaaaagatattcctgagtgcagtggcccacacctgtaatcttagcactttgggaggctgaggtgggcggattgcctgagctcaggagttcaagaccaccctgggcaacatggtgaaactccatctccactaaaatacaaaaaattaaccccttctccactaaaatacaaaaaattagatgggcgtggtggcacacacctgtagtcccagctactcaggaggctgaggcaggagaattgcttgaacccgggaagcagaggttgcagtgagccaagatggtgccactgcactccagcctgggcgacagagtgagactctatctccaaaaaaaaaaaaaaaaaaaaaatgttggagatcatcacatattaaagagaatttgagacactgtttttttctaaatgataaattgcctcttgagcacagagcaaacttttgtgaaggtaaaatggtaccatgcattgtcttaagatgcactcctttatggtcttgactctgatgcctttgtttctaggaagacctaagaggttggaacaaagaacatggtaggataacaaaatattttttgtagcctctgtagttcatccagccaaacgtatgtctattactgaatatgaatagattgtacttaatacttgcctctagcagcagcagtttttaatcttttaaaaattggattatacattcatatagtacaaaattcaaaagttgttaacagtcagaagtcttcctctcactcagccatgccagtttctcattttggagacaactagtattaacagagttttttgtgtatccttctaagggggatggtctgtgatatacagatgaataaaaaacatgtatacagtgtgtctatttttcccccttttatgcaaagcagtaaaactagacacgtcttccaattgcatttttcatttaattattttggagataagaatctccttatttgaaactgcagagatatgacatctaaatgcgcaataccttaccctagactggatcct

SEQ ID NO: 67607 - DNA, 1081 bp, Homo sapiens
ccttcagtattgggtacctactgtgtgccaggcacatagttgtttgtgttgggggaggtagaccatggaatggataaaggaggattcagattcagcataagttctatacagaggagcatctgtgctttgggaacacaggagagcacaactgtgcactgtcgtggtgacattttgcaatgggtcttgaagatcatttaggagtttgctaaggaaatgggctggaggagatagttccagcatacagggtgtattattaagggaacagtgagaagctcagataggacttgggactcatgcaggggaaggttatgatacaaggctggagggacatgttggcagcagtccgtaagttgcctttaccaagctgcagaggtcggggagaggaggagcactcgggaaggaacttacttccagccggcaccattgaatttagtgattcgcgtgacctctcctgtaggacgcaggctcactgttaaggatgtcagctgtagcatctgagcagtgccacagacaagttggcccaggccctgtgctttcccttgacagggatcctgccccttctcactgaatggtcacctctgctcaggtagtttgcccctttcctgccacctctgacctccagaggctatatgctatatgtatatgctaactgctctgtacacatcaagggagtgtgcttcctatctttttttttaaaaaataggtaaaagtattcatatagttcaaaaataaaaaatatataaaaaggtttaaattgagaattatgccccacccactacagtaactaattttataaatctcttgtgtatccttatagagtttctataggagaatataaacaaatactttttcttgcacaaaaggtggcatacagtacattctttttacctcctaatgtgtcttagagatcattttatatcaaatttatctatatctagacattatatctcgatataaattatagacttatttctgagtctgtatctgtatcagatatttctttctttctcttttttttttttttttttttttttttgagacagagttttgctctttttgcccaggctgaagtgcagtggcg

SEQ ID NO: 67608 - DNA, 4839 bp, Homo sapiens
aggcacagggttagtagaaactactagaaaagagcatttgggatgaggattgtgaaaacctatgtatcctagtttgtgttgctttcagaatgttaattttgtattctcttcttctgtaggctttgacaaattacaaaaggctcgtttggatctgtgacacatcgttttggggggaatgctcctctctttgtgggtttttcatcttttattttggaactatgaagacttaaaagagctcagacattttctttttttaactggtgaagagaaaaaggctgaaaagaaggaatataccttttttgttccacttgtttgcactgtgtgctgactgaacattagttgcactaactgctggtttttaaaaaatgttttctggggaaaggggacaaggaaggaaaagaaagaagagaaggggagaaaccctaaaaagagaagaatcttaatgaacacacaagcttgtcaatgatttcaaaattctccaacagctgactctcgtgcatttcaacttctccctgattcctcatccgttttttaagcctgaagagcttattacttatttgtgcgaagtgccttatgctatgagaccattcagaatatcatcttttagacacagcccgaggaatcaacaatagtaactctttctttccgtttttttttctttttcttttaaaaaatgtcttcttattttggtttcaggttgaagtctcttccctttctacccagtactcgagcccagggctagaagttgaaactcactagtaatgttaaacaccattttttttttctttttggggaggagttgatatgcaactgcagttcatccgcactgtaaatacatgtatttaaaaaaacaatcccaagtaaaaatttcttctgggctgagtagataaaaaacatcatcgctcccaaaggaaagagcagtctatcattgcaggagccatatgacaagcctttgtgctctatagcagacactaaagactgggttacatatgcctccagtagtagtatggcacttgatgtgtagacatgtcagagcttggccctctttcctctgtggcaaagcgtgtcccatagaaaattgggtgtgtatacttgtataactttgtaaataagttttttttctgggttcatatatatatatatatatacatatatatatatttttttttggatgaaggttgctgggattaaggggattagagtgattatgggagcagctaaagatgagaggggctcagttttacgcaacactaaattctagaaagtactttggcctcgtgctgtagagagcagatttctatggtaccctgtgttagtaaaggggcccagaaatctgggatgtactgtttgctgccacactgtctcatctagtacctttggagtaggtttaccagagagagcaaggaagcttcaaaacattgataattcaacatttattttgagaagctctgattttgcttcttccccctttctaaaagtttgaggaatatttcaagctctgcaacagggggcaaagattaatctaccttgcagtgtaggaattctattgagtggcagtgtcattgagcagtatatatataaagcacagatttgcatttcagaatattagccagtaccagctttggtaatgttagcagttctggagcttaattttctgtggatcatttcctgtagtgtgtaaatgtgttgccctctgcccgctttgatacataaacttttgcaggaatgggcaacctgagagctgttaactttcatgctacagaaagctgcttgccattctcttgcattgtgacaagaattgttacctgtcattttgcactgtaaattgctggcagatgctttacagtcaatagtgttgctttaaattgtgcccctcccaacatgcttgatgtttggcctgatctccaggcaaaaggagtgagatgaatcaaaaccagtgaacttttttttttaatgtttttaattcccttttaacccagtgtactaggtcaatcaggaggcatctggaaagggggggaaaaaagcaaaaaacaaaattaaaaaaaattgatttccatattttatttttcaaaaccctaaaatattacaaaataagtcccgcatatactttaatgttttaactcttttggacaaaggaatcaattacttgaagttgcttttttgactctgcctacttctgagcaaactatttgcgactcacccacaattgccttggagatcaaaatcctacagatgcctcctgatgggacatagccctaactccttaacaactgtagcaagaactgcacggtacaaacccaaaaaagaacaagctcatctatttggaacccaagcctcatattttctgtccagtcaatgttggttactaaatagaaaacctaattaaggaagtaacttttttccagggaggggtgggagagggaatttaaaaggtgtcaacttttgaccaaaaaaattgtgcccttgtaccgatgcagctctctttctcccccacctcttgcgagataagagggatcattcatgtagaagaaaagagtataaatgcaattctgtatctcgctagagaacgtgtgggtgactaaacaaaaagtgcagtctccttcaccaactttagactgcgtggtgccacatgcctgtgggtccctcttaaagcacagacttaaaatggaaagtattactgaagtatagcctctaatgaggagtggcacttaaactatctgggacaccactactggacacggtcttgtagaggcagctgtccagttttggtgcttgactcttgaataggaattgttaaatggaaagatgctctgaggactaggtcaaagcctggtctttttttttttttttttttttttctttcttttttgggccctcataataagcattgttactattggaagttgttttcacattctttccaatattaaatatgtatttttttaagtaatgataatattttccagtggctcatttggatgagaactaccctctatttttaatattaaaactacatccaactcatcatttagcctttggttgtacagttgtgtaatgggctatggactgttacacaccttaccacctctaggcctatgttttttctttccccatatattctgatggggataaatactgttttgcctctcccataggaatggaatacatttattctaaaatgatctttcacagaagtaagagagagggaaacctaaatatacctctaaattgtttgaagttggtcccagcagcataaaatgggttggccccaaagggttggagggtgggcttggttatcagtatttgttttcagaatgagatgggagcatctttcctttgccacgtgctttgtgcttgataacatcatgcttggttcaaacgacaactcagcacaaagccttgagtataaattgttggaatcaaaacatctcattctgatgacgtggtttaattttttaatttttttttttaataggggtgggagggagggtactttgccccagaagggagggtgtctgcactaaggatttagaaacactttggaagctcataacctcatcagaaactgcctttagccacactcctgaccttctagatgagtaacaaaaaaatgaaataagttcttggaaattaagccatttattttaatttgctatttttttcaatgttctaggtatctttaaatttgttattgtggaatcattttcctgccagatacctttatcaaaattattggcctcatgagagctgaagtaagtcagctttttggtgaactttagtggacttctgtgagattgtagttgtactttgtatctctaaatctaaagatagttttttaaaactcccaaagaaaatctgctctcctttctgatctaaaaactcatctttggggtaaagagttaagtgtccaaaggttgtcacagttcatgaggtcagagggagctagcctggcacctggactctgcccatccacagctgacagattccaacagaagtgtatttaaattctccagtagacaatgctgggtaagggagggggtagggctgggttattaagatacaggctgctgtattttacattggttgtgtgggaaggggagcctggagaaaacaaagtcactattcccttttttgaaacaggaaaaaaaattattttttgttcagtaaaaatggtagagaattccaatgtccctagccacaagggaccagttccactgagaagtgaacagtgggaactcaaaatttcagaaacattgggggaagggaaaattggctttctcttaattggcagatgttccagtggggggggggggggctctgtttttgttgggatgtgttatgttgtatgtacgcatatatggaccggagtctgctgagtttataaggttccaaaaatatggtaaaatcttggtttttgttaatttatctcaataaaagcccactggaactccaaatgtgtgtgtggtatgtccttagtagcagctgtgtgcataggaatctgagcattttgctcaggtaattcatactgtgaaacagacatttctcaacccatcattcctgtgaagcccagttgaattcagagccccttcatctgttgtagatactgttccaccatgctgtcagatttcacagcctaaatggagaaccaagataatcggttgggaagaggggagatgtggtccataatatgtccaaatacatcagtaattaccacctcctacaattgttctcaaatgtaaagctgaacatacccccaaaaccaaggcatactacatcttaacagtatgaatggaattcatatgctgagaactacaaaccactgatgaaataaaagattgg

SEQ ID NO: 67609 - DNA, 1041 bp, Homo sapiens
tgctactggatagtgtattggaattggaagtacagacacaaatatttcctttattatagaagttttactggacagcactgctctggatttttaaatatggcccctcagctggctgatttttctttttttctttactgtttgcctttagaaaaagatacaatatctaaatttcagaatttgatttagcaaaaaataatttaaaactgtaacaaaaatgacttttttgttaactacattatgaaatttcgtaagtaaacagtttctgtagacgaagatatcaagaacttaactcatttggttttgaaagcagcttaatatcatggatcacttataaacagattttgggtagaactgatcgtctgggagaaataattatgggaaatttggggctgtatatgagtgttaatcaaatggaatacattgctttctcctaggaacatcgaaatcgtgtatttcatgatttccgaaatggcttatgccgcaatcttgtttgcactggtaagtatttttgtatttcctttacccagtgtttttctcccaagttgttttttgctttctctgttcatattacatagtgcaacctgtgacatagtccgacacaccctaccactacttctaggatttctgaagttgaaaatgaactcttgtcagctcctgatactgggttccatatctgaaactttagaagacttactctggcactcatacctcatctctgtcttttttttgggggggggggggagggggatggaatctttgtcacccaggctggagtgcagtggtgcgatcttggctctctgaaacctccacctcctgggttcaagtgattctcctgcctcagcctcccaagtagctgggattgtgggcgcctgctaccgcttagcccggctaatttttgtatttttggtagagacagggatttcaccatgttggccaggctggtctcgaactcctgacctcaggtgatcttcctgctttggtctcccaaagtgctgggattacaggcttgagtgcacccagcctcttttagacacatttttt

SEQ ID NO: 67610 - DNA, 1053 bp, Homo sapiens
tgagccactgcatcataaggcgcagtatttctatagcttcttaaattttgtaaataatgatgtatagcatgttctcccacctcaccccatattttcttatatattccttgatactgtttcagcaatggtgattgttcccactagagaacttgctctacaggtcagtcaaatttgcatccaggtcagcaaacacatgggaggggccaaagtgatggcaaccacaggaggaaccaatttacgagatgacataatgaggcttgatgatacaggtaagaaatgattactaaaaggtagtgtagctctctgttattttagtcacaagtatttcagtaaattattaaaaattgtttttaagaattaaggaacagaaatactgcagtaagaaaaggaaatgaccactgcattcaagcgaaaaagacaaattaccataattgaaaacgatatttgactttattagtaattgtaaaacagcaagtttataataattttacctgtttaattggtaaagctaaaagtattagtagacgataatgtgagtttgtggacaaataggctacattgtaaatgtgggggtgtaaacttacatctctatcatgggcaatttgggagtatattttaaaattataaatgtatatataatgtgtgtgtgtgtgtgtatattttttttttttttggagatggagtcttgctctgttgcccaggctggagtgcagaggcgcaatcttgactcactgcaatctccgcctcccaggttcaggccattctcctgtctcagtctcctgaatagctgggattacaggctcccgctaccacgccaggctaaatttttgtgtttttagtagagacggggtttcaccgtattagccaggatggtctcgatctcctgacctcgtgatccacctgcctcagcctcccaaagtgctgggattacaggcgtgagccaccgtgcccggccataaatgtatatttttaagaatctttcctgaagaaaaaagttgggtaaatgcagggctgtaggtacaaagttgtttgctatggggtggtattgtcgtg

SEQ ID NO: 67611 - DNA, 1219 bp, Homo sapiens
atttttgtcatccctcccccattcctaaaagtatctcttctatcatgcttggttttacagttttatccaggcattttttttcccctaaatattaaaactgccttgattagatgggtgagtcttctgcatttgaatatttgtttgagatggaatttagttgcagtttggctgtgagatttggagaattggctgggtgcagtggctcatgcctataatcccagcactttgggaagccaaggtgggtggattgcttgagtccaggggttcaaaaccagcctaaacaacatgacaaaaccctgactgtacaaaaattagctgggcatgggggacatgtagtcttagatgttcaggaggttgaggctgtaagtgagccaggattgtgtcactgcactccatcctgggcaacagagcaagaccctgtctcacaaaaaaaaaaaaaaaaaaaagactgttagagaattaggcacttaaaattatatgctctcaaaagagcttttacattgacaggctggaaccagatatactacagattgctcccacaacgtatttctagagccatctgtgaccagttctaggtctggatgctgtggccagtagaataattgccattctaaaggtatagctttataggaacctagacttctttggaaggcttaagaatatactgtttttgtctgcttagcattatttgaaactttatattaactttggggttatgattgagaaagatggcctctctcgttgcttctaaaccctgggaacacctcttgaagactttttcgaaactctaagaaggtgaagaaatgagaagtagttgattattgagggaaacatggaagctccgtactgttggcaacaaaattttgtgccaggtcagctaaggtctaatgaggattaatagtttactatttatagttaggaattatagcattctgaatcctgtaaataagtcattcttcctgctaacaatcggtttatcatgattgaaaaaaatatttcctaaaaactcaaaggttttttttgtttgtttgttttgtttttttttttggtgtgtgttttgttttgttttctttttgggtggggtcggggagacagagtctcagtttgtcacactggctggtcttgaactcctggcctcaagcagttctcctgcctcagccttgcagagggttgagattacaggtgtgagccaccatccccagcctaaattagagatata

SEQ ID NO: 67612 - DNA, 2022 bp, Homo sapiens
aaagactttaaaactccctccaaaggatctaagaatcaaaacttcggtaagttggttgtaaaatacaagtagaataatggtggggaactagaagtgaggtatagctgtccctcggtatctggagggaattggtttcaggaccataacaccactgccaccctcctcctccaacccagtaagatagatattcaggctatatattcccattttgtggatgagaaaacaaatgctcagcagttagttctcttagcctattgttttcaaccgggagaatttttgtctcccgggggcatttagcaatttgtagaaacatttttgcttatcatcaataggggggaagctaaaggacagccctttacaacaaagaattttgtggcccaaagtgtcagtagtgctgagcttgagaaatttgacttagccaaagatatttgtagctcatgagtggtagaggtgggatttaacttcatatcttgtgatttgcaattcatggcatgatatttgtgtaaaaaaataacactattccaccagtccttaggagactgtgaccaagggccgggcacagtggctcttgcctgtattcccagcactttgggaggccgaggcaggcggatcacctgaggtcaggagttcaagaccagcctggccaacatgttgaaaccctgtctctactaaaaatacaaaaattagtcgggtgtggtggcgtgcgcctgtaatccagctgctcaggaggctgagacaggagaattacttgaacttgggaggcagaggttgcagtgagccgagatcacgccactgcactgcagcctgggtgacagagcgagactccatctctcgaagaaaaaaagaaggctatgaccaagtgctctttccccaaaacatagttttttaaaaagcttgtgtgtcaaagcagggacagtggtttttcttcaggaaaagttgaaatacagattaaaacaagtaatctgcatatatttatatttaagattgggcaggtaaagtactaaagtcagagaagttttctttcctttttttttttttttttttttttttttgagatagagtctggctctgtccccccaggctgtgcagtgagtgcgatctcacctcactgcaacctccgtctcctgggttcaagcgattctcctgcctcagcctcccaagtagctgcgactacaggcgtgcaccaccaccctggctaattttttgtatttttcgtggagttggagtttcaccatgttggctaggctggtcttgaacttctgacctcaggtgatctgcccgccttggcctcccaaagtgctgggattacaggcatgagccaccatgcctggcccagataaattttcttaaacacagataaatttaccaaaggacaccaaatttaccaacagtgttatttattcttttattgttcctttttgtttgactaggatgtgacctccacaaaaggaaatgagtttgaagattactgtttgaaacgggagttactgatgggaatttttgaaatgggctgggaaaagccatctcctattcaggtatgttaaccctttttatcacatatgtaaggttatgtgtcaaccattaaacagttttctttttgctctgcagaagtgatacagtgaactaacatttctctctcacgtatacacactttttctgaaatttttaagggtaaattagaaaatcatggcttttacaactctaaatatttcggtgtgtatttctttaggatattctcttacgtaaccacagtacagttaccttcagttaacattgataaaatacttctatctcatctgtcattctaattattaatggacccaaacatgtcctttatagcagtttttttcttctatacaggatccagtctagggtcaggtattatttgtaattatgtcttttttagtcattagcgtttccctagtgtttgttcttctttttatgacatcagcatattaaaaatacagcctacaaccccttcccccatccctcttttttttttttttttttggcaactgggtc

SEQ ID NO: 67613 - DNA, 1030 bp, Homo sapiens
gttgtccaggctggtctctaactcctgacctcaagagatcgcccgcattggcctctcaaagtgctgcgattacaggcctgagccaccagcacccagcccataaagtttaatagttgaaatttgtaagggcacaaaggtgtttttttctggaagtgtgaagttcaagtcaaaagctcacttaaatctataaggactctcggttgctattacaagtagaagaaaattaatgaattgtcttgtttaaattgtgtgatacttcagtgagttgtaatgcaattaagtataatgaatcactgacttttagagatgtcagagacttagagaattcatggggaggaaactgaagagaagagattatcattgacgagtagtgctaatttactagtctctttctacttaatctctggattgctttgaattaacaattttaaatgtttgatattggcctcattgtgtttttgagatagttcaaagttgtgtctatcctagcttggctcgtgatttggtctaagtgtagctgtattattaattctttaatataaaagatgagaattcttttaaaggggttcttttaaaagggaaacaaagtttttctgttgtgtttgctaatttaattttgtttgtttgtttcagattgacgtgagtgaattcagatataactcaagcttgttagagggctttttaaaaataaaaagttgattccgtgcaagagagcaagttactgctgcttaccgttcagagacttacaggtgcttgcctgcattgcaataaaggactcatttattgagcaagacttatatttatctcttcattttggagagcctaataaactgttattacagtttctctactgactttcaaaagttttgaagtttgaaagacctttgcaattaaaacagcatgagcacggccagaacagagaaccctgttataatgggtctgtccagtcaaaatggtcagctgagaggccctgtgaaacccactggtggccctggaggagggggcacacagacacagcaacagatgaacc

SEQ ID NO: 67614 - DNA, 1030 bp, Homo sapiens
ggagcgtccgccattttgggagcttcgagtcaacaataaaggaccgagggtgccgagcgggagtggcctcgttggtaggacacgggcccgagtcgcgaggcttggggtgaggtggtggggtcgaggtcagcggtgctttgggggctgtggggagccccccgggccggctctgggggactctcgggcggaggcctaaggcctggccgggcctggggaggaaggcggtcggcagctgtgtggggtgggagcgcctgagaggaggcgaatataggaatgtggtgcgcagcagggtcggcaggaggaacaggctaagtactcggagtagctttatcgaagatgagggaatatgaggccgaagggggcggcaaggacttagggggatgatggtggaggttatagggtacgaggcggccctatagggggcggcagggacatgctgtattggagggctcggtttagaagcaaaccggccgctgcttgattgcagtaggccttgcgggtcaataacaagagggtatttatggagcccccgactcttggaggaaaggagggggatttctggtttagggggtccatttggggcctccttgggggagtccctattgtttgctactaatggagcggttgctggctcatattgcgcagataagattgcagagccccaaccttttgtgtttatggtcagaagtgtgtgtgtttggggcgtggggcggggtgcggggggacaagaaatttcctttcagttacggggttccagtcattagtcaatgactctttcccgtatctctctcctttctcttcctcagcccccatttcccttcagaataaaacccagtcactccaacttgcaggcaaagctagaaaaactgcgctgcatttgcaaacaaaagctcttgttggcgatgacgatactgttttgggtgtgaaactgtcaattgctaactacgatctgtgaagtgctgtaattaactccgctaggggctcctcccaactagtctacgtttcttgttgtttgttttttgtttttttg

SEQ ID NO: 67615 - DNA, 1306 bp, Homo sapiens
ggtcatgtcccctccacaaggcctcatgacccagcagaatttcatgctgatgaagcagcggggcgtggggggcgaggtctacagccagccgccccacatgctctccccgcagggctccctcatgggccccccgccccagcagaacctcatggtgtcccacccccttcggcagcgcagtgtgtccctggacagccagatgggctacctcccggcaccaggcggcatggccaacctgcccttctagaagtcgctgccagggctggagccggggcaatgttgcaaatacgataaccttaacaaagttcttcccctcaatgttgggatggcctgggtcgcggggtggggtggagggggtgggagggggcttgtgtagggagtggcatttgtggaaaccagatgtgctggcagcttagggggaagtggcagtgtggggtgggggattttgcattggggttggttccatttcggccaccaggactgcccctcccccactcctcccaattcctatggagcctctctattttacctctttccgtgcatccctgcacccgccacacccccttcagctatgcttttggagtcctggatgggaatctggggggagagaggaaggacaggtcaggtctcccccagccccttctgctcctgtctcctcgtgtccgcattgctggagctccacctccctcttggtttctccgcacccgcccattttccttctgtctttacctgcttcgtatcctttccctgctgatgtggctgacccctctcccacccctccctgcaggcggctggccaggtgggcaggtgccagccggagctgtaaatagagcgctgcgcttttgtgctggtttgtgcgtgtgctgtatttctgtgttttgatagaagtcacacaaaaaaaaaaggataaaagaaacccttccccccttcttcaagttattgctccctccattcccctggacccagggacatgcagccctacatggccacccactgtttgcagtgtctctgggtccctaagggataccattcctgtctcgtccccaaatggtaagatgacgtaaatgacccactcctaaactgaggtcagaccacctaggcttccacctggtgagccctagcagggctgagacccccagggcggcagcctgtctgctgctgagtgattcagggagaacatgtgtgcacgtgcatgtgtgtttgcccacaccggtgacacggggccctggctttccactttggatgcccgggcatccgctgctgctacatcttagccagaacttgaagtcttttgtcccagtttgggatg

SEQ ID NO: 67616 - DNA, 1037 bp, Homo sapiens
ggggctatagagagaaatcagaaacaaatggtggcgtggtgggggccacgggctggcgaagtgcccaccatggcctgggcagtgccctctagggtggggcatcttagagaatggatctgggagggaccctgggtgtgggagaataatggggcctctaggcactcactctttcctccgtcctgcctgggcagaggtggcgccgcggagtaagcggcgctgtgtgctggagcggaagcagccgtacagtggggacgaatggtgctctggaccggacagtgaggaggacgacaagcccattggggccacccacagtgagtgcctgtcgatgccagggtgctgtagcccgtgatgttcctgggggatggacttgagaggactgagcctgggaaagaagtgaggactgggagtcctggatttttctctcccatcctacctctcagactctgtccctccctacactgcaactgcctcgcctctgccttccaggtgctcagtgaccccctctccctagggaccctaggtggggcagagtggagtggcctccttcttggtcacgtcacctgcacctctacctgtgaattcctggcctatgctgccacctactggttagtggagggagggcggtgaagcgtccagggacactgggagccgggcagttggctctgctgtgcaaagccctgctaagcctgggtgtgagttgccacttggccgtgtctctagtgcccttccctaacctctaattgactcctggcaagtacccagggtgtgtcaccaggacaagaagtgggtgtggagggatgcccactcctcctctgattcttttatggattcgcctatatcttgtccttccatgagtgatgggggagagccagatgtaacccctgcccctgggaagcttgtacatattttttttccctcaaagtttacgtttacatctttttgaggagagagacataagaaactagccagagaggctgggtgtggtggctgtcacctgtaatccccagaatttggggagctgaaaccggagaattgct

SEQ ID NO: 67617 - DNA, 1090 bp, Homo sapiens
acaaacagaaaatcattgtaccacttatgattttactctacacttcagctgtattgtgttgcttcgggcttttgcagttgccattgtctaaaacctgctttccttccctcatcacctagtttaccttcaactgttagctcaaatgtcactttttcataaaaggcttatctgaacaggttatctctatttcaagtggatgtagcaccatgtaaagttgcaaatgtaatttacgtaacttgtgcttaatgctcttccccaattatatgtatgctgtgagggcaaggttttgctcccctggcatgtaatagccactctacttacagacatctccactgttatgactgtgagcttcctgaggacagggttgtcttagagtgacttactgtgctttcaaagtttaacatcagctggggtgcagaattagcattgtggcagcagtcacacccacctcttttaaagtgtgctttgtctatcgtttctaggatttttttttttaatcatgcctagactttaactagcactttttttcccatttccaactacaggatataccaggagttggtaacatccactcaggtaaggtccagggcagtgtttttaaaaccctgggagatttttttttttttttgagatggagtcttgttctgtcgccaggctggagtgcagtggcgcaatctcagctcgctgcaacctctgcctctcaggttcaagtgattcttctgcctcagcctcccaagtagctggggttacaggtgtgcaccaccacacccagctaatttttttttttttttttttgagacggagtctcgctctgtcgcccaggctggagtgcagtggcgggatctcggctcactgcaagctccgcctcccgggttcacgccattctcctgcctcagcctcccaagtagctgggactacaggcgcccgccactacgcccagctaattttttgtattttcagtagagacggggtttcaccgttttagccgggatggtctcgatctcctgacctcgtgatccacccgcctcggcctcccaaagtgctgggattacaggcatgagccaccgtgcccggactttttttttttttt

SEQ ID NO: 67618 - DNA, 1015 bp, Homo sapiens
aaaccttactagagtctcattctgttgcccaggttggagtgcggaggggcagtcttggctcaatgcaaccaccaattcctgggttcaggtggtcctcacctcagcttcccaagtagctggaattacaagcatgtgccaccatgcccagctaatttttgtatttttggtagagatggggtttcaccttgttggccaggctggtgtgcaactccttacctcaagctatctgcccgtctccacctcccaaagcagtgggattataagcatgagccaccgcgcccagccaaaaaccttactagtttctattgtagcatctgttaagcatctcatcgtgctattctctccccctaggacttatcaaactggtttcaaagcacagagctcaagtaatttacaccagaaataccaagggtggagatgctccagctgctggtgaagatgcatgaataggtgagtaggaatgtgtgggctcatggtgtaggaggtagatacaaagctttatggttctgattcttttaatttttttttacaggtccaaccagctgtacatttggaaaaataaaactttattaaatcaaatgaatgagtatgtctgtttcctaagaaagacaatgataaagaatttggtggaaggtataataggggtttgttgactttgcttttagcctcatggtagttggtagagagcatgattagcttttttctgtatgtgactgcttcttcattgctgcagcttcagttttgaattgatgtctgaaaggaaataaagggttaacacgatgatgaagggtgacatctccaaaaaggaggttggatgggtaggttggagacccggcactgaacacacatacctggactgccagcggcgtccattattccagacgcggccaaaagagggcagccagcctgcactggtcctggagctgtgatcaaagttggccccaactcggtctggggggagttttttcaacttctgtttttcctctgtacaatgatagggaaacttttatttttc

SEQ ID NO: 67619 - DNA, 1979 bp, Homo sapiens
tttgttcaccacatacacactaaaaatcgccatcgctgccttgccgctcggaaactggtattcagcctctacccgacggcccctccccggaaccgcatcacagcacttgccgccggccccaccccagcctcctcctcctcctcctcctcctcccgcgccccccgtgcagccacctgctgcacttgcgcactgggagcgacacgctcgggcataagtagtgccggaaagttagctgccgagacctggtggattgcttttcgtttatcagtgcaggaaaacagcgctatagtatgcgtcacaactagcgcagactccggcagtatttaggcggtgcggcttgggaactagaatccacttcctgtcttccgcctcaggctagagggcgagcgcttcgccgtgggacttcttctgcctggctccgccttttgccccggaagtactcacagcggacggtggtttttgggcccgtttctgagcagcgcttcctttttgtccgacatcttgacgaggctgcggtgtctgctgctattctccgagcttcgcaatggtaagcttcaggggtgtgaagtcgccggcgttcttgggtttgaggactcagtggggagagccttcggcgggagcgctccttggcctgccggcctcggttgcagggcgggcgcggttattgcttggcccatgtgctctggtggtggagtttgcgggggctgagggcgcagtattaggggactttggcgctatttgaggacctggttgcattcccgctgccctcctacagccgcctaaggacgacaagaagaagaaggacgctggaaagtcggccaagaaagacaaagacccagtgaacaaatccgggggcaaggccaaaaagaaggtagaaataagacctctctgaaagagactaggggtaactctctcgtaatcctctagtaataggtaacttgtatagtaagtggtttttcaggtgtagatttctagagtcaaaatgtgagagtttatcttcccgtcaccactcgttctttttcccattaggatcatgaaaatgggtctgttgtgcgaagtgtctgccgctgtgcctgctgtgttatttttaactgatctagtggggctcggcccctgtttgaaggccaaaaacgtgtcggtgttttttttttgtttttgttttagtaatgtgtaatttatccttgataacggtggaacagatttctctgacgcagattactcgagagggaaagggtgcttctgccagaaatactaacttgtttctgttttgttttggtgagcagaagtggtccaaaggcaaagttcgggacaagctcaataacttagtcttgtttgacaaagctacctatgataaactctgtaaggaagttcccaactataaacttataaccccagctgtggtctctgagagactgaagattcgaggctccctggccagggcagcccttcaggagctccttagtaaaggtgaggggtgtatcctacatgtgtgtttttgtaggttaaattgtcttgaccatgttaagcatcttcagtggttttgctggaaaagcagaattaaaaaaaaaaagcgtggcttgaccattggctgttagtaatgtaattctgacgtcttactcctgatcctgagatgaattctcagggttcttagccacttttgtgccgtggaccctgtggcagtttagtgaagcccaaggatcttttatgtttcgagtaaatggatgcatagaattacagggacaaccgtttttgaaataattagattactattttgaaacaactttgaaaatgtttaaaacctttatggtaaatattttgttgatgtattaaattttaaaaccagaaatttagtacggtctactcagtagtatggtctgattaccataattccacaataataaggctcagctaactatagtgactgaacgtctataattctagcactttgggaggccaaggcgggtgaatcaacggaggtc

SEQ ID NO: 67620 - DNA, 1039 bp, Homo sapiens
atgcccgccaccacacccagctaattttttgtggggtttttttgttttgtcttgttttgagatggagtcttgctctgtcacccaggctagagtgcagtggcgcgatgttggctcactgcagccaccactacccgggttcaagcaattctcctgcctcagcctcctgagtagctgggattacaggcatccgccacacgcccagctaatttttgtattttttaggagagatggggtttcaccatgttggccaggctggtctcgaactcctgacctcaggtgatccacctgcctctgcctcccacagtgctgggattacaggcatgagccaccgcgcccggccttcctggcacaattttatagacacatctgtttgtttgttttgtgaatacaaaaccaatatttaatctgaaactgattttgtccatgccacccagcatgttcagcagaggttatcttgtgttcagataaaactcaccttaatgctatttcctgttgcgtgtactttggaaggtgttaagtgtttttccaaaatgaaatttgaaagcaaaatggatatgacctttggattgccagtgtcattgcttcaccctcttcatttattgaaaactgcctgactttgtcccctgcctggcaatgtttctgctgagggactccaaaactgttagtaagtggcagagctagaactcaaagcctggtcttaatcaggtgggtgacataacaaagttacttcacttctctggtctcatcggtagattcaaagtcttgcctttcctgcattatgtggtaaaaagaataaaattaaaataggcttatgaaagtgttttgcaaaattgaaagtgctgtacaaatacaggatgacactatttgctccagtgtctacgctttggtaaccattcttggtctctctccagggatcaagtttgtggttctagcagatcctaggcaagctggaatagattctcttctccgaaagatttatgagatttactcagactttgccctcaagaatccattctattccttagaaatgcctatcagg

SEQ ID NO: 67621 - DNA, 1052 bp, Homo sapiens
tttagagaaaacagactttccttggtgtttatgtcatttttgtttgtttgtttgtggggttttttttgttgatgtttttttttttttttttttttttgagactgagcttcactcttaaccacccaggctggaatgcaatggtgccatcacggctcaccacaacctctgccttccgggttcaggcgattcttttgtctcagcctccggagtagctgggattacaggcacctgccaccatgcctggctaatttttgtatttttagtagagacagggtttcaccatattggccaggctagtctcaaagtcctgacctcagctgatccgcccacctcagccttccatgatatatgttgttcttcaagcagtttcccctggcttaagtggggagaaagcctcaggcctcacactttttttcctcaccctgggcccggcttaggtgtgagctctttgaccagaacctgaagctagctctggaggtggcagagaaggctggaacttttggacctgggtcataggctgaacctgttatggacccccaaattctgagagttcctgcaacaagaatactgctgttgacactccagtggaaatcccagcagccttgttagtgcacttgaaagtgggagaatgctgaccctgatgacttgtactgattcctgagccttaacactgtgctctttccttctgtatataccatggtcttactttccaactctgtacagatttatttatggaggagctaggtccataaatgttgtaataaatattcctttgatcttggtgtttgcaatctgtcttaatcgatggttttgggggaaagatacaggaagtgagtcaaaaatggttagggaattctgggaagatgattatgtgctagtaaaaaacataacaaatatgtgttcattaaataaatgaacataagattttgaagcatgagcattggatctagtcccagaattgctgctgatttcctggggtcctggggtggtggcagcagtggtggtggctgttatgatgatgatgatgatggaacatatttcaagcacttaca

SEQ ID NO: 67622 - DNA, 2071 bp, Homo sapiens
cactgcactccagcctggcaacagagcgagactccgtctcaaaaaaaaaaaaggactattcaaggggtttgttcagttgtagtcactccagagtagtaggatgtaaaccagaaacctgcaggttgggacttcattgtggagaacctttaatacccttctgaggagtctgttagcctcttggggctgaggccaggggtggcagtgatttgcagtctgagggaagaggctggttgggggtgtgattccatctgggacagagatgtctgctctctccatggctagcttggagcctctcctggtctcacccacaggcctggaagaatgcaactctggccgagcaggctaagctgcccgccacagagaagcctgtgttgctctcaaaagacattgaagctaagatgatggccctggaccgagaggtgcagtatctgctcaataaggccaagtttaccaagccccggccccggcctaaggacaagaatgggacccgggcagagccacccctcaatgccagtgccagtgaccagggggagaaggtcatccctccagcaggtgagaacagggtacctggctgcatgttctgctggacagggagacagcctcctttccttcctgaggctatgtcttacccctggtttccttctaggccagactgaagatgcagagcccatttcagaacctgagaaagtagagactggtgagttggagcaaccatggttgagcacgtggatgttgcattagcccaggggtaggcaaactggcaggcacagcctgtttctagacagcccatgagcttgaatggcctttgcgtttttaaagggttgtttaaaaaaaaaaaaaaaaaaaaaggccaggcacggtggctcacgcctgtaatcccagcagtttggaaggctgaggcgggtagatcacctgaggtcaggagttcgagaccagcctggccaacatggtgaaaccccatctttactaaaaaaataccaaaaaaaagagtcaggcgtggtggcgcacacctttaatcccagctactcaggaggctgaggcaggagaacacttgaacctgggaggcagaggttgcagtaagccaagatggcgccactgcactctgcactccagcctgggcaacagagactctgtctcaaaaaacagagtaggcaaagagaccaaatgtggtacatgcatcctaaaatatttactagctggctcttcatggaaaaactggcccagccttcccttagcctcttcctcccttctgaggagactaacctgtttcttcccaaagcaggatccgagccaggagacactgagcctttggagttaggaggtcctggagcaggtgaggatggagccggggctacggtgggaagcctggtggggtctcaggaaatcctttgcaaagaactggggttggttcctctgtttcacctgcggtgattcctttgctcccccaaactcccaacagaacctgaacagaaagaacaatcgacaggacagaagcggcctttgaagaacgacgaactataacccccacctctgttttccccattcatctccacccccttcccccaccacttctatttatttaacatcgagggttgggggaggggttggtcctgccctcggctggagttcctttctcacccctgtgatttggaggtgtggagaaggggaagggagggacagctcactggttccttctgcagtacctctgtggttaaaaatggaaactgttctcctccccagccccactccctgttccctacccatataggccctaaatttgggaaaaatcactattaatttctgaatcctttgcctgtgggtaggaagagaatggctgccagtggctgatgggtcccggtgatgggaagggtatcaggttgctggggagtttccactcttctctggtgattgttccttccctcccttcctctcccaccatgcgatgagcatcctttcaggccagtgtctgcagagcctcagttaccaggtttggtttctgagtgcctatctgtgctctttcctccctctgcgggcttctcttgctctgagcctcccttccccattccccatc

SEQ ID NO: 67623 - DNA, 1343 bp, Homo sapiens
gcgtcgctccagccccagagggagagaagaagcagaagcccgccaggaagcggcgaatggtagaggagatcggggtggagctggttgttctggacctgcctgacttgccagaggataagctggctcagtcggtgcagaagtaagtgaggacagctggtgtgtgtgtgtacatgtgtgtgcaaggtgggcaggatgtgggatggcgccctgggagggagggctgtcggacccagagtctcaagttctcacttgccctctccctcatccctacccctcctttgtcccatagacttcaggacttgacactccgagacctggagaagcaggaacgggaaaaagctgccaacagcttggaagcattcatatttgagacccaggtcagtgggcaggaggcagcagcccccccactgggcttacacctggctctgtgggccttgcctctgggcttgtgggtgcatgtgtttacatgtccccctccccaggacaagctgtaccagcccgagtaccaggaagtgtccacagaggagcagcgtgaggagatctctgggaagctcagcgccgcatccacctggctggaggatgagggtgttggagccaccacagtggtgaggggcctctcaggacatggcaggtggagtgggagctctccttcctctcccagggtcagagagagagaagagctggggcttgagcccataaagaaggacatggggctgactccaggctctgctgtcgtcccttccacccctctgcccaatcgcacatccatcagatgttgaaggagaagctggctgagctgaggaagctgtgccaagggctgttttttcgggtagaggagcgcaagaagtggcccgaacggctgtctgccctcgataatctcctcaaccattccagcatgttcctcaagtgagcagcccctgaaccctttttgcagtcctgccaaggccactggttttcattcctaccagcttcccactccccacactccaggcccctctccctctggggctaatggtctcctttctggcttccaggggggcccggctcatcccagagatggaccagatcttcactgaggtggagatgacaacgttagagaaagtcatcaatgagacctgggtaatcacttcgtaaatacttaaccagatacttagctgccatcctaggtactgtgggagaggtggagagatgaagccacagcagcccctgcctcctggcttagcatctaacctgaagacaaaagatgtttgtatttgagcccacctctgattagtcccaagcaagggccatggccataagagtcatcagcctggaggagcaaaaaagcccatcccatgaggaca

SEQ ID NO: 67624 - DNA, 2503 bp, Homo sapiens
tttgtgtgattattcaacttttccatagcagggaccctgtctctctccccaccgccacatttgtattcccagagggaagtacataagtaatgctcagtaaacactgtcgaatgaatgagtggaagaagggtcactgcgaggtgtcagctgtgctgtagagagttgagggcagagtgtgtgtccacacatggggcactggagatgaacaaggtcccctgagatgaaggaaaggtgccatgtggggatgagaggctcctgtgcagatgcggggactccatgtgttcttcacttttttccctgctcccttttctcaacagatttgaccgtaccctggggggcctggagatggagctccggcttcgagaacgcctggctgggcttttcaatgagcagcgcaagggtcagagagcaaaggatgtgcgggagaacccgcgtgccatggccaagctgctgcgtgaggctaatcggctcaaaaccgtcctcagtgccaacgctgaccacatggcacaggtgcccacaagtggctggttgaggctatattttgtcccacgtagagggtgggggaccctgccactgaactgggctgctcgtgcctggcatggcccatgctcctcccgctaccatcctcccaaagacctattctttttgtttctgtcctactcaccaagagagcgggagctgggcaagaaccccctgacagtccccatcctctcccagattgaaggcctgatggatgatgtggacttcaaggcaaaagtgactcgtgtggaatttgaggagttgtgtgcagacttgtttgagcgggtgcctgggcctgtacagcaggccctccagagtgccgaaatgagtctggtgagcgagtaggggaaggcgggaatgccccgtaggaaagggcataggaaacccatgggacgtcaagggacgagtcagtgctaactgcatgctgttgcacctgtcattcttacccactgcaggatgagattgagcaggtgatcctggtgggtggggccactcgggtccccagagttcaggaggtgctgctgaaggccgtgggcaagtgagtgtgggggctagagcgcttggctgagttctgcctggggcagggctttgggctgagcagctggagggctgaggggagggaagtcccggttgcatgctccagggtagaccgtgctgaggcttggggctttcccagggaggagctggggaagaacatcaatgcagatgaagcagccgccatgggggcagtgtaccaggcagctgcgctcagcaaagcctttaaagtgaagccatttgtcgtccgagatgcagtggtctaccccatcctggtgagtgagcctgactgagcaggtgacaagctccctttacctctcccaagtagggtttccccttctgtctgctctggctcatccctttgtctttctgctaagaggtctcccccatcccacccccatccttaccccagaacctactcgggttctctagtgtgcaacagtgtgcctctgtctgcctgctgtgtaggtggagttcacgagggaggtggaggaggagcctgggattcacagcctgaagcacaataaacgggtactcttctctcggatggggccctaccctcaacgcaaagtcatcacctttaaccgctacagccatgatttcaacttccacatcaactacggcgacctgggcttcctggggcctgaagatcttcggtgaggggcaggggtgtaggatgggagctccagggagggggaggcgtggctgctggataatctgaggactgggggtgagggaggatgtgggcctgcggggctgaaacagggcagctatgatcagcttcgctggagaatgcatccgtcctcttgagtgtgcccttggggagtgcccctgacaccttgtgccaggaggccatgtagtctagagggcgagatgggctggggtgggtccccctgaactcctctttccttcccaaccagggtatttggctcccagaatctgaccacagtgaagctaaaaggggtgggtgacagcttcaagaagtatcctgactacgagtccaagggcatcaaggctcacttcaacctggatgagagtggcgtgctcagtctagacagggtgagagctaaaggataccctgtgtgcagagcaggggctcaggccctgccagccatttccaaagtgggttccacatggcattaggataagataaccaaaaaaggtttaggaatcagaaaaatgttggctctgaacagagctaactgatgatctggtgcagacctccttatagcctataaatgcttataggcattgtaaatttcttggaactattgaatggtttgatataggcattgtaaatttcttggaacaattgaatggtttgaagaatccactctttttttttttttttttttttttttttttttttttttggagagggtcttggctctgttacttaagctggaatataatggcatggtcatagcgcattccagccttgaacacttgg

SEQ ID NO: 67625 - DNA, 1055 bp, Homo sapiens
taaggtatggagccggcgggacccttttctgttgtcatctgtagagcagcccatcaaggatgcagtgatcaccgtgccagtcttcttcaaccaggccgagcgccgagctgtgctgcaggctgctcgtatggctggcctcaaagtgctgcagctcatcaatgacaacaccgccactgccctcagctatggtgtcttccgccggaaagatattaacaccactgcccaggtgagccaggggagccttgaccagacatgcagggtgactgaatctaaggatggaggccacttggtcccttttgcatctggtttgcatggctgggctgacccttggcaaaatgcaccaatagcctcctcccagcccctgttggagctgtttagttttgtgttaagagtcagacagcccattggaagcaggtgggtgggcaggcaggccccctggagtttgagaaggttcctgtgacagttgccttgatatctctacagaatatcatgttctatgacatgggctcaggcagcaccgtatgcaccattgtgacctaccagatggtgaagactaaggaagctgggatgcagccacagctgcagatccggggagtagggtaagtggatacttggcagggagggctgcttgtgaagaccctcaagtcaggggtttcttcttggaggagacacactgctttgctttcctgcatgctgcaggaatggtctcctgattgaggcatcagtcattgtaggggaccactcacaaagagtaaggggaagctgaggctcaggggaggacagtttgggaaaactggaagacatggaactttcaaaatgtattctaaggaaatccatggagccgcaggcaatatgtagggtgtcagattcaatcatgtttttgttctcttgtcatttccagttaaataatttaccattcttgttgtcttacctctttttaaatttttttttatggcctgtgacatagccctcaggagatcctgagaacatgtgccctgttgtcttatttcttgaaatcatctttttccgtcttcaccattaccacccagcccaag

SEQ ID NO: 67626 - DNA, 2553 bp, Homo sapiens
gcctgttattccattcctcggccgggctctacaggtgaccggaagaagagccccgagtgcgggactgcagtgcgcccgacctgctctaggcgcaggtcactcccgaaccccggcagcaaagcatccagcgccggaaaaggtcccgcggtcgccccggggccggcgctggggaggaaggagtggagcgcgctggccccgtgacgtggtccaatcccaggccgacgccggctgcttctgcccaaccggtggctggtcccctccgccgccccattacaaggctggcaaagggagggggcggggcctgggacgtggtccaatgagtacgcgcgccggggcggcgggggcggggccgggcgcgcagcgcagggccgggcggccgaggctccaatgagcgcgcgccgcgtccggggccggctggtgcgcgagacgccgccgagaggttggtggctaatgtaacagtttgcaaaccgagaggagttgtgaagggcgcgggtggggggcgctgccggcctcgtgggtacgttcgtgccgcgtctgtcccagagctggggccgcaggagcggaggcaagaggtagcgggggtggatggaggtgcgggccggccacccctcctaggggagacagcgtgcgagctccgggggcgggtcgggagcgcaagggagggccgcgcggacgccgggcgctcggcctcgcaccggggggcacgcagctcggcccccggtctgtccccacttgctggggcgggccgggatccgtttccgggagtgggagccgccgccttcgtcaggtggggtttaggtgaacaccgggtaacggctacccgccgggcggggaaccttaccgcccctggcactgcgtctgtgggcacagcggggccggggagtgagctgggaaaggggagggggcgggacaacccgcagggatgccgaggaggagataggcctttccttcatcctagctacccccaacgtcattacctttctcttcccgtccaggcccagctggctttccccgtcagcgggggagctccaggtgtggggaggtggttgagccctgggcggggatccctggccgcaccccaggtgtctgacaacaggcacagtgctgcggtgcgccactcactgcctgtgtggtggacaaaaggctcgggtctcctttctcttgtcctgttagcttctctgtttagggatgtggcaaagccgaggacccatgctctttcacttgggcctttgtgtgggcgctgctgggatgattagagaatggtttgtacccatcaggagggagaagggagaagtaggctgatctgccctgggtaagaatgaagtagatatgaatcttacagcctctccgttctgggatgtgattctgtctccttcactccgggtatccagttttaagtgttttctttcttcgcctcccccaggggcactatggcagacaaagttaggaggcagaggccgaggaggcgagtctgttgggccttggtggctgtgctcttggcagacctgttggcactgagtggtatgtaccccagtagagggagcaaatggataaatgatgactgaaggatgcatgatgggaattgagcttggggctgttggccagaagtctcttgagttgttaggtccaggcctttttgtcttttgccatcttcgtttacccatggaaagtggtatgctttgattagagggagtcccaggaaggtgggcgaagggagagctaactgacaaacctcttttcccttcagatacactggcagtgatgtctgtggacctgggcagtgagtccatgaaggtggccattgtcaaacctggagtgcccatggaaattgtcttgaataagtgagggtggcccccgtgttaagggtggggaacgagggagtctgggctccaagtgtgaatgtgttagtcatagtgcccacagcagacttcggcatctgagtggttaaatgtgtgtgagtgtcgaggcttctgagtccttctgctgcaggcacctgggcccaaaatctcttttcctcagggaatctcggaggaaaacaccggtgatcgtgaccctgaaagaaaatgaaagattctttggagacagtgcagcaagcatggtgagctagcagtccctcttcccagagtggtgggcagaggagaggagatggcagcccccagagtctgtttccttatcagtctctgtgatgtaagaggtaggtaatggtggacttgggagcctaatactagtctgctccttcttcacccctcaggcgattaagaatccaaaggctacgctacgttacttccagcacctcctggggaagcaggcagataacccccatgtagctctttaccaggcccgcttcccggagcacgagctgactttcgacccacagaggcagactgtgcactttcagatcagctcgtgagtgctctgttggggaaggtggtctcggcaacgctgctgggctcctcattggtgtgtgttcctgattgtcctgccttaatgcctggctttccttggctccaactaccttccttcccctcaggcagctgcagttctcacctgagg

SEQ ID NO: 67627 - DNA, 1018 bp, Homo sapiens
tgttttggttttatttttttaaggggtaagtggggtcttctgcatgatgaaagtactccctgttagatgctggtttgttttgctttcattcagttccaggcacagtgttttacatataccatgtattggattattattttctaaatgaatggatatgttagtgtacttaattttctaatctgttacttgggttaattgtaggatcctaaagggtaagatcaggtttatgtgttctctatgtacaactaccggcacagcgctgcatgttatgggatgagagggaccagagaggtgatttgtgctgggtgaaatgtgcaccaaagttatcatgggaaaggaaataggggagataagacagagatgtccaaacatctggtgctttttctttcctatgcaggtcagagtttaccagcagggattcacagagctccgacaagcagattctaaacatctatgacctgtgcaacaagttcatagcctatagcaccgtctttgaggatgtagtggatgtgcttgctgagtggggctccctgtacgtgctgacgcgggatgggcgggtccacgcactgcaggagaaggacacacagaccaaactggaggcaaggccaccaggctcgcagagctggccacaggcacctagaagcagctgcaggagcaggttccccaagtcatattggccagggtgtttccctccttgtgggtcacagccttactcagcttccttagggtaggattataaggtaaatggcctgggatggggctttagagggaagtagtggctgggagcctgagcccactctaagggttcactttgtttccagagaaccttatgaaataagatgatactgatcttggggatatctggtagctcttggtttgtctaggatctaggcagatcagaaatccaggactttctgttttgtgtgttgtgcgcacattttgggaaagtgtcttcccaggaccacttctaccaattttctaatctctcttcccttctagatgctgtttaagaagaacc

SEQ ID NO: 67628 - DNA, 1034 bp, Homo sapiens
gcaaggggagtgggagaagtgtgttaacaagtttagagaaggtggcccaggaaaggcctcagtgaaagggtcacatctgagtacagacctgaaagttaatttagtggcagttgtgaaaatggagacagaggaaacaatccccaggctgagttggccttgttgggagcatgctgagactcactgcaggtccagggctgttgtattcatttgactcccttaaggcgataagaagagcagggcagggccttcaggggccttaccagggaccttgccctgtgcacttcagctgccttctttctcatccttgactcctggccttgccctcacttttgccactcacttctggtctttcttccctgtagtcctaagattttccaaaagaccaagtgcagcatctgtaacagtgccttggagttgccctcagtccacttcctgtgtggccactccttccaccaacactgctttgagagttactcggaaagtgatgctgactgccccacctgcctccctgaaaaccggaaggtcatggatatgatccgggcccaggaacagaaacgagatctccatgatcaattccagcatcaggtggggatgagtgggctagatgggccaggggattcccactagtgtcacagagtcactggagggcttgtttccttatcacctcctcatttaagaaacaagcactttgattctgattcgtattccttccctcctcttctcctgcagctcaagtgctccaatgacagcttttctgtgattgctgactactttggcagaggtgttttcaacaaattgactctgctgaccgaccctcccacagccagactgacctccagcctggaggctgggctgcaacgcgacctactcatgcactccaggaggggcacttaagcagcctggaggaagatgtgggcaacagtggaggaccaagagaacagacacaatgggacctgggcgggcgttacacagaaggctggctgacatgcccagggctccactctcatctaatgtcacagccctcagaactaaag

SEQ ID NO: 67629 - DNA, 1070 bp, Homo sapiens
ttttctccatgaaagcctagagtctggcctctgattcacaatcttcccagcctacggtgttagaggtggggtggtcaagaagtgaagacagatggtccttgacttacaatagggttacatcctgataaacccattgttaagttgaaaacaagctgaaaatgcatttaatacacctagcctaccttacatgtgctcagaacacttaagattagcctattatagttggacaaaatcatctgacaccaagcctgttttacaataaagtgaatatctcatgtaatgaatactgtactgaaagtaaaaaacagaatggctgtatgggtactaagtacagtttctactgaacgtatatcgctttcacacaatcataaagtctaaaaatcctaaattggggatgactgtaaggcagaaaggagatgcagatgagctggggagaggataggggcaggccctacctgccccacccggttgtgccagcccatgcgctgcaggccagctgttgccaggatgatggcactgaactcctgctgctcgtccagcttccgaagccgggtgttgaggtttccccgctgtggagagttgctaaggaccacagtgtcgggcaatctggggcctcgtgcggttccctctgcctgagtctgtctttccctctctagctggctgactttcagtcatcttccagctctcagcttaatgttaacagctaacagttacatcatacttactacatgccagacactgctctaaaagtactttccatatgtcagctcatttcatcttcacaacaaccctgtgaggaaggtagtattattatccccactttacagataaggaaaatgacatagggaggctaaataacttgccaaggttacaagacctctgagaaaccttccctgacaccccagacttctgtgtttagatgttccaactagaagtttccagaaaattcccaacttcacttattggagcacttagcacatactatttttaaatttagttttatgaaatgtactacatattcattgtaaaagtcaagacaatatagtagcatataaaaatggaagtactga

SEQ ID NO: 67630 - DNA, 2715 bp, Homo sapiens
gaaaacttttaaggggtctaatttcttcacttttccattctccctttgtcaggtaggagaagggagtagggagtgactggacctggaaaggagggctgcagtagctataatattgacccctttcctttaaaaatcctacgccggcacagatttcccagacgctctctaggtggcctcagactccacccctttggtcttccgcttctggtttccgattgtagtgtttaaatctcgcgcgctttacaaggattggctacatcagcggatagttggcagtctgcgtgctacccctcctcctcgccttttctccccgggcaaaaggttttcaaattcgaccaatcagcgggcgcgctccctcagccgagccgcgacacccaagggttaaccgcaaccaaccggaggcgggtattggagaaaagagccaatcaggagggcgcagaggtgtgtcctgggggcttataaaggcggcctcgcggcgcgcgcgcgacagcagttacactgcggcgggcgtctgttctagtgtttgagccgtcgtgcttcaccggtctacctcgctagcatgtcgggccgcggcaagactggcggcaaggcccgcgccaaggccaagtcgcgctcgtcgcgcgccggcctccagttcccagtgggccgtgtacaccggctgctgcggaagggccactacgccgagcgcgttggcgccggcgcgccagtgtacctggcggcagtgctggagtacctcaccgctgagatcctggagctggcgggcaatgcggcccgcgacaacaagaagacgcgaatcatcccccgccacctgcagctggccatccgcaacgacgaggagctcaacaagctgctgggcggcgtgacgatcgcccagggaggcgtcctgcccaacatccaggccgtgctgctgcccaagaagaccagcgccaccgtggggccgaaggcgccctcgggcggcaagaaggccacccaggcctcccaggagtactaagagggcccgcgccgcggccggccgccaggcctccccatgccaccacaaaggcccttttaagggccaccaccgccctcatggaaagagctgagccgcttcagactgcggggcaagcgggccgcggctcccttcccctcccctcccctcgcccgccttcgccgcccggcctcgagtccccgcccgcccccgctcccgtcccgcaccgcctgccgcgtcggcctcgggccctgccctgtccgccgtccgccctccggtagggttcgggccttccggatgcggcttgggcgctcttcggggacctccgtggcgcggaagacccgagcctgccggggggaggccggcggcgccgcacctgcccgcctcggcgttcgtgactcagccgccccatcccgagtcgctaaggggctgcggggaggccgcagcaccttctggaagacttggccttccgctctgacgcagggccgaggtgggcagtccaggccgagaggccggcggccctgaaggtgagtgaggccctcggcagctgcagccggggtgtctggtacccccccggcgtggtgcttagcccaggactttcagacgcggccgctggccgggaggctttggtgggagagacgcgatcgccgatttcggtctggcgccccttctgcggccgggacccaggcctttcacatcagctctccctccatcttcattcataggtctgcgctggggccgggacgaagcacttggtaacaggcacatcttcctcccgagtgactgcctcctaggaggacatttaggggagggcagaggcctgcagtttggcttcacggctggctatgtggacagcaagagtcgttttcgcggaagccgactggcagccaggcctgtcgggccccccgacgccgccccatttcccttccagcaaactcaactcggcaatccaagcacctagataccagcacaagtcggttaatccctgtctggactgagcctccgttggcttctgaactggaattctgcagctaacccttccacgactagaaccttaggcattggggagttttagatggactaattttattaaaggattgttttttttttaaatggagcgtttgttttcattttgcaagagagttgtagaattagtgactttctatactttcctgataataggggtgggaggggccatgcaatataaacaggctctactgttaactgaaggggcaaaccataggaatttaagattgtggctctgtttcttggtgttcctgggagacaatttattctgtgtgaaatgaaaactattgaggcagaagcagaaaggacgtaccaggagaactctgggcaaaagtcccagcctctgaggtaaggatgaaagggctttgtgtttgttcctatcttcccgccaactccacacgcgcacacacaacaccttcagaactggtttattagtaggattggttacattcaaaggctgttgcttggacttctctaaagagatgaagcccccacatactgaggaggcaaggcagtcatcaaggccccaaggtgaggcaaatccctggaaggcttgaaccctgcagttcagtctcccggggtaatcactccccagatagcagtgagaatggggcactgaggcccgggatgtaggcactggacagcagcaacccaggcatctgtgccccacaaaccagttaatgggcatcgttaagctgccgtgcaacatccaggatgttttt

SEQ ID NO: 67631 - DNA, 1059 bp, Homo sapiens
gtggccacagtcaccctcatcccggccttccggggccacttcattgctgcgcgcctctgtggtcaggacctcaacaaaaccagccgacagcagatgtgagcagcggcacacgggtccgggcagggggcaagggctaaggaaggagtggctagggcaggggcgggaaccggggtgcttgaccacacgtgaagactcagaactaacccaggcagcctggaactcggagaggtgatgagcagaacttactcgcattggggaaaggatgggtagggacccttgggtatatctgggactctggcagtggtgctttcctccctccgcccccctcaccacttaccagaataaaaaaccgggaatgagaagaccactttgggttactgtaacacctgcactagtgagtgaccacgccccctttcctcttccccctcgcccccttgctgctgggccacagcccagaatcccagggagtgatcagcggtgctgttttccttatcatcctcttctgcttcatccctttccccttcctgaactgctttgtgaaggagcagtgtaaggcattcccccaccatgaagtaagtgggttcgtgggggtgattgcctgtggctgggacctgggaggtacctgagagaactggggttatttgggcttgtggggaggggctaagaaattatcagaaaagacaggaattcttaaaaggtggaatgggagcaggcttgagtcatggacctgcccgagcctcccccagtttgtggccctgataggtgccctccttgccatctgctgcatgatcttcctgggctttgcggatgatgtactgaatctgcgctggcgccataagctgctgctacctacagctgcctcactacctctcctcatggtctatttcaccaactttggcaacacgaccattgtggtgcccaagcccttccgcccgatacttggcctgcatctggacttgggtaggtagtcctaccactgctgcccctatggcacctacttcagggaacccttcctggtgctccacattctcctccaagtgttccttttttgtctctgtg

SEQ ID NO: 67632 - DNA, 1034 bp, Homo sapiens
cccagctgactataattgtccatcctgctaccctcagccctccagcaccccctggggtcctccaacaaacccagaggcctctgtggcatttctaccccactcagtgggcccccatggcacttctgccattataggggccccactgaattgccccaacttcagggagccccagtaccccctctgtccccgctccatattttcatagcatctccccacaccttcagcaggccccatggcactttcctacactcccattagctcctggggtgtcttttagtccccacggcatcttcctaatcacccttgtgattaatcaccctttaatcattcttgccctctgagtcacccaaagtctgcatctcaacaaagacagtaggggtgggggccactctgaagcaactcccagctcactgaccctcccccacccaccagactccccctcccgctccccgtccaaggtggaggtgaccgagaagacgacaactgtgctgagtgagagcagtggccccagcaatacctcccatagcagcagccgtgagtggggaatggggtgcatgagtgtgggttggccctggtgccccagcatcaaaaagtactctgggtgggataggaggagttccaatccaagaaagagccagggagaagtcaggttattcattctctgcacccctagcaggggacagccacctttccaacggcttggaccctgtagcagagacagcgattcgccagctgacagagcccagtgggcgggtggccaagaagacacccaccaagcgcagcactctcatcatctctggtgtttccaaggtaacagggctctggggagaggagctgggatggggagaaagccctaatgggtcggtcactcctgcccattaaaacccgtccctcctgccaggtgcccattgctcaggacgagttggcgctatccctgggctatgcggcatccctggaagcctcagtgcaggatgatgcagggaccagcggaggcccctcttcacctccctcagacccaccagccatgtctccag

SEQ ID NO: 67633 - DNA, 1131 bp, Homo sapiens
ttccatgatactgtgtccattcatagctccctaagctctccttttctccttgggtggttcccttctgcctgggatggttcccctctcctttctgtgcctctccactatcacctacagccctcctttcttctgcctgccccaccccagagcagcacttccagtgttctcactgttccaagagatttgccacagagcggctattgcgggaccacatgcgcaaccatggtgagtggcctgcggcccacagcctccctcctgccctccaaggttccacaagttctcacatcacagcctcctctctgcttctctcagtgaatcactataagtgccctctgtgtgacatgacctgcccgctgccttcctccctccgcaaccacatgcgctttcgtcacagtgaggaccggccctttaaatgtgactgttgtgactacaggtaagggggaccagggaccagaaaacagctcatgttccagtgttccccatgtcctccaatccctcctgatttctcatggcagctgcaagaatcttattgacctccagaagcacctggatacccacagcgaggagccagcctacaggtgtgattttgagaactgcaccttcagtgcccgatccctctgctctatcaagtcccattaccgcaaagtacatgaagtgagtggggctggtgttgggaaggactagtggaagtatgggggaccctggggtgaagagctggtctcatttctcccttccttccccatcagggagactctgagccaaggtacaaatgtcatgtgtgtgacaaatgcttcacacggggcaacaacctcaccgtgcaccttcgcaagaagcaccagttcaagtggccctcagggcatccccgttttcggtatgtctctcaaccctccttcccagattaacacacttgtttttataccttttcaaccagttttaaaaaccttaatttgggtcgggcgcggtggctcacgcctgtaatcccagcactttgggaggccaaggtgggcggatcatgaggtcaggagttcgagaccagcctggccaacatggtgaaaccccgtctctactaaaaatacaaaaagtagctgagcatggtggcacatgcctgtagtcccagctacttgggaggct

SEQ ID NO: 67634 - DNA, 1002 bp, Homo sapiens
attaatatttatcatgtgcttgctgtgtgcctgatatattcaaaactcaacctatccttcttcccttactccctacctcactatacacgttagttgagcactttctctgtgtcaggtattctgtattcattgtggagctaaataacctggcctttgcctttatgtaaggacagtatttttctctttagagttgtggacaccgaggctcagagagttagattaacatacgtttaccagcctctcttccttagaaacacacaatggttcaacccaaaaaaaagataagataagtctgcctttacccaaggttttcaaaatgttaatgagcagttctgttttgtttgaatgtaaaggaatggtgactgtttcatttcatattacagaagtgattctttggaggccatacttcaaacatcatataaagtagtaaactacataaatttaagagaagttacacatgtcttaataacctaataaccatgccttttggacacaaaaatattcagtagtgtgatttacagcaggattatatgttcacataacgagagtttcactcctgaaatttctaatggaacataggctagatgatgcagagagaggaattacaaagaaaccctcctgcacccacccccaagaatcagtgataacttttgtaaaactacggtattatagagaagtaggctgtgaatgtcaagtagaaagtgcagaagctttttccaatcactttactctaatattgccaaccaagacttgctctaaaaccataatacttgtgaagtctacaactgcatttaaattaggacatcttaaagaacaagccccaaaactggctacaagaacgtctttcctgccaggctttagtatacaaagccaacaaatgcctgctagagatacctagtagtgtgaaaatgttagcagcattgtaaacttcaatcctggcagcttagttttttttactcttatttgttgtgatttgaatttaataatacattttcttcagaa

SEQ ID NO: 67635 - DNA, 1509 bp, Homo sapiens
tttattaacactttctcctttacataatttttcatcaatgactttttttttttttttttgagatgaggtcttgctatattgagcaggctggatcgaactcctgggctcaagtgatcctcccatctcagcctcctgaatagctgggactacaggcatatgccacggtgcatggctctaattttcttttaatcaaataccatgtcctgttttctgtgaaccaggcattattctaagtactttgtaacaatcttatgagaatacttaaaaaaatttttttttcaaatgacaaataattgtctatattcatggggtacaatgtgatgttttgataacgtttatactttgaaatgattaaactatgagaacacttgaaatgagaaatctgagtttttaaaagcaacttgtttccagctccatgatatgtgcatgtaaccttattctacactgccttcatctcactgctaaacactttgtatctactgacacgtaagtgtgccaactggtaaaatgactaagaaactatgctaccaacaatatgttaatcatttaggatctgcaaggaagataatttataaaacctcaacctagtgattttatttttttttaatcttttttttttttttttcttgagatggagtttcacttttactgcccaggctagagtgtaatggcatgacctcggctgactgcaacctccgcctcttgtgttgaagcaattctcctgccctcagccctcccaagtagctgagattacaggcgcctaccaccacgcccagctaagtttttttgtttgtttgtttgtttgtttgtatttttggtagagatggggtttcaccatgttggccaggctggtctcgaactcctgacctcaggtgatccacccgcctcggcctcccaaagtgctgggattataggcgtgagccaccgcacctggcctcaatctagtgattttaagagtatctaatatttagtcatacataggcctaaaaagccctgcacaatggttgatgtcaatagcacttagattgctatttaacagaaagcacaatggaagattttctttccctaagtggctttttaatcatactcaatgaagtaaaagaacaggaggaaaggaatcactattatctggttcaactttagaaagaaaatattcaactgattattttaaatgtaaataccctgaaaaaaataccataaatataaggaaacaagttaagaaacactaaatctaaatacttaacttggatttcaaccacctagatatattagacactagactggatgagtgttctgcatgtaaatggagtagggggagggtttatggaaagagagaaaagaaaaatgttaacaaaaggtttttttttttttccatttctgtaacaaatttaacacacaggatttaagctttctgaagaaaatgtattattaaattcaaatcacaacaaataagagtaaaaaaaactaagctgccaggattgaagtttacaatgctgctaacattttcac

SEQ ID NO: 67636 - DNA, 1098 bp, Homo sapiens
actgcatcaacaatatatgcttctctccatctctagcagttaacactaagagtttactagggattagatgctttactaagctaaataaagtgcatttaattctcataatgctttgaaataggaattactaaccgtatcttacaaatgagaaacaaagacttagtgacattaaataatttgcaaggtcacaaagctagtaaggggcagcataggtctatgaaattcaagagccagggctctttggttatgacacatttcctttccaatgactacggttactaaatcctgcccattcttcaaagttctcaaacactgcctccttggggaggactctccagtctatatttaacgtctactctcagcttctgaaccccctacagcaacttgctcatagtttttcacaggttccatcacgttctgcttcatattaattgtcttattccccaatctggaagacaactccttaagggcagaggcagggaaagtatctcttacacactttatcccctgcaaccctggtcacactgggcacataacaggcattcaatacatttgtagaactgaactggaaaatattacctacttttgacaaatttttaatttcagaataattctacatctacagaaaagttataaagaccacgcagggagttcccataaaacccaaatccagtttcagtttcccctaatgttaccatcttatattactgtgggacattcttcaaaactaagaaaccaacatcagtatggtagtactaactgaatcccaggctatatccaggcttcaccagttttttccactaatgtttttatctattccaggatccaatcaaggataccactttacatttactcaccctatctccttagtctcctctggtctgtaatcatttcttagtctttccttgtttttcatgacagttctgagcgctgttcaagtattttaaaggatgtctctcagtgtgtctgtctgtctttctgatattttgactggagttacgagtttatggaaagaataacagaggtgaagtgcccttctcaacacatcaagtcataatatctacatggtatcactgaaaatgttcaactcgatcactt

SEQ ID NO: 67637 - DNA, 1329 bp, Homo sapiens
tcttcaaagtaccttatgagcaagagttacaagataactttttcagtattctatatagtagtgactgtactggtcaaaatagtttcagagatttttctgtttacctcatcattcatataaaggccacttttcacctcctgtcttgcttaagatggtgattgtgattcctatgaagttgtatttatatttttacttttgaagctaaaacaatagctatagttgctcatttaatttttaagatacttgtgtattggtgatatgtaaatcttagttctttattatgtgaagttgtacacaggaaaatgcataacattgctttgggcctgaggcacaaaggtacgttggctttgaaggtaggccctgaggtagagagaaaagaaatgacaccagtcttgaattaaaaaaaaaagatactgcatacagaatcagcatttgattatgagtaagctgtgagaggaaaagagaagaggaagacggaagctgtagagtagaatttgtagttccgtagatttggatggttagagctgaaggcgaaggttagagtggaaggcgaatgacctccttcctcagcactgtgttactgggttagagaaaagccagtactgctcgctgctgctggaactgaaggaaggaaagttctgtcttcagggtatttacaaaaagttgaacagttgtgttcctttgtggatctttggagaatcgttagaactcactgtgtgagttaaggtaactgctgacagaattttttcaagtattgcttaccatgtaaactcaaatgtctgtatcatacctcattctttttacatgttaagacagattctgctgattaaattctgccccatatactgtagacactgaaccataagcttcagattggttacaaaatgctctgacccatggacttttgtaaattcattatttccttttaagaagtatgatgcttacagtggatatctctggtggttttaagaaatgtaagcaggctttttggagggatgcattctggagtaggaaaatgtcttaaattgatttcccgtaacagtttcagtcagcactttgaactgctcttaggtacctggtgccattacatctttgtggtcaataactttttgtttgtgtggcttacttcacaaaataaaaatgctttctgtgtcctgttattttggtatgcatattttatctttgatccaacatagtgctaggtacctggtagattttcggtagaaaattattttaagagccaaagataaccagcatggtccagttattccaagacccactccctgtattcacttcagactcagcttaaaaagcaacactcgataaggt

SEQ ID NO: 67638 - DNA, 1093 bp, Homo sapiens
tccgtgatagagtgattatagcagtgcataagttcttacacttatttgttgaattctcttacctgtcatcctaaaaaagtaaatttgtccatgttcatgcttagctattaagctttattaattcaagattaaaagctttaagatatatgactaaattttttctcttgtttacttcataatatctatttgaatggaggagatacaagtggaggcagtgaatgcaacagtatttcttcattgtgtttgtatctttcatatgatcttacagcaaaaagtttctaaaacccttctttaaataaagaacaagatcactgaatatgtaacatcctcaacagcgcatttcttttctcttctctacttttttatatccttgaataatactggccagaaagaatatttgaagaggttctttctaaatgtattttaatattcatgttaattatacatcttgtatggtgaatttggtgcatttaaaataaaaataattttatgtgtttaattattgcattctgatcatttgtaggcgaaacctaaccaaactgtccctcatcttcagccacatgctggcagaactaaaaggaatctttccaagtggactctttcagggagacacatttcggattactaaagcagatgctgcggaattttggagaaaagcttttggggaaaagtaagtctcagaataatgaatttgaactatgaaaaactaaagcttacgagttttttctttacttttttactaatgaaatatttaaaatttgggaactctgagaaaagtaatatatgtgtatgtatttcctggctttggttaaatattaagtttttgctctgttcattgtttttaaaaaatagttttgcagattaaattgaaacccatgctctttgaatactcttccctttctctccccatccattgtggtttctttttgagacggagtcttgctctgttgcccaggctggagtgcagtggtgcgatctccacttactgcaagctctgcctcctgggttcatgccattctcctgcctcagcctcctgagtcgctgggactataggtgcctgccaccacgcccggctaattttttgcatttttaa

SEQ ID NO: 67639 - DNA, 2702 bp, Homo sapiens
cctgtaatcccagcactttgggaggccaaggtgggcagatacttgagatcagaagtttaagactggcctggccaacatggcgaaaccccatctctactaaaaatacaaaaattagccaggtgtggtggcacatactgtagtcccagctactcaggaggctgaggcaggagaatcatttgaacccaggaggtggaggctgcagtgagctgagattgtgccactgcactctagcctgggtgacagagccagactccatcttaaaaaaagaaagaaagaaaggaagaaagttattgttattcttgatggttcttttgatttttgtctgtatcttgccttgccttccaccgtaataccagcataatctactaaagcttctgtttatgtctgttcatagttatatcttccggctgagctgtactcgtctgggtcagtgggctattgggtatgttactgctgatgggaacattctccagacaatccctcacaataaacctctcttccaagcactgattgatggcttcagggaaggcttgtgagtacctactgcataccatctgttagagtctgggaacttaggggctgtccaacctcatcattaatgactttattccaggtttcttaaactgcagactaagattcaggaaaatattaacagatgatattgatttgaccttcaggtcctggaagacttttgtttttcttttttagggattccatgagtgaaattattctctaccacttcagttattaccataaataaactttatctttcttttttccaaatgttaacttattttcaagcctgtgttaggttttaaaatataccaattagcaggaaatttgaccagttatttaactagtcggcattcaagtgattcaatgttcctaatagccataggcctcagtggccttcatctgctttcatcctcacttcgcttttgttcagcagcatttcttcaggccttgggctactgtaacctatgctgctatttataactaagtccttatttattccagaattgctattcctttgagaattcaaattaattatcagttggtaaacacttaaaaatactaacagttgaccagatggcagaaaactagcttgtgttttgaagtgattaggaaaatacattttatattatacattatcttttacttacaatagcattgggactgaaaggagtgctgccccaaatgtcagaacagtttgatgctagaaactgtggatctccctggtagatgatctcagtagcttaatttgcatattgttacattgcttttaaattggtgtctctcattttcttaaacctgtaaaccttctttgatcaaaagcaaatgcagtttaaactaagaagttaagccgggtgcagtggttcacacctgtgatcccagcactttgggaggccgagacgggtggatcacctgaggtcaggagttcaagaccagcctggccaacatggcaaaaccctgtctgtactaaaagtacaaaaagttagccggacgtggtggtgggtgcctgtaatcccagctacttgggaggctgaggcaggagaatcacttgaatccaggaggcggaggtttcagtgagccaagatcactcactgcaacctcaaaaaaaaaataagaatctgtcgcgcacacacacacacacacacacacacacacataaagaatttctatctggtggccatccattgattaaaaatgggttggtaaactgtgacccatgggccacctgtttgttcccccggggagccaagatagcttttcctaagagtcgttttgaaaaaaacaatcagagaagaatatgtgacacagactaatgtggcctacaaatcctaaatgattttctatctggccctttacagaaaagcttgctaaccaaccccttgattaaaagatagagcctatggcattgttacctggagaaggaataatagtttttggagaatatctttaaactgttctgtgttttttatttttttgaagtattattttttggaagtattttttttttgaagtaagattgatctttatacttacaccacgttgcccttttagaatggagaaactcccagattccatttgtctatattagcaagcactggcaaattggcttaaataaaacccagggttggttactctttacagctatttgtttcctgatggacgaaatcagaatcctgatctgactggcttatgtgaaccaactccccaagaccatatcaaagtgacccaggtgagttttgtttcacatgataaccatatcactggacacaagctttagtatattctttatagaactgacagcataattgaattcattggaacccattgactagattagtgaatttgtgtgtatgtggtttcactttaaaccctggagcttaaaataggacccagactagatgctttctggtttaataaaaaataaaccactgttgtgacatttttatataagcaaaatttgtataggaaacaagtcttcactttttctgttaacatttataattgcagttatttattcaactaatagtcttttaattttttttaatcaaaggaacaatatgaattatactgtgagatgggctccacattccaactatgtaaaatatgtgctgaaaatgataaggatgtaaagattgagccctgtggacacctcatgtgcacatcctgtcttacatcctggcaggtacgga

SEQ ID NO: 67640 - DNA, 1767 bp, Homo sapiens
ttaaatgaggatttccccagatttgcaaatattttctttcctatttcttctagatgtcactgaaggttcccaagttcccgagaggcctccaaaaccattcccgcggagaatcaactctgaacggaaagctggcagctgtcagcaaggtagtggtcctgccgcctctgctgccaccgcctcacctcagctctccagtgagatcgagaacctcatgagtcaggggtactcctaccaggacatccagaaagctttggtcattgcccagaacaacatcgagatggccaaaaacatcctccgggaatttgtttccatttcttctcctgcccatgtagctacctagcacaccatctccctgctgcaggtttagaggaccagtgagttgggagttattactcaagtggcacctagaagggcaggagttcctttggtgacttcacagtgaagtcttgccctctctgtgggatatcacatcagtggttccaagatttcaaagtggtgaaatgaaaatggagcagctagtatgttttattattttatgggtcttgagtgcatttgaaggtgtccttcagttcccacgtagagagagtgtggattatattacatgataacctacctggggaacagtccagaaagctatagaacaagtattttgctggaaatcctaattgaggacttaagacttcctgggttaaggatgtggccgtgtgtgtgtgtgtctgcctgtggttgtatgtgtccttgtgattataagattaacctgctgtgtgtgttaattccaggcagggaattagcacaaaaggtttaggaaggaatctttttttaaagacttccatctactgtggtattatacccaagcctagtgtgtattacaacttcaacactcccctttggcttatattaccatgtgcatagctaaagtcttctatttttagaacaccttctgtctgttctttccccatcaactccttcctcatccttcttggtgttctgtcatgggccatgggcttgctatggccagccttactgaggccaagcagcttatgggatgttctttattgtgtgtgatggtattggtttgtttggtagataagtgggaggaaaagtactgttgctacactattataggcatgtttgatactagcagctaacactggtcactccaaagcactgtttctataggaacattgaagctattaagatgttttgattatcctaattacataatgaccgatttgagatagaggcctttaaatacattccatgccctccccagaaaatagtctgtgggagtcagttgccttggtgccaggtatgtgttctgatgtaggtcatgagtctttctacttaatgggaagggaagaacatttgtttccaggatgactttctggccagaataccggaaagcttttaggaagcttcgttcacatgctatttaaatgcacaaaatagacagtaaggatttatctgttcagtttttcttcccagtgaattaatttcagcttatatgggtgtcttcatttgaacatgaggaatattaggttatattttcagcagtggttttttcctttgccctttaaggagtggggataatgtccacggtggcccagcctcttgctgatggcaccttccctgcattgctgcctcccgatgatgtggttcttttcttgtgcctgtggctttgggaatgtaacatctctttcctcctttccttcccttttcctcttcacctgaggtcctaaatactctctgtaattactgtgttcttca

SEQ ID NO: 67641 - DNA, 1056 bp, Homo sapiens
caatgcagggaaggtgccatcagcaagaggctgggccaccgtggacattatccccactccttaaagggcaaaggaaaaaaccactgctgaaaatataacctaatattcctcatgttcaaatgaagacacccatataagctgaaattaattcactgggaagaaaaactgaacagataaatccttactgtctattttgtgcatttaaatagcatgtgaacgaagcttcctaaaagctttccggtattctggccagaaagtcatcctggaaacaaatgttcttcccttcccattaagtagaaagactcatgacctacatcagaacacatacctggcaccaaggcaactgactcccacagactattttctggggagggcatggaatgtatttaaaggcctctatctcaaatcggtcattatgtaattaggataatcaaaacatcttaatagcttcaatgttcctatagaaacagtgctttggagtgaccagtgttagctgctagtatcaaacatgcctataatagtgtagcaacagtacttttcctcccacttatctaccaaacaaaccaataccatcacacacaataaagaacatcccataagctgcttggcctcagtaaggctggccatagcaagcccatggcccatgacagaacaccaagaaggatgaggaaggagttgatggggaaagaacagacagaaggtgttctaaaaatagaagactttagctatgcacatggtaatataagccaaaggggagtgttgaagttgtaatacacactaggcttgggtataataccacagtagatggaagtctttaaaaaaagattccttcctaaaccttttgtgctaattccctgcctggaattaacacacacagcaggttaatcttataatcacaaggacacatacaaccacaggcagacacacacacacacggccacatccttaacccaggaagtcttaagtcctcaattaggatttccagcaaaatacttgttctatagctttctggactgttccccaggtaggttatcatgtaatataatccacactctc

SEQ ID NO: 67642 - DNA, 2045 bp, Homo sapiens
gctctttgataaatctgtcttcctgaaaatctaaatcatgcttttgtctttagatctacacagaaatgaccctccttggatcagttttctttccagtctaatcatctttggaactaaaacttgttctaactcgtctcttggcattcagctactcctagatcttttggttttatcccctggcctcagagccatttatattcccagagtaggcagtacaggatctcgtgttgatttgctgtggttacccagtgtcttctctacatggcataaagcggcaaagcccaccattaggtgaggcggtcccgagttgaggtagagtggggcagaggaagatggcagtgaatatcaaacagtagaccgccatcaacttctaacagccagtacacacactgtttcattttgaggtaacgttcagttttgcattttgtttaaatattgaaggcctagacaaagaactagaaaaaaaaaagcagtttccaggcccatccatattgtaatttttctttatctgcagatattgcctgtagtctaaagatctctttggaagacaaagcattggctatatatcttttgccttttccatgcatctaaatcttctctggagattatctccctactgtgtaggttaagggcagtctcgacttttccttttttgagtcctgtgtggctctttgaatcagcgtgaaactgaggctccagctccctgtgttgtgtgtgtgtgccatccatgggcttgggtgtcagtttgtcacaggtatctgccagcattcaaggttttggatcatttcatgaggatctttcctttgactgggtgctgtgaggacacacctgggtctgtgcctgagattgccaggcaagattaaggaaagttttcatgtggcttttgttttgaggttattctcaaaaccttaatttcttatattttctgttgactaaggcaccagtaacccattcttcaccctccatttgtatggcaatttaaaagtctttggctttgctctgaatttaattaaaactgccttttatgaacagacttcgagttttgccattttgggcaagcccttccgcttgtcccttcctagtggctaataaagtaaaaaaacccacactactttgttctctttttctcatattcattgggctgttgtattcagccagtctcatgctttccctgggtcttcacggattgctttccaagctgccttgttgcggggttgctgcagagcagcaactggacctttccagctgtcgccatgttccttccactaaagtagagggttcttaaaatggaaaaacctgtgggctcttcatatacctccctttagttaagtaatagaccaggcagcttctcatctcagcatttacctgttaatatttttgtgaatagtgctctctacctgtgggtggccgttctcttccacttgctcgtctccccccagccccattctgcataatctaccattcttctcctctctttctcttcttatacagaccctcattactggggcccaagatgtgggatactactgttagtattatttaactattttgtagatttaaaagatttctggttaagggaggtgggggtcactgttcatcactcttaaaatatgtgttttctctatagaaaagtaaaatgtgtttatggtcccaaacagtcaactcacaaatttttataacaaaatttccttgtaaaaactagggaccatctatatattccctttaagatctagttctttttgtaggtgttcagcaatggtgataaagcagaatattctcctacctcacgtcattaaagtcagaagattatagaccttctcaaactataagtccctcttcttgccgttggcctttctgactctggaatgaccactgttcattgaaaaatagttttctgactattggtctggctctaacagtttgtttgttcatccagcaaatgtttatgagtgatgaccatgtgccagaaatgtcaggtatgtgtccttcccttggcgccacatagtagtttactaatgtttgggggattgtacttggactgtcat

SEQ ID NO: 67643 - DNA, 4481 bp, Homo sapiens
tattcttaaaaaaaactacactcagcccagcacattgatcaagtatctatctctgagcagttggccttgccagggagagcagagatgtggcaggctccttcagctggagacagggagcttctcagagaagtgagcagagactccacagacaccctaaaaaggcttctactcaagaagtaaagccactactcctgcctttttgcttagtggacaggaaggcacaggagtttgtctgggacatcatagaaattcttaggtttaacttaattctggtcattgtcttctttatttcctgtttttcttccctttgtcagtcttcgcatccaagatttcttccctccctcttgtgggccagcctgtcctgttccagagctagcctgttcctgggtagccttccttagcctccattcagcctcaggtcttttgccttcttccgtgtttatttagagagcagaatctaataacgggttccactgtagccactatccatggacttctgggtcctcttcaggtttgagtgcttgaaaatgttcattctctgggcttgtggcctgtctcctccactctcctcctcaccctctcgctccttcctgtgtgagggccgctctgcagtaatgttctcaggcaagccttcctaggcacctcagaaactactttgccagagccagtaagaatatataatattggagcagttgccaggatagaaattaaatatagattccagtttaggatagagtttttaccgagagctctttagacagtatacctgtgtcttctctggcaattgctttcattttagtcctatataaaagctttccttttctgtttttttttaaaactatgcttttgcttgcctaaatcttttgatcttatatttctctcatctcagagcctgtcctgagttgtaaggtatttcatactgccttacttaaaagttttttaaactactagagtcatttgatacacacagaagttacctaataatccaaagatgtccatcaagggaggaagggtgggtcatcagactttgcctttgatgttgtagactaggctcctgagttaagcagcagagggacagcagtgccatgtgccttcactgtgtcccaggaaatctgggttggttccagtgggaaataccagtatttcttggttctggaaagtagcaaaagagtaggagatggggaaatagggatggggagagcaagccccgcatgtccatggcgagtcaggtggggagcacgggtggaagggccggctgttgacagacagactaagctgtgtggtgctcttgccgccccttcctgggtacagagcttgagaaaaatgcagccgaccactccctgtgtttgtacagagcaaagcccaaaagccaacctcagatctcctgatttggcagctgaagaaatcagcagagtcctgattgcctgattcagtcccaaaaatgaatgtcaggccccgccccctccccaccaacattgcctctcctacattctccttctgcccctaaatcagacaggaggccagagaggagtattgctcaatgcgtgctatgtgcaactcctcaggccttgtgccacctccatgctgagccctgaagcagggtgtcctgggtgcctgtgtgtcagctccctcctctctacctacctctgaccttcttgtgggtgagggtggccatgcttatggccatcttaaaactggagaggcagagaactacttatgagtctgtagaccacgtgttgtcttccatggcctgtttctcctgctgtctgggtgagtgagcctgcaacgcaatgcccatgagagtaaatgcctcctgacctaccctgctcagcactgttctagtgtcttggccttgaaagaaaagcctgacttcctgctgacacatgtggtaggggcatggcagctatgaggcacctcctacgtctgttttctggctgtggtgacttgggatttttaaccttatatatctttttcctttactcaaaacaaaacaatttttagcacactgaaaaaaaaaaaaagccaaatgttttgtgcctttctaaggcagcactgtatcccaggctgcattttaggacttaatatggaaataccagagtctgagctcctctaccttgagtttcattagtccttagtgtctaggagacaggaaagaatgctctctgtgactggagaggtgacatgcaggtgcagtgtgtctggagtccctttcccctgctgtgagacttcagtggaggagagaagcattgtaccctgggatcatttggttggttccaatcacaagcttagttatcaggttgcatgccttgtctcctgcaaaagacagaatgtttcacaattcccaggtaaactctggaccattccaagtgtcctagccttctgatgacattaattacctagttgtgtcgaggagtataggatggactctcctgagaaggggaggttggtggctttgtcttttctttttgctggatcctgaactggtctagacctcctgcccccaccccccagcccccatcagatgtggctggcctttcatttgaaggcttcagacttaaagcattaagcagctagtgccctctgcagggcctggtttccccagggaagggcagcaaggaacatgggaccagaagcctgtcctcagtaatgtgactatagtgagctttagcaaaagtttttctatataatgacatcttacttatcttttaccctttcctcagttttcccctgcctttaactaataaagaattgggagacagaaattttaaagtcctccttattcaagattttgaaattcttagcctgggagtgctggagagaacctgatgctttctccagaatgaagagtcccaatttgtatatcagtgttaagaagaaaacaaaacaaacacataggtgagattttcgtggactattttaaaaatgtgtcattaatataaaaaatttatattagcagtatttaatcattctcacctgtaaagaataagaaaaacagaaggtaaatattcttacagagaatagcagagctttaagattcattttcattttaagtccattttattttgccagtgtattaatgtttagaagtctgttttactaatgttatttattaattttttttcatttccatacacagttagttaactaaagagctttttcaagcacccatgtctgtaaaaaaatatttttaaataaagtttcttttgttgtagcagacttgagttcttgctcattcagggggttgggaggcaatactcgagttgccgtaggaccaaatgccaaggcccccttcctcatggcggtgagcctgagctgctgtctggagggcagttccaagtggcaggaaagcataggaaggggacatagctcctgctaacagcctgccaggcccttcgtgctgcgtcatcagggcagttttgctgctgaaaagtagggtgactgtctgctctggtagaacttgagccatttgctcagaagcagaggtaacccctgatctctgctgccaactggaaacggttttgtgtgccttttggttgtagtttcacaggcccccaggttcctgtggtacccatgatgaataaaaagcaatgtatgatttctgggacaattaagctttatttttcatatatatatatattttcatatatatatatacatacatatataaaggaaacaatttgcaaatttacacacctgacaaaaccatatatacacacatatgtatgcatacacacagacagacacacacacccgaagctctagccaggcccgttttccatccctaagtaccattctctcatttgggcccttctagggttggggccctgagcttggtttgtagaagtttggtgctaatataaccatagctttaatccccatgaaggacagtgtagacctcatctttgtctgctccccgctgcctttcagttttacgtgatccatcaagagggctatgggagccaagtgaacacgggggattgaggctaattcacctgaactcgaaaacagcgcccagcttcctcaccgcaggcacgtatcttttctttttttttcctcgagacggagtctcgctgtgttgcccaggctggagtgcagtggcacggtctcggctcactgcaagctccacctcctggattcataccattctcctgcttcagccttccgagtagctgggactataggtgccaaccactacgcctagctaatttttttttgtatttttagtagagacagggtttcaccgtgttagccaggatggtctcgtcctgactttgtgatccgcccgcctcggcctcccaaagtgctgggattacaggcgtgagccaccacacctggccccggcacgtatcttttaaggaatgacaccagttcctggcttctgaccaaagaaaaaatgtcacaggagactttgaagaggcagacaggagggtggtggcagcaacactgcagctgcttctggatgctgctggggtgctctccgg

SEQ ID NO: 67644 - DNA, 1071 bp, Homo sapiens
cattgttagacaatttcttttatacaatgtttctgggtcagtctatttagatcaactgatcgttttgcttactgccaagttttccatactacgcatagcaggtagtcgagttcaccattccccatttagtggacatctagacggctgctcgtttttatcattgcagcattctttgcacacatccttggatatgagcagacatgaaaatgtttttctagggttgacactgagcagtaaaagtgctgggttgaagggtttccagcttgcatttgtacctggccttctacaggggacagggggctatttagatggtcccctgccaaccccagtggacaaccctagggtggggctggaggtggggctgaggctgagtcttcctccccttcctccctgcccaggggtccacattcagtcgtcccagactgtggagtcgagtggtttgtacaccttgcagagtattctgaaggcacagctggttaaagaagacaaagatgcccagttttactgtgagctcaactaccggctgcccagtgggaaccacatgaaggagtccagggaagtcaccgtccctgttttctgtgagtactaacctgactctctgcttactggggctggggctgctggaaactcctgctggctcccccttatccagcccagggttgactcatgggccaagagctaccccctttgcctatgcagacccgacagaaaaagtgtggctggaagtggagcccgtgggaatgctgaaggaaggggaccgcgtggaaatcaggtgtttggctgatggcaaccctccaccacacttcagcatcagcaagcaggtgtgggggctttgtgctgggtgcaggtggggatgcaagcagagacccaggtggagtggcgggaggtgcactctgctcacctccccaatcctccctagaaccccagcaccagggaggcagaggaagagacaaccaacgacaacggggtcctggtgctggagcctgcccggaaggaacacagtgggcgctatgaatgtcagggcctggacttggacaccatgatatcgctgctgagtgaaccacaggaact

SEQ ID NO: 67645 - DNA, 1634 bp, Homo sapiens
cctgccctccttgtccgagagccaaggtaacaacccaggcatcccagagcccaggcagatggtgtcgagtgacatcacctcctcacagggctggcagcacgctggcaccactgacgtcactcctgcccactgcctggcccttgccctgacccctgggggagactctgacctctccatccttaccagctacctagggtggggtccgcgggtgtgtgcggagtgttcatggaggtgctgctgagggagcatgagaccggaacttccgccagagttagcccgctggggagtgagggcagggattttggagggcagaggatagagcagtggtgtcttcccctggcggtggtgacacaaaagggcctgtgtgccccagcctggcacattctttgcattcccacactctgagctcacccggagaggagggggcctggaaggaaaggggccttcctcttggccccgagcctaggttgcccctttctgcccctctaccagcctcagctggagctgttcggtgctcagtctctgctcaatctctgcttggctccaaggacctgggatctcctggacggggagagggctggcccaggtggggcgcgggtcggggtgggggtagagcgttcagaggacagggccctctgcagaccctctgagtggcaggaaaaacagctgcagcagcgctgcgaggggaggggcggacagcagccggagctgacacagctgcgggggccccgcctccctcccccaggtgtgcccggagaggctgagcagcctgcgcctgagctggtggaggtggaagtgggcagcacagcccttctgaagtgcggcctctcccagtcccaaggcaacctcagccatgtcgactggttttctgtgagtgcttgggctcctgcaagagcagcccggggagggagactctgcccctcttgtagcccaggacccttctcctcctctgtgtctcctcccattaggtccacaaggagaagcggacgctcatcttccgtgtgcgccagggccagggccagagcgaacctggggagtacgagcagcggctcagcctccaggacagaggggctactctggccctgactcaagtcaccccccaagacgagcgcatcttcttgtgccagggcaagcgccctcggtcccaggagtaccgcatccagctccgcgtctacagtgcgtgaccctgtgtctgccagcagggtagtgagggtggtgggacgtggccagatgtccccctcatttctattttcttgtagaagctccggaggagccaaacatccaggtcaaccccctgggcatccctgtgaacagtaaggagcctgaggaggtgagatgtgtggcaggtgggctgggcagctggtgcgcagccgctgagatggggcttgaagggggctcggaggcagggagactcacaccctgtgctctttaggtcgctacctgtgtagggaggaacgggtaccccattcctcaagtcatctggtacaagaatggccggcctctgaaggaggagaagaaccgtgagtagccctttctcccaaaagccacccttgggccaggtgtggtagctcacacctgtaatctcggtgctttgggaggccaaggcaggaggatctctggaggtgaggagttca

SEQ ID NO: 67646 - DNA, 1124 bp, Homo sapiens
gaggggatttaatctgtcgcctctccttccctttggaaagtaaatacgttcgggcgccattcaaacggaccaatgagtgatcgacgtttttgtggttggccttcaccgattggctggagtttgtcgtccctccctcctcgtcacgcctctggctccacccctttgcacacaagatggcggcgcccagcggagtaggggctgcgcttggggtttgctgaagctggctgcctctcccactccccttttgggtgcaaagcgccgctagcgggaagacgggggccgggcggggacaggggcacctgcgtagctggactgagagcctgcgcccagcttacatcgaccccacccggccccggcccgacccgacgcgacccgatccgatccgatcccattccatccgttcctcgtctcctcccggtctgacccgttgcccggccgtggttcgccacaccaggcatccaaagctgaggtcgctcctacggcctgggctcgccttcgctttagagatgtttggcctcttccctcccaaacagcccatcttcaaaacctggactcttggactggcacctggccacctttccctctaccaagactccacttccgtcttacccacttcttcctcagattcttggtaccccctgggttggagactgctcattttccttccaaattaatcccagaccccctaaaatattgacaaccttgacaaccccccaaccgaggagccagactttgttttggactaacttccatagccctatcatggaggcagtgtacctggtagtgaatgggttgggcctggtgctggacgtgctgaccttggtgttggacctcaacttcctgctggtgtcctccctcctggcttccctggcctggctcctggccttcgtctacaacctgccgcacacggtactgactagtcttctgcacttgggccgcggagtcttgctttcattgctggccttgatcgaagccgtggtccggttcacatgtgggggcttgcaggccttgtgtactctgctgtatagctgctgctctggcctagagagcctaaagctcctggggcacctggcctctcatggggcactgcggagcagggagatactgcaccggggcgtcctcaa

SEQ ID NO: 67647 - DNA, 1088 bp, Homo sapiens
gatgacggacgtagtggctgccttcctagcccacatttccagcagtgctgtggccatggccatcctcctttggacaccctgccaactagccctggagctgctggcctcagctgcccgcctcctggccagctttgtgcttgtcaatctcactggcttggtgttgctagcttgtgtgctggcagtgacggtgactgtgttgcatccggacttcaccctgaggctggctacccaggcactcagccagctccatgcccggccatcctaccaccgtcttcgagaggatgtcatgcggctctctcgcctagcactgggctcagaggcctggcgccgagtctggagccgcagtctgcagctggcgagttggccaaaccggggaggggcacctggagctccccagggtgaccctatgagggtattctcagttaggacccggagacaggacactcttcctgaagcggggcgcagatcagaggcagaagaggaggaggccaggaccatcagagtgacacctgtcaggggccgagagaggctcaatgaggaggagcctccaggtgggcaagacccttggaaattgctgaaggagcaagaggagcggaagaagtgtgtcatctgccaggaccagagcaagacagtgttgctcctgccctgccggcatctgtgcctgtgccaggcctgcactgaaatcctgatgcgccaccccgtctaccaccgcaattgcccgctctgccgccggggcatcctgcagaccctcaatgtctacctctgaagcctccttccctgcctgcccacccctccatgctccacgcaggcactcacgctaggacagcattaacacctcatctccgggtcctggtctgaatcccctcctacccctgtggccatcctgccatacatccaggacattgagttggaagactatgatctgggtgggggcaggataacatggcttctctttacccagtgggtcccttcgatgctgagggtggtgagtatgtcactatgcaagggccctgagactatttgctgtgggctctcctccagcctgcccagggcccacccagatgcctctggggttacccctgtctgct

SEQ ID NO: 67648 - DNA, 1007 bp, Homo sapiens
gtgctccagcccccgcgcttctccccggccaggcgccccctgccctgccgtcaccccagtcctggttcgctccctgccggctccgctttcctcctcccagactccaagaggaaaccagttgttcaggggccaagagctcccggaccgggaaatagctgggaaataactcgtggtgtcgcccggcggccggccaaagtttagggggagaaaggagggggagagagacttgagctgggcacagagaggcagaacttcgagagacggacacacagggcacctcctgttcccagggccagaggagaggcagggcagtggcagagaccaaggaccagaccccatttcagggagaaatacgcagagagatgagggtggagagttctagaggcagacagccagttggatccctagggcctaggacaggggcctgccacatgaatagatgctcagtacatttttgttgaatcaaggaaaaggtcagaaggcaggcgatggagaagctgaaaaagcagatggaaaggggaagaggcctggatgggaagtggtctcgattgtccggtggcacagtgtggggccagtcagcagcctgggaccggtaaagggacaggaaggagcagggagggtggtagggtcccatgagccccagctgaggacttctcttccccctccctgggagccccagagaaggatgggtagagaccctgctgatgctccttcctttgttcccctgcgtgccagccctgaccggcaaaagaggacgggcaggaagagggcaggggccggcttcagggtcagggctgggcacaagcttccaggtcagctgcctctggcagcctgttgcagttgaagggccagggggtgcccagtagtgccaggccagactggcactggtgctccgcttcctggcagacagagcggcaagggggcagaacactgcctagtggggtgcaacggggcacaagcagcccacacaggagcctccggaaatgctggtagcagggcaggcttgt

SEQ ID NO: 67649 - DNA, 1049 bp, Homo sapiens
ttccctagccccaaggcctggctttacatttggacataagacatcaggggaagagggactctcctctgagtgacactggcatactcaggaccagggtatcagacagcaatgcttatcatctggctttggagaaagtaggggagaaatttttatctagggcttgagacaatccaatacctctattccagccctgcctcagctggaatgagggaagaggctctgctggagactgaccaagggctggcatgggctcgctcgccaactaatgcccgcacacgcctctcttggggcactgacgacatctgccttttctgtagttattagtgtgcccattaggtggcaagctctcagaggaggaaaaagaaatcctatctctagatcccctgccacgtgcctcccacaatgggggctgacctgctgattgcagggatgaatggatggatggatgtgtgggtggtgggtgggtggatacacgggtagatggcgggtggacagatggacaggcaagcatatgggcagaagggctggatgctgtgtctcctccattaccttatgtacccctccctactcctaggacaaatacattttgaaaacaacagcatgccacagcaagaaatactgcttggagggctgatccagacaaatgcagcaggggttcaggaataggggcaggaccttgaagcttgcataactaaaggtcttgagagagcaactttgataatatgacttagggagtcttggctttgttgtgccatctgtgaagtggcacaggagatagaaacgctggtgcctcccagaacattcagaacttgacaaggcagggctggatccactgtagaaaggagtggagaagagagatgtgtcacaacagagctggcatggtggggaagtatcagctctcagggtgctgcgtgctgggcttggagtggagcaggactcacttggactcggctggtgctgttcaaccccagggcaattagaatatggctctcctcggaggggctcgggtcctagaagcctctgcggggctccctccccttgctcagaag

SEQ ID NO: 67650 - DNA, 1050 bp, Homo sapiens
ttcccccaggccaccaggagaatgcttggcccctctggggtggttccactctacctgtgggagggctcaggattccagggccacagagccgggctgggcagggtcacaagaggaaggaacggggttcttagcctctctggccttggtgcacttgtctgctcccaggacgtttctcgatggctctccccgaggactgggagtacccagcctggtgcctccaccctgtcttagcacaggctactgactcagcccaggtcctaatgatgcacttcagaggacgccctcattccagtcctcattctgactccagtctgacatgcatctacagcatcaaaggagggggcctgcctcgaccttagcccaatcagctctcctttcctctgctttacgggggtccatctgggggatgttctcatgcccattccaggggaggtgagcagcccctaccactacctccagctcagtcccattctaaaggcagccaggtcaggaggtaggatgttcactcttcagggaagggctagaatgggttggctagggcttcccttgactgttgagaagttgctctctccggagcaccgcgtgcctgcttctggtttgggactggtgagaatttcaaagctgcctctttctggtttgggattggtggaaaatctccccttccgcttaattgttgcccaacccccgcccctaaccccctttagcaaactgaccggggagctttaagagcagcgagtgagctgcacgcacacgtggggagggggtttgtcagtgtcgctcaggccacataccaccgatatacacggggcacagcgaggaggacccgccaaagcagcatttccttagaatacactgatcagcacacagttggctcttcctggcaccctgggctgtcagcaggcagccctcacacaactggcagacacagctggagcgtccctgcacagccggctctctccctatatttctagtgtccactctgcccagaatgtcgtggacaccttactttctgagctccaaaccggcactgatccccgaatcccccctccc

SEQ ID NO: 67651 - DNA, 1190 bp, Homo sapiens
tgagctgggagagccaggctcggggacagcaggcagttcccttggctggactagagaggagaatagccccataacgctctcaccctctcccaactgctgcctggtcaactggggaaccattgccttcggtgtgaatggggtgaagagctcagggccagacaggcagagcagtgtggttccaccagaactgtgggcaaggcctttggcctccctaatcttccttctcccagcgggaaaacagggatgacaccacctccctcagccagttttcttgtcatgatgtttagtaaggttttcataagatgatatgtgtgcaagagatcagtaatctgcaaatgggaaagatggctggttctgtgagaccgggctgttcctggtcccagctaagacattgcagtacccacctcccaaagggagtacacccttgctttgggcctgtgcctgcctgagtcctgatccgtcttccttcctaccctgcccccggcccccttctctttctgcagacaaactggtcaagtgtgagggcatcagcctgctggctcagaacacctcgtggctgctgctgctcctgctctccctctccctcctccaggccacggatttcatgtccctgtgactggtggggcccatggaggagacaggaagcctcaagttccagtgcagagatcctacttctctgagtcagctgaccccctccccccaatccctcaaaccttgaggagaagtggggaccccacccctcatcaggagttccagtgctgcatgcgattatctacccacgtccacgcggccacctcaccctctccgcacacctctggctgtctttttgtactttttgttccagagctgcttctgtctggtttatttaggttttatccttccttttctttgagagttcgtgaagagggaagccaggattggggacctgatggagagtgagagcatgtgaggggtagtgggatggtggggtaccagccactggaggggtcatccttgcccatcgggaccagaaacctgggagagacttggatgaggagtggttgggctgtgcctgggcctagcacggacatggtctgtcctgacagcactcctcggcaggcatggctggtgcctgaagaccccagatgtgagggcaccaccaagaatttgtggcctaccttgtgagggagagaactgagcatctccagcat

SEQ ID NO: 67652 - DNA, 1024 bp, Homo sapiens
ttgaaagacaaaaagagttccggagatgggctgcatagcaacgtgaatgtatccagcactgctgaatatactgaatttaagtactgaatttaaatggttaaaatagtaattattatgctttttgtattttaccacgattaaattttttttttaaatacgaagcctcagccctcataggtcttatattaccatacactatgttaatgtaagaagaggagaaagagtggtaaagttacttaaagtcacccagctagtaagtgctccatggccaagcgcagaaacacaccgtgactgggcttgttctccctccttccttgctttccctgagcaggaaagagccagtggcagtatcatgttcagtgagatgcagggacgagagggggaatggagagagggacttagatgactgccatagccactatgccatgttcccagggacccccagccctggtggtaagtgtggcacagcttggctgattcccatcctgttcccaccccagatccaggactgagatcccagaaccatgaacctggccatcagcatcgctctcctgctaacaggtacccggcatggggcaggactggggctccaggcgccctggcttccttccctccagagaagcagcttctccctcacagtctcagaaaagcgcaggtgacaaagagagggctctttttcatcctgaagtcagccaatccaccgcgctgatattctgacggcctgaggtggtttttgaaaacacagtttgctgagccctccttcacactattgaactagaatccccaactgagaacccggaaccagcatcaactccctaagatctcctgtccttgaaacacattgataggatccaaggctcaagcagagtggggagggaggctggggtctgcaaaggagaagtgggatccctggggtggggaaaggcactcagagagcagaccccggtcccctccctagccaggcccatctctccacttcaggtgggtgggaggcccctgtgccgcaggcccctccagtttgaag

SEQ ID NO: 67653 - DNA, 1048 bp, Homo sapiens
atgtctgtgagcctcacccatgaggtctgttgtccattgctgtgtattattatcccaaagtgtgaaaaggccacagtgtgcctctctcttgtaccatcagtggggatgtgagcagtctccaggctgggacaattaaagttgctacaaacattcttgtatgtaactttggggtccatcaccctcatttctgctgggagtggaactagggttagtagatacaatcagtgttccagagtggttgtgccaatgtcgctcccaccaacagcgtatgagagttcccatggctctgcttctcgcccactcttggtgccatccgtccttttatcttttagtctttctggcaagggcatagtggtatgttattatgattcagtttgcatttccccatgactaaggatgttgagcactttttcatatgactatcagagatgtaggattttgaaagtttccaaggcttttaaaaaagaatgtttgaaggcctattgtcatacattccctggagctcaagaggaagggttagtgtgtatctggtctgccaggtgggggccctcctagaagaaatccctgttccggtggcctgggaggcactggagaggctgggacaggatgggtggagtcagaggaggagggggaggagatgtgctctgggggattcccagaagaataggaaggacaagccagccatcaggaaacaggagtcgtggggcacaacagagtgattggcatgaggcctcgaggtgtcatggtgaccacaccgggtggggttcgctggaaaaccttcctctggtccccacaattgacccgaagcaatggaaatttcctggggcgttaatgacaagaaggacaggggacagcaaggcacaccaaatgggattttccctgttgactataatgggttggaagagaagggcaggcagtcagggctggatggcagccggcgggagggaggtaatatgctggcgagaggcctggactaggaggcagggggctgggctctgcaaccagctctgccacttctcaccaggtgaccttgagcaaggccctttgc

SEQ ID NO: 67654 - DNA, 1043 bp, Homo sapiens
gccacgtagcagaagtctgaagccatgccagccctggtgcggctctcccctctacacatttggggtactggatagggtgaagttaggggagaaaattgtggagtctttccagccacagggcagagggaggtggaggagctgggctgcttttcccagcagtattagtgtcccccaggacaggggaccttttccacattacatcactgccccatcccaccttacaacactctggcccctctgcttggtccccttttcccccaggcaggaggcaatcccaggggcctgcctgatagaggcatttcctgtccctgtctcctcctgcatctcctttatcctgcactgccaccctctattccccattctgtgttggactttgaaggccccaagcccagccaaagcactgagttcccccttaagacacctccacaccctccccacaagcaaagcacaaattttggggtccatgtagcatgggccacgtaggaggctcctgacttgccaggggcccagcctcagcatacccaccgagcagctgccagcctgggctgagggtgggcatgaggcaggagtcagcacttggacctagggatgtgaggttttctgtgccccaagtttgtgggaaggtgggcactactgctgggcccacagacacagccagctggcaaaagggaggtctagcccagcagagagatgaggacattttgcttctccttcatgcccacagcatgagctgagcttctgctttgctggaaatgaaataaacttggtatgaattgtgccaaggcctccccagttgtcatcctgcctcttgttgccctccctgtccttgccccccaccccacacccatgcccctgtttccttacagattttgatattgttctaatgtgtaatagaaccagccgagtccccttttatcagaagggtctgaaaagcagcagcacagagtaggtgaacacaggcctgcaagtgcgaccacctcagacccagtacgtgtgcccacagtggacacactcacacctccaacacacccacgcgcaggcat

SEQ ID NO: 67655 - DNA, 1024 bp, Homo sapiens
ggtgctgtgggtactgccctctgcctctcctcttgcctgtctctcactccagctaccaacgctgcggcatgttagggctccaggatgggtggagtgctgcggggcctcgaactggagctgctcaaacctggggtgcagacagcctgtccttcctggcctctcctttccctgcctccctcccaccccctctacaccccaggagcacacgctgatgctgtcccctccatctcttttcctcacccagaattcccctacaccccgtctcctcccgaacatgggcggcgcgccgggccggtgcccacggccatcattgggggcgtggcggggagcatcctgctggtgttgattgtggtcggcgggatcgtggtcgccctgcgtcggcgccggcacaccttcaagggtgactacagcaccaagaagcacgtgtatggcaacggctacagcaaggcaggcatcccccagcaccacccaccaatggcacagaacctgcagtaccccgacgactcagacgacgagaagaaggccggcccactgggtggaagcagctatgaggaggaggaggaggaggaggagggcggtggagggggcgagcgcaaggtgggcggcccccaccccaaatatgacgaggacgccaagcggccctacttcaccgtggatgaggccgaggcccgtcaggacggctacggggaccggactctgggctaccagtacgaccctgagcagctggacttggctgagaacatggtttctcagaacgacgggtctttcatttccaagaaggagtggtacgtgtagccccccttccagagcctctgtctgtgaccgctcctccccagcccctccccgcacgccccctgcccaccccccacctcccactccaggagctgaacagagacttgcccagctgcccaaagccagccccgaactcctggggggccaggggagcccagggcagccacgacttggctttgtgttttatttcctccctctcctccgcccttccccatggtgttgtgttcgactg

SEQ ID NO: 67656 - DNA, 1442 bp, Homo sapiens
tcaggagttcgagaccagcctggccaacgttgtgaaaccccgtctctacaaaatattagccgggtgtggcagtgcgtgcctgtagtcccaactactcaggaggctgaggcacaagaattgcttgagcctgggaggcggaggttgcagtgagccgagatcgtgccactgcactccagcccaggcgatggagcgagactctgtctcaaaaaaaaaaaaaaaaaaaaggacttaggaaaaagaattaaatagaaggcctggaggagaaaaaaagcctagtgtcatctggtcccaagccaccacaccactcctcctgtcacccactccagagaaacaaggtcccagtgggccccatgcaggtttattcgagtctctccttacaatacttgctctgcctagaacaaggcttatctctaagacataatcttgccattgtagaattcattctgtcgtccaacagatacttcttgaacattgaccacatgacaagcggtctaggtgcttggtataaatccatgagcaaaacagacaaaaagtccctatccttgtggagcttacgttttcgcataggaggaaagacaatagataaaatacatttttaaaaaatatgtaggctgggcgtggtggctcacacctgtaatcccagcactttgggaggctgaggtgggtggatcatctgaggtcaggagtgtgagatcagcctggccaacatggtgaaatccccatctctactgaaattacaaaaattagccgggtgtggtggcacatgcctgtaatcccagctactcaagaggctgaggcaggagaatcgcttgaacccgggaggcggaggttgcatgagccaagattgagccactgcactccagcctgggcgacagagcaagactccgtctcaaaaaaaaaaaaaaagtagtaattttgaaggtgatattgaggaggaaaaaaagagagtaaggggatcccaagtgctagggaccacacaggtggagtgggcttatgagctgcagttttaaatagggtagttggggaaggtcttgatgagaaggggctatttgagctgtgtcccaaagagagtaaaggagtgaacctgggggccctggggaagtggctttcagggggcagggcagcccgtgcagtgtgtgccaggagtggggcaagcctgcaggaaagcgggaacagatgacttcagaggtggggcggggcgtagggcaagcagagcacgttaaggctctagggagagtcattggagggctctgagcagatatgttacacttcaacaggatttgtctggctgctgtgtggaaaacagtccacagagggaaaggatggaatcaggggagcagttaggcagctattgcaatcaataatccagatgaaagatgagagtatcttggatcagggtggtagtgatggagacggtgagaagagatcaggttcaaggtgca

SEQ ID NO: 67657 - DNA, 1072 bp, Homo sapiens
aaacaacaggcccaggctgtggctgtggcgatgggggcaccgaggagatggaccggacagaatctgtgtgtgcttccgtgggcacaggccccagagaacccctttcagaggcccttacacagaggagcagtttcatggggtgggcccagtggtcacaaaatgaagctccctcccttctccctctggggtaatgacaaggtggggagaggcccagggtgcagcctccaccagactgaaaaaaaacagatgaggcagcctctatccctgtgggtgtcgggaggagacaggccaggcctctccagctgggacccagcctctcgccactcccaagagcaggacagggaggctgccagggtgtaggatgtccatcccagggtgcagggcgtctgtcccaactcacatttccagtgaagcccgggctcatcccttgcaggtgagggtcacagtctgcccatcagtcctggagttcttcagacccagaattgcgggccttgaaggccagtgtcctggaagggaggcaggtgtgagcctgcaagtgtgcatgcccagccatggtatggacatgtgtctctgggcatgtaaatgtgaaccagtgtgaacaggctccgtctgcatgctgagtgtgcatgtgggagcccgtggctgtgccgtggcaacgtgccattctctgagccagcgaatggcagtgtgttgggaggtctgagaaggcagctgcatccgtgcctctgggaggattcggttctcccccagcttgccgaggccctgcctgatggtctgacacgaggcacagctgctgcagctgcagatggacagaagggcttcccagaggtggaccccaggcctccccactctccctgtggctggctgcactgcatgctggggggtgtagttcttgcagcttccaggcctaatctgatgccggagcatttcctgcctgaggaagcgccaggcattggtttcggaggcaaacccaaacattctctttgaccccaaacctccagatcctagatccagactgtaagccctaacacttcactccacctcagatctatccaaagcccccagcaccagc

SEQ ID NO: 67658 - DNA, 1057 bp, Homo sapiens
tgtggtgcaagttccccaattatgcccacattatctcagccactgggcagcctccagcagcctgggggaggggtggggagcacccaattatcctgctggagagggcctagggcttagctgcttgccaactagcccgtcagcaagagtactgggccgtctggcccactgacctcaccatggaactgtatctggagtggggccacagctgcactgggctgtcatgagacagttaggaccaggaggaccactgggactcgggaggccagtctgctgccttacagaggaggaagctagggctcagaaaggggaggtgactggccacggtcccactgcctgctaaaggcagaggcaggctacagcccagccttcccaactcgtggctggatacttctcccatcgtattcccaacccatggggcctctgcccagggagcatcagctccgaagcaccccacaggctggcagagggaacagctggaggagtgagggtggggataggcctgatggaccttgagggctgtgtggatgtgaatcagcacagagaagggggaacctcagggaaactttcagaacacggtagggcctggcttggtgaagccaaagatagacttattcagcaagcatttcttgagtagctactttatgctgagcaccagggatactgcagtgacctagagacctggcctgtggcctctcgagcggaagagaggggagcaacttactgcactgaccatgggttttggggccctcagaggagcctgtgttgctacaatatccccgtcacgctgaggaggtgagtgagcataagccccaaattcccactcttggatcccagactcccttggggggtcatttagatcctccccctgccttgggtcagtacaggtcctggtgttattaatgctattgatgacgctcaataaagtgagtgaagtaaggatacaaagacatgaagtatacaaatgacagcaaggacacggcttgtggggagttgcaggactcaggagagagctggagtgtacagcctagtgctgaggacaaccgccccacgttaaggg

SEQ ID NO: 67659 - DNA, 1050 bp, Homo sapiens
cagaacacatgttgtggatttcacttaagcagaaaccaaatgaggtgaaaatccttccaaaatgatagcagtttaccagccgaaggaagacgctgcctgactttgtttcagctcttagaaacctagcgcagcccctaccttggcagcctccctcccctccctgtctaaaggtgctcacaacaccccaccgcatgtcccctgtgtccctcccctcgctgcccctacccaccctcttgcatcctctgaggacacacatgccactctataacccatattctgacagccagctccccagaggaccctgttctctctacctgtctcccccaaacacaactcactgcccctcctacagagcccagactctccagccctgttcccagccacttctggaccctctgtccctggacaaacaaggacagttccccaccagagtgccccccaactatgtttcccactcctctctgcaccagcttgccacagccagccctgcatgtccctcgtgagctccaccatccctgcctgagctttactcccttcctctaggccagtggtcttacccggggatgattttgcctgccatgggagatgcagcaatgtctgtggttattttgtcatcacaaatggagggggtgcacttgggtagaggccagggatcttgctaaacttctgcaacacacaggacagccccccacaacaggacagtccccccctccaaaatgtcattggtgcggagttcattcgtgccctgggggagtagcctcatcactgcaggggtctgctcaggatcacagggtgggcttagagccgggatgggaatcagggaaccagagcacgtgatttctaggtaggttctttctcctagcaaataatacaactgcttgtatagcatagctatgggccaagcactacgccaagagcaaaactgaattatttcattggatcctcaaatcagccctaggagatagtactattactggccccattttatacatgaggaaactgaggcatggagagattaatgcacctttctcgaagtcaaccagctaaaaa

SEQ ID NO: 67660 - DNA, 2356 bp, Homo sapiens
tctcagatacaaaaaaaaaaggaaacactggggtggtcctggatgtagacccagaaggaggaagcagacagcccctgcccgcaggttcgtgtgcaggaaaatgatggtggggcgtgaggggtgcacccagctgtgtgaccttgggtgagccttttgaggcagcttcttgcccggagaaccgtgttcctgggtaaagctggggagatttgccaggaggaaccattgtcttggagaagaggtggcaaaaaggcacactaacacgtactccgagtgtgaaaggatgggcatgataaaggccactctctccctgtgagcgccattcctgagcacctgtgtgccagttccgagcccggcatcctggatgcagtggaggtgacaggctgaacaggctgagccgcgcatctcattactctagcaataagctaccttgcattttccatgatcaatccttttgggatctcatgaagagtgtgggtggcagaggactttaccaataatccaggttgatggaaattcagggtacgaggcagacaggaggttctttgctaacatgggccaggtgtgctttcatgaaagagcgtcagcctcgttgttgggagtcctgcctcagccacttgtgggtcgggtcacctcaggcattccctggcctcaatttccttatctgtacagcaagtaggttgggcttgttgctcctggggagctcttggagtctcctggcccatcctgggtacacaggggatctgtgtgggaccagctactataatcctaccacttggacaagtccaaggcaaacaccaagaagggtacaagacagcgtggtattgtgacttctgagggccagccagcctctgagctctggagatgcctgactgccccttgctgaaagacatttatctgtcccgttggtgccagcatgaaggcccttcctgactacttgggcctccagcacgtgggacacagagtggggccaggcagaagaaactcgtggtcagatcctctgccaggagcatttctcaaacccacgtgggtcccaacccctcccactggagctggggaagctttgaggcaccttggtctcctggtcatgccgtgtgtcagttacctcttaattgttgatcacctcccatgtgcaggccctgggaagtgctgggcatcagctttgagcaaaacaggtgccatgcatgttctcatggagctcacaggctggtgggggccagacactgaatatgctttttaagtgtggcaaaggcctgagcctggtgggaacatagagcaaggggggtttaacccatactgggggacagggctgcctcccagggtaagagatgttactcaaggcacgaagaatgaatgggccatggagaaagaggaaaaaaagaggaagagaccctgggaaggccctgcatctgccaaaggtgtgggggccacagcgccaaaagctaccatctactgagccatcatatgccagggtcagctctcagggctttgcttatagagctttatttaatcttccctacagcctttgagggagtgattattctctctccatttttatagacgagaaaaaaaagtcacagagcttgcaagtggcagagctgggatttgaacccaggagcctggagtcagaggcttctctgctgtataactgagagaacggggatcttcagcaaatgcccctggtgaggtaggactagaagggggcaagtggaagggccaggctaggcccaaccagaagcagaaggaacaatctgcttcttcccagcagcagagttagcctagcagtacacagatggcctcagccacagccctggactcgccttgatggcatctggcggtggctgacccactcccaggctctgtatcaaaaggcttagggaaatggacttgctcttcagcagaagggattgagatgaaaccacaggacgaatttcccagctgtcatgaccatacgctattaaaacaggcagccgagggaggtggaggccctggtgggaaaggttaatgccttggttgctcagagctgctggagaggtgagtggggcagggggaggtccaggatgacccctccagtgtctagagatgagatcacatcacacagatcaaaaacactgtcccacaggaagagggcactgtcagctgtccccaggctggtgccaccctcttcctgggaccctgtctgccccagccctgccatcggacttcattaaattgcattttcccagagcagggcaggccggtgacagaatgagtcaacgtcagcttgctacaactgtcgcccctggagccggcgggcatagagggagataattgggagtggtttgacagcttaatgtctggggctggcttcctggagcag

SEQ ID NO: 67661 - DNA, 1277 bp, Homo sapiens
agtcgcctccaccagtctcccggcctgcgctccctcctgttcattctcagcagttgtcagtggtcttgttgaaacaaagccgggtcacagatctcatccctctgctcgtggcctccaacagcatggtccagctcaggggagaggcctggcccctgcatcagtctcctccgtctagctacaccggccacagttaccagacgctctcccgccacggggcctttgcacctgctgtctgctgcctctgcctggaatatctcctcccaggtggccacatggttggcttgctcaccttgtttttttctttgctcaaatgtctcctttctcagtgagatcttctctgggcatctttgatctaaaattaattaatcctacacacattttatcttctttcttgtctggttgccattgctagaacataagttccatgaagacagagaatgttttctgctttgtccagtgctgtatgcctgggacctaataggtactgaatgacagcaggaatattttaataaatgaataccctaatggacagctgctgcctcctctgcctgcacaccctgtttctgcatgcaatcacatgaagtctccctgaaattcctgctcatgaaggcctaatctcgagccctgcctggccagcacacactgcatctcccttatggttccaccctggcctgtgatgtgggctggcctcccgtagagccttatcatcctgcagagctttatggcatctacacagttctctcaccttatcttcttagcactctctgaggtcaggactatcaccctggtttacatttaagaaaagaaagttcagaggttaatgactaatttacttgaaaataacaccacatgtaagtggcagggccaggactcaaaccagatcttagctagagctgtccccttgctgcccaaggtcccaggacacctggtcccccctccctggcgtgcgcagtcatggctgagctctcagccctttttctgcatctgctcacctgcccggagagagcctcccggggtggagtggggcattctcacctccaccaaggcctgcttcataccccacggaggagatggagactcattctgagccctgccaacacttagaaaaccaagttacagatggggcggtagaagctgggagcacccagtggacctcttcctaccctcaggcaaggggctgaaatccacagcctctttctgggaagcccttccctccagctctgggctctccatttcaagaaacacgggggtggactgcgtgcagtggctcatacctg

SEQ ID NO: 67662 - DNA, 1079 bp, Homo sapiens
tgaccatgtcaccactttgcttaaaaggcgtcagtggctcccagttgcctacaaggtgaagttcagaccctcatctaatacaaagcccttttacaactggctcctaccttgctttccattcaccctgtattcccctctcctctgccccacatatccagtgctttcgccacatccaagcttttaaagacactctttcctcttttcctcttcccctcctgttcccttccctctctctgtctgtctctgtctctgtctctatctctgtctgtctcaaggactcctgcttatcctgcaggacccagctaaaaaatctcacatcttctgtggcgcctccgtcaccttcagacagaatcactcccccttctgagctcccattgctttgggtttgtatttttcagaaacaaacaaaaactgcgtttatcactcagtcattatttgttttcatgtctggggcccctgctagacagagcttttaaggtaaaagaaaatgtcttagtctttcttattcctccacgctccttcctcttgccactaccactgtcactttcacccaaaaggtgccagcaccatgcttgacacattgtataggtgtagtaatgctttgtgaattaaagcaggggtagaagagtgtcgaggtgatggatagcccagccctgatttgatattttgatacctgcctacaatgtataattatcaaatcagggctggaagctcatgtacccccaaaatatgtacaactatgatatatcaattaaaaatccaaaaaaataaaagcaaggggaagaaccagagacagtacattagtctgagagaggcaaccctatagaggaacctggaggaaggagaggattctgcaacttggcatagcagggacaaggtggggtatgactggacctaggaactgcctacatgggcagttggagtggggagacggtggggaggtgttgttcaccctgttcgacagccttgtggagtgtcatggtggtcactagcatgagagatggggtggaaggtttggcagggatgggaggggaatggggaacggccataaaagagaaggtggaggtgacctttagcaa

SEQ ID NO: 67663 - DNA, 1948 bp, Homo sapiens
atccaagccggagcattgcccagccagcacgaagggaccagcattgcccagagcccccctacccccgggcctgcaggtgcctgccgggctcccaagcttagccacttttatgtccctctcctctgccctctgggaccgggcccctttgagggttttgaatcagtggcagaggctttctgcagcaactcctaggcataaattggagcggaggcagggacaggcatctccctgagtgtaaataacactgtaaataacactggagcggagcagccacactgcactggattattttatcgtgattgcccacctcccccaccccctgaactgtcccaatctcattggcctagattgctgcatctctcagaatgatggaggggctgcctctcccttcccgggcagggtggccagccctgccgttgaggcaccctcctacccagcaacttcccagatttattccctgtctttatggtgcctggagagtcatcagtgtcctgggccggcagagcactctgatggtctccactggcgtgatggataggcctttgggggaacgtgtgcgacagccccctgctcccggcctgcctctgccctgaccacagcaccgttccccaccctcccaggggtcagatgatgggcctcgtggccagtcctgaaggggcggtgatgatggaagagggagagagcatcagtcctcggcgcccacctctcagtgctgctgcagagtctttctggcctcctccccaagctctgctcacaaacacccttcccaggaaatatccccattaccctctctcatctcccatcactccattactgctagcccctcggcacttgtgtacacagtttgcgctgtaatgataatctgtgctggtttatgtgtttctttacaagtgtttttatgtcctctgtgtgtgtatgaggaaggtttatggtgtgtgtgcgtgtatgaggtcacgtgctgtgtgtgtgtgcgtgcgtgcgtgcgcgcgcgtgtgcacgcgcctgcttctgattagactctgatcgccatcttctcccacacacaggtagggggccctcacccccctcctggggttgggggcacagcctggctactaagggtgggtggagaaggagggggagccaatcaaagatgatgactgtccgggcaaggtctacactgccccccagccgccagttagagaaccggcgaaggtcagtcttagatcattgttttgtctacagggtcacaaacaactagtttgactatttttccccaagaaattgactgaacccagtggttattttggagtcaaatgatctcagtcttttatgacttacctgtgtcagcgggtgtatctgtgtcttctctaaacaagttcccctagctgtacaatgggatgagatgataagaggctggaaggggcgaataacatatgtggtgtgcttagcacaagcaataatttgcttgatccagggaaagccttcgcaccgctggactgttgtgagctaccactgggagggactcccagtctggagaaggagggtccgttccctggggctggggaagccaggcccaggaaccctcctggctgtgtgtgccccagaacgctgtggggagcccctctgctgggctcctgtgacttctccagggtggtcaatgcaagcagagtatgtcttagtctcaggcccctgggctactggagatccgcccccccaacccagatgatcacctgggcaggtgcctcctgtgctcccttctgaaaggaaagcaagggtttcactcaaggtgcagaattctggctgccccaagcgcccagtgccagtccctgtaggaatcccactgccctggatgtgttgtgggagaggcagacaggttcatcctggcattcactcgacatgtgccaggcacagaggtgggagctgtagacagcaacaaacataatatccagtccagcactgcatggca

SEQ ID NO: 67664 - DNA, 1023 bp, Homo sapiens
tggcctggggtttgcagcatgtgtaaatgggaatctccttacccatttataaggcagcactgtggagtgccttggaattggattctaggcctccgtagtcaaggctggaggggaagaggagatactgcagagcttgggcccagttgccctggctgagtggcccggaaggcatctcttgaacctgaacttcagagcatatgggacaggtagcccttgttgcctgaggcttgctgaggctaagagtgttattggttcccttctcagccactcacctttgtacaatgaatccaccttggctactgtttgacccccggactctgctgtatgttttcaggatggttgagccggccagaaccctagtgctgatgactgagcaagtggaccaggcttggggggcagagggtcagttccagttgctgtctatgatactgccattgtttagcagctgactaatgttcattgttcagcacaaacagaaaatacccaagggaggtgtgaatgtatcttcaatttttccgattgtatctcttcctggttaacctggtgaattgaatgcctcctacctcagagagggacagacagagaggtgtcagcatattcacctgttttgctgatttaaaaaaaacaaaaaacaaaaaaactttaaacattagccagtgtgccaggctaaaatggtcatgagccagctgtggaacttaagctgtgacatttctgacagtctgcatagggtctcacctttagtataaagtgtgtgtgtgcacacaggtatacagggctttggtgtttgtgttggtgatctaccattcactgtgtgtgtgtgcatctatggggactaggagtagaaggtgtatgtgcttgtgtctgtgggtcactatgggactagggccataaatatataacatcgaatgtatattcacatataactgactgcttagagttttctgactaggacctgtgagtggtccagacttgagaatgcctattttatgtgtcagagtgtcggtgagggtgactttgggaggg

SEQ ID NO: 67665 - DNA, 1134 bp, Homo sapiens
cgctggtggctgtggtgattatgatggtgcctctgtatcccacagcgcttagcaacatttaattactgttattcctatggagatcactgcagagtcttggctgccattgctcttggggatggagcaactacacacagctgcacccactccccagtccaatgatccactgtgttgaagtgctgccaggatggttaacagacaccagcctctcccttgtgggccatggtgtcccagcgatctgcatggcttttggggctgagctctgagaggtgataggaaggcccaagttccatcttgaaccatctaactctccagaaagaagggaaattgttctatgccttgtgtctggtcagaaggccctcagtatacttctgtgaatcatgacgtcccaaatcctaaagaattctggttgtgagtagaggcggcactcctgattagggatgggagcacttaaaactcaacggtgatactgagaagagggtttcatccaggatccgcatagaccggagagcttaggtcatgaagatgggaagggacggagtggagcttctgtgtggagcatgccttatgtagaaagatgaaagggaaaagggctttgagaaaggaagatactcaacctcccacccacactttcctccctttgatgatgctcttatatccagggatgggtgttatggtcaggataattatcaggatggactacttgtctagaggaaccagatttttcttgcaagttatgtgaaaaccaagaaatagaaggtattgttagggaagagcagagttcctggatcagcccaaccccagcagaaaaagctcatggttgatgcctgcctgggagtggggaggtaaggctcgggctgtggagctgtgggtcttgactctttggtctcagaccttttcgggatctgatgagcgctgtgtccctgaaaactgcacatacgcacaaggacagtgtttgcatggcaacctgctgaagcccagctggggccttgagttaggaatccctgctgaagaaggagtgctttgggaaggaggcagccctgagcccagactccctgtgatctgggctaatgactgatgctaatgacatggagaaccccaaatgaggaaagtccaacccagacccttctataa

SEQ ID NO: 67666 - DNA, 1025 bp, Homo sapiens
gaaggcagtttccttttcagacccaagagtattggcaagggtacacctcaacatgttcctgcaactcatacccgggcagacatggagccctcctccccctgagctataggcagggtggccccgtggctgggagtgtgcagtaccccaattcctccccaaccccatgctcaggctcgagtgaaggcagcctcctgggatacttggcccctgatccagggtagcacaagtggcgtgatgatgaaggcaggagtcagggactctagctggggtgaagagccctcccaggtgctgttgggagggcctctaacatgctggtcttgacctgcaggctgtctcctgggtctgttctgagctcacccatctgagggtgtttaatccttttgcggtgatttaaaatatgtatgcaattatttgatgttccctttaaaagatggagccaattctcctcccttgagtgtgggctggactttgaggctcagttttcacaaatagaatatggcagaagttatgccatgtgacttctgagactaggtcataaaaagtattgtggttttctcctggctctgtgggaagcagctgccctgttatgaagacactcacacaacctctttatgaaacctccccgtggtggggaactgaggcgtcctgcccagcaccatgcaagtgagccacctgggaggtggatcttccaaccccggttctgccttcagatgcctgaagctttggccaacttcttgactgtggccacatgagaggacttgagccagaaccacccagccaacattctctcacagcctgtgactcacacaaactgagatgataaacatttctttgtttaagccaataagtttggggataatttgttacacagcaatagataatgaatgtatcccaaacttgtttgttttcctcaggtgtttggcaatttgcaggaaggattttaactcactttccattttctgctagggggaaatcaatgcccatggtggctggggcccacccacctgtttcataaggacctggga

SEQ ID NO: 67667 - DNA, 1091 bp, Homo sapiens
ggggtgatttgcctggcagagcttctagaccctggcatatcctgcaagccatgccccacttctagaccctggcatatcctgcaagccatggccagcgcccttcttatttcctgatctgggcccagagctggtgaaactggcaggggcagcctagccagagcagggggaggcagcaaagccatggacttgccagaggagctttcaggggggttaagggcttttaaaacagcccatcagcatggagccagcatccttggcctttggagtgatggactgggaaagaatggggggtagtttagttgacagcatgttgatactaacataaatctcattaaaataatgaatttgtcaaacataaccatgtctgtccccttaacagtttagggtgcaatggctgtgcccctttatgtccacgtaataaggatgctgaagcccagtctccaacccatgactgccctgagatggcaaatccagacacaccctccccatcctgggccccaggaggccctgggcctaacgagtgtttggaggggcaggaccagacttgctggcacccagggcccttgcacttgcctgccccctgtctggactgctcctcctgagatgtctacatggcttgctccctcacctcccacaagtcctttgctgggattttacacttgcagcccggtggtctctggaaagaccatttaaaattgcccctgacctggccatccctccactccccctctgccgtgcatctccctcccgtttaatcagtcattgctgtgtcctgacacctgcctgtaatggtcatggggacagggatttctgtctgtcttaccgtactcccaaacctccaatggtatctggtacatagtaggtgctcaatacatatttgttaaacattcatttgcacctgggttgggaatttttgtgtaccacaaggagggttttgcaatctttatctgtttttagatatgtttacttttcagaatttatctccttttgtgtttttgatttctaattcacactcaacctcttattcccactctgtactgtttaggataatataaatgataataaaaagtgggaaataacctaaatatcca

SEQ ID NO: 67668 - DNA, 1060 bp, Homo sapiens
gtattttacacacatttaactgtttaagcctcactacgaccctgggtgctggatactgttattatacctgtttcacagatggagaaactgacaaacagaaattgccccaaatcacacagctagtaagtgaagatgggatacaagtacgatgtagaagatgttaacagagggacaccatgagatgcttatctcaaattcagtcacccagcgtgtgagaccagagttggggattctctgctctgcttcatctagggaagctgcggctggagaagtgggcccaccctctcctcacaccttcgtccccctcctcctggctccccatatcagatttgaacagaaattgggccactccatctttgacattagcctcctcctcaaatgtcccagcaggctggggagagcctcagagatgggagccggcttgggcctacaaatctcgccttcctgcccaaaccggggttcagcccactaggccattttcatccagcgggtcaaaaagggcattgccaaggcttctcttcccccgatctcctgcttctaggtgtcctgtttctcagtggacagtgttgatccaaccaactacagaagtctgtcctccatttcccagggacaggggttctggtcccttccaggggcaatgagagtgacctctaggtcttagtgtgaaggatcctggaggtcacacagaacacagcaatgacatgtgtgggctcttgagtcaagtcaatgtttgtatgtactgggacctcactttcctcacctgtaaaatggggagttggggggatttaatgtgtacaatgcagtggctaaaataggttaaataatggctactacagtggctagacccaaaattaaaatttgcctttcctgtttggatcatctggaaaattcacttttttttttttttcttgagacagagtctcactttgtcatccaggcaggagtgcagcagtggcacgatctcagctcactacaacctccacttcctaggttcacgtgattctcctgcctcagcctcctatggagctgtgattacaggtgcccaccaccacacctggct

SEQ ID NO: 67669 - DNA, 1036 bp, Homo sapiens
atagaggagggtgattcctatttaatctgtttctcccacgagcccagcaaggaggagcctagtaaccaggtcttacctctgtgtcccatggcaagcttggaaatggaggtgtctgtaaatgcctgtgggatgacagaggagaccaagtggggaatggcagcggcctctgactaggggagctccttccctccctccctccctccctccctgatccttgcctctctcccccaggtgtggacagttctgtgttcgaggctctgcccaaggcctcagagcaggcggagctgcctcgctgcaggcaggtgggggaccacgggaagccctgcgtctgccgctatggcctgagcctggcctggtacccctgcatgctcaagtactgccacagccgcgaccggcccacgccctacaagtgtggcatccgcagctgccagaagagctacagcttcgacttctacgtgccccagaggcagctgtgtctctgggatgaggatccctacccaggctagggtgggagcaacctggcgggtggctgctctgggcccactgctcttcaccagccactagagggggtggcaacccccacctgaggccttatttccctccctccccactcccctggccctagagcctgggcccctctggccccatctcacatgactgtgaagggggtgtggcatggcagggggtctcatgaaggcacccccattcccaccctgtgccttccttgcgggcagagagggagagaagggctccccagatctacacccctccctcctgcatctcccctggagtgttcacttgcaagctgccaaaacatgatggcctctggttgttctgttgaactccttgaacgtttagaccctaaaaggagtctatacctggacacccacctccccagacacaactcccttccccatgcacacatctggaaggagctggcccctcagtcccttcctactccccaacaaggggctcactatccccaaagaaggagctgttggggacccacgacgcagcccctgtactggattacagc

SEQ ID NO: 67670 - DNA, 1452 bp, Homo sapiens
aatggaggagctaatgaatactaactaataacaacatcttgctcatttagattttagtcctgtgtgactaaattgactcagttatagttgttcttgtcctaacgtatttgtcaccagtaaaagttccaaggtacagctttctggcttcatttcatttttaactgaataattgccttaaggatatttttagatctcaacaaaaactcccctcctcttgaaccttagaatccttctgcttcactcttggcaaatctttgggtcggatttcagaactgaataaagccaggatttccccccaacctccaagatgtctggactctttgtttagttctgtatttaagtttatcccaagttttgtttttgactgatgaacctgtgacccaaatccaaacctcagctgaatttagtatcagcttaaaaccacattaaactgccatgtgtcatgtgacctctagcagaaaccaacgtggcagtgttctgttttttcatgagtgcgtttcattggggtttttgaactgtgaagacattatttaatacatgtgctttattttctgtgtattattgcccaaggtcagtcatcgctagagggttattattgacatttactcatcataaaatgtgatgtcagcctaccagctcggagtgcagttcctggtttccagtttacaacattgaccagttgctaacatgttatctctgaggaacttggaatgataaatacagccatacttaaatagaagattcttggccgtgtagataaggaaaataagataaggcaatatttttgaactattctataatagaaatgaggatatatacacaaaatgacccagtgctgttttcttagggtgcatcctttgtttttctggttttggtcttttcatcacaggatggcattagctctgtgtctgcaggtgctgtgcagcctgtgtggctggctctcgctctatatttctttctgccacctgaataagcaccgaagctatgagtggagctgccgcctggtcaccttcacccatggagtcctctctataggcctctccgcttatattggcttcattgatggcccatggccttttacccacccaggtaggtaggggattttcccttagggatttatgatttgggggtagtcttagaagtatgggacttttaaacagaatttgtacaatactgaagactaattcccattataattttgtattggaatccttattcttcttcattgttaactctgatattgtttatgtcacctgttgtttctgcttttcataactctctacttttaaaacagattttaaattgcttgttacaatttaattggaaatacaaaaactataaagccagtatcaacatcttccactaccacccccgaaaagacaaaaatagaactgtatcatacatatttttggcaacttgcaacttttacttgactgtctattcaaaagacag

SEQ ID NO: 67671 - DNA, 1051 bp, Homo sapiens
ttgaagtcaatggtgtttgattagctcagtgggtgagcaagcatatggtgctactggagtcaaggctggtcagtaggaagcatcagtccattccatggccactggtaatctaacgtaatgaatggtgtcttttgttgttgttgttgttgttgttgttgtttgagacagagtcttgctctgtcgcccaggctggagtgcagtggtgtgatctcaactcactgcaacctccgccttctgtgttcaagtgattctcctgcctcagcctcccgagtagctgggactacaggcgtgtgccaccatgcctggctactttttgtatttttagtagagacggggtttcaccatgttggccaggctggtcttgaactcctgacttcatgacccacccgcctcggcctcccaaagtgctgggattacaggtgtgagccaccgtgcccagccatgagcggtcttgaaaatgaaaaatggtcttggccacagaaaccaggtatgagggagtggttggaatggtataaagtcatcactgttagggaaacagtaactttaaatgcatgttaacagtgggtctttaaaaatgaatgtcatttggttaaagagttttgctgggcattgagataatctgacagcatctccacttcctgttttttttcttaatctccactttttttttttctatgatgagcgcccctaaaatgctggtaagcttctttccaacaaaattgcggtcaaagtaggatgctggggaatgctgattttagcaaaagcttgtagaaaagagtggcctggcacatgagcttaaaaaaaagaaaaaaagctggctcttgaattttggcacagtgcaacctgttccataccagacaaatgaacaggcttaatctggtaccaattctttttctctcttactcctcagaagtgaagggactgcagatcttgttgttttggggacactttcatggaactgtatgtaggtttttttgaatggtgagaaatctgaataattggtaaggggaagggaatccctcatttcagcttttcttgatgttgttactaa

SEQ ID NO: 67672 - DNA, 1777 bp, Homo sapiens
ctgcgccgggagacgccgccgcctccgcctcccggaccagggcttccaggccgggccggacgggcatctcccgcccctcgcggggagcgtcggggaggagccgccgcctctggcgattgcggaagagtccgggcctcaaagggatggggagcagtccgcggcgctgagagacccgggtccctgtcacctcgggccgcgggacctctccgccggcgccagcggctcgtcccagcaccgggagcctggtgagggcggcgagcacagaaggagccccgggcccgggacatggaatcgcgcgagcccggcgcgggacggccggagacgcggccaacgctgcggccacgagcagccggcagccccagatagagagccgggagggagggccccggcccttgccgcggcggggagttcgaggccccgagactccggaggaggagccgacacccgtccgtgagctgatcccgccccagccccggcgggagtcccgggtccccttcccactgcgcgcggatttccctctctgaggaagtttatccttgtgccttctggaggatttctctctagctcgactcactctggactgactcgctccctggctttctcagttcgttttgggagataacttgttttgctccaagccgcatccgttgaccccttacagtcggatggtctagatgactgaatggagttttgagttggacttttgtgtccctgacggagttgggcctgatcccagagcactgggggtggggaggaggtgttactgtaaaatgcaagttggataaaaggaggacctctcgccaagggccccaatgagtggcacacagtctactatcaccgacaggttggtatgaattcctccttcgttcggcctcccggaatcgggcccgacctagcaggggagtcggtgattgcagattgcctttggccagcgaagttgacaggcagaggaaagagggttgtttcggagctgtgcagttagcctggggttgctgccgagttatccagttgattggcttttggaaatgtaatttttccggagagaaacttcccttccgattctcagagaagggggaggcaaaaccatgattgtggttttccgcctgtagtgtgcattaggattgtgtactcgtctggaaatcagaggagaaggtcattttaggtgaaggtcggtgcctgaagtcggctcggtattggtgtattatttatcagctttagccgtgtcctgcagtagattctcaagacaattacattttaggaatttctacctgtgaacttaatgttgagcctactgcatggtgatctgggaacttgatctctttcagatgttgacctgcacggtgtttaattattatctaataactttccagaatgttgacattaccagtaaatcacaggttcttgctggaagcaatgtccaggagctgaagaaatgagggtaaatcatggggtttgcttttaattcttgtatttaaatatttcgtcttccagaaacacttggcgtttaagagatataagccgtaagcatagtgtaagcgcgcagctgaatttgttgagttctgtgtctgtcctttatagcacctaccagtgttgcatggtggtgggtggcgaattgagctagaccatgtgtggttgaagtgcagtttgcttatcctaagttactcttgtttatagggtaagggataaaaagcatattgattccttgaccacatttcattctcaatttaattatgacactgcatgctagtcccaaatttgtcagcttgctttattttta

SEQ ID NO: 67673 - DNA, 1756 bp, Homo sapiens
aatcttggaatttgtatcctctttataacgtagatggcatataaacattcaataaatatgaaattactgaaagcctgtttcttttctttttcttttttttttttttttttggccaggcactgtgcaggcacaagagattacaaaatgaatattgtaagattaatctgcaaattggtttgggcattaatgttttttgaactggttcaggtgctgctgcctaattttacattttttttttttaaagaaaagaccttggaaagccaattaataagcactgctgagacctgtttcgtaggatttttttttactagggtctttttttattaagaattattcttatttgaccacatttaaatatattttgtaaatataaagcatccatttgctgttaagagagtagttgttcctaatatgaatatatgttggggtgaaatctggaggtactggtttagtattatttctctgccaaggtgtcttaacaaagttacgagtatataatagtttctagctttctgtcagccctacctcatccttttttcgtagtgtctaactcttactgtaggtatattttgctgactctagaactgttggaaaattaacagcaccagtgtagctttttagatagagatcctttcaagtttgaagtgctgtatgtggtatggctttgtttcgtagagtgtgcagaaccaccaggccagctgtgtgagttagagttctttcattgtggtgcttctgactacagagtctgtctgtcctcagttgaaatcagactagctggttttgggcgttgttctgttttgcagtttgtggcaggcgacacatggctgaacaagataagggttttattcttgtgttagggacgtgctggggctgggatggaattcagctatgtttaggctctgattggtcactttggatactcagaactctgttacatcctgttattattttgcagttaaatcaacacattaacttgctctcttctctttcccttcatcttttactccccagtccgcaccccttaaaacctaaaactcaaactttttaaaagactttaaactcaaactatgttcatggtagctattacttctatgtagtatatccaaacagctttaaaaaaaatggtaagcaatttatgagccctggagtctgtagttttcatcgtttagaatgagcacttgacaagtgtagaaatgtctgattgctgctttttagtctgcattgattgctgcattcagtcttaaaatacatcctaatcgtttccaatcctcctacatgtctttcttgtatccctgagaatttaggggtcctatagcaattggaatttcttctgagaggtagacaggagagaatgcccttttagtagactcagtaaatgatttcaggccagtgtctataacattgaattttcagggacagtacaggtaggaaagttatagggttcttccttgaaataaatggacttttgttttggctagggcttatgaattttgtagtttttgatttatagataaagacaggtttttgatacaatttttttaaagcactgaattcagctttgagctgtttaacttaagcagatttttaaagtgagtgtggaaacctgtgactttatatgcctgtacccagtaattaatgatacttttcattagtgatactttttctgtcaaaattgctgtataatggttttgattaaaaaaaaaagagctactcatgtttatatgttattttcaacgttgcatgagtcatctctcgg

SEQ ID NO: 67674 - DNA, 1057 bp, Homo sapiens
accacgcctggctaatttttgtatttttagtagagacggggtttcaccatattggccaggctggtcttgaactcctgaccttaggtgatccacccgtctcggcctcccaaagtgccgggattacaggcttgagccaccgagcccagtggttttttttgttgttgctgttgttgttttttaactaagtttgagttttcagtttaaaaaatgaaatttgaggcaaacattcatggaatccataaatggtgaattttacatatgtttctgtggagcattgcgattccagggaaaacagttggaaaatatttcattgtacatatgtggttgcctcttctaaatgtcatccagtggtgggtatgaattgcttcccaaactgatacgggtcacagaaacagcaagataacatactggttcccagaggtaattgaagggactcttttgcatcatggttgtctgacattattagaaatgtttcttatatacttgcttgtttcctagaaattgaccatgacacattttcaagaatagtagcttaacttcttttggtcttttctgttaaaacttggttttgatgatgttcctgagctttatttgaagacatgctcctttcccttataataattacaggttttcaaaatagtgccatgtgagttaaaatttttaaatcaacaaaattatatttttgccttcttttgagtaaaataccatcatgtaggtaatgatatcctgtggtagtataattctttaacatttacaatattttcagttcagtacagggcagatcatgcttctgtcatttacactttaagctaattcatacagtttaagtcaagattttaagtcaagattataaaactagaaagggcagacccaagattttaacctagattttctggctctcaagtcccccattgttttttttcattttaaattattgtctttctttgtactgtatttttctgtgctattttcctttagtaactctccagcttgatgaagtcagttggatttttctcttacagcatagtttctagtaccttacccattctaattttaa

SEQ ID NO: 67675 - DNA, 1008 bp, Homo sapiens
aggaagttgtttcttattttttccagtggtttttcagttcgttatcttaaattgtaggtcaaaacattcctcgatgtttggtttatttttaccttattgttttgtctcctcttatttccacatgttagtgaaataacaatgcttagcagtattttttttttcagtaaaatggatattgtgaaaattgaaatattttactttcttgctgttgtatttacaagaattgttaatgacaagacagtgtaacagaaaaagtgcatatttagattattataaaatctgtaagactgtagaccttttgaatactttattagcatattttctttagtactattttagtttcaaattattgagatagatgtccttgttttgtattttgctaatattaatattttgtattttggtaatactaaaatttgcaaacatgccaaatttagagcattttactttttcaacttagaatatctggaatcatcaagatagtcatatagggaagaccgctataagacagcttctaactccaatagaagcctatgaagctagtgcctggtcagaggctgtgcctaaattgcatgagtatatagtgtcgacttttagtaaaagaaaaaatacactaactttacctcttgaattagcatgcaccaatgcagtttagattcataccgaaacaggatcttttactaattcaaatgctgagtcctggtttttgagatcacagtcacatgacaggcctgggtggcttctcagtgtctagagacaagcaaatctactggccaatgaaaagtaggtttcctgtcttggactgcaagtaacaattcatgcagaaattggaactatataagagagcctggttttagttaatgctttcaattagctgcttgtcacactgctttttcttttggtgttatataacacattagagtcatttaaaggtacactctgatactacagtttttgtcaaatattacatataaatgttgattttacattcatatactcaaaagatca

SEQ ID NO: 67676 - DNA, 1024 bp, Homo sapiens
gcactatccactatggtaaccacaagacaaatgtggctatttacatttaaattaattgaaattaaataaaattgaaaattcagttcctcagtgacactagccacatttcaaatattcactagccacatgaagccagtggctacagtactgttggttgatcatagaacgttttaaattattgcaaaaagctcttttggacagtgctgccaaacatttatcaacgcatagtttactaagatcagaaatcggtgagcaactttgctgggtggttctgcttcaaggtttctcatgaggttgcagtccaggtgtctgcaactagaagcaagggcttcaggaatctgaaggctcaactgcacctggtgggtccatttccaaggtgacttactcatgctggtcaagtgagtgctgattgttggtaggaagccctagctcctctgttggtaggtggacttctctgtggggatgtgtgaggcagctggctttgccctgagtgagtgattttagccagagagggaggtagaagccattataacttttgtgagctgacctcaaaagtcacactacatcatttctataatctgttggttacacaggtcagcactattcactgtgggaagaaactatacaagggcatgaataccaagagtcaatggggcccattttgtttttttgagataggatctcactgtgttgctcaggctggggtgcagtggtgtgatcatggctcactgcagcctgaatctcccagcctaaagcagtctctcatctcagcctcccaagtagctgggactacaggcatgccaccatgctcagctaattgtattttatttttatttatttatttatttttggtagagatagggttttgccatgttgcctaggctggcctcaaattcctcggcacaagtgatctgcccaccttggcctcccaaagtgctgggattacaggcataagccaaagtgcccagcctattggtggtcattttggaggcttcccaccacaaatacttacggaatatctggg

SEQ ID NO: 67677 - DNA, 3262 bp, Homo sapiens
tcaaaaatttcaagcatcttttacaattttcgaaatatttccagtgagtttttcagaggaatccttaactggtcctttcagagaggaaaaaagtatccagctcacctacatatctcatagttctagtttcacatttatcttgttcactttgttttgtacgtggaatacgtaaacttgtcaggataaatttaggttgttcacataagtagatatatttgtcaagatatgcttatttgcagagcctgtctcaggcatgcacatgatctcacaaactgaagatttcttccagaaatatttgaaatttttcctgcagctcaaaaggatgcatgaagagttttccactctttttgccaaactctatatgtagccccaattttgaagttacttttataaggttttaaataaatggttttgaactgtaatgactaacaaaaggcatgtgaatgatagtgctagagatgctgccaccaaagtaccaagaaagaatatcatgcttgatgataaaataaaagctttggagtgtctcaaattggctgaatacatttaatgagctattagaggaaacatggtaaagatggatggtcatttagaaattctaaagtcctgtaatgttgaggaagctaaacattatcaaatcttggaagaagtaatcaatataggaagaagaaggaggagaagcaatactttggatactaagcaatagtttcaatactaagttgaaattacttagctaacctcaatttaatggactcactacatttcctctgcagaacatgacttttacccagtgagttaaatgcttgtgtctcatggctattttgtagtgtgtctgaatgcttctacttcgtccagttgaattgtataatctcaacccgttgtacttgaattggaattagatgatttagttaaatattatgaaaactgaaaactgatgaaatctgagcaccaaaaagaaagttatttctataaacagtgagttgtgtgtgctttggaaataagagtagagacttgtcactgaaaaaaaattctgtcaaattagacgtgtatacaaaacaattattatttggaaagtatcttctagattattatgaatgtctttcgtttcttgctccactctaaggaaacaggaaataaatcatagctgatatattttaggacagtttataccagaaagctgatgggacactccaatcaacagacccctacttaaagaaacagccaggcgcagtggctcatgcctgtaatcccagcagtttgggaggccgaggcgggcggatcatgaggtcaggagatcgagaccatcctgactaacacagtgaaaccccatctctactaaaaataaaaaaaattagccgggcgtggtggcaggcgcctgtagtcccagctacttgggaggctgaggcaggagaatggcgtgaactcgggaggcagagcttgcagtgagctgagatcgcaccactgcactccagccttggcaacagagcgagactccgtctcaaaaaataaaaaaagaaaaaaggaaaaggctttgatcctacattttaaaattggcaaatgaatgtacatttacataagttgaaataaagtttaaggtttgtatgaatggtttttaattatttcctgctttaactattcttttccattaaatgaccaaccactggtaccagtggattggataagacagttggcactgcgtggataaaggaggtttaaagaaaaggaaacatgaaatgccttctttttgaggctgctacaataaccaagttacaagtgtgctgattaatttattattcctgtttccagaaatgtcttatttgtatttcatttttaatatttttaaatttaatagtttacatttcccccactagtgttgccttctatttgtagcaagttaatactggttttctatttataatagtgagataaagtttcctttggaaaggaatgttacctttaaagaaaaacattaggtgactaataatttggtgcttatgtgactgtggcaaatcatgaagatagtattttaagtatggaaaacaattgctaaccagcaagataatgtcaagttccttaatatgaactcacttcttggcctttgtctaccttctccagcttcatgtcttaccactttcccttattatggacttcatgttgatcaagtggaggctccctctcctcaaggagagtccctaggccagattcagaagatggttggtagagaggggatttgatagcttctgaggacagtgctttggatggagaaatatcatgcaacttaggacagtgctttggatggaggaatatcatggaactttagttttccagctttattgagctttgcctgtgatattcacttgtttggggggctgtttggagacagggtctcactacattgtccagacacaatcaccatgtactgcagccttgaagtcctgggcttaagtgatcctcccatttcagcctcccaactagctggaactacaggctcgagccactgtgcctgactcttactcacttttttgttcccaatacctggaagaagatcgtcagtctgtaaatatttgaaatctaaataagggttatggtgctgtagtataaggccaaatcttgggcaccaaacaaaaaaaaatttagaaaaatcccttagcccatcccatgctgtgctgggagcttcatctttctttttaattgcaatttaaacgatctactgctacaagagggttgtggtaaagcagaatttcttatactgtgcaggtgggcatgtaaattggtttaaacttacagaaaataatttgacaatatagttcaaaagcctaagaaatgtttaaactttttgaattagtaatgccaattttggtatatatctcaagacattaaggatatacagttttagctgtcattttatacaaagagatcacccacaccattattttagtaggggcaaagaggaaccaatgtaagtctggtgcctctgaagaggtagacctagaaactgggatgacaaggaactcccaggggactgctgttaataaattactttatgtcatttgataaaatatatgtaagcattaaagacattttcaagtaaaccttagtgaggaaattgttcatgatctgtgaaaagtatgggataaaacttcaaatataatgccagttacatttttaaaaaacattcatgtgatgcttttaaaaagacttctaggacatgtaccaattttttttttttttttttttgagccaagtcccactttgtcgcctaggc

SEQ ID NO: 67678 - DNA, 1088 bp, Homo sapiens
gctcacctcctgctgtgtggcctggttcctaacagatcatggaccagtattgtctgtggcccaggagttggagacccctgtcctagagtacacagtgaaaaagtttgatagagaggggaacagtggaagattttgttagatatgtcacatgattaatggatgactaaagttttgtttggtgatctaggatgatagagatgttgagacatgaaattagttggcttcaagttctaagctgtcctgtgtgagaaattgcctcatcagccaacacaggctttgacatatgggtagcttcgtgtttcttaggatacttgggctggtcagaaagtgccaagcatcagagaaactgagacctcggtataggtggaggaagtctaatgatagccacagtcagtagcctagtctgatttgtttttagcaaatctagactattttcttaatcagtaactacttctttagtaactacttacaaggcgactgcctttgccaaggtatatgttctctgaaagctgattcttcatagatcactaactgtagttttgaggttctgtgatttccttcaaaattcacagaaccttgagctataatttatgtggatagagtgattactgggatttaacttaaaattagatgtattcaaatgttttaaggaatatgttttgtaaaacaacatgtttttcattcgttacttatatattgatcccagaaattgtgtgcctgcaaattgtcaagttgggttgatgcttcagaaaaggaaagtagaggctgagtcttcttagtatagcaatgcattttttagagcagtgtttgaggcaaattattttcgcaaaattacatggcttctagggattagattgcatgagtttgtctcttgttcctccctcattctactgtaagaggccaggctgctagttaacagaatgccagacataatgcctagggcatagtttgagacctgggaagattcacaataatcaaacacaaacagacagagtagcatgaagaaatttcaatcctcccagtcttgcttacagatttaattaggcttattggggcagaaaatatttttcctccccccatgtttaaat

SEQ ID NO: 67679 - DNA, 4259 bp, Homo sapiens
ttatttccatcatggtgatatgagttatcatactgtttgccacattttgaaagctgtttgactcctcagaagtattaacaaattaacaaattcttactgagcatttacattatgctaggttctttagatgtatatcaggtttatagtctagtaaaggatataaaaaactcatgcatatgatgtaccatttttggtgcaagcatataagtattgcagtgttatatatttatgtactgacatgtaggtgttttacataagctactacatttaatcctcataacaacctagtcacgaaattattgtcattcttgttatcctatgcacattagtccaaacaagcaaacaaaaattgtcattctcttttatagatgagaaaatttacattttgagagattaagtgatttaccataagtaacaaagccatgaagtgatgaagcctgggtcagtcagactctaaagctctttccactgtttgtatatgagtagattaaagcattttatcatgattatttgacatcacaaatagtgatgccatgagtgaaaaggagatagggatcctaatctttaatctatgccaagaactgagtgattgagcaaatcatttaacatcgtctgtaaagtgtgagggttggactaggcaaccttggttcatgattctattcagtgtaagagattttcacatatggtctatggaaacaattctcattactttagtgtttttattatatttagtttccattactcatccttcataatgtgctgtacatgttggattgtgtgtggtggggggggagggtgatagagtgcatatcatcttctaacatattacatacaatatacatttatttattaagattattactgtctgtcatcttccttcttcccttcccccaaatatgtcacgaggacctagactagagcctggctacatagtatgcagttataaactaattttttgaatgaatgaataggaataatagacttgtatagtacattggcaaaatatataagtaacttcataattcttaacaccaaaagattccctgggggccaaaattattaatctttctattacagtgatcctttaaggaactaagtgtaagaatcttaaaaagaagaacacctacgaaacaatcaagtgtagtcaagtaatctgaagtttgctggaattcccccatacaaaattattggtagtatagaacttgctaaccataggtttgtttacccagtgttctatttgaaagtagtttactaaagcattccatataagcaaagaaaaaaagcagcaaagtttcttttttgtttatgtgtcactgtatagtctcaaatgctgtaaatttacagtgagtagaaaatattcagaccattgagtcttttgcttaaaagatatttcgtaaggtataacataacgtttactggtagttttgtttcatttaaacattaggcttcttgagagttttaacagttttattgaaatgtaattggtgtataataaactgcctatggttagagtataatttgataggttttgatgtatatacacgattaggaaactatcaccacaattgagaaaataaacatattcaccccaaaggtttccttgtgcattttcataatttctccgtccctccacccctcctcacctatccccaggtgtacccattgacttgtctttggtccttatagagtagtttgaattttcttgctttctttcttgtcattatagattaatttgcatgtctttttgtaagtgaactcacatagtttgtgcttttcttatgtggtctcttttactctgcataattattttgagatttgtctgtattcctgtgtatcagtagttcatttctttttattgctgaatgatatcccattgtgtggatataccacagtttatccattcagctgttgatgggcatttgggttgtttcaagttttagactattaggaataagtttgctttggacattcatgtacaagtttttgtgtgtacataagctttcatctcttaggtaaacacccaggagtggaatggctggattatatggtaggtatatattttaactctttaagaaattgccagactgtttttccaggtgactgtattgtgttacattcccattagcaacattccagttgctgcacaacttcattaatagttggttttgtcagtctttttaattttagccattttactgtgtgtgtgatggtatcatattgtagtttttatttgcatttcatctgatgactaaaaatgtttaacatattttcatgtgcctgttttatcatccatacttcttttgtggattgtctgttcaaatcttgtttttaattgagcttttaattattgggttgtaagagttccttatatgtttgggatataagtgcttttattttttttttattttattttattttgcgacagagttttgctcttgtttcccaggctggagttcaatggtgcaatcttggctcactacagcctcctcctcctgagttcaagcgattctcctgcctcagcctcccaagtagctgggattacaggtggccaccaccatgcctggctaatttatttctagttttagttttagtagagatggagtttcatcatgttagccaggctggtttcgaactcctgacctcaagtaatctgcctgcctcagcctcccaaggtgctaggattacaggcatgagccaccatgcccggccataagtccttttaggtatatgatttagaaatactttctcccagcctgtggcttgtattttcattttttagcatcctctttctctctttaatacttttattgagatataattcacatttccttgagcaaaagttttaaagtttgaattctaatttatcattttttctttcgtagattgtgcttttgctatatctaagaaatatttgcctaacccaaggtcacacctctttgcttctagttttatagttttgggttttacttttaggtctgtgatacattttcaggtagtcttttatttttaatttttgtgggtacctagtaagtgtatgtatttatggattacatcagatattttgatataggcatgcaatgtgtaataatcacatcagggtggatggggtatctttcatctcaagcatttatcttttgtgttacaaacaatccagttgtactcttttagttatttttaatgtacagttaaactattttttactataatcaccctccactacccttcccagcctctgataatcatccttctactttctgtctccatgagttcagttgttttaatttttagcttccacaaatgagtgagaacatgtgaagtttgtctttctgttgctggcttatttcacttaccataatgacgtccatttccatccatcttgttgcaaatgacaggaactcattcttttttatggctaaatagtactccattgtgtatatgtaccacattttctttatccatttgtttgttgatagatacttaggttgcttccaaatcttggctattgtgaataatgctgcaaaaaacatgggagtgcagataacccttcgatatccaggagtgtcctaaatctaaggatgtgtcatattattttttctttatttttttctcctcctgctgttccgggtctctacagtgtcccctactcctttgttttattcgcacacctgggtagtgcctttccaatcaaaggatagttgggtctgcatttcaggtctgtgatctttatgtttagggaaatccgtttcctggtcaaagcctaccagacttccttggtatcactccagaatttaacagatttggcaagtatgttttttagttaatggtttgagatcataatcatttccttcatgctcctcctgccttctatttttgcttttaatattgaggaatgctaatggaatagatttgcttttgctctctcccatctttacctggaattgaacacatatttattgaaggaatgagtggtttgcaggaatgttgccattcaggtggagacatgtttctctttaaatatatagctggcaagttgcccatatggcacatagatattaactgaattatccactgagctctgggattaggagatacagattgtgtaggattgggagttctttctattggcttatcttttcctaaaactatgtaacgggatatgaatacctttctacctaagtatcttgtcattatactagatctagttttctgagtctcacttgtgaaagcttttggttaactattaataaaaaactgtacaa

SEQ ID NO: 67680 - DNA, 1047 bp, Homo sapiens
tatgggagctacaattcaagatgagatttgggtggggacacagccaaaccatatcatgtgtatgtataccccagttagtataacacattcatttccctgctctctctgctgagagggcctagaaatggtgacatctcagtagcagtgagcgcacccagctcctggatcttggttactaaatatcactctccaataaaatagctccttggagaaatggttgactctaaggctgcaatagggaaaatgcaagttgaacctagagtgccttatagtgccacaaacaagaaagtgcccaaacagaagggtgagagcatgtcagtggcataaacgggaagaatttgagcaagagaataaataacgtagtattggattagaactcaaagtctaaaataaacatacatgagcccatactgataaaaatgattacataaatacatgggtgagaaaacacaaatcttccttacaggaaaatttcaaatagtatacgtagattcctattcccaggagatggagcttaatcctctcagatgctagtgtggattgggcttagtgacttcttcaaagaaaaaaatatggcaagggaaaaataataactttacagggagacgtcgagcaaccactcccttaaccaaatgaccaaagttaacattactagtgttaagtcatattggtgtcatatatcctctgatgggtgatgaaaagggtacttcacccctgtggtattccaaaaatagacccacgtatatatggaaaactgattttcaaaagtgcaaaaggcaattcagtttcaacaaacggtgctggaacaattggatttcaattggatatcacactctatataaaaattattacaaaatatattgtagacctaaaagtaaaatagaaagtcactcagctcttagaagaaaatgtaggggtaaatctttgtgatttggggttaggcaaagatttcttaggtatgataccataaacatgggcagtgacctaatttccaaataaagtcccacaggtatggaagttaagacttcagcatgtctttggagataa

SEQ ID NO: 67681 - DNA, 1025 bp, Homo sapiens
catttacatttagtcttccaatgtgttggtgttgtcattaacaaaatacaaattctcctaaaaatattatgaattgtagctttgggcatttattcagtttgtggatagtataataattgctattatgtgtatccctgggttttgtttgtgtgtttgttttctactttcaacacaaatagggagagagtctctctcaccgatttcgtgccacactttgtcacttgggcattaaaataattttaccctggccctttgtcttacaaggtctgttgccaaaacaagcttcttcagcttctgctgctgtttccataaagatttgacatgagttcatggaattgatctcggggacgagtgtgtcctctcttttctgtttacctagtacccacagaaactcctgtcatttctagtccaaactcccacctggattccttactataaatgaattcatcccaaggaagaaatcaagggggagtatagaacttgggttacaaggatatttgttataacattctttattatgctgaaaaattagacccagcctaaatatttacaaaagggaacttcttaattaaatagccatatcacaggatactttgcagttatcaagaattatttagaactatgttttttaaatctttatctgatttggaagttcaatatatagaatgaataaaaaacaaagcagctctgatatgtgggaagtctagagccccatctacacactcccgctctgtgagggacctcttttaaacctctagaattttatagagcacagtttaaaaccagcactgtagtgaaatatttaatatgtaaacatatgttgatattttatgaagttaaagttgtcaatatgtccagtatgctttaatttttatgaaaataaattttaaacattgtatacagaaatctatctctattttgggaaagaatgggaatatatgcataacaatgctgggtgttgggattatgggtgatttttgtttactattttgtctttagtttttaaaagtttatacgtgtacttc

SEQ ID NO: 67682 - DNA, 1085 bp, Homo sapiens
cagagagaaccattgctttataggaaactacagtttggaaaaacggcagtctcattactcaatcccttgagagaggaattatcttgaaaatgttataaaaaatattagtaacagatttactagtgtcagtggtcttgtgtgttaagtatattaggataagccacatttgtaacagctaacggagaaaacataactgaatgtcagtgttacacagtgaactttgtagagcagtgattcccaattctgagatgttgtaagaggaatgtcagaattcctaaaacactcatcctccaacctttcaaattcagtgctgtggtgagccattgttactgataagggtatatcccacttgtgatttctttgttttgggtcaagaaaagcttttgtagaagccagtgtaaaatggcatgcatataattaatttcctcatcttttcctcataaaatcagaggtccttttatcgatggtggtttgaaagtctggggtattcagatttggcagcagaaagtgtgttttttttgtgtgtgtgtgataaactaggtggattgctaattctgattgaggaattcgtaatgtttgacaccagaaccagagcacttgtgaaaagaagtctctttagtacaaaaccaaaaatttaattacagcatttgttataactatagccaataaaagtatttttaatgaaaaagaatttccgcagaagaaaatgctttctattaatgcagaaggtgttatatagaagatttaattgtaatgatattggttatgatccgttttttgttttatctttacctgtattttatattcgtataacctctaaattttacaaattacccataatacatttcttatataattaaaaaaattctgagtacagaacaggaaatatgttcaatctttattccattagagttctacttggaaagtattaatatgtaaggtttttatttctccataagaaatagacctatatagtcaggcacagtgtctcatgcctgtaatcccagtgctttgggaggctgaggcttgaggattgcttgaggccaggagtttgagaccaacctgggcaacacagcaagacctgg

SEQ ID NO: 67683 - DNA, 1025 bp, Homo sapiens
gcatttgattactttgctttaatttaggcatggaagtattttgaaccgagagtcaccaacagataagaagcagaaagttgagcgcattgcatcacatgattttgaccccacaggtaaaacactattcattctttcaaagagtattgagagtagtgaagttcagaataatagagcttaagctacccgaaacactcaggaatagttgtttgatctgttttaggactctcacattcctccaattatatcataataaagcctttgcatttagtaggaatgcaagcatttttaacttccaacactgtacattccactacagaagtatcattgtagagtatattgtatctttaaatagtgataataatagaaatggttatataataattggagatttggtcagatcaagaactcagtgttaagttgaatcatggtataagcagtaatatgtcataaaaccaaggctctaacaactcgacacttgcgtagtcatctaaaaattcaattgtgattatggtgaattggagttttagataaatcagtttcacaaattaatgatggtctcattttagagtaaacaaatgaatagaaatccctttctcttcagtcaaaaagtattctgaacttaaagagctgtctttcaacctaagcagtgtcgatctttcctagggttgtcaccttaacagactttcagattgatctccttttaaaacatctaggctttttccttttgctttctccttgtaagcttactccatatttgattcatagaaagtgcttggtaatcttgcttttttcatttgaaactgatatatattttttgtgcacatactattttattcagttgcctgtccctttgacaagagacgaagtaaatcccgctatctcagatacataaaaataatgtatctatttttaggtatttttacttagaaatataattttaaatatttaatagagaatagtatgttttatttatctaagacatttcatactttattagtataaactcctttattttgaaaaaatat

SEQ ID NO: 67684 - DNA, 1052 bp, Homo sapiens
tggtttcaaccccactgccttgtccatcattttattagactattataatagattcgtaacttacttttatttcagtttcacattgattcattaacttttctccattctatattctgccttgacttgtcagattaatattactaaagtaagaatttggtcattcacttgctaagaaagtacaggtagttattaagataatgccacaatttgtttccaatttattctactctgattctccttcagcgtttcattttccaaaacatgttttggcattcttcctttgcacatgccatttctgttgtcttgagtgaattaccacctataacttagaatcctactcatctttcaaggcttaattcaagtactgccttttcctaggattgcccagctacttttgttgtttctgaatgttgacatctgttttgtatttaattacttatatttatgtttatctttacatctcccataatgctgaacatattggagacactcattaagtgagttttgaatgaatgattgttgagattgacataggaagtattttagtagagaaaattgatggaataagatcttcactcatcctaattgaatctttctttccttctgaaaaacttgaagatagaagaaaatgtaacttggagacatttttctggtagtggtctgaaagaatgaaatcagcatacttggaatttaaggctcttcttgctggcaagactgtgcatttagaatcaagaagcttcttaatcaaaggattatctgaggtcttactcataaaacatgtatgtctggcaccagtttaaaatgagctgtttttatgaggttgcacatggcccttctccactcccttccctgaagctgattcttaagagctgaaacctagagaagtttggtcatgaaataaaataaaaggtgaagaaagactaatgtgctttcactaaagtcaatgtaatatggaagatttaacaggttatcttacatgtttaacactccattttcattaatatgccccacaccctattttcattataggagttatggccttctttcaggaa

SEQ ID NO: 67685 - DNA, 1033 bp, Homo sapiens
catctcagccttccaaatgcgcccagccagaattgattctcttaaggatcatttgcattaattgataggagtttattaacataaaagtacttacaattgtactagtagcatggatagaggagaaaatccaaggtcaacctccccttaatcataataaaataatatttaacgtgtaggaacccttaatatttgttagacattaagctaactactttatatatttttttattcaagtgagaggtgcaaacatagcaaactccttgactccaaatacccgtttccctcatgttttacaggtgtcctgttctctgcaggcatctgaaaaaaggtctatttaagaagcccaggttgcttagcactgcagtcacccatattagaaacctttaattcattaattttcagcttttgtgaggtgaggtgggagaatggagaagcacgaatatagtatgaaaaaacgtattcagtgttataattgccttgatttctaaagtcacagtatctaatttattttgaaatttcaaataactataagggaggttgtgaaatatttgtttccaaaagcaagcatggattttaaaaggttcctgtaaaatgctgcttagtctaataattttttttttttttttttttgagatggagtctctcactctgtcacccaggctaggctggagtgcagtggtgcagtctcggctcactgcaacctccagctcccagattcaagcagttctcctgcctcagcctcccaagtagctgagattacaggtacctaccaccatgccaggctgattttgttttatcatgttggtcaggctggtctcactcctgacttcattcaggtgatccacctgtctcagcctaccaaagtgctgagattacaggcatgagccaccatgcctggccagaatctctgattctatttattatatgctagaatttataaagaatgctttttttaaacttgatttatatattcatatcctattttataggtgtcctaattacttgaaggaagtaacactgaacagataacaaa

SEQ ID NO: 67686 - DNA, 1045 bp, Homo sapiens
ttgatgacttggtaattaaaagcaaagagatcttttctatttgtatgagcccttcaccgtgaacgatttgtaaatctgtttcatgttatgttttgtcatttgtcatggtgaataagttgtactgttttgtatgtcaaggcctcggtttatgtttaagttcattttgttgctgaatatgccctgtagaatcatggtgtgaaaatgaatattgaatcaaatacataaatattttaatgtaatgtgattactatattatattggttatattatgtatgataattcttgaagtcattttatccattgtctcaatagaatgtatctgacatacactactttcgttttcttacaggtgaatggaactctggtgactcattcaaatcatctggaggtggtgaagctaatcaaatgtaggtgaatgttattcttagttttaattgttttctgaaacccttaaagtaaggagcagcaaatttcctgtaataggccaaatagtaaatatttaggctatgtggactatatagtctactgccgactctgtcattgtatcatgaaagcagccatagactatatgtaaatgaatgggtgtggctgagcttcagtaaaactttatttgccaaaagtctgtgatcctggtttagccccttggctggagtttgctgatccctgcattgaaggaaaatctgaggtgaaaactcttagcttactaatagctatcttttgtcaactccatttatatggttgattataatattcctgtcattcttggtaatatttgatacatatatttgaaagaaatgcatgagtcacctgagaggaaggaggttgagaagtcagacatatggcctgatgaactgaaatggaactttaaaaatcatctagcacaatcactttccctcagataagtaaatgattatataatccagagtagcgatcttctcttggaaatctttagggttaagaatttgtgatcttcaggtttgagtgaatagcccacttggacttagttctctgtggagaaacaggcttgaagcagtgggagtctgca

SEQ ID NO: 67687 - DNA, 1061 bp, Homo sapiens
gcaaaagagtacatgattatcctaggattataggaagactaatttggtaaaatattatagggttgtgaaacaaggagggatgatgggtgatgaattagggagctgtcttcatatttcaggtaagaggtactgggagtttgagctatgcatggggatcgatagtaaagatccaaatgagggaaagtaaaagatactattcttatactaagacaacttcatttctccaatatcaatatttagtgttctcttgaatccagtttagtaaaaatgaaatagaagggcagacatttccttgtagtttcttgtaagtgtcatgtctgaaagcctgtccacataacccggaagtaaaaacctaataggtattgataattggagccgaggcagaactttgtatgccacattttctctatttattttagcttcattttgtctatactggttgttgtttgttttttatctttttcttttctaggaggaaaacaatgtggttcataaccagaaagtagaaattctgagaaaaatgttacagaaagaacaggaacggctacaggtattaaatgagaagtagggctgtttacaggccaataaaaatgtgagtgggcatggttgagttggtgtttatcagtcacaatcaagcagcattgtaaccaatgccattagttatattattgattaagaatggactatttctgtatcttttttacataagtaattaattctgaaaatatttttataacttttcagttattgcaggaagattacaaccgaacacctgcccaaagattgctaaaagagatccaagaggccaagaaacacattcctcagctgcaagagcagttatccaaagccacaggctctgctcaggtagcatcactattacaagtgctacccaactttttgcaggagaattttcttctgggaatgtgtcagagaatgttgcagttgccttttttaaagttatttttctagcgtaggacaacaggatgtcctgttaaggatgttacagaagtaatgattaacaaaaataaatgtgggcgtctgattgtttgcttgctcatgag

SEQ ID NO: 67688 - DNA, 1040 bp, Homo sapiens
aaaaaaactcgttgttgtggtctttttctctgccagagtggtacatggccttgaaaatttgtgaacccctactttgaaaataaagtacttcaaaggaaataaacaaaaagaaatctcaccatttaagtgaaccatgtctttttgatgggttggctttattctttttctaaatttgaccaccaggtaatttttctgtttcttttccctgaatgttgccaggacactcaatcacttgtcggaagtccctcaacccgtatagcacctcatattattggagcagaagatgatgattttggtactgaacatgaacaggtgatgacttttttctttctaaaaaatagattgttactttctgcaatatctgatttgttgcaaaaatgagcacgttctggagattaagataacatttgtaaggatttgaagctaaatcttagaaccaatagctccttgggttaattgcttattttagctttgaccaacagaaatgaccttgcttttaaagccagtgagagatcattaatatatgtttaagtacttcattttattggggttgagtgtgtttcttaaaatagtatttttaaaaaaaatttcaaatcccagttcattggtgctataaaggaatatgattagctagattcttgtccttgtatcctgtgatcttgctaaattcacttattatttcttggtgcttttaaaaataagtcttttggagttttctacatagataaatatgttgtctatagtttttatttccttattttcaagctgtttatcttttatttcttgttcttgcctttattgcactggctaggacttccactatgaggttgaatcagagtgacaagacatgcttgccttattcctgctattagggagaaaacactcagtctttcatcattaagtatgatgttagctataagtattttttagaggctctttataaggttaagggttattaggttaaggaatactcctggtttgctgagagtttttatcatcactggatgttgaattttgtggaatgagattattatgtggtt

SEQ ID NO: 67689 - DNA, 1032 bp, Homo sapiens
agctcacatttatttcatatatacaccatcatacagaaatgagcttttattacttttttgcacttgagctagaaatgcttttaagaaagttgatttgagctactgcctgtcaaagagaaagttttaaaatccattttacttttcttcaaatgaatataaagagatcttacaatttttagcggtgacttattttcaaatttaaaacttcagatcttataggatgtgtttaaattctgaaattgtatgacttaaataggtatacaatacaaaataagcaggaagaggttaagatattttctcttaatgcaaaataataaagtattcccctccattagtttgggggtgggggaaaacaacagactggtaattattatgcaaatattatggggaaaatcctagctaggaataagtaaattctaagatagtcaccttatttggttcagtagcaagaactgtagatggttgctggagatttaaaactccaaaaactcaacattgacattcaatattttctcactgggagtgtgacattgtgagggctcttaaactttacataggaaaacgattaggaatattattggtcttcagaatgagcatctcaaatataggaaagaaaaatcatggctatatgtgagtacatttttcatatgataatatacacataatttaggttttacctatattgatctaaatgacatataactgattatattgaccaatgattctaggaagccaaagccaaagccagtatattcattaagtgtgtcacagaagcattcagtcatctagctaaacgactgtagacttttcctttatagcatgatcctcgggaaaagggctcattttcaagtttaaacgatagaatgttctggagttgtgaaatgtgaatgaataaatgagcttgtacttgattgtgcttgtagagtgggtatccaagttgtatccccttactttacagaagtacttatgtacatcttcaaatatctttagcgttgttacaccttttgtttgcatttcattttagcacctgaa

SEQ ID NO: 67690 - DNA, 2211 bp, Homo sapiens
tagaagattttcggtaagcttagtggtagatagaatttcatatgattattctaaattaatttttttagttaagaaaaagttgctcattaaatacttagcttagcactagataaaccatatggtcttattgttattaaaacataatgaacatctggagccaaagggttagagtggaactgagagtccagactctccattccaggcacttgcaggatctgagctcagtgctgtgtctatgctaagtgtgttcctttaagatattgtatgtgttcttggagtcattgcttctagaattttttcctctggtatcctagatgacatggacccataagtggaaaagtgacatttttcctgttcctagaaaccatagctgtgaagactgtgatgaagcgtccccagaatgaggtagtttttctttaggctacctcaggaaacttctctattcccttcaggcagaaacgtagtatgggactgaccttggctgaaagcgagctgactaaacttgatgcagagcgagacaaggaccgattgactttggagaaggagcggacatgtgcagaacagattgttgccaaaattgaagaagtattgtaagtaatagaagtatatgtggaaatgccctctctgctgagatactagttatgcttgaagtgtcctttgggtaggtttagaaaaactgtcagattgtgtatgtggagccgtttattttgtcatagtacttgagaaactggattttttttttcttttttctgatacttttagataaatttcttgtgttcctttttctgggtggtggtaaatgggtaactctaaaacttctaatcagtgatcaaaaacaggttgattactttcattattttcaatttataggccttggaaatatttcttgccatgaagcatatacagttggtgacatgagggtgaaacagataaggttctttaggggatcagggttcttttggtattttattctagggtgtggcccaaagcatttggctctgttctgttatttcaggtatctgagttaataacaatttttaaggccaggcatggtggcgcactcctgtaatcccagcactttgggaggccgagcgggcggattacgtaaggccaagagttcgagaccaagctggccaacatggtgaaaccccatctctactaaaaaccccaaaattagccaggcatggtggcactcctgtaatcccagctactcagaaggctgaggcacgagaatcacttgcgcccaggaggcggaggttgcagtgagccaggatcatgccattgcactccagcctgggtggcagagtgagactctgtctcaaaaaaattaattaaacttccatatttcatttttaaatttttttttcttttttttaaggatgactgctcaggctgtagaggaagataagaggtaacataactgttttttttcccctagaattttaagaaaaaaagaactatgtttttttcctttcagtcctaaattacaatttatttcttttaacttacaaatacagtttgtggtctctctctggtggcttgtatgttatttgactaatattctactgttgtcctgagtagaattctcttctctgtgcaatgactagttagttctttagtgtttgtttgatttatttcaataattccaaccttggggttttggaaatcatttgatgtctttattctaccaaccctcccttctcagaagtcttaatttacttcgtcctttctcctccagctccaccatgcagtatgttattctcatgtatatgaagcatttgggagtaaaagtgaaagagcctcgaaatttggagcacaaacggggtcggattggatttcttcccaaaatcaaggtaagaatgaaataatgtaatagcatgttcaggccttagggcttctttacatttggttgcagtgtcttccatcatcttagtatttacttaatcagcaaattaatgctagtcatacaaacatttataagatactgtctctgttctcaagaaactcaaaatacagtgagaaatccagacatataaactattattagacaatgtgaaaagtgaaattagcagtttacaaagagtgctatttctgattctgttcatgccttatactttccttttactttgcctaaactaaataccccctgtgttgctacataatcgtcatgaacatctttagtggcagtagagtattctgtcagtttgtaat

SEQ ID NO: 67691 - DNA, 1108 bp, Homo sapiens
tgtattttcaactgttagcaaaatgcttagtaaatatttgttgaatggatgaatgaattgtttagaataagttcctggtaaatgtgctataaaactaccctttgattttccaaagctgtcagtgataaagagtttgaagaaaacatcttgagtttgaggtgtacacggtactgtgtgcgaacttttaattagtgctctgtgtgcatacacacgtgtacgggttttcatttacacttaacaatttctttgaactaaccattagcattacactatgaaaatcgcaaaagaaatttactctgttacgtatctcttattttttgtacttcaactctagcaaagtatgaagaaagataaagaaggggaagaaaaagggaagcgaagaggattccccagcatcctgggacccccacggagaccaagccgtcatgacaacagtgcaagtatgttgaagtttgaagtgctgcattttcagtactccaggccctcttcacatcagaggcttcttcagctagaatgaatttctggagaaaggagttgttaggatgattttactgaattcccaatatgccttgtttccattcagcgttatttctgaactaagtaccccctatgttgctacataattgtcataaacatctttcgtgggctgggcgtggtgattcacgcctgtaatcccagcagtttgggaggctgaggcaggcggatcacaagttcaggagatcgagaccatcctggctaacacaatgaagcctgtctctactaaaaataccaacaattagccaggcgtggtggcatgcgcctgtagtcccagctactcgggaggctgaggtaggagaattgcttgaacctgggaggcagaggttgtagtgagccgagattgcaccactgcactcaagcctgggtgacactggagcgagactctgcctcaataaaacaaaaagaaaagaaaaaaaaaaaacgaaaacacacatctttagtggcagtattctgtcaaatgtccgtaacatagtttacttacctcttctgattctgtttccattcaacttgtgtttgttaaattaaaaaaaaaaagtgtgtatagatctctccaccacactgaacgtctctt

SEQ ID NO: 67692 - DNA, 1032 bp, Homo sapiens
attttgttttcatgttactctttactttccattgttttagggtgactgaacatgggacaccaaagccctttcgaaagtaagtaaatcttaagcagctttcaataaaggcgcattttaagaaacgtaaccttttttcctctaaagtttcattttaaaggaaaagaaaccctgtataccaatctgttatgtagtataaaagaaagctcttaagaaacactggtcattcaaaagctgtattttgaagtatgtataaaacagccatttgtaggagaggatgaaatttcagtgctaagtcagattcaggaatctgattagaatttattgtaatataaagatttgtgctgtttctcattgtccacctaaagtcttcaaattgaattcactcttttttcttcataggtttgacagtgtagcttttggagaaagtcaaagtgaggatgaacaatttgaaaatgacttagagacagatccacccaactggcagcagcttgttagtcgagaagtgttactgggactaaaaccttgtgaaatcaaaagacaggaagtgattaatggtgagtgtaatcaatttgttgttgttgtttacaaatactgagttttgtcagagtgaattaagtctctcagccttggagtttgcttcaaagtttctcctagccttttgttttaaacaaagaggaaattaaactggacagataatccttgaactcaagaaaatgcaaatgtttctctgattcttattgataatttaaaaggaaaatgtgttaagccttaaagatatttaagattcatagcattatagatcttaaagttgaaaagtcattgcaacaactaagttatttttatgcatagattttaaatgaggaaggtaaagcccagggagattgaattcgttaagatcatacagctaataacgtgtaaggaaaaaaattcagttcctggtctttctgtatcgaagtgcagtgttctttatttaccctagcatgtatgtgataaatgtgtggcatgggtgctgtaccctttactatccttagc

SEQ ID NO: 67693 - DNA, 1039 bp, Homo sapiens
ttccatttatattatttacaaagtaaatgagacctgcccttctggagtgtatagtatagtggtcctggtacttcacgtaaagcatctcttcttggatttcgggttctgtactgtgatttctttttaaagattagaatttatgttttaaagtcctgttataagaagttttacctgtccaaagactgcttgaattgagactctgacagaggctttaagctggtacaaaaatcttcaaggtcttaatatgctcttaaaagtattgaaatgaaatgaaatctcatttacatatattttatggttttttgctcagttcttttacattttggatttctttcccatatttagaatggccaacagaaagggagaaggtgaagaaagctgcagatcactgtcgtcagatcttaaattatgtaaatcaggctgtcaaggaggcagaaaacaagcaggtaaaaaaggaaaacaagaaggtacaggatgacattgggagaacattaaattaatattacctggaatctgtgaaatagttgttaaaactatcattacctaatggacagggagaacatttgtttactgttcgcatagtaggcaggtcaagatcaatctgtgatagaatatcggagttgtatttgactttttgaaacacctcaagctgcttgtttgctctttcatttatctcttcattcagcagatatttatagaacatctactgtatgctgggcatagggtacagagtagttgagaaaatgagtgcaatatctgcccacactgagcttgtttgctaggaggatagaaaggcatttaacaggattatagtgcaaatattttgtatcagttgtgatagctactatcaaggataatttcaagatgctacgatatataactatggggcctagcttagtttggggatgttaggtggtgcctattagagaaaattttcttgaggaattgacacttgagccaagctctgaaggatgagtggaagtgaaccaaaatgatgtgaagggtgcaaccctagaggtagaggcaatatataccaaag

SEQ ID NO: 67694 - DNA, 1065 bp, Homo sapiens
ggactgtttggtaactttccagatcatttaataacacaagatagcatactattttctcatgaggctcttcagaagcataaaagttggaaccattacaggaacgatagtaaaatgtttactaattgccacttctagtatgtgggcttatgtgttaactttttcggattttaagtgtttttgtaccatttcactaggtggtggttttggcagatttatttggtggctgttaaaatagacttttatgtcatatattaatacttcgtcaacaagcacgtaaatgtgcttattccccttagcttccaaagaatgagagttttctagagctgctaatactaaaagatgattctcttactaataagttgttaatatttagaccaagtctgagtagtacctggacttttcatgagtactatttcttagaactttctttgaaattagagccttggaactcagaagccactttcttatagacaagcatatgtaccatgctcatccagttattcataggaaaattaaaggatacgttgagaatctagtgactgaatgtttgtaacttgatcttcataatctgttatcatctgtttagagtgaggtttgaagatagtactcctgaatgttcttctgcaagataccttttcctttttagaaaattgtatgcagattactttaatatggcttttgtgccattttcaagaactgacaaatagcaataatgatagttgaatgtaaatggtgtattttatattaagaatttctttaaaagagactgtattatatagataatcatgttactgagtgcttggaaattatttgtgcatgattttctttattttgccagaatttggatttaacaaaaaggaagatgattcatgaagggccattggtttggaaggtgaatagagataaaactattggtaggtctgatattgtcttttagttttggggagagtggcaaaagggaaggaataggaaagtttcctatgacaaagggaagaggagagaaccattctctcagcagtttgcagtgctacctcgtgttatttgtacatttgtagatctgcttgt

SEQ ID NO: 67695 - DNA, 1019 bp, Homo sapiens
attaagttgagtacagtgttggttcgacaagtggcaacaggcaagtatgtccactgaaggatactaatttccagattcattgtgaagttgcataagatactcggtgctgtctcaataacacaagtggcatagagtcttgctatttttatattcttaagcaaattacatgaaatttactgcttagaaagagacctaagagtttataccccaaagttattagggtgtctcgattctgtgaacagttttctgcatttgaaaatttttatgctattactttggttctttatgttcaaatcattgatagatcccaatgaaaagcctttcatttagggtggtatgttttttgatttggtgagaaaaaaatcaaaaaccaaagagacggatgtagtgttgattaaaaatcaaatttgactggcaagttatattttaactctattaacaacggggtcccttttaaaacttgttagtttcatggtggcaaaataaatttgtgacctcttttctccactactcactgaatattattaactaacaacttagcaaaagtgcagttcaaaataaatgcaaaagagtaatagcatttaatctggtaatttggatttatttattttttttcttttgagacgagggtcccaccctgtcacccaggctggagtgcagtggtacaaccttggcacactgcaacctccacatcccaggctcaagcaattcttcaacctcagcctcctgagtagctgggactacaggcatgcaccaccatgacctggctaatttttttgttttatgtagaggcagggtttcgccatgctgcccaggctggtctcgaactcctgagctccaagcggtccacctgcctcggcctcctaaagtactgggattacaggtgtgagccaccgtgcccggccagtaatttggatttttgacatgcttttagcaaagtttctagtaaattattgtggaattagtgctaattcgtataatctttgttttattgaagtacaataaatatagtacaataa

SEQ ID NO: 67696 - DNA, 2366 bp, Homo sapiens
tccatagatttctcttaaggtatagttttggactctcgccttaatagtgtgttgccaaaataaagatattctctggcagagtgggttttgttgttgttgttgttgttgttgttgttgttgttgttggttgatttggtttttgtttagttttgctttctgagtatatttaaaggatatttcttttttcttttttgtattttggatttctttccaactttctgaagctggcaggacctaatctgtcggatggctgcatcagtgaaggagcaatccacaaagccaattccattaccacagtcaacacctggcgagtgagtgttcctttgcattgtagtaggacttattttatgttttgggttggaaaagactaggataattattatgttttgttgcgatgatgtttagatacctcaggaaggtaaaagtttttttttttttttttttctctacagaggagataatgatgaagaagatccttcaaaattaaaagaggagcagcatggcatttcagtcactggtttgcagagtccaggtacactcttctgaagagttcaatggagaatgtgctctattatctgttaaaatgctggccggatgtggtggctcatgcctgtaatcccagtgctttgggaggtcgagataggcgtatcacctgaggccaggagttagaggccaacctgaccaacatgacaaaaccctgtctctactaaaaaatacaaaaattagccgggcatggtggtaggtgcctgtaatcccagctacttgggaggctgaggcagggagaattgcttgaacccaggaggcggaggttacggtgagccgagatcgtgccattgcactccagcctgggcaacaagaccgaaacaccaaaaaaaaaaaagaaaaaaagaaaaaaaagaaaataaaataaaatgcaaagaaactttaatactgtttggtttatgcaggttccagcatcagagattcagtttaacaaactttgcctttgagccttctgtgtgtcagtataacactgttctaagtgatgtgtatttttcttaacagatgatctctgtagtttatggattgttttttttttttctgattcttccctgaatgcttcatgttaaaagttaaaagctttgtttagatatagtctaccttttctattccattggacagacagagatttgggattagaatctaccttaatatcgtcaaaacctcagtctcattcactgagtacctctgggaaatcagaggtacgtgatctgtttgtggctgagagacagtttgcaaaggaacaacatacagatgggacactaaaggaagttggagaagattatcaaatcgcaatcccagattcacacctgcctgtctcagaagaacggtgggcattggatgcactaagaaattgtaagttttattcataacttattacagatacttactaagtatgacactcatgtgccatccctaaagtatgtggatttatcaaactccacttattcttctagttctattgtggagattatagtattctctacagtggcccatgccacaggcacacacacacatgccactctgttagctccccacccccctgcctggttcagaatcactgttaaaatgggaggatagcatatctctcagttgtattgaggtgggaaaaaggctgagaacaatttctttggctggggagaaccacttgaaatttttaaaccagcgtatgactaaaggtatgaaaaaagattaatctggctgaaagcggtggaaggatttgaatggaaagaggtatggaatggtgtacttactaaataagctattataatagtctggcctgagactaaaagagtttggactagaatgttatcagaaggaataagaagaaactgagaagtcatcaaatgcttaaaataattgacttctttgaatgtgaggtcaaaggaaagggaatatttagagataatttcattaatctagtcagaaataagagtcagaaaaggactaccactgcttcccccacctccttccattgtactttcttttttctttcttttgatttggtagaattataggctcagttttaaagcatgtcaagattaagataatgaatgacaaaacactaaaaagtgagtaactagcaggaagttagagttttaggagtgaaactttagagagaggttaggaagagatagagatgtgagcatcagagccatgagacttcctggcatctctcaggaagtgattgtagagcagaaggacagaggatgagagacctaagtggaacctgttgcctaaagaaacatgacagacattaagctagtgatgagagcagagaattggttatttaaaacctacaatattttttataccttctcctgaat

SEQ ID NO: 67697 - DNA, 1069 bp, Homo sapiens
ttctaaatagtagtatctccctattcagaatgcttagatcttttcaagtttagtttaacgttaaatcttctctaaaagatggtgctttatttcatcttcaaaacaaaatggaaaatgattgtatgaagtaagatgattgtatgaaattaataattaacattttaatatgtcattaaaagatactttttaaagatagatcattggtaagtcagctaatttaattcttgcagcctgaggttatagttgtgaatatgttttttttccccctccttcctaaatcgtttagtgggtttgttgaagcagttgctggtgcaacagctaggtttgactgagaagagcgttcaggaagactggcaacatttcccaagatacagaacagcctctcaggggccgcagacagacagtgtcatccagaactctgaaaatattaaggcctatcattctggtgaaggacatatgccctttagaactggaactggtgacattgcaacttgttacagtccacggacttcaactgaatcttttgctccacgggattcagtgggactggcaccccaggatagccaggcaagtaacattttagtaatggaccacatgattatgaccccagagatgcctaccatggagccagaagggggtcttgatgacagtggagagcacttttttgatgcccgtgaagcacatagtgatgagaatccatcagaaggtgatggagcagttaacaaggaagagaaggatgttaatttacgcatctcaggcaagtatctttcacacttaaactttgattttgattttgatcattgttaactgtcctgtattttgaaatggatgttgtattggtatccaggtgtgtgtgtgtgtgtgtgttcacacatgtgcaatatttattccttcatttgataaatactgaatctactctgtaccagacctcatcataggtgctgggagatatagcagtgaataaaacacagaaaaatcccatcttctcatgaagctaggggaaagaaggatggtaaataagtaaacaaataaatagacttcaggaagtattaggaagaaacataagtca

SEQ ID NO: 67698 - DNA, 1035 bp, Homo sapiens
aaacatttagcagaggggaagaatagggtgatgaaaatgctgatgtcaataaacttgttcaggttctagatttctttgactattatccatgaataggcctgggtaaaaagttgagattggcattgtttatctttttctttctttctttttttttttttttttgagacggagtctcgctctgtcaaccaggctagagtgcagtggcgtgatctcagctcactgcaagctctgccttccaggttcacaccattctcctgcctcagcctcccaagcagctgggactacaggcacccgcccccacgcccagctaattttttgtatttttaatagagacggggtttcaccatgttagccaggatggtctcgatctcctgacctcgtgatccgcctgcctcggcctcccaaagtactgggattacaggcgtgagccaccgcgcccagtcggcattgtttatcttttgactatcacaagagcagaaaaagttgcagctctgtgaactgtgtgtttgtatgggtgtctaagtttaagaacctgaaatgcttcgggtagttggctggcctctgtcagacatgaacaagaagatgagataggtagggtttatgtagttatgaatctaggctgagaaatgctatgactttctgtagcctattatctgtgactcattaggtgacattggcagcttcccaaatcctatgacagatagaaattggcttcagtggctcctgtaatctaaaaacatggtcatgcatgggatttttgtagattggtaattgaagatgtcactattgcaaaactgacttgtgtggcaatttccaagagaaagacctatcttaaagttttccatcagaggcagggcacggtggctcacgcctgtaattccagcactttgggaggcaaggcaggcggatcacgaggtcaggagatcgagaccatccttgctaacacggtgaaaccccgtctctactaaaaataaaaaaaatcagccaggtgtggtggtgggcgcctgtagtcccagctactcaggaggctgaggc

SEQ ID NO: 67699 - DNA, 3610 bp, Homo sapiens
tttgaaatttgggggcttgtacctgtaatgtaaaaagggcttcttttctgttttctgaagtttttgttttgttttgtttcattacgtttgaataaaaaacctatgggttttatttcacagaaggtggaggaaagttacaccattctttgccaaaggctggctggatcagccctcacagacaagcactcaggtatgtaaaagttatgagttccagactctagactaatcatcctacactgaatgaaatgacttatcatactttgaagtgaaaaccttctgagattccatttctcttctgtctttaaagaactgcctgtttctaaacatcagatatcaagcggaagctcatgcctgctgactctactcttctctaagaggaactgcagttgtcagttcccataccatcccctcttctctctcttttcaccttttcaaagcagaaggcagagcagtgggaagcctggtaaatcacagattcggtgtgaggcttactggtactgctgtgactccctagtgtggaggatttggccttattggatgttggtgcacttgcctctgctgacagtgtggctggtgtctcccctgactgcagatggatttgtgttccctgcagcagtttatactcatctgcttacatactgattcagaaacaaagattgaaccacgcccacagatgtcatgggtattctttgcaatgttagtatattctttttcttaatatcatttccatgtatctttattcttctcagataaaagttagagccgcatgtcctggaggtgactgcaggttgttggatttggagtatcggccgtgtctcaccacatcctggctccagtgtggatgcagagagagtgtgacagaggatctgcctgtgaaccacctgggattagtcaagtcccaaggtgcccagagtgggactagttcttcacagtgtggcagctgcactaatctgtttgtgagggaatatccattccctcactctactctcctcactatcggaaattcattttgattcagaataaaaaccaaatgtatagagctttgggtgtaggatatgaaattgtacttagatttaagaaaaagagaaaatcagatgtatttatttgacttcattccgtatttgaaagcacattttaatttttatttgccttgttttgttttaattgagtagtgagagttttagacctttgtctttagtacacccaaggatcaactgctcctgaagcaaagaggtcaggatggagtatgcagaagttgggtagagaggttaagaagaggaggaagtgagacggggaagggaggagcaccttgcttcactatacagtattccaagctctctgctgtccagtaggctgcttctctgagggtcacctcaaaggtatgctatgccgtgtggctcttatgtgcccaggtggtgtggtcagagagtggatgggcttcctcccgccctgaggcaagcacctcttctctgtagctgggatcaaccacaattaataggaatcctcaacatactaaatagcaggcacttgaaaatgggtgtgttttcttccattgtcgtcttttctattgagggttgggatttgggtgggagaggaaagcaaattttattttcttgactataaatttgttattcttggtatcatttcatttttataattatacattagacattggcacttgtgtaaaactgtccctgcagattgagcaggaagtaaaaacaaatggaaatgcttcggatagtggcaggggtgggggttgctaaggaaagggtgggatgggagtgggtaaagagtttgggaaggttatctaactgaatcactactgagttgaatcatggctatcattagccacaggtactgctgattataaggccagtaaaattttagtacctggaggtttgactctaatttttgcactgatggtgccaaagggccctgagtcaaaaggatagccaagggtggagtggaaaaagatatggtgaaggcagaactgctcacaccagctccagaagcacgtcctctgacttcactgccgcagctctttccacacggggccgtgattgaccctaaaaattgcagaccagcacatacactggacactgcaggcaaggtgttggtaactgcctgctctaggatgaatagtagcgttagcagcaccctacagagggtaagtttcagaattgtaatttgagaactccttcaattatattgactttctttggttttccttgtgcattaggtatatattttttgaagtatttttgccaactaaaatgaagtctgtaaattctgttaataaacaaggagttcatccgttgctcacatctttcattggtgccctctgaactctgtgggttgctaggatgtaattttaatgcttccctgcagtccaaagatgattttttcaccacaaatggtaagggatgcccacctacttttataaacaccactgcaacttaacaagtttatttatctatgtccagatttctgtttctgtcctaaattgatctgtgtttttaggtggatcaacttggatctttagacctcatctataaattgaaattatatttttagtcataagccaagtacaatctaactcagaatgggattaaaaattttagaagcagaagctaatatataaatgaagtttgggatttggaactttctgtatctcttaggaggaacaagtaaaaaccaaatggttacattgtgctgctagaaataatgtcattctcaattaaaagggttacacctgtagccacttgacactaacaccatcgagggcaattaatcaggagaaaagtaaatataaaaactttgctcttaacgtcacacactacagggtaattatgtaattctctagcactcaattaagaagcttgtaggttagcaaaatttcagtttctctagttcagccagtgtcttgtccttagtaattatttgctttccctgcagttcaatttctccttggaactctaacaggactaactggaaaaatactttgaccatagctctagtacttccaaataaattcatatctagattttcaaacaaagccccaagatgaagtctaattctgaaaatatctcacaatttttgaatgttctttttatcttaccgacctaacttctcttttccctcccaacttggcctcccacacgttccatttcattttggccattatagtcacatccgtttgactttggttgtgacatcttcctttcaggatgatggaattagatgcagtctgtctttgagtgagactggtcaccatcagaggagttttttctaagtgacgtgactagaagttgaaatctacttccctgctaaagggcacaggggtggtgtacaaagaaagctaccttcccagagcaagcaggctgcattttagctatggaagtgacctgctgtgacactgtgctctcttctgtgggcttaatggttcctttgctatgaagtggcaaattacatgtagagtgtctccttccttttcagagaacagttaatcaaggcaaatcagcaagcccccaaagtgctgtaatttaacatcatgattaccaccttcgaagctatatattttgcatactttaaaatcacctaacttggactg

SEQ ID NO: 67700 - DNA, 1261 bp, Homo sapiens
ttggtgtaatacgtggggcttccatatttcaaagtggaagctttcttctctgaagtcgatatatggttttgaattactagagctttggtcagtatttccttccctatatgtcacagagggcaccactgagaactgcgtgcataggacctcaaaatacaaaattagcagggcctcacagtcagcttcctcatggctagtttttcccccttatattacaatttttgttttataagtcatttttttcctgatatttccaccacttttcagagtcatctacaaaatttttctttcctcaagaaaagagttccttttgccttattccttatgccttccccactggtattgagggttttgataataaattggtaggaaaaaaaagtacctcctagaaggaagccttccccaccatttccaggtgccaactgctaagcagatatattccaaaaatggtaactgtcatgtgcacactgttggttatttttaataagcctcttcctactagaacattttattttccttgttcaccatacaatcatgtactctttaacagaaattgcttttaaaaaatatctggaactatctttaaaaaaactttattaataatcatgtatttttactgatcacattttgaaatgcctaaaagactttattgttctaattatccagatgtacctttgtaaaatagctcttttatgaattagctgataaggctgtatgtttctggaacaaaatattggtcatctaaaaactttctgttttctggggtctgggaaaatagaaaataagatttcaaatattaaataagcttaaaggaaccaagcatgtgactttttatttgtattctggttgatttgtcttgtccaagttatattagaaaagttgaggagtcgaggagcctgtaattaattttcctgtcagtgactgtcagacatcttcctgcttattagagcatccctagcaacaaggctaaaccttcatgacagtgctggcaggtgggcttgccctagcatgtggggcaggtttgttgtttttttaatagctttattgagatattcacatatcatataattcatccatttaaagtgtataatcagatgggttttggtatattattgatttttaattgtggtgaaatatatatataacaaaatttgctattgtaactatttttaagtataaagttcagtgaggtaggccagcttttatgacgcacctgaagataactttggttttaatcctaccctaaatgaagcatatgcct

SEQ ID NO: 67701 - DNA, 1054 bp, Homo sapiens
acatgcctgtaatccaagctatttgggaggctgaggcaggagaatcacttgaacctggaaggcggaggttgcagtgagccagaggttgcagtgagccaagattgcaccattgcactccagcctgtgcagcaagagtgaaacaccatctcaaaaaaaagaaaaaaaaagttcgtttttaaagtgcttatcacagtcaggttataaatggctaaagggcggtcacttgacagtgtccaagaggaaacctggaatgatgttaatagaaatagtggttgaacactttaggcagaagaaacattttctcatttaaacctcaacaactcacattttacaagtggggaaactcagtgaggttgcagaagttgcccaaagtcacacagccagcccgtggcagagggtctgaccagagccagcacccagtcctggggaacctggaggatgcaaaggcaggtggggttgccctgatcccgcctcggcttgccggggctttggcttctggagctgcgtcatctttgtggctctgcccctgctggggtcctgccaggcctcagctttcatggaatgtggagagcagcctcagctccctgcggccccagggtggagatgcttccagagtgggaggaagcaggggcgggagctggacagcatctgtctgcagggtctgctgggtggggaccccggagcagatggtgtttcactcagttaaaacccctcagggcagacccctgccggtgagagagggagcatggcaatgcttatcccagcagaggaggggagcagggagccgctgcaagttccctcctgccttcctggagcccgtgctggggatttatctcctcccagaggcctaactgcgccccagacactcgcacctgcatcctccaggggcgggctgggggctgggaggaagacgggcattcaggtgcttttgttacctttgtgatgtggctgagccagacagcctcgctcacactaagccacccctggcgtgtggccttgtctggtgagagagaggtggcattgtgcttgcatttatatgcagctggcagagcag

SEQ ID NO: 67702 - DNA, 1032 bp, Homo sapiens
ctgttttcatgctgctgataaagacatatcagagactgggtaacttatacaggaaaaaggggttaatgaagttacagttccacgtggctggggaggcctcacaatcatggcggaaggcaaagaggagcaagtcacatcttacatgaatggcagcaggcaaagagagagcttgtgcagggaaactgcccctcataaaaccatcagatcttgtgagacccatgagatctctcatgagatgctagcatgagaacaacacgggaaagacctgcctccatgattcaatgacctcccaccagtttcctcccacgacacatgggaactgtgggagttgcaattcaagatgagatttgggtgggggcacagccaaaccacatcaccatctattgagcatgtgcccatctacagcactttagtttcccagggtagctttggctccctgcctcaggacctttgcacatgctgttcactctgcctgcaactcctccttccacctcctctccttctcttgcttcactactccttatccattcctcttccaggaagccctttcctgacgcctccctgagcctgcataaccccccaccccgaccctcatgtgctcttgcagccccaaccctcgttccctttggagcactcccaccttgcattgtaacctacaacttacattgtagcactgagctgtgggaggccaggcatcaagtcaccacatccacttctgtgccacactttaacacagtgtctggcttacaggaggatcttgccaaatatttgttgaaagaagcaaagcgatcgagcaccaaagagaggagcaagcccagccgctgtgcccatcgacattagagggattgcccttggctgtgacctcctccaccttagtctgagcccctagcagttactacagggacgagcctagagcccagcctgggcaccagtgaccacatctgttttgcacagcgctgggttcctgacatctgcacagagatgcagcctaatagtgtctcttagatgtccttggatagtcacacatgtaag

SEQ ID NO: 67703 - DNA, 1031 bp, Homo sapiens
gagagggtattgtttagacgttttgtgtaaattaataatattgtaactgttaattgaatgtccattgattgcctgtcagaggtttgatttaatctgtcctcctccctctgagccggctggctgcttaaatagtttgctcgctttgccttgtttttcttgctctagtgtggactctttcccctaccccgcaaaccttggtttcatttcgctggcttcataattagcatcttctgctttctggcactggccttggccttcttgcagttactagtccctcccaagtggattcctgtgattcatccctcaaccagagttttctgaagtatctggagactcgggacaaagacagtcggcctgtctttgtcccctttcttttggggttttagatgctttgggcttctccttggaagggagtgggaagggcagtgcctggagacttaggggatgagcccggtagggctgctggcttcattcactcattcatccgtctattcaccaggccctgtgttcagcactaaggggacacattcctgagttcagtacttagtggtggagacagagaagtaaacagatgatgcaatgcggtgtgatgtgccaaggtggaggccaatgtaggggggcgcagagacatggaagaaaacggtaaaatcagatgtggcagcatggaaggcttcctggaggaggagtaacctgcactgcagttggaactgcatttcaataaacaaggaggaattagtctggcaaaggaaaggacaagagcctcctagcagagggaaaagcacatgtcacagctgggtcagaggggacttctagagtgagagatggcagagaataaggtaagggttaataatatctacagaatgataatatactgcacactcactaagcattgggcagagttctgagggctttccttgtattatctagcttagtccttataacaaccctgcatacaggtactgctagcgccccttttaatagctgagcctagagatatgggcacaggcagtctgattcaggggtgctggctc

SEQ ID NO: 67704 - DNA, 1047 bp, Homo sapiens
tcctgggaccagagggaagagggaaggggggtgcagatctttgcagggagggttggggagggcttgggggccttggtggtctcaaggaaggaagaggggagtgtgaagggggaggtaagagggagggagggaaggagggaagaaggagtttggaaaagcctgtaaaaggagggggtagggagcaggccgggacccccacccaggatcctggagcagtgctgagggcagggaggtgacactgtccaggcaccacacttgtggaacagcctagaagtgggcatgtaggagggaaggagctggctaggcagggtgtgtagggcaaggtcactaaaggacaaaggagcaggacagctcgggatcccggttctacatcccccacctcacaggactgtagcgaggattaaatgagttaaaatgcatgaaacacttactacctgagcacgggcagtgggctagcacattagtattagtatagcagcaactgagtgaacgttgcattttttatgtgtgtatctgtgcacatttgcattgctgcacctattcctaccttgctcccatgtaacatgcagtccttaagatatgaaagtgacactgtgcctgccttcagtcagtaggcatcactgtaccttttccagggtaggtatacacgtgcatgaatacagtcccaacacgcttcactggttcctcctggccatctcgctgcatgtatctcatgctgggctcaagccaggggtggaaaaagacgagaaggtagacacaggtgaactctcatgtcaggcttaggggagcagtggaagattataaagccatccttgaagtattgtgtgtagcactaagaaggtgagaggtgccaaaaatcaagtcaggcagatgttttcacaaagaacagaaaggtagattaaaaagtattctaaagcaataagtgttaggctattttcctgcaacaattcgaaagagtgtatgaagcagatggtcctgcagctctgagaacacaaaagaggagctcgcggggctggcagcagttcctgaaggacaagttgggcccaa

SEQ ID NO: 67705 - DNA, 1064 bp, Homo sapiens
cctgggtgtggtggctcaagcctgtaatcccagcacttttctgaggcaggtggatcacctgagggtcaggagttcgagaccagcctgaccaacatggcgaaaccctgtctctactaaaaatacaaaaaaattagccggggatggtggtgtgtgcctgtaatccagctactcgggaggctgaggcaggagaattacttgaacccgggaggcggatgttgcagtgagctgagatcacgccactgcactccagcctaggtgacagagtgagactccatctcaaaagaaaagagaatgtatgttcctcaaaaaattaaaaatagaactaccatacaagccagtaatcccacttctgggtatttatccaaagggattgaaatcaggatcttgaagagatatctacattcccatgtgcattgcagcactagtcacaatagccaagagagtgttcctcttggaagaatggaatccagaatatgtggtccacacatacagtgaatattattcagccttaataaagaagaagatcctacctttgcaaaaacgtggatgaacctggaggacagtgtgctaagtgaaataagccaggtacagaaagacaaatattgtatgatctcacttacatgtggaatctaaaatagctcacagaagcagagggtagaatgatggttgtcaggggctggtggggaggggaaatgagttgttggtcagagggcacaaagcttcagctatgcaaggcgagtcagttctggcgagctgcgctgcatagtgcccatagctaacaatactgtgttctatacttagaatttgcagagaggatggatctgatagtaagcgttcttaccatagacatatgaaaatagttataaagagggtgagagaaactgtgggagctgatggatgtgtctgtggccttggtggtgatagtagtttcaccagtgtatacttgtccccaaactcatcaagttgtatacattaaatatgtatggtcttttacatgtcaatcataccttaacaaagtggttaaataatactatttttatacttttttttttgagatggagtct

SEQ ID NO: 67706 - DNA, 1085 bp, Homo sapiens
cctcgccttgtcacccttacctgggttctggcctccctcctgacagcgggcagctgcttgcctccctttcttggtgtgagttaacatccctcctgagctgacccgtccagtctcctcctgcccacagaaggcaccgacctctgactcctgctgcaaacctggcctgactgaggcttctgttaccctgactcacagcaggcagcttgtccttggagcctgcttgatggcagcattcagggacccagggctgactgtctttctcttgtggctccattagtgcactggaggaccggatagaattcagaaggagcccctcccttgcctctcctgtcccccccgaggactctcgtgttcagcacaccatcccttccctctgcctgcagtctttctgctgcacgctctaggtccgctgccttgggggaagaaaacggtacctcctgccatccagtctcctcacaggctgtgcctgccctggctgctgctgtcctgtccaccgcagcctcttctcttgaccacttgtttgcagtttcccagcctctcctgctgtctgggtgatgggagtactcagccaagacaatctgaattaattttgcaagtaaaatttcatcagacgacctatctagcgcttccctaaatcaagacgtattacatctcatgtgtgccctgagcccattcatcatgttaagtcagcccctgaaataccagccaggctcaggctgaaaatgagcagcattctcgtctgaatctggaaggggtcttctttatccccagatttgccacgagagaggcttctgtcagctcttttgctggtgataacatcaagaagtaatcgggccgggcgcggtggctcacgcctgtaatcccagcactttgggaggccgaggcaggcggatcacgaggtcaggagatcgagaccagcttggctaacacggtgaaactccgtctctactaaaaatacaaaaaaaattagctgggcgcggtggcgggcgcctgtagtcccagctactcgggaggctgaggcaggagaatggcgtgaaccagggaggcggagcttgcagtgagccgagattgggccactgcagtcc

SEQ ID NO: 67707 - DNA, 1035 bp, Homo sapiens
ggagaaagttgagtccctagcagtgacattcctgtactccttgtgttggtgtggcattgttttgaatatatgcccagttttccaagcagatttttttttttgagacagtctcactctattgcccaggctggagtgcagtgttgcgatcttggatcactgcaacctccacctccgggttcaagggattctcatgcctcagcctcccaagtagctgggattgtaggtgtgtgccaccacgcccggctaatttttttggtatttttagtagagatggtgtttcaccatgttggccaggctggtctcaaactcccgacctcaggtgatccacctgccttggcctcccaaagtgctaggattacaggagtgagccactgtgcctggcctccaagcagattttaaggtcatgatagacaggggacctagccccgcatttgttatgctggccacacagcagtgctctgggtgtagcagggagcctacacagtgtccccgttgaattcatcaatgagtctccttcacagtgatatacggaagtaaactgaatatagtatgtatatgtgtgtatatggtatagctagacttatatacaagtctgggaagaaagagtgtttccatcaggcacacacaagagacagtatgatagtaagagtcaaattgaggttctaatttcagctcctccattcattagttgagtggtcttagatcactcggtgcctcagtttcctcatctataaaatgggataattatagtggctaccttattgggttgtgaggattaaatgagatcatggcttttaaattgcttagcacagtatctggcacataataagcattcagtgatgttaatgacaataattaaaaagctttaacatctacttcagtggaagagcagtggggatggtatgatctcgtgggggattttctgtgggtcctttctgtctgctaaggatttcatcttcctccttccccccttccacgcctctgggaagatctttatttggcctcagccttaaatggatattaatgcggaaatgt

SEQ ID NO: 67708 - DNA, 1051 bp, Homo sapiens
ccctgatttacattccctatttctgagaccttgcatcttcttctttcttggtttactccattgttttgatggagcgtgctctccaggagttttctcagattgaaaagctgtgcagcagctgaggacatggtgacgactgtcctctgcatgccgctgcacaccctgcactctggctggttgccttccacacctgtgcacagcagtctcttttcccctgggctggatctcccgttttctgtagcttacatgttccttttgcttaggttagtccctcatcttgctggaagattttgattttttaggaaagctgattggtggcaggaccctcctgcatgctgcactagtaagtggcagaattgtgactcaaacccaggtctgctggtttacatcaggtgttcctcctcccccaagctatgattctaactcctcctcctgtgggggcccaggagccacaccctcccctggctctcaccacccctcatccacctggcctggcccacccccctcatctctcctcttcttcctctcttgccagcccccattgtggatgtctgtctttctgacaccctgcacctttgcctagactatgtctagggcctgggttgccaggacagaagccccaggtctgtgaggtgacctgggttctttaaactttcctgggtgaacgacctacttggtggtggggaacatgttggggaacatgaggagtgaggccattactgtggcacagccctgctcatggtcctttgattggcaggaagtcaccggaggcatcctgtctatgtcagctggagctgctataacagatcattctaccatagactgagtggcttaaacaacacatatttctcaccattctggaggcagggaaatccacgatcaagatgccggcggatccagggtctgaagaaggcccccttcctggattgcagatggccatcttcctgttgtcttctcacatggcggagagcagagagagcaagagcaagttctgtgtctctttgagaggcacgagtctccttcttgagggctccaccctcctgatctagtc

SEQ ID NO: 67709 - DNA, 1028 bp, Homo sapiens
tgcttccttcctcagagacatgttttaggtgggtcaccagggccttggtgtgaattagaggagacaggaagatcagcgaggagttctcctttactgccagatgccgagtgtgtggactcagcggtgcttgggatgggaagtgagaggtgacaatgggacattcgggtgaccttgtcttcctgttgtagtctcccttccctctgtcccacagcaaggggacccttcctccgacctggagagtatgtttgtccctagggatccctgatttgatcaagccccagggtgccgagaaacctctccctgctttagcctctccattcctgatgtgtggttaggatcaggccctgcagtcgcgctgccccaggcatagtagtgaggggaggtccagattctggccttcagggaactggtgtcaggtctgatgcctcatccattggcctaatcagaccctgtcaggaatacagatgtgatgctgtttcttcgctctgtctgaaattgctttgtaataacagtaggagttagagaggcatttttattgattaaacaatcgaggcgatttgtctttacaaaactgaaaatatagaggtgtctctttctctctctgtatgcattacacatgcttatttattagaggcggcagtctctgcttgtaatcaagctgatgtttatgatggggctgttttataaagccaggcagagatgatataaggggaactggaatgaaaagaagccctaatataacgacaccgacaatcggggtgagaggcccctggggaaggcaccgcggccagtgtgagtacgtgattggagggaaacttggagctactttgacatggaaaaaaatcttataatgtcacatggaaaggagaccgtgagctttggatcagatagctcagggtttgaatcttagctctgccatttattgcatgtgtcacctgggaaaagttacttaaaatctgtgacactcaaaatagggataatggtatgtaatgacatagcatatgtaaatcgcttggcacagtgtcaga

SEQ ID NO: 67710 - DNA, 1039 bp, Homo sapiens
ggaatcaggcacttggagctgtcagggagaaatatctaaatcatttgaacaggtaataataggatagtgtaagcttgtttagtgcaaggaaactcgttgtaacagaaaccccctcccagctcatcaacttgcagctaagggattttctgtgaggtagacacaaagaagacttccccagagccctggcagtgaggcaagggagggtctgggccatcaggagccagaaagagtgaaggtcctggcatcctcaggggcttatgaaagactatgggagttgggttagtgtgctttcaccttagactgggagttccaagatggagtctagtcttatctcaagcatgtactaactatgtaaacttgccaagtcacagttctttgggccttattttcttcctttctaaagtgaaggcacttaattgcatgattttagtcagttttgacatactgtcatccgtagagacttctcagctgcagcggcagtacaagggggtctttgtaatgattaacatgggtatggggtatagcttgtgcttgtctttatatatgtcatttattattattattattgttttaatttttgtttttttgagacagagtctcactctgtcgcccaagctggagtccggtggtgcaatctcagctcattgcaacctccacctcctgggttcaagcgattctcctgcctcagcctcccgagtagctgtgactacaggcccccgccaccacacccagttaatttttgtatttttagtagagacggagttttgccatgttggccaggctgatctcaaactcctgacctcaggtgatccacccacctcggcctcccaaagtgctgggattacaggcgtgaagcaccgcccccggccttattattatttttaactgtgacaaatgtgcaaccaccaccaacactgggatgtggtacatttaattttcacaacaaccccatgaactaggtactattactacccccatttttcagacacagacaggaggcttagagagggtaagtgacttgccccaggtcacactgcct

SEQ ID NO: 67711 - DNA, 1045 bp, Homo sapiens
tattagtctagagggctgtcagcagcccaggggagggggcttcagtgggccctgcccctttcctgtgtgctggtgacagatgacccaagtctctgccaccaagggaatggaagaaaggccagggaaggggaaaatgggtttaaatgatttagatgcgacctcagaaagaacttggaaccattttacctgctttaactggctcggcacactttattggagggaaactgatgcgcttccctacccttagacgagagagtggcatgtcttatgtgtgtggggaggtgaactcttcaagaggttgtgctgtctcaaagccgcacagggtggctctaggacccaggatcttttggccttacctttggtcccctgccacaccaacactgcttccagggtgcactcaagtctcaagctcaccttgatccgtgctttccccagggaacagtagtctcctaggcatcccggagctcattgcatctgttcctctgcctgaacgccccatttggatccaatctcaaggactccgcagctgctgtgcactcatcgctctggacacacgatgtctggaaaactctcttgctggacttctgtgctttctcccttgatcagggctcgtcaggaggatggcatactcacatatcaagggctttgtagggcaaacagatgaaaacaattgtcttatgatctaccctaaagaaacatggcttgatgtgattgacagaaagccagccctagtgatggtaaacactgatggtcagcacaccggttccttatgtgccaactgactccacggaggcccgaagggcttctccactgcccaaggccctgggcagaggccacgtagcaggcgggcctggccctgtttgtgctgatctgttcttgagagccccggtctgtgtgtctggggttgcacagctcagtgtccctctgtgtcaccagcccactttatctactgttgggtccccagggctcagcacagagtaggaatttcattaatgttggttgatgataaacattatggagcccaagttaatccagttcttccttc

SEQ ID NO: 67712 - DNA, 1120 bp, Homo sapiens
acaaataagccatgagatgggctggttctatcatcagccatttaacagatgaggaaacttagaaggcacatggttcacccaggcacacaaacagatgatggcaccttggtcatctgatcctaagttcagtgccctttgccttgggtggcagctgcccacagagccaccagcgccatgcagaagagtagagtcaaccaagaacattatatgttcagtgacagtgagttcagagtcttcttggcctggagcttcgtttaagatgaagtgccaatggcaaggtaattatcattttgggcatatttaaagtacttaaatggccatgtcaggctttcagagccctgtaaatcagagacacagtgagtgcagggccaggcctcataggactcccaggccttctcgatggggagcggagagagccatttcctgggataaagaggactctctgcagacgctggcccctcttaatcgctgcccatgccttgttctgtgcacgtgagcacatgtgtgtgctcgcatgcacctgctttgaaagcctttgacttagacattgtcaggacgttgctctgtgtctgaagctaggctgccatatctgctattgatggtgtttaattagggaccggggaagcttttaacttttattgtttattaataaagataaatttgaagcatcaaaagtgtactgagttggcttttttaagtaaagagggaaatgaaagccacaggtcccctcaaatgaaaggggatgggctgtgttagcattagaaggcccctgagcagggagaggctgggaggggaagggagagtttctctgtctccctgctgctactgtgggggtttgctggggagaaccaagcataggcagaagggaagtgtggctgggcatggagattttttgagataagggccctgcttgcggcacatctcccagtgggatgtgtgaaagacgattgcaaacctctgagctgatgcaaactgaagatctgtgagcacgggggtgggagaagggctcttggggagagagagcacagcgattagtaggacagaacttggaggtggccaaacgtaggttcaaatcctgttgtttccgcttatgagcagtgtaacgttagagcagcggctg

SEQ ID NO: 67713 - DNA, 1085 bp, Homo sapiens
aaagcgattctgctttattaaaaaggaagtcccccagggaggggtagtactgttgaaccgctatcagtcatggacaatttagtaccaattaattaatcggatgctttcctgttgcctgcagagtgaatggggtgtgatgagtgtttggaaagggcatgaggtcaccaggtgattcaggagagatagcaaaggagcaagccaagggcgtacaggataagcatgccctgtggttgccagcttatctcatttgtcttaaaaattattttagtaaacattttcacaaaattatatcaatcatccccaaaatgcacaaatcataagtgtatggctttgaatttttaggaagtgtacacacccttatagccagcacctgggctgtgaaacagttactagttgctcctctcagacccccagccagccactgtgacccccaaggcatccgctatcctgacttccatagataacgttttgcctcttttcaaactctgtgagcgtggacttcttcaatgcgtctaccctttgcgtctggctttccttcgttcaacgtttctgttggtgaggttcacccatgttgttaaagtttgttcattttcattgctgtgtagtgttccgttgtgtgaatatactacagtttattctatggttggtggacatttggatgtctagcttttgactttcatgaatggtgatgctttaaatgttcttggccatatctgtcttcttcttttatgtctgaggttatgtgctgttctcctgggaaccgtcttctgacccctaccccaggggagcatgagtgcccctcctttaccctcccatggcactctgtcataatccaggaaagatgaatagtgatattttcagttcctaggcaaatgtctggcagtggtagatgctcaaaagcattagttgagtgaaggaacaaattttatgtcacagttttgcccagggcttctcttgatatctaagaagagcagtgtggggagactgtgttgggagtcttggggatcagttcggattcttccctagaaagactgctactcttggccaggcacggtggctcacacctgtaatcccagcactttggg

SEQ ID NO: 67714 - DNA, 1054 bp, Homo sapiens
tgcatgcctgacccccttaggagactgaacatagtggttccccagagttcctccttccctgagggagggcctgagatccagccaagaactagagccagggatctttgaggtgagaatcatggctgtaggcaggtgaataccagctgtggagggggtgatcctggttggaggagtgcaggtcttggggtgaactcccaggctcagcactgagctccagcttctctctgggcagccagagcataggctgtggaggaatgttccagagaggccaccagagacctaggcaggcccagcattcactgaacacttgaacctgggcataggtgtattagcctcactctgcagaggggggatgcgggctaagggggttaaggaacaggcccaggtcttggagctaggtattgagagagtcaggattctttattgtgtttgtaattattaaccagactttttaagtgaaacaaacaaacaaacaaacaaacaaacagaaaaaccagtctaacctctcagttaaaaatgcaaacaatagagaacacttgagaatgaaaagcaagtctacttccttctccgactggagtcctgtatcccctctctgggggcagccagtcagcagccagtttctcctcccttggcccccgagggagcctggtgccagggccttgccccaagcagatgggagtcagtgctaactgggctgatggaaggggaggggtggcatgggccctgcatgtgcccttaggcaattccgagagactattctgagcttggatgactctagtggcataggtctccgaaccttcagcaggacaccgctcacgttgctggggacctatctagctctgctgccctctgccccacacacctgggagggctgaggggggctgattctgggtttctccaaggaatgcgcacatccagagatagctcctttctcacctgctctggctaagactgaagaaaaaaaaaaagatagggcctactttctgacgatggtggataagacaacaaaaagcactgatgtgcaccagaagtggccatggacaggacagatgta

SEQ ID NO: 67715 - DNA, 1130 bp, Homo sapiens
tctgtgagccatcagcacccaggcatggctctgagagcagcacttttcctgcctctgctgttgcctttatgcgtctaggcctgggatcagtatgtgctccttaagggcaaggactgtgtccaggttcctgttgcatccccagggtctatttatacataataggtgcacagcacatatttgttcaatgaatggaaggcctcaagcaatcacctgctagaggaagacagaggaagataaagagtaaaggatgggggtgaaggcaactccgctgttggcaaatcaggcccagaatctttgttctttaattcatgggtgttggtgcagggatagattaaagcaaacacagtcttaggagaagctagacattcttacttattatggataaagttgattattcagtgattttctgtctccctactagaatttaagctcaatagaggtggggcaaggacaggaatcttgtttggactatatccccagggcctagaacagtgcctggtatattatacggccttaataaatatttgttgagtggataaatatttgttgagtggaacaaggagaaaaaaactgtaataatccagttaggctatataaaagtactactaaatacaatcacttacctcaaatgccttccatttatgcctgatcagcatgctgcaccataattattaagcagactgctaaataggtgtcagattaccctgtgtaaattttatttgatgacagaactacacgcagttcgtgcaggcctgaggaactgagtgaagctgctcatggccccaaagactggtggatcctggagactacatttatttttgagacagagtcttgctctgtcgctcaggctggagtgcagtggcgcgatcttggctcactgcaacctccacctcccaggttcaaacaattctcctgcctcagcctcccaggtagctgggattacagatgcccaccaccaagcctggctaattttttagtggagatgggacttcaccatgatgaccaggctggtctcgaactcctgacctcaggtgatccacccgcctcggcctcccaaagtgctgggattacaggcgtgagccactgcacccagccgagactacatttaagcatgacagtggctcaggtcc

SEQ ID NO: 67716 - DNA, 1096 bp, Homo sapiens
gtcggggatcaggggtgtctatgtgtacatcgggggatggggattagtgtggacaggtgggtggggcacagcagtgacaaacccagaaaggtaggttgatggccacaagacgacccatccaacagcagggccccaagggtagagttaagtgacagccctagaggaactcaaataccaggcaggttaccccaacggataaccacatgaggcccctcttcccacactgggggtggggttgggggtgggagcaaaggcaggaatctagatcttaaacctgagcctgaaagggttagaggctgacttagagcaaagatggcacgatgctgaatctcagggagctgacttaaagctcccaaattcctccaattgcattcaggtcggtgtgctggtgatggtcaggaggccatggtgtgggcagaggtgggcgagcagccaaaacctggctaggccaggggtcacaggccggaagcccagcctgcaggtctgtgagctgcttcgttttaccttgtgggcacagtttttcatgcaaatgcagaggagctgattggaatcagaaatgtggacaggtgacccagttctccccctcaccctgccctcgacacactgctctgcatgcttaaaaaaaaagaaattaaaaaacaaaattttccctccctcttctccgttcatttttacagaaacttcaaaacctaatttaattctgcttagcagcaatgcaaaacggttcatatccttaagatgtttaatttataagatgcctatagtttttcagcgtttgctgcaaggtcttctccctctctaaatgagtgaataaagtggcaacccatcaatttccatttgtcgctaatgggaagcggaaagggattgagccagaatcagtagcacctcatggcctcgcctctcccgacacttgtgctctgggagggaagcagaaagcggagctgacaggtccctcttttggctgccacaacagagggcttcaaaggcacccctcgtgctcccaaacccatactctgaacaatgcttgttcagctctgtcaagactgctggccctcagttttggttcatgctaggccacttccagccgctttccagc

SEQ ID NO: 67717 - DNA, 1049 bp, Homo sapiens
tcgaatgaggttttgggtaaaagaaagggattttatttatggctgtgaggctggctgcataaattccccaaactctcacacatatgtcaaccccttccatcatctatcttctgaaaatgtgtttggattttgcttcagtccctctgggtcctctgagtgataactgtggagccacaagttaataaatgccctgaggagaccccaccccatctttgcacccccttcattacttaaagagaccagagatcattgtcattcttagatccggaagggactgtaaggattcgttatctaacctgctcatcttgcaaatgaggaaacagggtcacagcaggcagtggtttggccaaggtcacctgacaagtaggggcctggctggtggcagctgacactggtgctggtatccttgactcctcttccagtgctctcttctccatgcacccatgggctcccttagctgctgagaagcagaatcaccttcaatagtatgtgaaggttatattctcctacagtttcctccattcctgttcagaaaacatttcagacattagcaaatgtgttacccttgcccctaacaccttgagactcattaagtatttgttaactgaatgaacgctaggctccaagcctacctcttgttactccttccttggctctgtattttacctacactaaaccactccctgtgagccaaatataccaggaggatttactcccagctttacccattcccctgctctccctatagtgctcttcctcccgtttcatcttctctgcctgcaaaacaaatccagctcctccttctactcctcttctttttcttcgtcttcctcctccatcaccatcagcttaaatggctcttcctctgcaaagtcctttcccgttatcatcctgtccgtaagagggagaattcatctttttcctaccattcccccattcccccagcacataacatctgttccagcacttgccgtgttatattctaaagattatggcattttcccactagactctgaactccatgggagagtgatccccaacagaagggc

SEQ ID NO: 67718 - DNA, 1039 bp, Homo sapiens
tcttaatccaattaaagcctgaactgagtccctgccgggttgtgttttggtcagatttagtttacctctggctcactcctttcccagagcagagccaccattagttgagagcctcctgtgtttactgggtcccctccccagcaggtcctcaattctagtcttgctgttcagtgcctcagaatggccagaaaacactctctgctttatagagactttcggctgagattttttggccttctcctccattcagcttcagaattctgtaaatgacttaaggagaaaattgggaccctatatttgaggaccctcaagtccttaattttctctctctagtcccaaggctgccagagctctgctggcttctttgtcccccagcagcagtctttgcttcttgcaaacctgggttctcagcctctcatcctgggcctagaaatgacataccctccggaagtgattacagaatatcagctcacctcttcacactttcccccctcagtaactgtatcctctcccatccttcttgctccagcaggtcaatggtgccttgaaacagatgattgttatatttcttctagcatttctagttcttagtggaagcattgattggccacaaactatcccaccctaccccgaagaggaagtcagatgcttactattaacacataaaaaccacaggattacaagagcagctcttagctgggtgtcttggtagctggcccagccaactaggagcaaacactgtttaaggcattcccttgagtgtctgggctgcctcaccatgaagaaggcagggaaatggatgggagtgtaactgtgggcccaggaagaaggcattcactgggatgaggaatgagtgttcagcaagcccaggaggcctcgatacttcatcaggtttctaatgattttgtcagagtgttaatcccatgggtgagtagcagcattttgataccagcaaacagattgtgtttcagcccagataatccaatatggagatctgcatgagagccgaaaataattaatcacattttaatggggttga

SEQ ID NO: 67719 - DNA, 1050 bp, Homo sapiens
ccatacccaccctcctttccttcatcatcttcctccattccctcccaaccctacactgcacccctgttctagagttcacttggccactcagtattcctgtagacaaccagcactttctttgtcccttggctttcttggtggtgttccttgtgcctgaaatgtcctttcctgccatcttcacctgatgaaaagtctaccctttacctcagacccagatcacatatcacctcctttctggaaacttccctgatcctcccagtccaaatgagtcatttctcttctgagttacctgatagtttcctcctctgttaaaataaatcacactctgctcatctcatagcagcttttgtctctgtctgttggttactcccacacccccgccagggcaaactccttgaaggcaggagaacaccctttcatctccatggtctccaccacagctcctttggtgccttgtgcattcctggtgctcgataaatatttattgatcgaatgagtaaatgagtatcgaatgggctttccatgtgttttgctccaggtgtctcttattgtaattaaagtttttttttccttagtcaatttcaggcaaaaagcaacataaattttatgtgaggtttgagaaggactgtaaaagtgatttatggttgggtaggagatctgtgcaaacaggttaggaaaatgctcagagtcagcttctacctgctcccctcgtcactccagaccctaaatgctgaagcatagctgccctgtcgtcctggtgcgtgagtggctttagtgtctggtgttgaagtgctgaataaaaaatgctcactcctgagagcatggtaagatgtttgtgggtagtgttcacatagaatgccctgcagcttgatgttcgagaatgatcttttgtgtgggcttgtgcttctaggcacatctctattgtccagccacattctcccactgcaatccttggcaaagcacacatggggctgaaacctgtgaccctgcctcctggtttcacgctctcaccagctgagcccccacactgcagcaagaactggctgcgcc

SEQ ID NO: 67720 - DNA, 1052 bp, Homo sapiens
gagtagtctgtccatccatccatccatccgtctatcagttagtcctttcaataaatatttcttgggtacctagtatgtgtcagatactgggaaagtcctgggtatagagaggtagataagaaagacagtctctgcccaccaaaggtgacatagaaaaggtaaggaggcctggacctctcttgtagagcagatagagaaaggaagataaagtaaaaaggccttttggaagccagtttatcaggatttggccatggattggatgtggggtagtgggcatgaaggaggaggcataaatagctcccattttccaccttggagggctgtagtggctgagccgggaggggctcctgccagcatcttcagcccctgagttaagcacagaagcagaggagagcggtgcatttgccgtgtagatgcacctctgagacaagggcgtcaccttttctgtcttaagacagaaaattgtcttagcaccattttctgtcagcccaattgcctttcattccctcctgtagaaatccaggagctgccttgggtgactaggtgggccaccaaccaagggagacattcagcagggggcagatggtgagcttgggtggactgcaagtgcccatggcatctggacgagacgtccagtagacagctggatgcataggcctaaagcatgagggagggatctgggctggaggaattgctttggcattgtcagtgacagaaagcacgagagcagatgaaattattgaaggaagagtgcagtagggaaaagaaccctgggctaaatgtcaaggtaccttggtctgagtcttagatttgccattcatatcctgcgacctaagacaggctcttccgcctctcagccttggaggccctcatctgtagaatgagatgatcagaacagatcagtggtctccaaacttagtttttagtggttgaaccttttgttcaaataaaatcacacacagaatcccaacagcaaaaagtgagctgctctaggaggagaatgacaagagattggaggttgagctctgtttccccacccaccccccaaccca

SEQ ID NO: 67721 - DNA, 1813 bp, Homo sapiens
gtttattagccagtttacaagctctctaaagtctcctgaagcctgtttcttccactgtcagcccaacccaggctgtaaggttgggcttacaggagtaagggtgaggacccaggagtaagggtgaggacaggagggtatatctagtatatgtaccacttataaatcctaccgtctgtcaatttccttcatgaaacttcccctgtccactcagccgtatctcctgagcagcaaatcatttaaattcctttgaaatactgttacttaaacttgtttttggacacttagattgtacctattattaccattactatttcggttgtgtctgtgtgctgctttctgaatctctttataaactcctggaggcaggtgaattatgtcctgtttcctatacatggtaggtacaggatggggtggtataaagagcactcgtcttgatcatctttggtagcactaaagccaagaatgatgcttacaaaattgtgggacctcaacagatgtctgtttaataactgaatggctaaacttagaaccacatagttttagtttagatttctgagtttccgttcactagctttgttgccaaaggcgaaaaacgaaactctttgaaacccaatttgctcatctgtcaatttgttcatctatcaaaagcagtgtatttcttgtgttctcgtgagggtcaaatgagataataaccatagaagtttttgcacagtgcctggcacatagtaggtgcttatttattaagtgttaatgtttctttacttttcttatgatgatatatatgcggtttattcttcactagactgtggtcttatggcaaatggggattgtattttactcactgttgtcctccatagcactcacacagtgccctgagcatattaggttcttaggaagagctattggatttattgcttgctggatacctctggtcgcagctcaggagatgcagctgaatgagacatgacccagggccaacagggaacatttgggagtgcccaagcttagagcagtcacagcctctatctcagcttcgaagcctgcacgtaatttacagtctcattccttctgtttctcaagtggccatttaaattctttagattgcagggctgtcatagataattcctctactagaatgtaagctctgtgaggatagacatttttgcttgctgttgtgtctagaacagggctggggcatggtatgtggtcggtaaatgtcagatgaaggaatgaacacaggtggggcatgggaagcaatattgtacaacataactctgcaaacttttttttttttttgtaaaggaccaaagagtaggtactttagacttgtatactatagtatctctgttgagattattaacctctgccattctagctcaaatggagtcacaaacaacatataaacaaatgagcaggtctatgttccaaaaaatgtactttacaaaaacaggtggcatgtggttttccagttgtcccagaaccatttgttgaatagactgttctttccctagtgaatagtcttagcactcttgccaaagattaattggccatagatgtttcagttttttctggactctcaattctattccattgactgtatgactatcctatgccaataacacactgttttgattactgtagctttgtagttagttttgaaatcaggtactgtgaatcctccagttttgtttgtctttttcaatgttgttttggctgttcatagagtcccttgcaattgtatatgagtttgagaatcagcttttccatttctttcttttcttttttttttttttttgagatggagtttcactgt

SEQ ID NO: 67722 - DNA, 1160 bp, Homo sapiens
gactgctttccagcatcgggcctgctcttgagctttctagagttccagggaccctggacagccaccatgaccaagtccattggatgtcagctcaggagagacacaggaacctcttcctgcctatttgcaggagtttgatggtctgtcctgaagtccatggctctcctaggaaggggctgtgggttctaggactgaccctgatctctgcctgtaattctttctaacacatttttatcaccaactccacccatagctgccctatgtagaacagatttcttgtcttgtctttgtttagacccagtttcttctggactcctggctgatccagcctgagtgctgtgtggccacctcttccattccgactgcgttggcatgcctgggctctgtgagtgtgagtgtgcacgtgtggatgtggcatgggggagcatgtgtctgccctgtgtctctcccctcctgcaggcctggagtccttgcatggagcccaggggtgagtcatgtagagaatgggatggatggctggacttccaggtgaggggctgttggtgggtggtatgctctgacattttaggggcacaggggaccccttaaaggactgggttgatttctggcctagaaaacgttcgacctatggggatctttatcacctaagacatataggtagtctgctgcatgcagtatcaaagcaatatgtgaggttgagagaagggagcgtatgaccaagaccaagctgtgagtagggatggcaactggttctcaccccctctgtagctgctgtcccagcaggcctcctaatttcaggtccctagtctgcagatgcacactgcttggtggctgtgtctcctgcaagtactgtctttatttgttaggatcaccatatgaacggactgacagtgctgacagtggtgccatggtgctgtgacctgataccatgtcaggcaccatgaaaagagcgaatagctaccaatcctctctgacttgggccaagattctgcagcacctcagagctcctgggacaaccacacagagcctttttgttttcatcaacattgaacgaccaggcttgaatgagctgccaggacagggctgctcaggaggatacggcagtgtgatggccatttacagaggcctggaggcaagaagacagagaaagtaatgagaca

SEQ ID NO: 67723 - DNA, 1049 bp, Homo sapiens
tggggatcagtgctgaggcacaccctggcatgggtcatgcttctcttcaaggggtgtctctcaggatagcccaagttcaggaggacaggctctttcagaatctaagagcagagactcccaaggcagaaaggggcctccaagatcctaaccaatctcttttgaatctgtagccacctggcaaaactataccaaacagattgatccttaatgttttccagaaaagaacttcccaaaatgtccattgcaggatgatccaatagaaagagggaagctaatgtaccctgaacctgcagaaggccttttgtggctggagagggctggaaatttctccccagtgccctcaggccaggacagaaaggctttaaagctgacgtgtagcccagaggagacaggaggtgggttctgtacgggatgaaaagcttggaagtcctagcaactgaatcctacccattccgtggtctgagtagcttcattaagaatccaattcattcatatatccatgcactcaggaaatgattattatacactgcactgtgccatgctctttgtgaggtgctgtggatgcaataatacacaaagcacacaaggtcgctgcttcacgcagcttacacccagcagggaaattaaatggacatgtcaataaatagtgactgtaaagtaaggtgaatactccactagcacacatacagggtgctaagggaacctggggtgcaggggcacccagcctgcccttgggggtagtggaaggcttctcagaggtgatggagaagccaggtcctgatgtccagccatgcggtgtgctggggcgagggttgggaagagagggggaaacgtgacagaaaatgagaccggacaggtaggatttaagagaggaaaagaaaccaggcctgctggcctaggaaggaccttagccaaggcagtctgtaaccattttcagctcctttaggcaaatctccctcaaacttagtcattttttgccttccagaggcagtgtcaacagaggtcacccacccttctgtgcttttcttctaaatttatcctctgaccac

SEQ ID NO: 67724 - DNA, 1049 bp, Homo sapiens
acccgtgtcactagcctggatcccttcttttgctggtctgttattgtccttttgaaaggaatgacaataactggtcacagtttcctgcgtgagcctggctggagtggggatgagagaggcagtgcccaactttgagacactctgctattatttacacagcccaaggttgcacttttttataagcagcagtttgccacagctggctcatgtcaagcgtgtggttctaaaaacaaatgaaaaaacaaagctcatgttttcctcttttaataaacttgtccaagtcaagtgtccccctgtttataggtctgctgtatttcttgaatccaagatttcactggattggtttctctcagcgttctattctgctgttcattggttgtttggattcggccacctgacatgctaagcacaccccctcccagttttgtgccctctgcagattttatcagcatgctctgtgggttgtcattcctggcacctgaaaagccccccgaacccaggcaggtaaactccataaagagagcaggaggaagacagaggggggccacccttgcgtcactgacattgggctcttcagtcattgtcatgttgtaattggcaaatgcagaaagcaccagcatgttttgtgcttagagctctttaccaggcgaggtttaattgcaatgggatttatgaccgtagcttgtaggaggtaatagatgtagctgtgtctcttttatcttctctggctacagaggattttttaagggaggaggaaagacaagtggggctggaactgggaaactcggtgaggtagagaggtggctacgagggacttgatgagtcgcagttgctaaggttgccctaagagatgtacaacatgaatattcatagttctgttcacttaggtgactgctttgctagctttatctcttcacagcagctttggaagatagggaaaggaaggctcaattctccattttacagagggggaaattgagtcgagagtggatttgctgcggactcaaagtcccattgagagtcatgaatagaattggggctggaatcag

SEQ ID NO: 67725 - DNA, 1023 bp, Homo sapiens
ggcggtggctcctcgtcgctctgacaggcagtttggggtccagccaggagatttttcctgccgacggaatgcctgtaaatggaggccaggtgccctgtgctcatcgcggaactggttgcctttggtcaccttagtgtgagcctcaggctggggtcacagccattgcaaggtagctaatggctgggacagaggaagcaactgcacacacctgggtggtgggcaacgctgcaggaacaggctttcagaagggcagctgctgtggggcatcctttggcaatgtttacagtatcacgaggtgagatgttactgccccctggggcttcttccctacttctcctgtcccttgaacctgctcacaggcggatgagcatgcccaggatctggcagtgcttagggattggagaaggatgggcccactatctcctttgccatcctgccaacacacatgtcccagcctgcatagaaagacaccgcagggccaggaaatctgagtcctaaaagtttaaaaaaaaaaaagcgatgggagaacttgatttgtgatgttggctgtatcagttgacctctttggtcctcatttccttacttacaagaggggaaataagaatcctcctgcttcctgcatcaccaaggtgaggagaggagactacatgggatgaagaaagagagggcttgggtggggaaagcctgctgggggtgtgtgggattctgatcagggaagcccagccgcccagcctggggtgcccttccagctctgggctttgtgggcaggaatgtgctctccctggagctgaggctccacgggcttaggcctcctggaggctgagcagctgggggatggggagacctcccagcaaggctggggtaggaaatggccagcctgtacctccctgcccgcgtctgtaagctgaggcggctgtctgtggcaagagggcttgaaaagattccgaaaagaattaagtcagtgccatggttttccccttaagtgtctgtctagacacaacacctgattccaggaaaggatca

SEQ ID NO: 67726 - DNA, 1045 bp, Homo sapiens
catttttctctccacattagctgctgctgttatccatttgacagagaagccgagaaaagaggctgagagctaacggcttaaatgttaggaacctttgttccctaaagatcaattcaagaaagagataaggtagattaaaaaaaaaaaaaagatttggggaaacatttcatttgtaaaaattcaagctgtttcaggaaataacttttacttaaagcaaactacacctgggattggggagcactgccctgccttatacctagaatgtggagcaggttgtgtgtgttgtggggggaggtggtaaagaaagagaaaggaggggagagggtgagatttcgaactgagagctcattggcatgaccattagaacaacttctgctggtcacagtcacagcgtattaaggtctgctgaggtgggattggtcatgaaatcgataagcactgcattttgtgtttgattctggtttattgtagactgttttctgcagacatcctttgatgtgcgtttggctgtgagcaaagtaatatagattttcccattgcattctgggtctcaaggctgactcccttgcagtccagcacctttggggtggggataaggagctatttgggatggtacctgggcctccagatgccaggcctggaccacgtgggaggtaggaactgatggtgttgatgtgtcctgctttggttaagattagctcaggactgaaaggaactaagctttcagatgggagctcctggtgcacagccatgggtagttggagatcagagaaatttgggaggggaagaaggtgctggcaccaggataggcaattgtgatttgatatttattctgcaagggtgggggttagggaggaatagggagggaggtagatttaagagtttagctatattttaagaagttaagggtgcaacatggcttggagggggaagatactggaatttttaaaatgaattgagaaatcattgctctgtctcagtgtgtgatggaaaggttagaggaatggagggtgaggatggagggaaaagggagagagatgaatgc

SEQ ID NO: 67727 - DNA, 1047 bp, Homo sapiens
gtaataactgttatttatataagagaacagcaatgaatatatcaaaatgtgaggtttcaaggtaataactggaccatcagaatcatcattatccatttaaaaggcaatttctgggcttggaaattgatagaaaaaaatggcccaattctaccacggtggtaattaaatttgtgtttcttttttatgatttgattttgttctgaacctgatgggacttgatgaccgaggggaattgagtagggatgtaaatgggaatgaccgtcccacctcatccttgctgatgtccaaacatgacagctggggagaggcctccagttttcatcctggtcacagttggagggaaaacagtggagacagaggaggtgactccggccagagtccactggacatcttctagaacacttactcctggatcctgtgattctgcctctctctcgcctgccaagttaaccagcatgggtgaacattcctctggcttttttctatttatactaaatctataaatttttttttctctccaaagaatggggaacattccatacgtactgcatgacaatgagcccattacactgtatcgtgaacagctttccatatcagttcatatgcatccatctacttctttttaaaagctgtgtgcttgtcctctaatgtactatcattgaactaacctttcccctttaggtggacatatgggttgtttccatccctgtgcctgggtctttgtacatttgcaggagcatttctggagagtaattcctagaagtggaagatttgggtgaaagggtatgaacatcttaaagcagaatcagttgggcattgttgaccttgagaaatgagattcaacaacgtttgtcctctaggtcgaatggattctcattatgtcagactactgcacaaaaccctgaaagatcttttgggaattggtgattttgcttatttaggggccaggatgaagactgagaaagagatagagcttgttttggactgtagaacatttagcctcactcccaccatcagtgggacttgagaggtgttcaggagggtagt

SEQ ID NO: 67728 - DNA, 1103 bp, Homo sapiens
tgaggctgatgaaaagcttagacagatagctaggactttagaaattactttggaggtcttcagaacaatacgaggtgaaggagggagaagaggctgccagggttccttgttctatgcgccgttcccatttgtggtattttcgcttagtgatttattttgagcatagctcagtagtactgttaatatttttggtattgtggttaatattgtgaacattattgtcaaataattttaatcagaattttatcaaagtgtctagaagtcagcttagggcctggcacaaaatctttgcgtgtgcgtggctacgcacacatgcaaacctatgcacacacacaccagttttcaagcctcaccctctccaagtgtgctcttcaaacaagattcagggtgagggccgtgatgagtaaacttgactatttataacccaagcccatgatccagcaactaagtggtttaattacgcttatcactgccaggcgcctctgtggattaatgtagctaattcaatatcctctctaagaagcgccattggggactgtgattctgctctgaggagcagccttcagcctctctgttcaccaccaagaccttggctggggagttggtgtttgtctcccgaggtggtctgtgagaagctggccgacaggttaaaccctcctctctccctgcgtccctcctcctctagcacttggctgttgtgtccattggaaaccttcccagactctcccttccacctcccatctccttccaccccctgccaagcacttttaatttgcttggaataattgattctgtcttcttcttgcacctcatttttcctcacttttatttatcaccttgaaacctctccttgatgtacgcaggccccatgtctgtggggagatgagagtagggtgctgctgtgtagcgggtgggtaaggggacagcctctgctaccagacccacagtttccactctcccccaggcactggtgacctcatggctgtgtctccaagtctaggaagcacctggcacagaggagagtaatgaacagctatagaagagagtgaggaaggaatgaaacgtgcctgtgttttgctgactctggcatttgcacttggttt

SEQ ID NO: 67729 - DNA, 1430 bp, Homo sapiens
gagggggccagcaacagggccccgagagcctctatctgcccagctcacatatggtgtcgaggagccacagggaagcaaacagtcctacttctgtccttgtgccacccacttttgtggaagccattgggctgctgggctcagagcaatccgtagagctttccaggcaggaagagaaggtgcaagacagagcagaggaactccccagaatgaatcacaccaaaaggcctgggttcgtccagctgagaattgagggtgtagccaagcacaatgagcacagcctctgagaggacagacagcaggaagatggtaaataatgccagcgctgctttgtggtagggagctcttttgaaggccagttgtagaggaggggccccacagcacaaccttcagcatctcagccttggtgggactccacagaaggactgatgggctcagcggtgggcggggggaagtttcagaatcattttaaaatttacttttatgctattaattttttgctgacagattagaaagataaatcaatctggcagtgggtcctgagtttagggttgttttctatgtatgcaagaaccatttgttaatgtgctttgttagctgtgtgagggagagaaggcaggccagcagccttgggtagaaaatccaattttagcactggaaggagcctcagaggtcctggtttagcctcctcattttacaggtgaagaaacagaggcagagaaggaaggtgacttgctggagttcacaggctactttgtggcagagttgagacaggacctgtggctcttgactcccaggctggcaatggcaaccctgaaagagggggtgttaagcctgagtgccaagtgtttctcatttggtccccgcacagtagtcattaaaacatgttcactgaattgaaaaaaacaaattgccaagacatagtcttggtacaccctaatcctgccctggttataaaaaagggatctacaaactagaaatctcttttttttttttttttttttttttggaggctggggatgtagagtctcgctccgtggtccaggctggagtgcagtggtgtgatctgaggtcactgcagcctccgcctcccggattcaagtgattctcctgcctcagcctcctaagtagctggaattacaggcatgtgccaccgtgcttggttaatttttttgtatttttagtagagaaggggttttgccatgttggccaggctggtctcaaactcctgacctcaagtgatctggccaccttggcctcccgaagtgatgggattacaggcgtgagctgccacccccggcctggaaacctctgtttctatcattctgttacttcctcatctagaacacaggctctccaaagtgaggtactctgtgttccatttaattaatgtcataataatctattgatgagctattttgtaatggatgctg

SEQ ID NO: 67730 - DNA, 1080 bp, Homo sapiens
aaataaaataaatggccgataaggctgccaagcagactcccataagcctgtgctctgagagggaagtgattgctttgttgggttctgcatagagtccccaggagcccctccctgccaggctctgggtgggtttgggggaagggcaggtttctgggcccaggttctggaggaagcagacaagtcagacacacagtcggacagccacctggatgcaataaaagcagaccatgttcccaccaggaaacgattctgcaggtttctctagaccttctgtgctgacttgacgtcagcagcatcttcggtgaagggcctgctccttcctcccaagccctgctgggcttccgggctggctcctgtgctcccctcagcagcagtcctcggtgctgagtgggaggatgatcctgggaagcttctcccggtgaaggttcctggatctccttgccaaggctgctgtggtatgtcgggaggggatctcaggaatctgtaccaccagcttgcggctggggggtggggagacaccctctgaggaccctcttccaaggtgtgagctggaggagctattaatagtaagatgccgggtgttccctgcagggtgacagggcagctgtgcaccccaccaagccctgaccagcatcctcccacaacctgtgaagggtctcgtgcatcctcccacaacctgtgaagaagagatcaccaacttcttgtgaccagtgaggaacagacactcagggcaaccggggcctgcccaagtctgtcagccagggagcaggaggtctgatttaaaatctagctcttcagtctcaaaaggctgctgtttttaggaagagatccctgcaaatgaagccacaactctacttgcagagttttgaggcaactgggtcagagcagaatctgtaaccttgctagggaagccacgtcagcagagcccccccatgatctgatactgacatctggagggacagagccacagccagagtcacacagcccgccaaggtgggcaggcccctgtctaagagctgttacaaaagccatagtgaccccagcttgggtgggaaatggagagatccaccccttccctga

SEQ ID NO: 67731 - DNA, 1042 bp, Homo sapiens
gggttgtagcgtgtgtcaataattcatttcctttcatggctgaataatattccattgtatggctctaccacattttatttgttaatcagttcatagatatttgggtttttttccactttttgtctattatgaatgatgctgctgtgaacattcatgtatatgtttttaggtggacacatgttttcgattctcttggatatatacctaggagtagaattgctaatcatatggtaaatctatattttatcctttggggaactccagactgctctccaaagtggctgccccgttttacattcccaccagcaatgtatgagggttctaatttctctgcattctgtctcacatggttttgatttgtatttccctaagtctaatgatgttgaggatcttttcatgtgcttactgaccatttttatatcatctttggagatctgtctgttcagattttttgcccctttttaattgggttatttgtctttttattaagttgtaagagttctttctatattctaggtataaccccttatcatttatatgatttgcaaatattttctgtcattggtaggctgtctttttactttcttcacagtgtcctttgaaggaacacatctgaatccgaactgcaaacgatgtcagtgttaattacaatgaaacatcattaatttggactctggtaatttggaatgggtcagggcagaggttcaaagtttattctttcaacagttattgagactgtctatagtcaaagactgtgccaggccctgggggtagagaggtgaacagagctgagtcctgcctttacagccacagtgtgtggtgaggagaacacaattgcaccatgggagccaagggcctgagcgctaatggcagagccaggtgctcagggagccctggggaaggaagagctaactgtttaaaaagcatttactcggtggctcacacctataatcccagcactttggaggccgatgtgggaggattgctagagcccaggagttcaagatgagcctgggcaacctagtgagacctcatctctaca

SEQ ID NO: 67732 - DNA, 1026 bp, Homo sapiens
ccatggccttggggatcctcagccgcctcccttccggtggccttctctcccactccatgtcaccatcacagctgcattcttgagtcatggcagcccttgatcctctgcttctaaaaccatacatgtccaaatcccatggtctgaaaacagcatcttacccaatctcaccatcgcattcccctgctccgctcttctgcgtatcctggtatccacatattccacaaatatgcagcctttcctttctgctggggctaacccattggacagctttttctgggtgttactccctttcctgtccagtggaaaaggcccagtccatcaccctcgccaggtcccaatagcaccttcactcatttgtccccagtcctgcccacccacctgatcacctcctactcttagttgtgacatctgcctgccttgcttctggctgtgccctgaggctgctttcagaaacacaccaacatctcttcatttcaactgggtccaaacagaaatgcatgtacatatcagagcagctattccaagccctcccctgaagccaccttccttatctttgtcagtcttgctagtggaagatgaagatgagacctttcctcttttccgagaaaatagatgccatccagctcagcctctctcaacaccccccacctacagcaaatatttatttacagctgtatctgtcagcatcggttagacctgcattacgcagtgctatagccattagtattgagcccctggaacgtggctcatctgggtggagatgtgctttaaatataaaatgcacactggattttgaagttctggtatgaaaacaagaatacgaaatacacaaatgatttttatattgactagagattaaaatcatagtatttgactgggtacaatggctcacgcctgtcatcccagcactttgggaggccgaggcgggaggattgcttgaggccaggagttcaaaaccagcgtaggcaacatagtaggactctttttttttttaacaacaacaaaaaaaatacgaaaattagccag

SEQ ID NO: 67733 - DNA, 1031 bp, Homo sapiens
atcttcatttttgtaacatctccatcaagagaattaagaatctctatagctagatttattgagtgcctcctgtgtgcaagatcctgtgttgatcccatgccatatcttgtaatcttcacaatagcccaaggctctctccacttccttaaaagcgaggcaactgaggtcccagagctgtggagggctgcagctgggactggaagccagttgtctgtgataccataacatttatccttaacactgctcccagaagttgggcaactgttggtattacaccactgcagttgtccacactgaataagtcacactgattaaatctgtgtgctgtgccacttccacacattatcttagtgaatcctcacaccaaccctgtgaggttgtcctactctttctaatgttcagtgaggaaaagaggttcagagaaactaagtagctcactttggtggcatggcccatcggtgtcagagcctggggagccagcattcagcagtgtctggcagctgctccttgaggccacagccttccctcacagacctggcatcctttaaccctctctcacctcagggagagtttctcatatgttcagaatactatttcaaaggacagccactacccgcctcactttgcacaatgcctgcttgcctgtgtgcatggagacaggtatccaagtatcaggatgcctggacccggggacttcgtgcagacaggacccctagtggcctgctctggtattacaggattcccgaggcgtgcatccacattagaattcacttctacacctggctgcaaaccaagacccttaagcttggagagaacttgttctgggggacggttctgagcatggcaggatggagaggaacttggggtgctgcctggaagaggaaggtggcagcagggggaggctggagaaggaggagggtaacagtagcggtggagtaccaattgtctccatgtggttgcctgcccacagctgctatcttggacgaccccatggagtgcagcagaggggagcggctctccatcaccctggc

SEQ ID NO: 67734 - DNA, 1129 bp, Homo sapiens
catcttcgcagactcttggcaggataagttgtgggccagagcaggcagagacaattcttcagtcatttctgaataatccattctggaagccaatctactcaccaccaggaagttcttcctgctgtctactatcgatcttccttgctttaacatctatacacactgatattcagcttcagctcgctcagctctggacaccaggggtgagagtggaagaataaaatcaaggtggatggcagattattacattgtaactttcctattacctaccaaatagcctaagccgccaataaagcagccatcacagcctcttaagatcttttcctgggagaagagaggcagaaggcaggacagtgggtcctggaaatgtcagtaatagatgcagagggaagctgacactgtcctaatgaagccaaaccacgtatttatttacctggctgtgttcagaggttctctagatggtttctccgcctgcagggcttccttcctccatgtgcgcatgtgtgtctgtgcgggagcccatccccgccccacttcctctccctgggcattccccactgaagtttgttgggagctggttactatacacctgttggctgggctgggctgatgggactcttctcttagtcccagggtagcgatttttctctttctgccgtctctgctctgatgtattaactacaaataaaatattctaaggattatgctttcaagagccaactgtctctctgccagcagcaggcagttcctctaagaataaagatagattcttttgccttctcaggaccacagaccccagcttgcagacccacggtgcattcatccgggtctctggacaaatagttttctgtcctggggctgcttctttgaagcatcatcagggatgtcatcgctcgtcttcctcccacggagtgggtgccctgggagctccttctcccattggtgtctggcgaaggtgttacataaaagaactcaccctccacaacctcagctcactcatccctctttcttccttttcacccacctggatcctccctgctgtccgtttttgctcctcttgccaggtccctcacttcaaagtggccccagaggagttcgtcaagttccagttccagagattcacaaccct

SEQ ID NO: 67735 - DNA, 1120 bp, Homo sapiens
atgaagtcattaagggtagaaaagctccaccaagtttcacgagaggagaggggccctctttagggaaggttgggagcaggcagtgagagcttcagcttagtagatagatgtccctccaccacccttgtggaaggtagctcagaatacacaggttccccctgtggtagctggagcctgcctgaacagcccccaggtagaagcttctgggggccagccttgtgccctccatagctcccagcatctgatgttgcactattattttttttattcgaatagcattactagttcattgttgaaattttggaacatatagaacagaaagcacatagaagaaactaaaaattattcacaatcctatcacccagagctatttaaccactgttaaattttgatgtctgtttttttctgctttacagacacatttttcccccaaattattgtcatactgcacaaacttttctgtaagcgctttttgtccacacttaattctatgccgtgcattttccccatgtcattaaacatttttctagaaatattttaatggctgcctcatttcctatcatacagagttcccataatttatttaaccatcactttattgttggagatacaggttgtttcaaatcttttgctacaataaataatgctgaggtgcacatctttgtacataaatctttatacacattcatgaatatttccccagcatacatttctagaagtggaattactgagttaaaggtacgcatgcttttaaggattctgatatgatttgccagattgcattttagaaaggctgtaacagtttacactttcgccagcagcatataggtgtcttatagcacccttgccaatactgggtatgttaattaaaaacactttataggtgtgtgtgtgtgtgtgtgtgtgtgtgtgtgtgtgtggccatgcttttgaaggaagctctgcctgtagtgtagtgatcattattagcaaatggttctgctcgatgcctcagggctgtctttcctgagctcacctgtcagccccaactcctgtgacattggagccacactgatcaatgagcagcaaggcttcaggaaagcctgttccctttgcccatttgccttcccaatggcccagg

SEQ ID NO: 67736 - DNA, 1055 bp, Homo sapiens
gtcaaggggcagatgagctggctttggcaggatgtaacctgaagggtgttttctctcctgccttcctggcccatgtaagtctggttctttctcccaaagcacagggacttcctgcttatcagctttgatggaaaattcactgactgcagaagcttattcacacatcagccggcaaacaaattagagctacttaaattttcaagctgggggctgcttttgggcagaagagcagggttttaaagtgctgcattttaaatgtatttcttataatgtgccccatcacgcttctgcctgagatcagtctggggaagtttgccagttcccagtgactcttttccgtgcctcttcagccagctcatgcctggaagagctggaagaggcggacctgctaattcggtctcaggaagcagcctgcgtcagtcagctctgatgggaggtgggccaggccaccggccagaggtgtggggtttgcaggcaggcaggcctggggaaagaacaaaggtggatccagggaggtgagggagccacatgcagcagcaggcagcgtggggcactgggaagggcataaggcttcatggtcaaaggctcagggaagagtcccagctctcccagtttctgttctagcattctgtttctcaatttcctcctcagtcaagcagggatggtgatcatcatcatatctgctttatgtgcatcataaaattattgtgagagcaaaatgaaacattgtttatagctgtgctttgaggattctactatatttgcaaattttagttctgtcatctcacccagagatgactatctatgtatctgtctatctttgtgtgccgtattcccggagtctcgcttctaggctggctcagggcagagagaagaacaaaacgggggtgagcgagacgcccagggccaggtcactctggctgtaaccacgcaaagaccggcccatgccagccaggcggggtgcacaccagctgtaccaggctggccactcagggcttcaggatggcctccccacagcctctccctctcctgcctctctccttcctccacccctg

SEQ ID NO: 67737 - DNA, 1074 bp, Homo sapiens
gtgtctgttcactttgaatatgtcaataagttttaaattaacttgagagtagtgagtatttggggagaagaatttgtgacaccccttgggacaatcaaagatacaatgggacattaccagtcctgagatggaaacccccagccatgccctgtccaggaagccatttgtttgcttcttactcacatgatcggcaagtgcttaatgctgagccaggtaggggaaccaagcaggtgacgagtctgtcccaggacccactcccattctacctagagcaggcgcaaatcggaaaacattggagggtgattgtgtgggccctggcatgagagcaggggagttctgagacatgggttggcacagaaggaggcagtgtgactctgcggacaaagatgactaggtgaggtggaagatgggggagtgtgtggagagtttgtgcagggagaagcccttgtgctgaggacggcgtgtgtggaaggcaggctgaccgttcctatctcattgacgtgacagtggactcatccagaatcagaatcacgtcaccttccactcagagctcccgctccctgacacatgacctttgccttctggctgcccacttcatcacgcccacatcctgctctccctcacagtccctccatgaccttgtgtctgtctggccctccatcttccccagcctagaagtccttctcagaacgagctcagcccatcaggatttcagtgctttcctctctgggctcctagaatcgtgatgtgcaggtttctccatgcacacctgtacccaagcccgattgtccctgccacccctgctcccagctgcctgtctgcatccagcctcccctctgcagccgggccttggtaatccctgagcccagctctcctctgtccctgtcgcatcccctgagcggctctgctgaaaatcttcccacacaccaagactcaagcctatctgccccactttcagcacaactctggggccagcacgagctcccttctctctgtgaacccacccataccctctacctcacctccaggctcaggcctcaacctcaccccgccccaccctgcctccaccctgca

SEQ ID NO: 67738 - DNA, 1012 bp, Homo sapiens
ggttatgttgcttagatgcttggtcagatactagtcaggtgttgctgtgaaggtatttgtagacaggattaacaactacaatgaattgacttcctaaaggagagtactcttgataacgtgggtgggcctcatccaatcagttgaaggacataagagcaaaacctgaggtttcgtgaagaaggaattctgccttaagtctatcacatagaaatcctgcctgagtttctaggctgcctgccttttggacttattagcccccacaatcctgtgagccaatttcttacaataactttccctgtctctcccaatatctctatctctgtccctctctacacacacacacacacacacacacacacacacacacacacacacccccctgactgtttggtgaggattcctctcctcttctggcctccacactgaagcgccaggatgccacgtggctgcctagacctgattgataacagggggccaagcaagaaatgagtgctgggattaacagcttacactaagcagaactgacagtttctacattttttcaacaaatatttattgagtgcattctgtgtgtgagacaccatgcttaggaagtaccaaaaagtcagctgaggggagaacaatcccaaattgactaacccaggggagatatggttagaataagtctgagatgaacgttgttatgtctgaaacagaggagggccttaggaagatctgctgtggctaaaggatgaactggtagagtccaccccaagagcctaattctaaacttacatagagactctatctctaatatcatagtgttaaggtaatgaaattaaatactgggtgttcgttgttttgcaatttttctctaattgttatctgtgagcaaaaatatgggtaatttaatcacatttatgatctataaggatcgagaatgtctatgttagttctatgtttatgaggtcacctgactgatgagttattgttaccaaaaagtgagcatctggtggcaatcaaacctgtgtgc

SEQ ID NO: 67739 - DNA, 1144 bp, Homo sapiens
ctgctttaaatggctggccccaggtggcttggtcactgttccagagctgtgtgagaaggggctcagcgcgaatgcaagccgccgtgacaggcctgtgccagccccgactccaggtggtcactgcgcttctctcccagcacactaacagttcctagttcttaaatcagggcctcggtttggtccgttccatggaggagtgggaggtcagaagacagggccatcgtggcctacctcgacctcctcacccagagcacgtgatagaaaacaccatgtcgctggagagaatgccagtttgacaactgaaaatgccctttgacacaggagcgaggctccactgagccctccggaagcgggcatcattccctttctcagcagagccgatgggtttgcactgagccgcttgtgccctctgaccagtttccttgtgaccaatggcctaaatagccacctggtgtgtagccagagtgtagccaactctgaagtcatgtccacacctagggctcattaacccccagcacacaccaccacagctaagcagctgcagagtgctggcttcctcctggggactgcccaccccaggtctctgtttagggatggtcatgagagcaccttccaatagggcagaagagctgaggcaggagcagggagagcagaccttgggcatggagggatacctgctacttacaggtcacagatagggaaggcagaaggaggcagccaggtgattttcatcccatattcagtctgatggtctctctatacatttctctatatctcacatccctctagtcctttacagattgctgatcactcatgacatattacttcattttatctcacaactctccagcaataggcagagcaggcatgattatccccatatatttattagacaagtaaatgagctcagagaaggcgagtggttttcccccacattctcacagtggaacacagccagaaccaaaacccagctcgctcatggtggtctgccatgtagacatgcccactgagtcagaggatgcccctgttgcttcactcctggggaggcagccagcaagtgttcttggtcacaatggcaaaaggggcaatgggacctgctgctcttgaaaatctacacagcagtggcaagttgccaagttctgtg

SEQ ID NO: 67740 - DNA, 1029 bp, Homo sapiens
ctcagcaggcagtgctgagagtgaggaacacctggtgacctgattctcacactctggggtggctcttctctcattgattggtgacttctctggataaacagttgtcaggtgtaatgtagtgagagttacaagtgcctaagaaattaattaatttatttatttttgaaacggagtcctcacattctgttgccgaggctggagtgtagtggtgcaatctcagctcactgcacctccgtctcccaggttcaagcaattcttctgtctcagcctcctgagcagctggggctacaggtgcgcaccatcacacccagctaattcttgtatttttagtagagatggggtttcaccatattggccaggctggtcttgaatttcttgcctcaagtgatccgcccatctcagcctcccaaagtgctgggattacaggcgtgagccaccgtgcctggctgtgagaaattaatttaaataaagtagaaattggacacacctgactaaaaggtttgtgtcacagaaacacaaactttggcttcctggaggtggatgggatgctttgcagccagcgtcctgtgtgtcggtgggcaggttgtttaacttggatagaccatctttttaatttagaaagtgatggtgcccggctggggaagtggatggcacaactgcctggaaagccgtttcttgacccatcttggggtgtttggccatgggctggacctgccagtcagcatggagagaagggaagcagaaaagcctgagaacactgcgtgaagccagaatgccccgctcttccgggggagccccagtggagtagacagcactggccccatgggctcgccccacccgctgcatctgtctgtcccctctcgaggtgaaagcaggcagggtggccaggaggtgtgccgggaaggggagcagagtgacacctaacagggcattcacaacctgtgtcctgggctctcccgtaacccccgcaggctcggttttccgggacgagtttgatctggccattctccagctgcaggagaacaaccg

SEQ ID NO: 67741 - DNA, 1047 bp, Homo sapiens
attgtagatcagttaatgcctataaattatttctagacagtgttcattctcaaagtgtcctggtttagacaataaatcatatggtcacgtaccatatctactactccatctactgcagccttgttaaaatatgcaacagatttacctgtccacgctctgcccgaggaagacagctgaggagtaggatgaaggatatcatgtgcttgtcttttctgctcagcatgaatgattgtccctgatgagacagtgaatgaataactatgtgattctcagtgtctatacgtggatctctatcttgcaagaagaggtctcaagaatatggatatacggagcaagtattttttataatttaaaggaaatgctgccctcagaggaactgagtgaggccacacacttcttggctcttcactccccaaaggccagagctgaccatggggaaagcagtggacacgaatggacacagggcatgggcagacctcatttcagtctcgtctctaccagttgtgagtctgtgagtttcagcacattagttagcagcactgagccctcattcctttatctgtaaaatgagttcagtaagtaacacactgtagggctgctgtgaagggagagtgaaaaagcacagagcttggctcatccctgggcccagtgtatcacagctgtgactgatctgcaccctagcaccgtgctctgctgctctcagaacttcagggcagtctgattccatcagctgcctgcagaggagttactttcaaggctcagctagccattccatcaatagggatatgctgagtgacagtgaggtatcccagcacatcacttcacactcctgggaataagaaagctctacaggcttaccagcaagcatcttaaggtgacttctggaaacaaaattcacttacttgaagtggttagcaaacaattcttgacacttgccaaattacagttaaatactggggggtgaagtgcggagattacttctccttgttcagagtaaaagaaaatgggggggatgcagaaaaaagtgtcaaggcacttttgtggatt

SEQ ID NO: 67742 - DNA, 1057 bp, Homo sapiens
tcagaatttcctggaagtcttctgttctgtcctaaaaatacatgtgaattttgcatcttactctgtaatacaggcatatttatttaatgtaagaatttttttcccacccaagccctaagtaaaatcagtgtcccaggaagatgccccatcatcatgccacagctttgtcagactcctcggcacaccaacagtgccctggactgggtttgggagcattggcaatagccgtcaaaggttctggggtgagatgtggcacacggaaagctggtgtggtgggatggaattctgagctcttggcggcattcatggtcccaggggatagttattgcctcaggagaaatcaagtcaaattattggctttaagttccaaaataagttcttaaagctcacagcagagataatgtccttggagagcgaggtttttgatttgccagagaagtattttggaatacagaaggttaattcctaataggatctggtcaaaaagttaatgctagaagttagagtgaaaaaaaagagaaagaaatagaagaaccaggccaccaagtctgcaaatcagataaaaggatgccctggccaggacaggagcttctgagcagaaaaggacatgttaaaatgtggttggtccctgcccttctgggagccggagagaggcagatatcactcccagaattagctggatattccatgagttctaaatagatttttacttgtgcaggggctgtgggtggtacatgtggagcagagaagaatttctggagaaattcttctggagagtttggctgtgtaatgggcttgtactgtggtatgacgcatatttctggagtttggcaaaccccagaaatatgtgccatgccttagtgaagtgggggacgtaagaggcggcacgtagggacccaaggcagagggcccagtgaaaggcctgagttttccttaactccagacaaagatattggaaatctaagtggactacggcataagaccagacacctatccccaccccaatacaatgacacaaccgcaaacctgaaatacatcccgggaagaagagggaatg

SEQ ID NO: 67743 - DNA, 1141 bp, Homo sapiens
cccatgagtctgcaacaaagcaggtcacaattgttaagacttcagctcactgttgtctggaaactgggccaagattaagccaacaaatcatcgattcaaacatgcgatgtcatgttctgaaggacagaaggggattttataagctgagctgtaactcacacgtagaccccctcacctctaccctgtgtccctctagaggttcccaggaatgtgttcagtcattaggatgccaggatgagttctgtaatcacccccctgcagcatgagtggatgccgagtgactgggagagatggtgtggagtagacgggaggggactggcatcagtttagatccaggcacttccacttgtcagccgtggaaccttgggcaagttacctaactcctctgcaccttggtttctgtgtcaggaaaaatggaggtaagagtagtgcccatttcacagggtaactgtaaggattgagttaaaacatttagcatgctgactttgctcatagtaaacactcataaaggtcagctttatatttatacagagcattcgctttggaatcaaattgatctagaattcacgttagttatgaaaacatgaacaacctaagttctctgaatttctctttctttaactgtaaagtggggacaatgggccttctctatggtgtttttaacgataattgaatgagatagcaaatgaaaaatgaggcacttgagctcatattttgatggattataagcaacctcccatagctcgtgtttggataaattgcaaaatttatcacatacctctcccatccctcttctagtttgagttccttttgcctacttttctcctattattctctccagaatgtgctaggtctagtcaccagatgccttggtgaatacaagaagaaatggcaaacttaccgtttcaacatgatgaatcactttgaattttctgggaagatcatgtaggtcagtttatatcggggcacataaagttgctatttacaataataagtccctggagatcggactatttgatacacttgcatggctataggtgaatatagttctgaaatagaaagtgcttgaaagccatatggttccaagaatccatgttcttgtccaatgctcttgatgagccagtgtggcacagagcttcag

SEQ ID NO: 67744 - DNA, 1025 bp, Homo sapiens
tgggttggtcggcatcctctttatgccaggacaatcagttagggctgccgtcctgggggccaaatggtaccctgattattcctgtgagggatactcgttttgtcctcacctgacctcactcatgaatttgaatcctttatcttttttctctttaaccatcaaatgacaacaagctgtgcaagacacttgtgtctttttttaaaccttgccttgatcctcgtggagaaacgtggatttggtgggaagggcacccgaaggccagctgacaacaaaccccaatggtgccactctgctccaacctgcagctccatcctatgcttctcacagacaacgtggttcctactgtcagatcacatttggggcgggaagggtggttttttaaaaaaactcgtttttatgagcaggctatcttgatcaatagcaaactttttttaatggattagtgaaataaatgtccccatgcatcatttatagtctgtttctttctccgtgtggaatcaagataagactgccagcactagacggtttctgttagctgctgagaccagggcctcaccttgctcaagctagtgggtgaatttgcaaccagctaatactcttccttggtttgtttccactttttatctgttggttgttggctttcttttccattctgtattttctatctgactctgtatactgtataaagcagttttttcttgtctgtttatctttcttcaactggaatatttacaataaaacagaaacaaatcctgaaatgttagtgatggatgacagctgtttgggtttagaaagtatggttcagtgtgtctaatatccaggtactagacttgaaaagcaaataaaatcataaacccactttttgtcttcccctccacctgccctctctgtctccttctctccacctccctctctactcccccacccgctttggctctttgttcagatcccagaaaagtctaggtggcttctttcaatttttagtcctaggagcctgagccaatccacccccccatccccaaaag

SEQ ID NO: 67745 - DNA, 1413 bp, Homo sapiens
gccgggcccgctggctctgccgggctctcgaggcccgaggcgttcccctctggagccgaggcgcggagggtcgctcctgcagggtgctgggataggacactcggggaagggtgaaagccacatggggcctgtctcgagcagctgtggggatgggagacctgccctggggctagagggaggatggggcctgcctggcctgggctatggcggagctgggagggtcttgggctgggctgggctgggctgggctgggggactggtcccgggttggaggagggcgtgttggggagcctgcccgggttcctgggagaatctaggcgtctcaccttgccccagcgtgggggatgggtagatgcctcccagctgttagaagagggagacgtgtctgggactgctggggaaataggaaacttgtctctgaactactgaatcccagaaaagaggacatgtccccagggaggtttgctgggggaaggacgggcatgtctaggcccttgggacattaggcctgctcttaccaggggctgataaaaggatgtggatgtggtaattgaataagggcttttgggagaaaagatttgccccaaggttgggagactgagaacgagggtgttggactgacaggcgggtgccttgtcgtgggatcttgggggaagtaaggatctgtgtggagcttctctgttgagttctaggtccgctagtaggaagacattctgggaattggtgaagagaggagatttaatagtcttttcttgggacacagtgattccagaagttgtagttgaggaaagttggttggaagtgttgaactgtatacagtcagtggagaaaggaggagctctactgtgaaggttgctaggctacaaagagcttgtaggcaacgcctagggctgttgagagaagttggtaatgctttcaagtccaaatacaggctgagctggggcttgtcccttgttcatgtcatgctgctgtggagctcttacgtttccagtagtctatcttgagcaaagagtatgaataggtgctgaggactaaggaaaacattcactctttgggtcctgagatgcattagacccagatctctagggtggtagctttcaaacttaaaaaaaaaaaaattatgccccacagtaataagtatgtcttacattcagatctagtacatacgtaggtatgaagggaaactttcacaaagcagtatttacccttattatatgtgatatgttctgctaatttctattatattccaccctcttgcattaaaaaaaatgctggctgacatttactaaattgatgatttgtgggtcacaacttgcagtttgaaaaacactgtttctgaagcacatttatttggtgtcaatcagtgtcctcattctgtaagcttctaaagagcagggatgattctaaggagat

SEQ ID NO: 67746 - DNA, 1618 bp, Homo sapiens
taatgttaaatgttgtaatgttaaagtcctttgaaaagttgttacatagcctattgctgcaggacattgagtgtcaaaggatgttgtctaatttcagtaggtacacagggtatgtatttaagaccagtttaatagcgtttctttttttgaggatgagttcgtattatttgtaacatagaattcaaagacacggtcatcaggacagaagtacccaagttaaaacttcatcagtggggccacattcttgatcaaatgctttacgaaaacattctatcatctttgaactttgtgtgttataaatctttcttgcctttaattatttattaggtactgatagaggcgttatgctggcatatatcagccatcctttaaaaatgacctcttaatcagggaaatatttgttttaaaatatttagctttaatgaatgtttaaagaagattttgttttgtaggtgcctggaacattaaggaagattcttatttatttcatttttctgggaatcatatgtacttgtcaataaacagttacggagaagtgaccctgagtgattgtgtgtgctttttaatagtttttgtttcttctctgatccttagactcttaagcctgtccacctgtagcaggctcttttctccttctaatttttgcctccaaactactatggttttgaaaatcagatatttatatttgttatataatacttttttttccttttcttagtgtgtgaactgtgtgacatgtatgttggctacttagagaccagtttacttagtcctgggctgtgttttaaataagtgaactctttatatattttgggcctggttagctgtataagaagtaatgtgaaactgatagtgatacaatttgggcttaaagggtgaaggaatccttatttgcgattgttgcctttctcctacacgtgattagttattgagatttactattcctccctttttcatgctacccattctgacttacttctttggaattagaatggtaataactggactgttcccattgtcttttgcttgcatagcttcatgagagaactcttccaaaggatattgctatgattatttcatttccctcctcaaaaaccattagctgctttccagtacaggcactgaataaagcccatggtgtttagcttgatatttagggccttctacagacttcctctactttttttctggcatcatcattacactcctaaatgcagttcctctacctgccaaggcctctgctcatgtaccttcctttgtgtgtaaaattatccctgaaagtctgcatataaaatgttccctttcttcatgaaatcctactcactctcatttcatttcagatgacccctcttctttgaagtctttgttgcttatgttgtctgtactgcctttgctatattgctttgtattatttgtgcaccttatttttatcccttttagattataaatgcgtggtgaacaggaggctcaaatatccatgaaaaactaggacatctagcacagggtctaccagggcgtagttcatagaccaagtagatcagaattgactgaacgtatggttaaaaatgcagatccggcaaggcattgtggctcacacctgtaatcccagcactttggg

SEQ ID NO: 67747 - DNA, 1776 bp, Homo sapiens
ggaatctaggaatctgcattttatcaagctgtctggatgattcttccatacagtaaaagttaaaagtcactgacctagcctgatgctttaaattacagtaggtactcaaataacttttcagcaagtgatgttaatgaactgagcaatatcataattcagcaaactggtttaattttagggccttgaagtcagcctagatttgagtcctggctctgtcactagctctgggcccgtaacctctctgcttcagttttctgatctgcaaaatgggataatagtaccccttataaaagtgttgtgataactaagtgagataatacatataaaacaacacagtacacaacacataataaacttacaatagattttatctgctgtcatgatgatgcctagcacaacagtggtcaccgcagtaataataaaacatcatgaagagaggttccagatcagtcattgttaacaaacaaattgctcatatggttttaagaactaaggcttaaaatattttctattttacattaacagattgtggccctatgtggtgtttaaagtcataaaggtgtttccgccttctttagaagaattggtatcaaattagcatgttaggatttttccccttcatctccccactgatggaagaataaagtgcaaacttttgaatggtggaccttagccccttaccatctggccctaccaattctttattttctagccgtcttcccacatatactctatactctacaccaactacactacatttctcactttattttgcatttctcactcatttgtgtttgtgcagatgctttccccttcttttcatctagtacatttctgctgctgtcttgtaaaactcagttttacatgtgactgacctccttagtgaagacagtcactccctcagtgttctcaaagtcctttgtccatgcttcttatatattacctttgtgtacatttgtctttttggagggaaaaacgatttaatcctggcatgtattcccacctctgccaaaaggggaggatgtttgtttatttgactcatatcagctcctccatttgtctggacgtctcagctttcacaataataactagtttattgaccacttacttcatgccaggtacttaactagatgcttcaaaaactttatttcatgtagtcttcacaataactgtgaaatggctattaatagcttcattttacaagtgaggaagcaggcatagagataggtaagtaacttgttcaaattacacagtagtcataagtgaactcagaactaactgaagaccatgcttttaatcacagtgctcttctaaaaatgaaatttaaacaggtagcccatttcccaaattcaggatcttaaaactgtgtgaaactttgattaatcactaatcattcttaggaatgtgatccataacaagtactattgtgaaaagttatttaaaactgttcttggaataatgcgtttccggtgattttcaaaatttttcttctcattctgccattggtgagcttcattttcatttcactgtcagaaggtgttgcttcatgtctattgataatgaaattcacttttccatttatccaatgaatattttttaatcatatgccaggcactgctctgcacaaaactgaactggactgacaaatccctgcttgtgtgggacctatcttctgctggagaacaaacactgaactaacggattatgataagtgctataaagaatgacagagggtgaagtgactatgagtgatggtggcagtagtgctatttttga

SEQ ID NO: 67748 - DNA, 1065 bp, Homo sapiens
gacaatgtctaccattgccaggctgctttggcaacatcagatattttgtgcttactcatatataccataatacattttgactacagttccttttcttatgatatcccttcttctctgagtactccagagcctgtatatccttctccctactgattattttagtaaaaaagcctgatacctaatagttgaaattacagaggtcaattttagctgcctatattttgattaatatgcatcataggccagccccttaagtaatgagttatcaggttgttagaagttagcgtgttgtttaatattacctgttttaatgtatgcatgagtccttctcagtactcatcgtctcagatgctggaatcattcagtgtttggacccttagctgatgctaaacagaaaggactctacccaaactcagaaccaaaagagatgacattttgtattatttaggattaggtccagttataggtaactaaaaaattgagaagaacaatggcttaagcaaaataggttacttatctgtcattgaaatttccagagatatgtaccagtatggcagctcagttacatgaagtcctcagggatgcagagccctttcagcaattcgtcccacttttcttagtgtatattccttgggttcattgtctggtggcatcagttttctaggcaacagatggaggaagaaacaaaggagggcaagtggcacactctggtcatcttttaacgatgattcttagaagctgccacagaatacttggtttctagcccatgagctagaacttagccagcactcattcccaaatacagttatccagttatccagttaaaggttcttttactatggaagaagataatggattttagggacagatattaaaggattcatccaaactgtttagcctgatgttcaatctgtaccttctttttcagacctttcttcaattacttatccacatgaatcctatgtaccagccaaaagccttctcattgcccttggttggaagtgatcaactcctcttctaaatcttgtaatagttttcatctgtattgcagatatatgctcaact

SEQ ID NO: 67749 - DNA, 1047 bp, Homo sapiens
atattcaggttgcaaccctgaagcttgtcccacctatgaagcttctgattcagtaattatggtggaaccttggaatcagcatattttaaattctgtcagtgattccgatgggtagctaaggttgagataatggttcatattatgcttatgttcataatagttacatttattaaatgattttttgccattaagttattcaataaataagtgtccactatgcagtagtgaagtaggtaagtactatatctgcttttatagagcttacatgctagttgggggtacgtagggaaacaagtttcaaaaaaatgtgtcacttgctatgctaagcactttaatgtgtatctcatttaatcctaccaacagatgggaactattttccctattttacaaatgaggaaactgagatttggaaagattaagtcacttgtctgaaatcacacagctaggaagtgttggaacctcgtttgaacccaggctttttgactctaaaactaatcctaactactcttttctccttttcttatagcttttacttaccacattgcctggttgtttgatgcttaatacatttgctggacatctagcatttatttcatacttgtttaagctgatccttctcgcagattgtgccaactagtcttcagttttctttattcattttttctgcttatatttatgatgtataaatatggtatattggaaagaaaaatggctctgagttttaaatcccagacgtgacctttgtaactgtaaggccttagtcaaattattagtcagattcctcatttattaaaatgaaagtagtattatcttgcaagttgttttgagaatttaatgaataaactatatcaaagagactagtaccatgcagaccaaatagctaaggtcagtaatgctcattttctttttttcctttttgtctaccaagttgctagctaaatcgttgataatcttgttttccctttcgttatatagttacggattttttttttgtttttgagtaaacatattttaaagtttggtacatctttgaaccaaattgaaact

SEQ ID NO: 67750 - DNA, 1032 bp, Homo sapiens
cataggaaatcttcctttttaccattaagttctgttatgtaccagtcagttatgccactatttcattgaaagattaaattatttgccaaggtttgttgaaatcacttatgtccctctgtgagtaccgtcactaaataataggactccttgatgtaaatggccctttgcctggagaccagctcctctaggctttcttgagcatgattgctatttaacagctctgattactgcctgataatgcttttctttttttctccttaggtcagtaaaattgtgtcaaatgttcctcagttggagtttctaaacctgagttccaaccctctgaatttgtcggttttagaaagaacatgtgctgggtccttctctggggttcgcaaacttgtcctcaacaacagcaaagcttcttgggagacggtccacatgatactacaggagttaccagagtaagcccagagagcatgagggcgagggagttatgttgccatctgtgttagtacataggagtactgctgatctcccacgcaagaaatactagaactgcagattgagtggagaaagaggttagaaaaacgaagttattggaatgagaatgtgagggtaatctagtagcatttccagtggaatacatgttcagtgttgagtagcaccaagacatgggatatgtcatctctgagctagaaaatacccctgagaagcacttatcactctaaatcaactcagccttactctgttttaatcttctgatatgagaattgagcctcagcccttttctttgggaggaaaagtcatagtatcactaaaatgtgttaacattcagatgattaagtgcctagctgatctgatgggaaaattgacctagtattgttttcaaaaatttaagaaagaaattttatttttgtcaattaaaacatgctttattatgtttcgtttgtccctatctttgtatttacatgtaagtgtgcaaaggaaatttaaagaggctgtagtttctttgactgtctaaatatggaaattctcaaagccctttagaat

SEQ ID NO: 67751 - DNA, 1397 bp, Homo sapiens
aatctacacttttggaagttttacttgtatttggttttagtagtcttagattaatctactttttaccactagtcctggtaataccaggagataccaccagggttccatccacactcgtatattacccctcttgtatttctccttgacagtcaagattacttatcttagctgacaagctcatttttaagtggggcttgtgggtaggggatgatttttcctagtaatttgtagaacttaaattcagtacttggaagtctcagcttccagttggaataattgttgtagcactagtgcagacatgcctttgggttctaaagccgctaaacctaggaatatgaaataagagttttgcaagttagtcactagatgtaatcatgagctgtattgtgtttttcacatttacccttgagtttgcagacctgtctactcttacaaaggataactggtatcacttttgttcttcaagacccgtacttaatgaagagttaaatgggaatatgataagtagtcatcatccagtttttagtggtggcaatgtctttctgtttccttttagggaagtggtgttgcttttgctttagtgtttttgttgaaacagattcacagaccacctatttattctaatcctaaagattccaggaccaattagctattggaaaagattcatgcattcagactattttacttactgttctggccttgctatttatataattatgcctactttcctatgcactagtggttcaatgccactgcttggtctcttccatccttcattaaattgaaatggcaacctgatttcagtgtctcctatctgcatccctgacctgtaaagtgttttcagatatatgggtgctctacttcctaatatattttcaaggtcttggagtaggaaatgtcttctgggtccttttaggatttgtaacggagaacaggtagaaggacatgagtgacacaataataattataatctccattatcatacttattttctttttaatttttttttcttttgaggaggagtctcactctgtcgcccaggctggagtgcagtggtgcaatctcggctcattgcaagctctgcctcccgggttcacaccattctcctgctcagcctcccgagtagctgggactacaggcgcccgccaccacgcccagctaatttttttgtatttttagtggagacggggtttcaccatgttagccaggatggtcttgatctcctgacctcgtgatccgcctgcctcggcctcccaaagtgctgggattataggtgtgagccattgcacccggcccatacttattttctgtacgtttttccatataaataactaaagccttgcaattattttggtgttttgtaattaaccctactgagcatgctgttatctgagcta

SEQ ID NO: 67752 - DNA, 1751 bp, Homo sapiens
ctatgtgattagtcattttggcaataaaagactttaaagaggatccagagattcacatacctgttttcctatcccaggatgaaatgcaaaatctgaatcatttgaatttttatgatgaaaagagtaaaatgtttaggagactgaagggagacatacttattaagagctttataatttcttacaggtgctcaattatcctttttattgccttctgataggtagagctggaagtttagcctctctgctctagctgcttatggcaataatggactaacaaaaaactgagcaatcagccatatgtctcatgtttatttactttgtgaaacaagagaagaggaaaaatctctgttttctgattcttggcctttgaccatcatactgtttgcttttccagtcaatggactcttttcttttaaagccgtcatctgtgccgtgtttcttagtggcttatatagcagtggtgtgatatgctgtttccagataagttcagtgtgtactgcaggtagctggaaagatgtccttactgggctggtcatatttcagttattagactctcaggccttaccaggagaacttctaggaaataactctagattctagctgggtttcaaaggacagtttaatttatttactgaatacctactaaggaccaagaggcactgggcttcaagctagagataaagagacaaaaacagtagtgtctactctcaagaagctaagctagagatatatttcctttgctgggccctcttcatgttcccaacctctaaaacttgagttaccccaggacttagtccttggacctcttctcttctgtactcatcccccacacacttttagccagtcccgaggctttcagtgctttctgtattctgataactgccagatgtatacatgcagctgtgatctgcctctaaattccagacggcgctttccagctgcctgcttgatgcctctgcctggatgtttaaacctagtgtgtccaaaactcaactttcgataccctcccttttcccttaccctgcctccctcacccctagccccctgtgccatagctactgctctgccagtttttctccttttttcaattattccagttgctcagggaaaaaacactggagtcattcttgattttttttctcccacaccccacatctggtctgttttttttttctttcagttctactttcaaaacctatgtatagaatctgactactgcttcctatcattttagtccaaatccttcatcatatcttacttgtgttattgtagtagcctactgaccagtctccctgagtccacccttgctcccttaaggcccgtgcatctcatagcagcctgtttctaagaactcaagttgatttttaaaaaaacaacagaggctgggcgcagtggctcatgcctgtaatcccaccacttagggaggccaaggtgtgcagatcatctgaggtcgggagttcaagaccagcttgaccaacatggagagaccctgtctctactaaaaatacaaaaaaaattacttaggcatggtagtgcatacctgtaatcccagctactctggaggctgagggaggagaatcacttgaacccgagaggcggaggttgcggtgagctgagatcacaccactgcactgcagcctgggtgacagagcaaggctccgtctcaaaaaaaaaaaaaaaacagacaaaaaacagaaactgtccttactgttcctgacacacttcaagcacactccctcctcaggcctttg

SEQ ID NO: 67753 - DNA, 1002 bp, Homo sapiens
aggtcatctttatctttctcctcacttgacagggaatgcatctaaagtttcaatatgtagatatgaatgctgacttttgctatagggttctgataggttcaggtggtttctatctctatttttctaagagtttcttttattacgagtagacattgaattttgtagaatgttctttttgcattgagatgagcatattttcttctgtaaattttaatatgatacattttcaggtattgaaccatttttgcattcctggtatattcaacttggttgggaaatattaaattttctttttaaacatgtagaatttaattttataatgttatttgggatgtttccatctattttgatatgtaaaattggtctgtaattttttgtggttcttgtctggttttatgaaggttgtactagcttcaaaattgaattgagttcgtgatttcatattttctctactaagtaactgtttcattcagatttaaaatttaatagtcacttacgatttgggggtaggtgttttaatttttgaattgttatatttaattttcatttggatgggcaatacttccacatggaacctgattggaaattttaaaaaggatgtatactacaaagtaagtcttcttcccatttgtatccttagtagctaatcaagtatttggcccctaggcagccactgatactattttcttgttatagtttccatcgctattttgtgcgtaatttttgtacacaagtgttcacaaaacaatacattctgtactctatgttttctttttcatttaaccatagatcttcaatagcatctgtgttgagggtctttgtgattttaaaaatgtactatatcaatattcatctttttattcataataatgtctatttctgcctttccattttttcttaatcagccctgctaatgactatcttttagtagtgtcctttgtttaaagtcagattgattgaagtatgtgacataaattttaccccttttagtgtacattcctg

SEQ ID NO: 67754 - DNA, 1016 bp, Homo sapiens
atcagggtgccagcatctggctgtggcttttctactgtatcatcccatgatggaaggaggaatgacaagagagcaagagagggctgaactcactttaccaggataacgggtggactccctctataacagcgttaatctattcatgaaggcagagcccttgtgacctagtcgcctctaaaaggtgccccctgtcagcactgttgcactgggtattaagtttccagcacatgagcttggtgagggggagcacattcaaaccaaagcactaggttaggtataataattttgggccattctttctgattcatttatttgggtctgtggtggtggtggtttgctcctcagtttgtttctttagctctacagtctccattttcatctcattctgcagtttatcatttgtctttgagcgctggtttttatattcaagtacttactaatttctagacttttgagttttgtggagtgttttctttttcttcagttgtgttttctttcaaattgagttctgcctctgtcttttacttattatgtgttcctctcctttattctttttgctgtgatatgcgctcagttgccattttgtgtctcattatcttgcttgtgcttgaagtggtcacttgtcttcatgtcatctctttgttgaaatgtagtatgagtaaattctctttgtccactttgacattgtttcttttgttactcctaggcaaaatttgagagctagggtattacaattttacttttccatagtctgaaggtaaaacatctctagagttgggttcagttcttatttgaccactgggttctgctgtcttttctgagattttgttaaattttcataacctagtttcagttatttgaaggcatatactaggatatggggtggggaaaagatacccctagactttgaatcatcttaccttttcagtttagagccttggaaaatttcaagtcctggcagctttgtctttgtttgttttgctttgttttgttttatttgcctttgctaaaatcct

SEQ ID NO: 67755 - DNA, 2101 bp, Homo sapiens
tattattatttttctaagatggagtctcactctgtcacccaggctggagtgcagtggcacaatctcggctcactgcaacttccacctcccgggttcaagcgattcttctgcctccgcctcctgagtagctgggactacaggcgcgcaccaccacccctggctaattttttgtgtttttagtagagacagggtttcaccatgttgaccaggctggtctcgaactcctgacctcgtgatctgcccaccatggcctcccaaagtgctgggattacaggcgtgagccaccgtgcctggcaatcttatattttttaatggttgtgtgtgctttaaaataagcttcagagcagcagtattttatttgtttatgaacatagaatttacaaagtgtttactcatttgttattttatttggttcttatgactgtcttatacagtaggaagggcagaaattattcctaattttactaatgaggaaattgagatccaaaaagacagtgagttgccaagtcacacagctaattataaaatggagtcaagaccctgaagacagagccagggctatttttacatattccctgttactccacttattggaaatgattacttccatctctaagcacagcaatctttttttttcttttttcttttaagaggtgaggtcttgctatgttgtccatgctggtcacactcctgggctcaagtgattcttccccttgggcttcccaaggtgctaggattctaggtgtgagccaccacacctggccacagtggtcttactgtatgtttaatgcacccacaaaccttattatgacactgattttaactgagttaaagctgaaagtggtgtggaggaagtagggggataattttatgtgacttgtattctgatccttaattaaagtgacttcgttgtatcttggttttaataaaactaatattaatttttttcagcattttttccctttctggtacgtaggaaacttgtaagtgtccttgataaaatcagatctagatcctccagggctggcagtgcagacaagattttctctatgggaaacatgactttgtgggccctattctcatctctgtaattcactttcctcttggtatcttttcctttgtattccttccttgatcaagaaacatgtatcccttacttaccacttttttccaagaatgtattcttaattcttccataaattctgtgtattacacctgaaattagattggaacgttcaaacaaggcatctctgaaagagcttggttaattagtaacaaagaactacatgtttttgtttataagttatggcttctccaggcctcagaaactgctggcctccttccatctttccatctattcccaaggggtacatgcctagatacctgcccttcttgatgatgacacccaagaaagcaagttctacagagagattgaacttctattgtctttatagtgtctacttttctaggttccatttttttcctaagcctgttcttatgtaataattgattaacagtaggcatagtgaccatcttcaggaaaaatgattccccagttttactgtggcctccctagggcactcatattagatcacagagtccataggagtcatgtgatagaataagattttttaaagatgttgagcctagtaatattgtttatctgtagttgggaagaagtccacagtacatgtgctagtagtttaagctgacagtgttgtttttaatccttctaggtatcatgaactgatcactaaatatgggaagttggagcctttggcagaagtggacctaagaccccagagcagtgcaaaagtagaagtccactttaacgatcaggtggaagaaatgagcattcgtctggaccaaacagtggcagaactaaagaaacagttaaaaactctagtacaattacccacaagcaacatgcttctctactattttgaccatgaagcaccctttggcccagaggaaatgaagtacagctctcgggcattgcattcctttggcattagggatggagataaaatttacgtggaatccaaaacaaaataacctctaccagccttgtgaaaaacatacacataaggacttgttgcag

SEQ ID NO: 67756 - DNA, 1034 bp, Homo sapiens
aagaagctataactctgttagaacctcgaagagtagatgtagaatgaaaactccaggaaaacttgcagttattctggaagcaccggcagaacagtctgatctctttgtatgttactaactcacttttaatgtccctgtacattatgtcagccattactttcataacatgaaatatgtcagattccagagttcttttatttttgcttattgaatgtatttcctcatatctttctttttcattactttaaactattgggaattgaggcctgacttcataaataattcaatagagtcctggatacgtgcaccaggagagttgagaattagctcataaactatctgtggtgtgtgtggggaatgaagttgggggatgtgggggaagagcttatgactttcccacctgtgtcatccattggaagcccttgctcttgcactttgcattaaaagtgggaaacattaatcaaagggagattttattcccaggttttccctgggactttgtgatatcataattgaacagttcttttgttttacatttcaatttagttgcctcatagaagtataactgcccaatctatgagtaaagtgtaagtgtcaaaactttacaattgcctccaagtcatattttttgcagaagcacatttaaagcacttttctgtaaaagctagttccttacctgcttggaaatctttttgtttgttcttctattcctttgttaatcagatgtaatccctttctttaatgtgtatttttcttggtccaccatgtttacagatgggagacttgagagatacttagcataactggggcagaaagtgtgtaagtgaagtatttttcaaagaatgcagttattatctgattgcatttgaccttttgacctttgttacataattctacccctcctacaaatttaatttttttatgaaatttttaggtgacttgtaaattcttcatgtatgaggagttgtgtttattaatgctactttttaaattttcctgtgccatgtggcagatgtttattctcttaatgcact

SEQ ID NO: 67757 - DNA, 1015 bp, Homo sapiens
caaatttaattggaattttgccagagttgaaaactacaaaacaaagattcataagaaacgtgttatggcttttctgttagcaaaatcttatacttctgacatgctgtttatactccttttttatcctttgaggataaaccctctcgagatatttggcatcaccttttatgagtaagattgaaaaatctcatttgttgaaattaaaatttgccagttcttattcaggggctgcttttttccttagaaaaatagttttttataagtattagaattttgtacatttgaaccctgcttgcttatcaataatttcttggtaagccattatgaattaaccttgcaccaaggattaaagtctaaggactatactttatatctgtatttaagagacagagtccattcacttctctttcaatgcctcagaaatacataagtatcatgacctgtttaagattatttctgcctgctattcaaatttcaaagaattgtaatttaagcctctgtgctacattttatttaattactatttagtatgagcttcttttgagttcctgcaaagtagacatgtatcaagacatccaattactattggactggaaaatgctgtgacttcctctagttattagaatgcatttaaaacaagaaggttgacttctgaagtcacatttctctttcagttcttctctggaaaagaagttcctgtttggtctttacaacaaccctacgaggtcgacactcttatctccattttcttactagtgaggaagttgatgcacagataggttaagtaataccaaaagtcacatggctggtaaatgacaagaccgggatgccaacccaagcagtttggttgcagaacccatgcactgacagctgtactgtagtgctgactgctaaagttccccagcacacacctttattgttagtcttccttttcatggaaaaactaaaatgacatgtcctcaatatccatttactaaattgattggctctgtaacagaatcactgatgtggctga

SEQ ID NO: 67758 - DNA, 1133 bp, Homo sapiens
tagaatccaaagaaaaacaaataaatgtgagtcatttggaaagaagcagtcatttaacatctgtaagtaaatatgtgtggaggattcataataccagtgagagaataaacaatgtgggaaacctactgaattatcacaggtttttggaaaaacacggagtaatttaaactaaaaaaatttagctcgccaagcactcttgtccattttaagacaacatgcttaaacccagaattatatttcttttgtacagttggcatttaaatgtctggtcagagaaaatttgcagtaatttttaaattcccattgatgtgcagaagagtttttttttcctgctacagtcaagttacttctttcttaataaattccatttaaacattttgaatagtagatttagcttatgccttagccagttttgctcattccacatctactggatgcttggaagcatctaaccgagcacgttttcctcttattcacatgccttttaaactatttacttactgcaaattttttatcagaaggggtttatctcccccctctgcctccagtgaccctcactgggtgttagggaaggtttccaggccacagtttgagatttcccttgtggaagatcgtgtctagcgctaggtcccttgttagattttgcctggaaagtgccctgtcctatctcctgcagagcggtgcatcagagagaaaagagagggcataaaacctaaaaagtttggaaattttctttaaatacttcatgcatacctgtgaaaaaatagagtagagcctatctgtggcgactgttgaaaaccagagaaacaaaaaaagactttaatagaaaaccaacttcatttaaatgttggaggcagctgctttgtttggagttttaatcccatgctggtggatgctaattctgtaacattatacagttgccttcttttgggtacaaaggtagaaggggggttttcttttgtgtttttcagtgcaaagtgattctgatcagaaaggcccaaggtttcagctccaagtacctgacatttccatctgaatctactttttttttcaaaggggaaaaaaaaaggtctagtttttcaggaaaagaacctctctacgcaatcctgaaactgatctttagatttactttt

SEQ ID NO: 67759 - DNA, 1043 bp, Homo sapiens
aatatatggaatgatgctcaactttactcataataaggtaaatgcaaattaagtatacccgagatagcccttctttcttgatgaatatgtgaaagtttgatgatatcccctgctagtaagattgcagagaaataggtaaggtactgtcctacatcgtttgaggactacaaagtagttaaactcttatggagagcgatgtagcaatatctaccaaagttatgagtgtataactctttcgctcagctcttcttttagaaatctgcctaatgagggcctgtcattgtagcattatttgtaatagcaaaaaatggaacctatccaaatatctagatatgtgttaagtaaacacctatataacagtgaattagacataattcagttgaactcacagaaatggacacaggtccatagtccctagtcacaatttggaactctggaaagccctgtaaaaccaaaaagttgttttctttttgctttaagttcggctctcaaaatcatttgatgacaaattctcactccatctgaccgaggtgcccattgtgtcttggcacacctaccaggtattcctggtgttttttattgttttgttaatttgggtttaacgtggcagtgtgggaactaccaccacatgtgacttaaagaatagaaaaacagatcgtggacgttttatagtggtagtaaggactaagaattgatgaaaaatagggagacattgcagaggactgaaaatgaagattctaaccatgtttcggttaagtggatttcacaataggaagtaaacagatgccactcattgctttgttgatgatggaaaaagctggcatatatgaagacctgctactgaaggatgtatttagtattaacaaggaagaattcagaaacttaggaagcagtgtggtgaaaaatatctaaaagtatgacaagagttaattgaaaatttactttctagacagctcttttatgcattctcctcaactgtaggttatagtttttaatcatttacttttacttcactgtgaccagaatacagcctttttctttgg

SEQ ID NO: 67760 - DNA, 1065 bp, Homo sapiens
tgggagtgtcagaagaacagatagtcccaattctatggttgtggtggcagcatggatatcttttagggaatttatcttaggtgtcagtgctgaagcaaaaatctctgaagtatgaatccttgaaggagagagatgagctgaaacttgtagctgaaagaggaaactatttgtctgagtacctagtcccctgcattcccatctttaccacttgccatgctgccataggacgcggtagggaatgacactgaaatggaattccatctgggcttgtgccacttagcagcttgatgacctttcctgggcctcagtttctctaactgagctttagcatccccatacatagtatgaagagattggactagagatgatatctaagatcccttctggctctaaagatggcatgtaggggattctgatagcagcagatgtactgcatatgactgttcttaaatcaggaacttgagatatagtgtttctgaaaaatttttgcctggaaaaatagagacatggtaactaattgtcacacatgcttattttttaggggctaagtgatggatcttgtactccgtgttgcagattactatttttttacaccatacgtgtatccagccacatggccagaagatgacatcttccgacaagctattagtcttctgattgtaacaaatgttggtgcttacatcctttatttcttctgtgcaacactgagctattattttgtcttcgatcatgcattaatgaaacatccacaatttttaaaggtaagaaatgtttttacctattttctaacgattaaagtaaaaataacaatatgatatatttctgagatttttagattaagctgattatatgtaaccattaaataaaattttggagaccaaccacaaatgggttagatattttcatgagggttaatccctgctctccttcccttagtttaagcaaatctaactttttaataaaactataagtctagtatcgtatcttgctagatgcatattggagcatttttatgctgatattgatgagtaaataaatgcatacatttatgtaattattttaata

SEQ ID NO: 67761 - DNA, 1050 bp, Homo sapiens
tcacaaactgaaatgtgtttttttaccatgttttgttttttggctagataggggattcaaactcagtagttttaaagttgtttacaatcatttttaaatttcggttgtttgtacttgtcagtgactccaaggactgaacagcaaaaagaaaaaatagagaggattggggatggaagttaattaggaaagaaatggttattccataaatagaagtttagaatgcagattttggaggaaggaaaaaaggtttcagaatttgaaatacttattgcattttctcagtacaaaaggaatgattttcttacatacctatttttatgtatttaaaattttaatagaaacagtttggaggtaagccccttcatgtaaaagagattttaaaaatccagtccagaacagttttatgctagttttgtttaacatggattttgtgatttttaagtattggaaatttcactttcagaatcaagtccgtcgagagattaagtttactgtccaggcattgccatggataagtattcttactgttgcactgttcttgctggagataagaggttacagcaaattacatgatgacctaggagagtttccatatggtaagtaaataacacgagtgtcaggaagagagtagtctaagcacaggttagtttccttaaaaaaacaagtctgcccttttttttttcatcttttaaaataattacaaattattcagttgttttttaatgttctattttcatgtgttcatgtcttgccacatgtgcatttctttagtttttctatcaatctgaaagtctgctgtagatgagattgtgtctggcggaagattggagtgatcagagatgggtccttgcatttgttttctattaattattgaattcaaccttctaaaaaaaacttgagtagcttatgtcattgctgaaagttaaaaacagatttttaaaatgcattattctgcttcttagaaactgtaactcttctggcatacaaccacccacttttctgtgcctgtatacttcattgtttacattacacaaatgaagtcctgaggtg

SEQ ID NO: 67762 - DNA, 2773 bp, Homo sapiens
gattatgagttaaaataaagggagagaggacattttaggttcttgaacccctatgatgaaagatacagaggtaaaacttccaagacagtgggaggacattgagtaaacctgcctggttagagtagaaatacaggagtgatgaggttggaaagatccgaaaggggtggagtatggaataaatgctaaatttaaagtatttagtggaaagtatattttaagcagggagataatgtgtaaagatgggttttaggaagattaatatgaaggaagtgatgattcccagagatttaaataataaagatgtcttaggagtatcctgtctcacaaatatctttatagtttaattaagaagtactttaggtagaacatttcaagtacttatgcgagggaaatgaggaaatgaccagattccaagaagccaagagagattagtttataatatactgaattagccagaacagatcatttataatgtttgagtctaggatcccattttgcactcagatggacatgtgaaaagtgaactctaatcccaggagctgagttttgattcttctgtttcccgttttcttttctaggattgtttgaacttgtcgttagtataatatctttcctctttttcactgacatgttcatctactggattcacagaggccttcatcatagactggtatataaggtaaagtcatttgtggtgaaaagagaaaaaaggttacacatttcagcaatgtatgattataaattctgttctctatttccaagaatttcctctacccatattaaatgtctaagtagccataatcataacaggtacagggtgcattttgttcatattcttctttatgggtctaaggggctgtcttaaaattcgtctgttccggtaacaggtacacatggacttacagagggaacaatagacattagagactccagaaggtgggaggatgggagaggagtgagggatgagacgctccctattgggtacaatgtgcactcttcaggtgctaggtacactaaaagccagacttcaccactgtgcagtatatccatggaacaccactgcacttgtactcataaatccatataaaattatactgttttagggcgaagaaggacattttatagaataaataattttgctgatctctacaggatttgttaggttgtttccaacatgagtgtgagaagctaagttgaatgttgcacggggtaaagtttgcagtgctaattgtgtccttttctcctgcagcgcctacataaacctcaccatatttggaagattcctactccatttgcaagtcatgcttttcaccctattgatggctttcttcagagtctaccttaccatatatacccttttatctttccattacacaaggtggtttatttaagtctgtacatcttggttaatatctggacaatttccattcatgacggtgattttcgtgtcccccaaatcttacagccatttattaatggctcagctcatcatacagaccaccatatgttctttgactataattatggacaatatttcactttgtgggataggattggcggctcattcaaaaatccttcatcctttgaggggaagggaccgctcagttatgtgaaggagatgacagagggaaagcgcagcagccattcaggaaatggctgtaagaatgaaaaattattcaatggagagtttacaaagactgaatagattattgcccagttattcttaagtaaggacaaagaaggaaatatcatcgtatttcttttttttaataaggaaaaaataatatccatacagtcaagatacatagtaaatggtatcatttggaaatcagcatcgtgggcactgctgaggaatgatcctagtggtaggtcagaagaagatgctgtgaacaccaggactttaatcttatgcttaaaatgccagatgttgttcgggggacaacttgtatctttctagcagcagatctgtagtttgtatagcctcaacaacaattttaaataagatggagaataaattattgaggggactaggctatatgcatttgccttcatccacccatgtttattaagaatcattgtgcttaataataccaagactaagcaccataaccaagaaatactaatgtaaagattgtttcttgtttcaggaatggttaattcttcaacgttggtatgataatgataacttgttttgacttgaataaagtactacatcagtgtggaaaaaaattctgatacattagcagctatgtaaatgacctaattgatagcaggtgtaataagactatcgtcttcctacacataggaggctcattctctggacacactatcacctattacattttactgattaacaaataaattggaatttaaaaatatcgatatcaccatgatttaatccagatctgggattatgtagctaaacattgtgatgattattatttaaaaccattatttaataagagtaaaaatatgtgaatctggatatatttaaaaaaagaaatttgatgcccagataatatattaggcactactgattttttagttaaattgatgcactacacttttgatgtttgaagttacaaacctgtaatttttttgtaaaggaaataattgccaaatacctaggcccattgctgacgattagttctaaaatcttattcctcctcttctcccctcacttttccctacttcctctgcaaaaagatttaacaaatacattcataaggaaatgtgtgttgtaacaaatatattgcaaaaacatagtttgtaa

SEQ ID NO: 67763 - DNA, 1071 bp, Homo sapiens
attacccagttgaagatactttgttaaggcagtacaaatggactaagacaagggggaagaaatttgcattcctgatcttcccaacttcttcaaattcacaacacttgaatgacagtcttatttcagcacttactgctatcacctattacttttatgtgtgtcttacctatttgagatgccagattccttggaagtagagaccgtgtctgaatcatcattgtattaaaccactcatccttaacaaatgcccaagccatggttaaagttcaataaatactttgttgaatttattaataaaatggcagaaatgtcattctcttccatatatgtttaataaatccctgataggtgctaagcactgcactaggtaaaaattctcttctgatgctgtctttttggccaaccatttttttatcatttattcattagctgacatttgctaagtgctttggaggggtcaaaaggggaagtaatgagaaatcaaagatggtccctacatcaaggataaactatctttttttagtcactcaaagtcataaccctttggaaacaaaacccaccagtaccccagattttgaccacagatgaatcagtactacaaggactggttagagggttgaatgaatctgtatactcagcacttaacacagcactctgggtaaaagaaaaaagatcctcaaagatattagttggttacatcaagaaaggacaaacttaggttaatctataacttcatctcagaggaacaggaactttggagataaacagggctctgccacttgcaagttgcaccatccctggtttctccatctgtaaattgattaaaacactgcctatctaataagattaaataagttagaagcattcagttaaatgtcaactgaaactattgttcatgtaaattgtgcttgatgctttttctttctagattcaatgattattgtcattttacctccataggccctcaatagaaatcagttgcagagggcagaagcctagatattttcaccttaaaattggagggtgaaagacattgaggtgaagtagagatagagggtacacagaaaaatc

SEQ ID NO: 67764 - DNA, 1004 bp, Homo sapiens
atttgtaaattccaattatcctgaacatttaataccatttacatattttattaatcacattttcttaaacatttgataagagatttaatattttgatccaactaccaaaaaagcagacttgtgtacttgacagatttttctaaacacttcacaactcacgattcaaacaaagacaaaatagcatatcaaaagttaatcactcagttggaaagcactcataccataggcttttattcatttcttgaataattttgttatatcttcctcttttaggctgcaatgagctataattgcactactgcactccacgctgggtgacagagcaagaccctatctctaaaaataaaaaagtatatatatataaaaatatcttcctctattataatttaactcattaagccatttatttagatgtaaacttgcccccctgacatgtggtatgaaacaaatagaaacctagaaatttagtgcatattcaaatattaagacagacactggtgtggtgacttttgtctgtcgcttcattgggacgttttttctttctgatcaacttaatgaaattataatttactataattaagtgtagccatttttactgtagagttcaatgatctttgatgaacgtgtacacccatgtaaccaccacccccaatcaaagtaaagaacattttcttaccagaataaatttcctctccgtttgcagtcattctccccagccctaggtcaccactgatccaccttctgttactggaaggttagttttcttccctgatttagaatttcatataaattaaatcagatagtatatactcttgtgtttagtttctttagcttaacatgtttagagatatttgctgttgcctgtgtctgtagctttttgttttcattgctgaatagtatttcattgtaatataccacagttggtttatgtatttgctgatgaatatttgtgttatttccagcgtgggattattatgaataaagttgctacaaacatttgtata

SEQ ID NO: 67765 - DNA, 1043 bp, Homo sapiens
cttttaggaaatttacaatttaaggaggagagcaagcagatgcagatacaggcatgtcaatgtaccaggatgggaaccaggaaacatggtcacaagaaaccagccacaactctacaatggtgtgataacgggctgtgtgacatgcagcgcatgggagatggagagataaggggtggtgggctcagacactgtccagcttcttgccctctgacctttgagtgaggttaagaggacactggcagcacaggttagggctggaagcagaagctgcctgaaggaagcaggcctagaggcgatgttaaggccaccaccttcagggagaagagaagggaaggctttctaggggaatacttgcatctgagaaagagccctgtgctggagtcaatgtcggtcctttttcctctgcttcgctaatgtcttgggtaaactaggcttggttattttgaccattttcctcctcagtttctctaaggtggggagaccggcttctgccatgattacttaaaggcacatttatgatactgaaatgtgattgtaggggtgaaaataatttgctggcagatatcaggacttttctgcccatgttcaaggctcacgcctgtaatcccagcactgtgggaggccgaggcgggtggatcacttgaggtcaggagttcgaaaccagcctggtccacatggggaaaccccgtctctactaaaactacaaaaattcactgggcgtggtggcagatgcctgtagtcctggctactcaagaggctgaggcaggagaatcgcttgaaccccggaggcggaggttgcagtgagccgagatcgcgccattgcactccagcctgggggacagagtgagactccatctaaaaaaaaaaaaaaaaaaggcaaagtttagaagttgagccccttcttaaaggccaggtccaagaagagggattccctaattcatgccacactgaatttcctcctgatttctcataagctctgtctgtctgcgccatcatacctgctttttcctctgcctgaaatgatcttccccaactcttgtcct

SEQ ID NO: 67766 - DNA, 1039 bp, Homo sapiens
attacattgacctttcctccatttatttggatttaaataaatgtgatggaaagtaaaagagagctcactgcatttttggtttgaatattcagggattagtatttctccagaggtggtctgggctgtgggggtgaggcattctctgttgatgagcatgggactttcctatgcattttctaggtatgccagacactgttggcagatggtatagtcagtctagccacgtacatgcaaaaatcaatttccctcaatttaaaatgagccacagttaatttcgacctaatttattggcttatcgacctgtgaaccctgggccttcgaagaagtggcatgggcggccttcaagcgctgaagtggctgatgaagctaaaatccagaaaaggcagggtgggctgctgagcaagatcaagatttgagtttcctcctgtgttattgtgagatgctcagttttttttaactgtaacatgaccaatgctttgtgcattttatggtgggttccgtaaaaataggactgcgtaacgatcacaagtacactagtgtgttaaaaaataattacaaagttctgttatccactgggtaactgtttattataatggtaacatccatgcccatagcactgctactagccaagagctggaagatcctatcttcctggccgcgtcctggaccctccgatgtggcactgttcaatagatctttctgtgatagtgatgttttctatctgtgctgttcaccatgttcactagtcagatctggccattgagcaggtgaaatgtggcaagtgtgactgaagacttgaagtgtctttcatttaattttaacgaatttaaagttgaaatagccacatgtggctcttggctactgtgtagacagcacaagctttgacaaggcctcttcttcccacctgtaggcaacctctgcttcacccaagagagaagttcctgcaaagacctgctcgtgtaggcagggcaaacagggcaataaaagcaagagtggagggcttgggtctagaccctaggtattggtggctgctgactgc

SEQ ID NO: 67767 - DNA, 1029 bp, Homo sapiens
tcctgcataagcctcaacaactatacagatttcggtggttttattggaaacttctcatcattggcttagacttgcaaccctaattcccccagaagtgctctgtgtgagctaacaggtaagaaatgattaaagagcctacagggtgcctggcacctagcagacctcagtgcctacttcatccgcaagtgaacgcatgagtaatcagtcccttcatccaagccattgacttcctcccctctatttataacaacccagaacttgaggactgggtggtagcaggtccttcccctcactctgaataataggaggtgaatcatttcacctctccgggttgccagggcacgcagggggctgagggacaacacttgtggggtgatatggacttgttcgatgaagatgccgaggcgagtcaaggtgtgggtggcatccactgttgtgagctggcggtggatgctagccttgggcctgcggctgtttctccagctggggacagggaggcctgtgcggatgctgtggctctgcagatgccgctgacagcactttgaaggattggtttggccagagacccagtccacagcctgcctcctgtatgactcattctagctgcatattttggtagcatgagggcttgagatgagataaaaggagcacttcttaagagtggaagctcctaggttcttgattagcacttgagaaatataatgttctctgcaggtcctagaggccttaaaaaaatttgagtatatttcacattacataaaattagccattttaaagtgaacagttcagtgaacttaatatcgccgcaatgttgtgctaccatgatttccaaaacatttccatcgctctgaaataaaaccccttacccattaagcagtgattccctcctctccaatctcccagcccctcgtaaccactaatcagctttctctccctatggatttacctattcgggacatttcatataaatggtgtcatgcaatcatgcaatatgtgaccttttgtatctggcttctttcacttagcata

SEQ ID NO: 67768 - DNA, 1049 bp, Homo sapiens
aaagaaaagaggactgcatgggggccaggccgatagtggccctgatgacttctctcacattacacctgctggaactcagtcccaggccacaccttctgccccacagcctggaccagagtctgcggtgtcctcaggaagcagaggaaagagattgagagagtagctagtcctgtttttgtgatgtccttacttggcagaatagaagttgccaaccagtcctctgttggccttcctcatttttattttatcggtttaccaaatctaaaagtctgagaactaaaatatttccttatttgagacctttcaaaaataattttgaaaagcttcacaatgatacttctctcatttctcattaccagctgaaagtgaatgacagtaccaccaagccagaaaaaacatagttggaacagaagtttgaaaagcatgtgatctttctggcctatgaattttttttgaacaagggcaatgtttccatgctttggtttaaaatcttaccagtgcatgtcatacatagagtaaggatcagagtaaccagagattggtatcataaaggatgaaaataatcaaaggaattggttatgccaatgagagcccaagaagcttttctacaatctctttacatccaaaatagcaggggactcatttctttgtggggaagttgagtgtgacagaatatgcatgaggtgggaggggaagaggccaccttggcccaaatgctttagatggcagaatcttcatcatttctgcttgacaaaggaggaaagagtcttgatttagaatgtgtgtggccatcacttatcgtgggtcctaattcctacattgatctctttcaggttagtctgaatgattcccacaatcagatggtggtgcactgggctggagagaaaagcaacgtgatcgtggccttggcccgagatagcctggcattggcgaggcccaagagcagtgatgtaagtgttgtgttggctctgggcacaccttggtgccatcaacatgcccttttctggtccactgggattatcatactggaaaaagtagtgggtaattgg

SEQ ID NO: 67769 - DNA, 1035 bp, Homo sapiens
tctcccatttttcttgaagtctgtggccttgttggacaatatatgtcatttccacttttgatggagatgcacattcaagaaacattctcccatatcttaatttgaacatactaatggatacttggttcctgtgttggagagacgtggggaaggggaagggcctttggggaccgggagaagcatgcttccgaggagcattgactgtcagctccaggctctggttgccgtgcaggatgctgggcccagtgttgccacatcttctggttttccagaggaacccagaggtctggagtttcatgtgaaaactgctgagtcttacaagttggcagccagtgtatagtttttacagacaccgcgtgagccaggtaaaacacatgtaagggccaaagctcgcccaacggctggtcccaggtctgcggcctgtgctctggactcctccttgtgggtgagaggagcagcccctgcctcagcctggggtctgacactgtggcagcgcgaggctgcagacggaacaccatgctttacagcttcggtcaccctgcattctggccgggggaaccttctgatgaatttgccagcactttcacactagccttaaggatacatttataattcttgaatgcggatttggtctctgtgaggtccctctctgtatatccactgtctgggttgggtgtgttgagaagcaggtgttgggaagttgtctcagggactgtttccagggagttgaattagggcagccacagaagggaagacagaagggctggctgtcaggatgcatgactttgcccggggtgggttctgagccatgctgtgtgggagaccaccgctactgatggccagtctgggtgtagtgctctggggcagggctagacttgtttggggcaatgactttggcccatttataaatatgatcaggttttgcaagtaaaagctgtggccaccacagacagctgtgtctgaatgcctttggtggccgggtgtggtggcctgctcccatagccccagctactcagcaggctaaggcaggaggat

SEQ ID NO: 67770 - DNA, 1029 bp, Homo sapiens
atctggtaacatctgtcatttcctatcaggcacctaatgggagccacgttcaggatccaggatgggatgtttgaaagagatctttctgcttgggctcggtggctcatgcctgtaatcccagcactttgggaggccaaggcaggcggatcacaaggtcaagagattgagaccatcctggccaacatggtgaaaccctgtctctgctaaaaatacaaaaaaaaattagctgggcgtggtggcaggtgcctgtaatcccagctacttgggaggctgaggcaagagaatcgcttgaacccgggaggcagaggttgcagtgagctgagatcgcaccatggcactgcagcccgggcaaaaagagtgaaactcagtctcaaaaaaaaaaaaaaaaaaaagaaagatctttctgccagtttctcaccaactctttctttttcatctccttttctctgtattccaggtgtacgtgtcttacgactatggaaaatcattcaagaaaatttcagacaagttaaactttggcttgggaaataggagtgaagctgttatcgcccagttctaccacagccctgcggacaacaagcgggtaaggaagtggccatccctcctgtcccgacttcatgggactgggttttggaaagattgccgcacttaagggggtgctaggagatggcgctctctgtgatctttgtagcatgactggtggctagtgagtttttgtgctaacctgggcatttgtgacagactgctgttctcagggttggtctctgcacaatcaggcaggccaaggactggtcaggcaggatttctagacaaacaatgacaggttaaaccacagaaaatcagccaactcttgtaataccttgcccgacttgcagatggcaaaaatgtttcccaggtacactgagaataaccttgcaatcaaattcatgttttctaggatactatcagtgtgtctgcttgcgtgcttatgcgtgcttgtatgcgtgtgtgtgcatgtacgtgcttgtgtgcgtgtgagtacctgtgtgc

SEQ ID NO: 67771 - DNA, 1302 bp, Homo sapiens
gcaggcaggagacttgggacgtggggagggagaattgggttttgttgggaaagttttgaagaactcaagttttgcgtatagtaaaatatcttggcccatcaaaagtggagatggtgagaaggtaaacaaaaatggaatctctgtaagaattgagggttagactgtagatttgaaagtcatgccatgcttcttcttttgtttttgagacagggtctcacttcatcacccaggctggagtgcagtggtgtgatgtcggctcattgcaacctctgtctcccaggttcaagcgattcttgcacctcagcctcctgagtagctggaattataggtgcacaccaccatgcccagctaattttttgtatttttagtagagatggggttttgccatgttggccaggctggtctcgaacccctgacctgaagtgatctgcccaccttggcctcccaaagtggtgggattacaggcatgagccaccccgcccggccccatgcttgttcttaagggcggtggttgaagctttgtgaaaggataagccaaagttagcagcaaaggatggaagaagaatgaggttatatgagcgtagggagtggggaggaccaaggagccagcagaggagaatcaaggcttgagatgatcaggggctggggatggagaggtgaaatgagagggtgctgtggattaggagagaaggcacacaaatgagttaaatggtacaaggtaagacctatgaatgaagttcaggaaatgttgccgttttgttaaaagagctgttaaggggtgagatgtgaacatgtgaaccagtcagatattgacgtcaatgctgcctagtcctgcgtcaccttgggcagtaaactactctcagtctcagtgtcctcattattaaaagagtgtataacggtaatatccaaagcattgagtcactgtgaaccctgaatgagatagggcatgccaaacttttagctcagtgcctggcatataggaagtgctcttgaaaacgtttagctattaccatggacaataatacattctatgacggggtgcgtgatttttggattctccaatgtgagactgcaggaagccatggaacagatttctggggaaatcttttcaaattgaggatgcttccttccccaataacctaggtggtttgggagcaggaagatggactatgttatttctggggaatacttttatgccagaaattatgatgatcctcttaggatcataattgttttttataacattgcattttattgtagtttttgctttcaaaacatttactaccttttccagtttgattt

SEQ ID NO: 67772 - DNA, 1006 bp, Homo sapiens
atttgttcataacattttcttgaatgtctgttaaatataaaacctactagattcttaagggtataagaaattgaataatttatggatatagttattaaggagaggtaaggaaagacatttcaggtacgtaacacacattgtgaaagaggcacagaggtaacagacatagtatgagaagctagagagaggatttatccttccagatgggaggatcataaacagctgtgtagaggaggtggcccttgatccaggatgtgcacaacaggtaggatgtccctgtgtggaggtgtggaggacaggaattccaggcagaggaacaaagtgacttgccaaaggcacagggatgcgccaatgtggtgcttgggtagagaacatgaactcttaattttggacagtgtattgggtgaagttttgaaagggaagttggtattagaatctgcatcgcttgataaaggaatttgggctacattctgaaagcaatgaggtacccctgtagttttgtgagaagaggagtgaaataaacaggctgtacttcaagaagtacttctagaagtaaatagtaatatacttatcgtaatttactattacagtgataaagtagtataggatcttgaattatatgaatttgtacatgtgcaggcaaatgtgtaggacagatttctaggagtgggtatgctgggtcagtgggtttatctaacagctatccattcactcacatggatgactgatagatattgcaaacttgacccctcgcaaattgactcttgatcttcaccaccccaaatcagctccacctataacttttctcatttgctcaggccaaaatctttggagtcatcgttgatttcacatttgttttatgctttacattcattctatcaggaaatcctattggcttcaccttcagtatatatctagaatcttctactcaggtaccacttctagtgccagcctccagtgtcattgctcattagtctcccaactagtctttctgcgtttactcttg

SEQ ID NO: 67773 - DNA, 1033 bp, Homo sapiens
gggagttaatgctctaagaaaagcagtaattaagcttccagctgtcagtaagtagcttaactctcagcctttgggaaaatcttccccttgatttgatgtgttggagccagatgccgaaatggtgggcttgctcattcaaaaccagagttgattacttaacaggacttgtcttgaaattgtattgagttcagtctttatcaccctggttgtaaaggaaaaaaccaggcccagtcaagggcaggtggggctcttatttctgggaggctactagcttgctttcctgatggtgcccttcccttgttgactcagggtctgttgaaggcctttgctaactgggaggttactctgttgtctttcactgttaaccttagagactgaaatcagacgtaatcttttccttcagattctcatttacttctataattggtagcaggccaggtggaagtaggtcaaccttcttagtaggattttagggtcaagagaggatctccccagcaggaaaagcagggagtaaggacagaatgagaagagagatgtgggtggctaaaggctagaggcatttccagttacataccttgcaaaatgttctgaaaaaccattagcctatggcagtttttcttgtcaggccatttgcattgacccatagacattggttcagtgccttcctgccttgactgtttctttatctttctcttaaacacacatgcacaaatatgtacagcagcccagaaacataagcatcctcgaatggctttgggcagggatggggtgatgggaacacacagataagaaatcaggcccaagcactggtgccttgtgacatcagttggacagtcttgagttttcagtatggtctaaaaccttgtcttcagttctccagggtttataggccttttctgccttaatgccttgggcctggagttattgtgtgattttaattctgaactctaaaacacattgactgactgcctggtttgtcctcctttttgcttgaaccagggcaggatggatagctgttgtgcatttctcttaa

SEQ ID NO: 67774 - DNA, 1128 bp, Homo sapiens
tatattaggttgctggtaatagactagaaataaaaattgcttaaccaagtcaggagtttagttttctcccccttgctgcctggaggtaggctgtcttgggctggtatgttggtgtcctgatgttcttggggatccaggtttctgtcttaatgttctgccatcctgactagtgatttccattctcaagattacctcatggttcaagacatccatactagccttcaagtccttattgcagttaagaagaataaggaaagacagcaagtaggacctcttcccaccaattctgtctgtttaggcagccttctcagaaatccagcacgaaacttctgtttttatctcattgactagtacttagtcacgtgacttcccataggtgcaaaaatggtagagaagtgcagtcatttattctgggtggtgtcagagtcccactgctcaggaggaaagggataatgggtgttgggggtaggtgtagcagtgtctgtcactatgtacatatgcttgcatgtggtggcacagtacatttctgaaaggatgcacaagagctgttagccactgggcactctgcagggtagagtgggaggagggatgtggagatcagagcagagcttctgcatttaccttatacccatctgtgctgttggatattttccatgagtatgctttgctttttaataatagtgataaaaaacaaaccaacccaaaacctatggtttattaagaaaaatctcagagccttacaatacatcttataatcactagtgtgccatagtttaattgttaatatatttcttggtggaagtaaaacaatacagtaactctttaaaaatccattaagaatgaacctgaattgtccaggtttaggaataattctccaagaaggtagtgggatcgatgcattttgagattttttttttgatgattgtagtattctgtgatttttgcatttatgaggtaagactgacctgtgaaatatattcttaatactcaggcctcccagcagcaatcgttaagtatttttaactaatgatgggcctgggtgtcattgagaaatcactctttttaaagttatactcacagttggaagtcgtaaaaaacaaagcataaaaatgtatatttcattgatat

SEQ ID NO: 67775 - DNA, 1022 bp, Homo sapiens
atatgaataaactgaaagctagagagatttctatcattttctcagttggtagagctagctcttaatctatgcttttatacacatttccaagattcttgctgtgacttaaaaatctctaaaatgcaatgtgatgtggtcaacatcatgttgaatactctaccaatgaatatgtattctagcaaaagaccttcctcaatgagattattcagagatggaaaaccagaatcaatgaagattctctcaagtcttggtgcaaattaaaaccttgtgactggagcatccttgtaatctaaaaataggagtagaaagaagaaaagaacatgttttgtgtgcatggtgtgtggctgatctcaccctttagtggtttgggggccgtaggctcctccctgcgtgtttcttcagcctcatcacacaatcctctttctatctcttactctgttgaagtgttggcagcctccaaaaacctcctctagtccaagttctaccatcataccatttccttatctaatatccatggagtgtctagtgtctgttgcaaaccgggtatctaagatgaagcagtacaacccaaactgcccagtgatggcagacattgcaaaaacatgaatttgcaatcacagtctctattttgtgtttccagtagaactggaagaatctgactcttctatttttatttttgctgcttttgaatgactgtaatgtggcaccattaatttttttttctcctcttccttggcagcatctcttgggcagtgaacagcagtcttctgtccagctctgggtctcctttggccggaagcccatgagagcagcccagtttgtcacaagacatcctattaatgtgagtggggtctgcttgaggatgggaagaagtatcattgtctttatgcagaggtcagaggaaggttgttgcagggatggcctgctggagtggatattttatggcgcctccctgaagtcaggtctctagagagtgcagctatgctttgggcatcgtggtctgtggttcccacttcactgaa

SEQ ID NO: 67776 - DNA, 1028 bp, Homo sapiens
agtggcccattattttgtgccccatttgccagtaaggggcccgctaagctgcagatctgcctcaggttctccaaagggaaagtcgccaaagcttctttgccaaggttagggagcttcccgtgggctttaggccaacattcatcgctagaacatttgaaagtcattgcttccgtgtgtatagtaaaagcccacagggcacatttgttttttgacgtatcttttttgacttttgattccaaaggaatattacatcgcagatgcctccgaggaccaggtgtttgtgtgtgtcagccacagtaacaaccgcaccaatttatacatctcagaggcagaggggctgaagttctccctgtccttggagaacgtgctctattacagcccaggaggggccggcagtgacaccttggtgaggtaaggagactgtgagtccttctcctgccttcttaggccaacacaaccattagcttctctctggttctgtggttttcaacattagctgcccatgtggatacacccggggagctttcggaaacccgatgcctggctcacgtgcgcagagatcaccatgggatgggtttggggtgtggccaggttatgaggatcttaagaagcgccctaggtgattcttacgtgcagccaagtctgagaactacagctctaggtaacatttagggtccgagctactgtgttaatcacttccttgagctgcttttgttcagttttctggttttgtggtttctgagcagtgaaaaacagcacttggtaaatatcagtcagtgagagctggcatatgcggccagtggatcaggttaattgatgtcattactctttttaagagataatcggacggtgttttgtaaagaaaggcaccaacgtcattgatcctttgtctgtaaatcatgtgtttagagctgttttgtagtccagcagtgggcggtctcggagcaccacacccatcaaggggtggtggaggagttgggggtttgggagggatgaattggttcttaagatccgttcagggccattta

SEQ ID NO: 67777 - DNA, 1048 bp, Homo sapiens
ttgtgtggagatggttgatggaggacagcgtttctcggctttattgtgtagccggtggcttagaacccctgaagtaaagggcaagcttccagtcttttttctttttctttttttttttttttgagttggagtctcgctctgtcaccaggctggagtgcagtggcacgatctcagctcactgcaacctccgcctcccgggttcaagcgattctcctgcctcagcctcccaagtagctgggactacaggcacgtgccaccatgcccagctaatttttgtattattaatagagatggggtttcactatgttggccaggatggtctcgatctcttgaccttgtgatctgcccccttcagcctcccaaagtgctgggattacaggtgtgagccaccatgcccggccaagcttccagtcttaacagccacctatgaaccctggttacaatttctcagagatccgctctatttgtaatgcgtgtatcattttagcgcaaaaccacttccctgtggctgtggcatcagggtatccgcatggtagataaagcctgggaaacccatattctctctctctttttttttttttgagacggagtctcgctctgtcgcccaggctggttggagtgcagtggcgcgatctcggctcactgcaagctccgcgtcccgggttcatgccgtccatattctcttaagaatataaccccaagctttctagagccatccttgctatatgtacagtttctttaggaaagaatcgacaggttctgctgagcttcctgacagaaaaccctgtgggcttctatctgatcagggtgttggataattaggttgtaagtacctggagaggggctgtgtaaccctgagctaggttcctacagattgggttgaattttaagcctcagcactgttattaatgtcttgcaagtctgacttaatgatttctgtttttgaaggctcactggaggatttggagtcaatttcgttagtgatgtaatagatgtgactctttcgtcaacttttgtatgttatattcatcattctaaaccccctgtt

SEQ ID NO: 67778 - DNA, 1033 bp, Homo sapiens
acaagccttttgaccctaaaagttgaaaagaaacaaattttttaaaatagcagattatctggctggacatggtggctcatgcctgtaatcccagcactttgggaggccaaggcaggtgcatcacttgagctgaggagttcaagaccagcctcggcaacatggcgaaaccccatctctaccaaaaaataaaaaaaattagctgggcatagtggcacacacctgtagtcccagctacttgggaggctgaggtgtgaggatcattgaggatcatctgagtctgggaggttgaggctgcagtgagccatgattgcaccactgcactcctgcctgggcagcagtaagactgtctccaaaaaaaaaggaatgaagttctaacaatgtgctataatgtggatgaaccttgaaagcattatgctaagtgaaagtaaccagatacaaaagaccacatattgcagattccatttatatgaaatgtctagataggccaattcataaacacatggagcagatgagtggtttccagggcttgggaagggaagaggaaatggagagtgactgccagtgggtatgaggtttccttttggaatgatgaaatgttctggaactagatagtaatgatagttgcacaacattgtgaatgtgcttaatgccacaaaattgtatacttttaaatggtcaaattttatgttatttacaataacaagcaaataccaattcaggttcatagctgtttattttcatattgtaggtattttgcaaatgaaccatttgctgacttccaccgagtggaaggattgcaaggagtctacattgctactctgattaatggttctatgaatgaggagaacatgagatcggtcatcacctttgacaaagggggaacctgggagtttcttcaggctccagccttcacgggatatggagagaaaatcaattgtgaggtattgatgctttaatcttcttttgctttttaatataaaggaaagagccctgctctgtggtagtttcctatgtctagtatttattgaaaaaa

SEQ ID NO: 67779 - DNA, 1234 bp, Homo sapiens
ggtcaggctttagttaaatcgaattaatggtatcattcaaattcagctttctgtttccctgactaatcagtttatttatgaactgtcgttcatcagctttaggtataggtttcttcttctgagtttaggtggtggaaggaatgtataggaaatgggtaagtctgattacctgaggttacagaaactcttcaatgaatagacttccttgcaggcagagaagcatgagtcagaaagaggagtgagcaaataaatatttctttgagacccagcctaatttgttccagttttcattggtcaaactgagactctagcaagacagatacttgttagagatccttttatgacaaaaataagtagcaaataatccagcaaaccttgctaccatttttacctgaccataaccacataagcacatagtcctcctgtgcagaaccctggccacatctgagtaacattgaacaagctctttctgaccaggagaactgagtgtgaccatatggcaaagggtgttgtcctgattgcttgcagagctatgaaaatctggacatgagtgatggaggccagactgaatcgcttgaagccttgccctgtatacctacacctttgtgcaaatgtaaaatacataggaaaaaatttagtgctaatcctttgctttttatatctcattgatactgtacatcaggggagcttttccatgagacttatgacttctgattcttggtctttcttatgacagaattgctggaatcatgtttgaaatatgtctctgacttagaaagtgaatatgacaaaatcatttcatttctctttagttctgagtcacttgagaggatctctgagtgataggatgagatgatgactttcccatctacttgagttgacactgatttctaattgttattccctgagagtctcagaaggcctttttaagttgtaattgttctcttcttccacgggacatttatgtgggttcagatgatcctctctgtctggggggtgtggggacagctgggctgtgagtctggtttcccctgggccaggcctccttgccccgtgtcagctgcactcccctcacacaggccgcagggtttacagggaacgctaggcatggtatcatgtgctgacactgcctgaaactttggttgtatagctttcccagggctgttcccttcatctggctcagcgcctcagtcagctcctcaacctccagctccggagaatgcccatcctgtcc

SEQ ID NO: 67780 - DNA, 1046 bp, Homo sapiens
tctaagattatgagttctatgagggcaaagacaatgtctgttttactgacttctttatccttaggacctaagagtgcctggcatggagtgggggctcagggcatatatgctgcatgtatcagcaaattatagcgtagtggtattagccctgaaatgggctgctattattattattattttgtatattattgaagttgagatgaagcctgtccttgctgggctatgttgtataggcactttcgtctcactctgtgctatggaagtagactctctttttgccttaaggttgtataactaatatcgatgctgattataccaattcctaagacagggctagttccctagttccaaaatgctaattcatcttcatctttgggcattagagaatttccaaacttgtaaaaaaaaaaaaaagttgttgccagcctcccattgattaaggccaaggaagtgcgtttggtctcgttctgtaggggttgctttcaggggtgaccctctagttatgccaggagccaccagggtaaaacccaacagatcacttgacaggatgagcaccttgtcatcgagcagccccgcaggctgggcagccggaacagcacgtcgggagtgatgtggagttctcagaacagctagcagacatagttcccatccacgtggtgctttactgggaatgcaccatgctcaccttgatatttgaataggtaatatgtaaagcagtaataaaaataccaacattcatttggcaccttgcagttcacagaggcctgtcacaagccttctctcactgtggcagggcttcccatccctcccgaggagagagatgaggctcagacactgtgtactgtatgtggtgaacgcaaatatgtgttcagatgaggcagattgttaaggccattgtagtcagagtgcaaacagtttgaatggaaattttcgggttgtccttgtgcagctcccaagggaagattaagcagctgctttcccctttcgtggagctggacgctccctttgaaatggggtatcctcttctctgcgaataggcctgtggt

SEQ ID NO: 67781 - DNA, 1030 bp, Homo sapiens
ttgctttcgtttacttttcagcatccactggtagttgttttttgtccagagttttcagctgtaattagcaggaaggatgggctatagagggctaatactgtcatagtagaactgaaaccccagttacttaatttttaatcaagggttggtgggagtcatagatttggatttgagtcctacctctgctgttcacagtctaccattttaatattaagcccgtgtttcttcatttgggaaaaaaattgagatactagaacttgctccacctgtccctaggattgtgtggaacagatgagataatggatgtcaatgtcttctgtaaacggaaaaattgttttcaagtggttgtcattgctgttatgtctatgtgcacgtgtgtgcatgcctgtgggcatgtgtacatggtttctgcacaattacctccacagcagtggtgtcaccatggatttttcctcttcaggcacttcctggacctcactactacacatggggagaccacggcggaatcatcacggctattgcccagggcatggaaaccaacgagctaaagtaagtgtctctgatgaggccttttaacatcaaactttctcccagaaatttacgtctgtgattataattggattatctctctatagcactatgttgttgacagcacaatttgtgatctctggatatgagttaaacttttttttttttttttgagatggagtcttgctctctcccccaggcaggaatacaatggtgcgatctcagctcactgcaacctccacctcctgggttgaagcgattctcctgcctcagcctcctgagtctgggattacaggcacctgccaccacgtccggctaatttttgtaattttagtagagacacggttttaccatgttgatcaggctagtctcgaacccctgacctcaggtgatccacctgcttcggcctcccaaaatgcttggattacaggtgtgagccactgtgcccaccccgatttaaactctttatctcccaaatgggaatataagaacctgtcctttc

SEQ ID NO: 67782 - DNA, 1090 bp, Homo sapiens
ctgccagaaaatcataaagccttccccagacattttgaaatgacttgggggttgtagactttgggggattatggtcactgtagcattcctctatttgtataggtttcatttggaggtgtctgtttgaatagttcaaataaagcatttgaaaatacgaaaatacatacaagcctcctattgacaggtgcatgtgtcccacataacaacctgagcttggcctaaatctgtgtagccacctggcatttactcagtgtgttgttcacagaggtattttgcttcttcccctgctgctctgaaaagcaagaaataatattcaagttagttgatattctcagactacaatggtgatttactgtgacacccatgcacaaggacaggtggcttctgacaagactggatatctgttgctgggctagggcctcaggccccttctaagtttggcctccccagtcacagagatctcttttcctttatgactcgtagcatgtataggctgtcccattcatttggcattgatcatattctgactccttatgttagttacctttacatgatgcgcctgaattctgcaactcgttagtaaggtctttgtaggtaaatatttctgctcgatgtaggttaccaggcacttagcaaatatttgattgaaataggtcatgcatacttaatcatccaagattgcttatggtttttttttttttaactgatttataaaactagaggagaccgagctagtgtgccaattgcacagctccaaggggaccactgccactgtgctccatgtcaatgacaacccctagagcacagatgtgagtggaggctccctggatgtgtgcaacccggtagtacccaagagacaccagagatgacctaatctactttccttagttttcacatgagggaataagagattagtcaggagttaatgcccacactggaacttgagcatatttctgttaggaatcatttcaggtccattacacagacaactgtcgaacatctacaatgaagcggatgctgtgctggataccaaggatgcaaaggcaagtggggcactgatcgggagctgcctgtgcccactgtggctctg

SEQ ID NO: 67783 - DNA, 1010 bp, Homo sapiens
ctggccccggcatttattatattatttatacaattagccttttaccctttgcaaatttggcagattcgccttccagatccctatccagatcattgacagatgtgttgagctctgtgagaactagaagtcttatcttgggttgagatcaaaccatacgtcagcactcttgggatgtgcttattttaccatcagtgaattttatctgactgcgtggtccacaaagatcttcatgaaaaaaagaatgttctgtgtcattgtcctgtttttcaaatcaagaattaccacgaggaaaggaaatggagttagtctgttgtgacttgtgtgtgaaaccatttgggttcttagccttgacctccttttcgtctgagtgctctcaaataaactgtttcataatccattcttgaaaccaccttttcttcattaaggaaataaaagtattttccctattctagtttttgagatctttgttcttcataattctcctagagattattgaaaaggatgctataatcatcctatctttaagtctttcagttccttagaatttattttgtactgattttcctttaacttaaatggtttttcttgtccaatttgaagattattttccttgataaagataaaagcaaaatagaattttttttctattttttttagacccagctttactactatgttgttattcaaagatttttttctttttttttactaacgaagtctttatttcttttgttttcagctttccaatcagccagaaaacataaagtattttcaattcaaagttctagtaaagataggaagaactgggtgatggttttcataaatgaatgaatgaatgaacgaatggatgaatgtgtatcaagtgctctgtttttttaaattgatacatatgattatgtctgctattatttattctattggccatcagagcaatgatcctattcctttctaattctttatagaacttgccagataaccaatccactgacccaccagtctgccaattattt

SEQ ID NO: 67784 - DNA, 1036 bp, Homo sapiens
gcagagcttgtagtgagccgagatcatgccactgcactccagcctgggtgacagagtgagactccatctcaaaaaaaaagaaaaaaaaaaagaaaaaaatttctcttttgctcctctgtcttttagtatcattagagacccatgtcctattttcattcaatgtgtaatctgttaccatcatttttcttttttatgtttgaattctcctaaattcggccagttggagccccatcaggctggttcctgtgttcttttgagatgactgcatttatttctgagcatttccttaaactttccctgccttagcccaggatcagccatttctccaaggagccctggttcctgttcctggtgaatgttatatggaaaccaagcctttgccttagagactttcactgcaaggattctcttacttgcatttgggcagatacagtaccaatgaaggggagacctggaaaacattcatcttctctgagaagccagtgtttgtgtatggcctcctcacagaacctggggagaagagcactgtcttcaccatctttggctcgaacaaagagaatgtccacagctggctgatcctccaggtcaatgccacggatgccttgggtaagctgctgcctccttggaccttttcacatggatatgcgtggacttcctgttatgtgcaaagcaccagcttagatactgtgtactcagaagagcctgacattcattgggggagatgggcccataagagttagcaaaaagcatagggaggtaattgaaggcctgctcaattcttcttagtaagactgggtgctattctttgtatcttagtttcctcatgcagttcctggcacataagaagtttaaatatatgtctgctgaatatgtagataaatgcatgaatgaaaaacatatttccaaatcagcagtgccaattggacgtattcagtgagtgtgcctgactgtctgtaagtcagtgtgccaagcgacacagggtcctctcaaagccatctaggatctagttgtgatctgctaatctagatacaggatg

SEQ ID NO: 67785 - DNA, 1048 bp, Homo sapiens
tgcgtttcaggtatccttttcattggcatagggctgcccagcttcaaaacaagctgattggagggtctgtgtgcttgcggggtggcaacagatagacaggaagtgggggttgaggccaggcaccttgaggcatagcaggaaaccctacatgggcctgcctctaatgcttcgtgctgtgttcctttttctttaggagttccctgcacagagaatgactacaagctgtggtcaccatctgatgagcgggggaatgagtgtttgctgggacacaagactgttttcaaacggcggaccccccatgccacatgcttcaatggagaggactttgacaggccggtggtcgtgtccaactgctcctgcacccgggaggactatgagtggtcagttcttctttgatggctggggactgagttgtgttttattcactcagcagtgttgggggaagagattaggcatggtccctttccctgagcaaaggaagggaatagaaggaaacaagtatttgtgaagcatcttttatgtgccaggaactgtgctaagcatgtttcatgtaagttgttttctttagttcttatagccaggtaatgcggtagaggtgtctaggagagctgcagctatttctacaggaatagatagctctgggatttatttctattagggtaacccaaaaatatgctgaaggtttcattgtttttaatccttctccttaggaccctattctagaggggatttatttctttatctgaaacgaggggatgttagtgtgtgtatatgtgtgtgtgtttgcatcatttattattccttaagcaaaatatccaaggcactgctgcgaatgctaaaagtaggagaagtgatttgtgcatggctaattggcacaggagatagaagagagcaagtgcctcagaggaggaactggtacttttattgtgactattgaaaggaaggagagggctgtggattgctgttggagaatgaggagatttttggaagaagtgctgtttgagctgggctctcagggagcatcaatatttgcagacagcagtgtttt

SEQ ID NO: 67786 - DNA, 1745 bp, Homo sapiens
acagtcacgtgaggagggagaacagggcgattggtgtaattaggttggcaagtgtgacttgaagactggcaggcttagcccagaagtatggttgttgaagcatgcatattgggagatttagaataaagaaaaacataacaagtaaaacacttgcagatgaagaaacagattcactggagtttaagtaacttgcctgaggcagaaatgtgattccattacacacctcctgagtcttgatttctgtgctcttcacttggtccacaccacatgccaatgaatttgaggtttgtgtatgagaaacaaataggtcagatgtgctaggacctcttcagcatcccctgggtccaacctcccacgtgtcttgtgtgtctggcagaagagaacgagttcattctgtatgctgtgaggaaatccatctaccgctatgacctggcctcgggagccaccgagcagttgcctctcaccgggctacgggcagcagtggccctggactttgactatgagcacaactgtttgtattggtccgacctggccttggacgtcatccaggtgagtcagcgcttggtctgactgtgggagctgtgcatcgtgactgccctgtcctgataagctgcatgcagaatggcctatggaaatgggcagttagaagtttgtaagtgttactcatctcagggctgacaggtgaaagtttccagtcttctgtgttagtatttttctttctctgtcttcatctgttcatataggaaggataaagaaagccctaaatccacagacctgcttgaaagtgaggtcttgcttttcctgctgggaaggtgttgggactagtaatgtaggatgattagttgcccccctattgtgccaactgcctcttgagcatctttcttcccaagccatgatacagtaacacttgacttacccatagctcacataattatccacttcagctgttctgaacacaggtaagaaccaggaagtaagcattaaagagccctggacaggccaggtggatagccatacgctcacacccatgcatttaaaggagagctctttgatctttattcattgtctacttaatccttttagaaaagcaattccaacaaatttttatctagattccaacccaacagaaatttcacagtgcctgggtatttgaggggcttggggtgggggatggcggtgatgctgaatggagctgtccaacaatagcacttgatggctaagagcctcacagggaagaaagagtataaaagcagacacaagaactgaaatgtaacagcagtctggtttcacttattttaaaagcaaacagactcatacaatctcagtaatctctgactttattattgccatacagcataatttagtaaccagtgttcataatgataatgcagagtaatatatatgattaaattctctttattctgctttaaaaaacaaaaatgtagtatattttagaaatgctttcatgaaaacctggcttcatgtgtctggaaagtttactaacgtaaaacatctcatcccttgccagtcctgccagttgaataaagggttacccttcatgggactgacttggcagggggtcgtttgaacagttcctagcatttattattacttttctctcttaagcgcctctgtttgaatggaagcacagggcaagaggtgatcatcaattctggcctggagacagtagaagctttggcttttgaacccctcagccagctgctttactgggtagatgcaggctt

SEQ ID NO: 67787 - DNA, 1067 bp, Homo sapiens
cttggagaagcaagagatgaccagcctggctgacgggaaggagcaagaatatgagtcccacctgtggactcttcattgcaaggctgtgacattgagaatttgttttatgggagtgtggagtcatcgattgccttggaacgtggagtgacacgggatggtgaaataagtaaatgctcatttgcttatttacttatttgagtaatttacttattgatactgctttgtccagatcatcatgccctggaaactggggcttacatggttctagctcctctttcagaccacttgaaaattgtcccatgagtcagaggaaggaacagcgcattgtgactagaagttggggcaggtttcgcagatgggtcaggtcagggaaataggcaggcatggagggggcatgtctgtagcagaagctgagtagccatctttggcaatgggggtctttaaggagctccgatccatctcagcctcttttccccctgtttttgtcaggtagctaatccagatggcgacttccgactcacaatcgtcaattcctctgtgcttgatcgtcccagggctctggtcctcgtgccccaagaggggtaagtgttgccccaaaaggaaatcagtcttgcgtccaatgctacactaatagattctcatggaaacacagactgcgggacaaaaactctgtttctcatgatggtggttgaaatggtctattaactgagaagtttgagaccacagcttagtcatcgtggtcaggtaactccgttcgctttttgttagccagtgtcagagtctctttaggcatccagatgtcttgcatctgtgggttgtttctctagaaaagttgatgttaaaagagagcttctgtagacatagacaggcctgcttggatattgtgagaactttctcttgagtttcatgcatggtacaaacatttaattcattccatctttcccctgccttcccagcatgtgtaggttttcttacgtacaatcagtgtgcacttggggaaggcaaaggtgctttttattaactcattaactgaaggaaacataattaagagggaaattctggatttg

SEQ ID NO: 67788 - DNA, 1088 bp, Homo sapiens
ttaccctcacacttcctagtggtaatcattgttaataatgtcttgtgtatctttcatgattgcttttacttatgtacaagtattatctttaaaacacacacatatacacacacatgcacgccaaataggattgtagtgtagttactattctgtacctttttaaacaaacttaatatgtattgaaaatagttctgtgtgagcatatatagatttttaggtttcacagtattctattatatgtaccataatgtgtcacttcctctgctgattaacatttagtttaatatacatacatatacatttctttgtatattatctttgcataatttgattttatctatagataaattctagtaaaggaatttccaggtgaaggaatttaagtagtttcaggtgttgtcattacatattgttataataatgctgaaataaccagccggatcattcgaaaggagtttctgaccttttctggagtagtatttgagctcccatttctctagtattgatgaggtatgtgttctgtccccattttcgctagggtgatgttctggacagactggggagacctgaagcctgggatttatcggagcaatatggatggttctgctgcctatcacctggtgtctgaggatgtgaagtggcccaatggcatctctgtggacgaccagtggatttactggacggatgcctacctggagtgcatagagcggatcacgttcagtggccagcagcgctctgtcattctggacaacctcccgcacccctatgccattgctgtctttaaggtgagtccatttgttgctgccggacagtctgctagagcgggtgaggagcatatgagatcaggagcctgcatccctgggctttgcagagaagctgtttaacttcttaaaggttgccttttttccaaatttgagataacttattttcagcctatggagggatgccaggcagaggcgccaagggtccaggctcccctgctgttcacatttcaaaaggttaaaagtgaaggctcttcccatgaacattcccagtttgcccctcagtgtcagtagcctcatttcagggtggtgtcttcattttttgtg

SEQ ID NO: 67789 - DNA, 1325 bp, Homo sapiens
agccgagattgcgccactgcactccagcctgggcaacagagcgagactccatctcaaaaaacagaaaaacaaatctagtctctctgactgtgatctcaagcactaggacacattatcttacccagttttactgttgagaaaacagccgtagggagattaaaattaatttccccaggaagaggtagagccacgatttggtacccagtcttgactgactgcagacagagcctatgttcctactgtagaattctacctccatgctgcctttaccatctgtacaatgaagtgctaacttcttgtgtgaaattgagcttctctaatcgtagtttcatagataaaggtatttctgtcacttatttaggaagacacttttcgcgtctgaagggatcttaggaggtcacctagcctgtcactctctctcgccaacagatgacagtttctcacttttccccgtcctgttccgatctggaagctgtccacagaaagatatgcccttatctctcttggttgtaaatttcaagctctcatgtaatttatgtcttctgtaagtctaggtttaatttctgttgctacaattaatacctgctttcttctattttttaattggttttccagtaggatgtttacatttgtgggaaatcaattgtacctaaggaatatgttgtctttctatcccattttagctaccaccatctgtgacctggacacccagtttcgttgccaggagtctgggacttgtatcccactgtcctataaatgtgaccttgaggatgactgtggagacaacagtgatgaaagtcattgtggtaaggggacatcacatcctgaaaccctgctctggagaggggggtcattgtgctccctcacagggctgtactggtatgtactggttttctgatagccgtctcaggatttatgatattctagctgaatggctttctccatccacatggtggggttgagtcatttctctgtccattcttaaagagtttgtttgctgcttttcacgaggattcagttcgctggagacacttgcgaactgggaccctagattcccattaactctggatgggaccctagattcccattaactctggatcaagtgtctccagcagaactgaatcctcatgattcatggtcagaaaagatggagcctggactcagctcctgtcacttactcttagattagcctttgttttctagtctgaaaaatggggaaatggaccctgctttgccttggagagatgctataaggatgaaaggtgatggtaaggaagtaaatttctgaatgaattcagggggttattaacagctctacaggcttg

SEQ ID NO: 67790 - DNA, 1022 bp, Homo sapiens
tagttaacagtccctggtcccagactcatagttgctgacctccgaaggagacattatgcaatcagcatggtgtgccagattgaggcatgagagggaagtgagagtggaggtcagacgctgacccagacgtggtgatgagttggcggggccctactgtgccctctctccctgtccacggggggcaggtccagccacgctgtgcttacgcacatggacacagcctgcttgattatgagcaggtggtttgactcacagcagctgaaataaggggagcaagggcagcttgtaaatcatctcaatgcaagttaaccagcagagcagagcctaggccatttccacacagaaaatacccctagcctggctcttggaaggtttttaaaaaattcccagttttccttcttcaagtgcctgaaaacatgtccttggaatgtgcaactatttccccttcatccctgccatttccttcccagcactcttagaaggttgaaatgtgtagctagttttgccctagtaagaaggaaacttcacgtggttccctctttctggtatcattgagctcacgtactgggtacatgtttgactgtgaagcagtttcagccccctgatcctctgttcatggctcattcttactagtttgtcctgaattcatcccagggtcccggttagccccttcctctgatgcaggtcctcttcgtaagtttccacactcttcctcaaaaatatctgatttactagctttgccatcaacaagcctcttggcgagaatgactgagacggctgccttgggccccacgcttggctgctcctgttttctgacgctctgtaaactccatgtgaaagttctatgccacagtctatttgggctgtgataacaaaatacttagtgtaggtaatttataaacaatagtattttgtttctcacagtactggagactgggaggtccaagactgaggtgccagcagacttattgtctagtgagggcctgttcctcatagatggtaccttcactgcagcgtcagat

SEQ ID NO: 67791 - DNA, 1081 bp, Homo sapiens
atctcacggtgatcagctcatgcagacctctcggcactccttttctcaaaccacaggctgtgtctgtaggagtcctctgtttcttgaaagttctacttcctggcctcctctatcactgcttcctaaccttcttcccatcatagcaagcatagaaaataatatatgtggagagcactgggatgaatggacaaggatgctgttgtcaagaggcaagcagctctaagggtctgagggtctcagaatctcagcccacctgtaacccatttgcagcacactgactggaagctgttaaatgaccttttgtccctggtaaaagtctcttcgttcatggtctctgtggatcattggtgatcacgggtccatctccatcctttatgagagctttgacaccagagacaaaattctgaacaagcttttgtcctcacctctctgtttatggtctcacctgcagaaatgcaccagtgccggagtgacgagtacaactgcagttccggcatgtgcatccgctcctcctgggtatgtgacggggacaacgactgcagggactggtctgatgaagccaactgtaccggtcagtacttcctggactcagttgacagcactcatccgttcatgcagtggttaacattatagctttaaacgatcggaaaatctaggctctgagaattagcttggaccttagaaatcagcgagtttcatgcttctcaaagagctggtctttgatgagataaggaacctgtgccagaatgtaaatcaacaccctgctttcaactgattaaacagtgttctgagtgatatcgttgatttatgttctggctcaagcttcttattcattcaggaccagtgttaaacagttttcagaccagcccctcggctggggtccatactttgagtaagcactgaactagctcatgttttttaaaatggagcatcagggggttccccagacaaggaaaatgtaaactgtgtttgtacccgttttgggtaagattttattaaaagtaaagatggaaacaacatgaatgtgctaggtgctataaggtaggggtagtgttctcattcttttgttgggttcgcttat

SEQ ID NO: 67792 - DNA, 1063 bp, Homo sapiens
cacacaaactatataaaatgctgccacgtaaacaaaatatataaaatgttttttgaaaccaaatatgtttaaggttctctatccttttgccaaacattccaagttttcaggggatgttagttgtctacatgttgttatacattctactccttaagtaaagatgtttatgcaactctgtttttgtgtagtaagcattttcatggaggatgcatattcactttatgctaccataacctagtttacatggttgcttcctggttgggtgtttgaggtttttagatttatactgttatgctagtaccactattcgtgtctttggaaatggcctgatttttctttgagatattttctgagaggcgttcttcagtatggagttgtaaggtgaaaggttctgaccagtttttgagtctctctgttaccaaattgggtttccaagggattacatcaaatgtgtctctaccagtaaaacgttgcatgtttccccaagtctccttgatattagatttgtatctttttagttgcttccactaatgtaatatgtgtgtttgcctcatgtagttttgatttatacctcttttaaaatactttttctacctagtgacattaaccatttctccaaatagtggtgcttgtttactgtttctgtttgatatcctttggctaatttcccagaaatgattactttttacaggattaaaacacattttcatacttatacctaatcctcaaggaactattctacacagagctcagtttgcaaaggctatctatgactgcctcattagaagtgattttcttttttttttttgagatagggtctcactctgtcacccaggctggagtatagtagtatgattgtggctcactgcagctttgacctcctgggcgcaaggcatcttcctacttcagcctcctgagtagctgggaccacaggggttggccaccacgcccagctaatttttgtatttttttgtagagatgaggttttcgccatgtggctcaggctggtctcaaactcctgggttcaagtgatctgcccaccttggcctcccaaagtgctgcg

SEQ ID NO: 67793 - DNA, 1043 bp, Homo sapiens
ctttcttttgttgcttaaggaatcctgcttttcagttgtgggtgtatgtataaggggcaggatggcgagtgaccagggtcttggctcaagggtcgctgaaagtgagaggcctttcttgccagtactgtatcagatggcactcccagcgtgccgtagccccttaccctgcttcgatgatcctgtcacaacttgccccaatttggacctgtctgttcattttgctgcctgagctttacaggagcaggggcttgttttgtgcattgctatggccctctcctaaaatagtgcccttcttggagcagctcttatatttgtttcctgggactgctgtagcagagtaccacagaccagatggctcaaacaacagaaatttatttcttgcaagcctggaagctagcagtccaagatcaaggtgtcggcagggttgggttcctccgaggcctctctccctggcctcatagacggctgcctggctgccttctccctggctcttcacacggtctttcctctgtacacatctgtgtctaaatttcctcttctgtaaggacaccaggcctattagattcgggccacccagatcacctcattctaacgtttcctctttcaagcccttatctctaaatacagtcctgtttctgagagactagaggttgggacttaaacacatgatttttgggaggataaactcagctcataacacgactcggtaaagattcatggaatggattaattaacaaagtgtgtgctctgtttagattaggtttggcttttgctttcaaggcatggtttagccagacagtcctttgccagaactcactgctgttcccccttgcttctgggcaccactgctgcttcgacccctcagcatggaagttcctggacttcatggatgtttgttccctctgtagcccaagatcctgagttccacaaggtatgtgatgagttcggtttccagtgtcagaatggagtgtgcatcagtttgatttggaagtgcgacgggatggatgattgcggcgattattctgatgaagccaactgcggta

SEQ ID NO: 67794 - DNA, 1356 bp, Homo sapiens
atgcagatctaggatttaaactctagtttgtttgactccaaagtgctcactcttcccgaatgcagattccagttgttaatgttagatgagatggcaccttagtgccggtatagattccaccactggtcattccagaggtgtgttttgaagcagaagccaattagtactttgcctaaatgggaataaacttgggcccagcctttagtaccatacggcccctccccgtggacttaagaagcctctctgtgtttcagccacacacagcaccttgacttgcatgagcagggagttccagtgcgaggacggggaggcctgcattgtgctctcggagcgctgcgacggcttcctggactgctcggacgagagcgatgaaaaggcctgcagtggtgagtgccggtccacgggctgggctgggctgggctgggctgggaggctcgcttaccccagggcccctcctgtgtagaccttgagctaggacccttttgaactgttgctcaatctaaggataaaacagatttgtgcctagttttggagccccaagtgaggtgagccttggccagactctgatacaacatgcagctgtctcctccctgttagtgaaatgctagtcttggatttttttttttttatggacttcccacctcatgcccatacaccatggctctcacagtctcaatctgctggtgggattaactcagttcttatctctggagtgtctagtaatggaccctatgacatggtccttggacttgtagcattctctatggagaaataggcttaaattgtcataggcaggaggaagatgaaattcgagggaaaatatcacgaccggaaaagtaggagaccctaggagggattgtatagggaggtttcaactacattttctgagatttcttttcagataatgattatggcctcctgataatctagatcatggtagttctgtttaaaagcaggagtcctttgaaatctaaggatttgtaagatgtaacttttttttttttgtatttttagtagagacggggtttagccacattgcccaggccagtctcgaactcctgagctcaggcaatttgcccgcctcggcctcccaaagtgctaggattacaggcgtgagccaccacgcccagccaagatgtaactttgtttgtctttttctcctttatctctctagatgagttgactgtgtacaaagtacagaatcttcagtggacagctgacttctctggggatgtgactttgacctggatgaggcccaaaaaaatgccctctgcttcttgtgtatataatgtctactacaggtaggtcccatctttgtcatgggagatgaaaatgatgtcttcattgccccaggat

SEQ ID NO: 67795 - DNA, 1049 bp, Homo sapiens
gactccaaagcctgtgctcttaaccactgtgctccacgcttctctctgggctgagacacatgcggcctactggaccgccctgcttgccgggggtggcgggctcagcatcttgcacgagtgcctcatgagggcagagatctggtctgtttttctctactctatcacgggcatctagtagagactaaggaaataattgatgattgagtgaatcgaagcagttaaatgaagggttctggcatactttgggagatggactacaactcattttccagagtggttttcctgaccttagccttgacactggggacttgcatttctggacttccaggtattaaaaccagatggacactgtggcatgcaataggactggaagattttactttaacctaagcctgtgaggaataggctctgggtcatggagagtcactatctagtcccctctaaaatctggagcctttgagatcagggcccaaggcggccaaacgtagtgccaccagatggtctttggagctgaatgcttgcaggtattagagaaagcctgctgaattcacactctcctagaatttttattgttgtatctcttctctctacaaagtctgtttcaaaacactgaccacacataccaagaagggatgttggaagagcaaccaaatacatgtaccttgaattccgaaggcacaagtcacaactgcatttgaaaatctcagtggatggttggttctctttaacttcttttctgtgattttgatgaatctcagctgcttgcatatatttgggctaggatttgtacagaaggcagctgtgtgccacatccaaaaagtgtttgttgtaaaatatctgtgacatagtatcataataacgttttaagataaaggacaaagacagcagaggcatcagccagacgcgccaggttaattggtgaatgtagtggattagtaatgacaatgagaaaagccaccattccctgagcacttcttatacactaagcaccatgctattgttgctcgtgaatggatcccttattaatccttatgaatcctatgagataa

SEQ ID NO: 67796 - DNA, 1045 bp, Homo sapiens
ttcgaactcaagtttgccagcttccagaggccacattctttccattttgccacacgcacgtttaccatttacgatttactccattgtcagccttccgaaaggacttgagattggtgggactttgttagtgccaatcaagatgccactcgcagtgaatgatccctgttcctttaagaaccaggctgaagctgggctgttttgggacctttacaaaatggaacttttctgcctgacctaattgccaggatagccgactgagccaagatagttttgtgttcaccaagcaactgtggaccaaccttagcttcaggaaaacagtggtaaaaaaagatcgatgaggaacactgccaaagaaataccctttcttccccgactgaaagatggctttgtccgttgagttgaaaactattaagtcctgccttcctcacttttcatcacgtggcttctgtttttgaattcctttttgttttcagtgatcccaccaccagatatccacattgacagctatggtgaaaattatctaagcttcaccctgaccatggagagtgatatcaaggtaatgtgggaatttcaagccagcagctggatggggctttattttgtatgggaactgaaaggacatagcacagtaagactggaaaaaaacaaaaaacaaaaaacaaaaaaaacgaacggctagatctagtgaagctaaaataccaggactagggtggttccttcccccatgaagaacaacttgagtcttcacatgtaattattctgcctcagcctggtgcctttttatccttaaccatataattaaatggttcacagctacagtgcaaataaagagttggtgttaacagaatatgtatgccctgtaattttcagctttattggatttcctggtgctaagcgctaatgctgaggcgctcacagtggaagaacaaccttcttgtgggagagttggataccttggaaacatattcactttccatccacctaagatcttcctcttccagcaccgccatcccctctactggccctctgcatagccgacttcatc

SEQ ID NO: 67797 - DNA, 1144 bp, Homo sapiens
gaacggccactttcaccaactgcagctccgttatggaggactgataacttggcagatgatcacaagtatagataaatcaaaaatttttatcaggttccacttctaggaatttagcctacatacttttatgtgtgtgccaagatatatggagaaagatacatggtacgttattattcttatgatagcaaaagatgtgaagcaacttaaatgtctatgaagagaggactggttaaacatatcatggtttattcatgcaatggaatgcaggacagccgttcataagaagtatgacaactctaaatgtactgatatggaaaaatctctacgctatattattatataaaagaagccaagagcataatatgtgtgccattttctcagttgtataaaaaatatttgaggaagataggcttcatatacacgtgcatatatgtgtaaggatacacgtacatacatatccttccttatatatgcataggggatttctggaaggaagcacaaaaactcttaccagtggtacctcttggaaaatgatttggggtaggtgggaaattattttatattttatggttttttgtactaactgaattttaattgttgtcattattttgttgaaaaaatactttaataaagattgcataaggccatgatgtattttttttcctacgtgtgtgcttgggcttcaggtccgtgtagtggtaccctaccaggggccatcctctgactacgttgtagtgaagatgatcccggacagcaggcttccaccccgtcacctgcatgtggttcatacgggcaaaacctccgtggtcatcaagtgggaatcaccgtatgactctcctgaccaggacttggtgagtgggttgggcttccaggcctctttgtttattcctggcctggttagggtggggtgggatggaaggggatcctctaatggggcaagaaacacaggcctggtttctggcgctcagcaggaggtctctctcccatttcagtctgaccaaagatggggtccgtacagggacctcttcttagttggcacttctccattattcctagctaccattttggtttgtccctctttctcctccgctgctgatatttccttccctgaccctctcacacagggattagcaaacaaaggcct

SEQ ID NO: 67798 - DNA, 1073 bp, Homo sapiens
ttgaatttcctgtgcttactatatgccctgttattttccccttgcccccctatacccagaagcagcctgggagaaagtaagtagagccttgccctttagagccaggattgaacactttggttcattctctctccaccaacaacatccatgaactattgcagtggtggagatgtggaagttgagtactgagtttggatgtgcttgcttgttccaacctacctgctgatgtcacgataaatgtggccctccctagagggttaaaaaaattttagttgataactctatgtgcaattctatgagtgaatagttattttaagattggatctggtcactccaaaggccttccaaagaatggagtcagatttcgggactcaaactcttgttgctgtgggtcccagctattaatatactacattgtccaccattgaactacaaagagtgaaaaatgtcaactttctgattatcattcacttgttcttttttggtcctagttgtatgcagttgcagtcaaagatctcataagaaagactgacaggagctacaaagtaaaatcccgtaacagcactgtggaatacacccttaacaagttggagcctggcgggaaataccacatcattgtccaactggggaacatgagcaaagattccagcataaaaattaccacaggtaagcaggagagaggttagaggtcttctcacacagcctgccctcagtgctgtgccgctagacctccagagacagacttttcattaggcgtttgtttcacagggagtgcaaacgctgcccttcaatattcctacaggggcagagtagtgcagaggctccagggtctgagccgtggcgtggtggccagggcacagtgggctggggagtggctatcgttttctttattttctaagtctttttaactcccctcgctggttttgatattactaaaggaaaagaggagggatgcccaagagaggaaataaaactgaatagttgccactaagaccaagtgctgtatctgagaatctggatgacaggttctcagtggtccattgtggcaatctgacatgttgaaatggagggag

SEQ ID NO: 67799 - DNA, 3298 bp, Homo sapiens
gaaggtggccaggagggacagtgggaagctgggctaggtttcacagctgattatggtggctgcctggctatggcattgaccttctcagctagagggttgtggtagggttgaggggtgggtagagtggtgggatatggggtcaggtgaaaatgtgttggaactcaccaaggcctgactgttttgtctctaggggaagatgatgaagatgcccctatgataactggattttcagatgacgtccccatggtgatagcctgaaagagctttcctcactagaaaccaaatggtgtaaatattttatttgataaagatagttgatggtttattttaaaagatgcactttgagttgcaatatgttatttttatatgggccaaaaacaaaaaacaaaaaaaaaaaaaaggaaagaaaggaatgaataaactttgtagtaatcaactgtgaacttcaaaccaggttgattttagtaacccaattgctttgatttgacattaatgtagtcttacagggctgtgcttgctgggcatgcttttacgtctgtgagataatttcggttcagtaaattggccaatctttttatttttctaagacacagaaatgtatttaataaaaacctcgagagagtgatgggtggaaccccttctccttgaaagtgtgtacagatattccattttgtttggatatagtttataggaaagtgtgtggatgtattatggcggaaggtttctttatgttattttgttaatttattgggactctgtgtaaggccaggctttagtggtcattagacaccacatgtgttatgagccccttacccatagggttgggggtgggaagagaagcatatttttttgccattccggaagcaatccatttttattcacttgtgtgtcatgtaatggtctttggcaggagagagcactgagtcattgctggagttcagttcaacagagctgcagcttgggaagccctgtaagcccacagcttcctctcttatattaattgatggaattttactgtatgtgcctctgtacaagatgtagctttgagagctacaaaatgataacactgctttattacacactggtttcattgtcattgcaaaaacttaccctggttgtgggggagagttctagatctgtgccatgatccatacactggctaatagagtacataatttttccattttccattttttgtttttacttactactgaaggatctcagatgtaaaattatgtatttggtttgagatggccacttattgtccttaaaaatccatactgatatatgcagtcattttgaattggacagtgccttctctttttttttctcctcttcttccatctccctcacccatgcccccacccaatctaaagagacagtgctgtacattctcatagagatagagaagatctaaaaagttgagactactcaatccagttaacaacagcaggagcactagagtttgttcatttattctctctgtaaaacaagctgtgctttttttcttctgcctttaaaatgccacccgtgtattcaaaccatggccacttgatacttatgtagaatccatcgtgggctgatgcaagccctttatttaggcttagtgttgtgggcaccaatgtcgagcatcgttgtgacttgtgctgtatgattctcactgaagaatttcctttcagccaagaagcagtgaggtctgggaatattccaaagtcatgtctctgaatatgtgtccttgacgtgcaagctttgtaaaaccccatccccgcttaggtgcgaggcatcaccttctcacaagtgtttagtttcttttaaccacaagtatcattcttgggtgataatatagtttcattctacttagggattgtttagaaaacaaagaaagagccaattaaattttttagtttttgaaatttttatttatatgtatacttagatgagtattttaagctgtcgacctttagtttgccatacgggtaggactgtatttcatgttaacaactggtggtaatgataagccttcttctagcgtattttctcttctttcctgtcactttcctaagtttttttttttaaagactggaattttttttggctttatcttgtcttaccgtagagatttgttcaaaactctaagccctaccacctcccctttaataagctctttaaatagttgaatcattaacaacctggtgggaggcaagtcatttaattgaaccactaggaagtgtattttcttttctttttctgccaactttttggtggcatttgtaaaagctgatataaaaggctctgagatgttattttcagttattccataggcaagcctttttacagagcatatgtctccagttggcagcttgagatatttccgagcatccggttctagctaccagtgcctcccaatgcttagtgcacagtactgtagactggccatcacccctctccttggaaaatgccactgtgctgtttgaaaaaaagcagccttttagggctagagtattttatataaacagaagagctaagttcctgaagactaagctagatagctgcagctatatgtaaattgtatatttttatgaacttttgaagcacacactcctgtttccctctgtgtagctttgtggggatttcatgtatatatgctgtctgaaagaatccagaggttggagtgccaatagaaaatgaaaacaaatgccttgtactacaggcagcctctgaaggtgaccacataactgtcttcactgtgaccaatcggagtccctgcttgcttgtgaagaaggggcttttgtaccttgttggagatgccacctcagaagttcacactgtgcaggaaaaaggttttattctctcctggcatacattagaatgtcagatgcttgcatccatgtggaccacgatgggcctctaaaaattggtgggcagggggtttgcttatgagttttctctggaaaccgattttactcctggatgtattgaatgccccttgagctttatgagatacgagtccacatggataaaatgttagagagtggagttctacagaggattccaggaagaggccatgtctgtgcagtcctagttccagacaggtgagaagctccaggaactactggctaccttgacaagctgggtaaatagttatcattctgggtaactggttgaaactctgacttttggacaagtaattcctggggttctgtctttggtagcatcaccagggatatttgggtgggacagacagaagacacacagctgcctgttctctcctgcccatcatgtttggcccactagatga

SEQ ID NO: 67800 - DNA, 1008 bp, Homo sapiens
acattagtccaacacattgcaccaagcgaaatcccaaggggagacctaccacctgggtgagcctccttggtcatggcctcatccttaggttttcaggcttagataatttttgtcaacacatgatagtgaattcatctctcatggccaaacacaccttaaccaaactcaggatgttgatatgcaacgtcataatgtccatttgttaattcaccctgggaaagtgtcctgtcccttacaatgtctgcatgaccagtgcattctctccctgtagggagatctaccccaggagccagtcaccaccagaaggttgcttggagagcaggggcaaagagttttaaaagtaggagggatctgggttagcatagtggttgcccaataaatactgaatgaatgaacaaagacttgacactccacaacaggaataatctactccatataaacttagtatttgaagccgtcagattgcaacaccctggatccatttctagttaaaaagatcttgccaataggatctaatactttaagtccatgcactgtggttcccctggacagggcttgggcactcccacatcggtcactctgactcatctctacatgtcctgttgttgagtaaactctcccactcacgaaaacattctatagcaaaattaatgcatttggactgagtttgaatcgaatcttcctggctaagagccagattctgactacatccgtcagctatgattattgggttccccagcccatagcaaattgaacatgggttggggctgctaagggcagctactccgaggacaatagaagagaagccacgagttagagttagactgctggaaaacctatgtgagagataaaggaactccagcaaatatacttattgggaatatttggcataaaaccagagtcctacacagtaagtagcccatccaattagaataattatcattcccttccgttgaacccctgttctttggtagtaactatgctaaactctctctctctctctatata

SEQ ID NO: 67801 - DNA, 1017 bp, Homo sapiens
tcattgtatgtatcagtaacttttttctgtttattgctgagtagtatttcatggtatggatgtaccatagattgtttaaccacgcagctgttgaagggtctgggttgtgtccagttttctcctgttgtgagtaaggctgctataaacatttgtgtatgggtttttgtgtgaatataagttttcatttctctgtgataaaagtccaggagtgcaatttctgggtcatatagtgtttgtaaagaaactaccaaactcttttccagagtgactgtaccattttacctccctatcagcaagatatgaatgatccagctttttctccatcctcaccagcatttgatgggatccatagtgttatctaattatggttttaattttccttgccttaatagctaacatcttttcatgtgcttatttgccatctatatattctctttgatgaaatgtctcttcatgtttgcacattttctaattggattgtttcttttttactgttgagatttgagaattctttatatattccagatactaactgtcaaatatgtggtttccaaatattttctcatcctctgtagcttgtctttttatcttcttaacagatcatttttcataaagtagaagtatgtaattttggtgaacttcaattaataaatttttccttttgtggattgtgctttacctgtcaagtctaggatctctatctggccctaaatctcaaagattttctcccattaaaaataatcttatagttttacgttttatatttaaatctgtgatttgttttgacttaatttgcttaattttggcttaaagacaaaaattgaggttgaacagcttcctcctccttccctccttctcttccttaccctcctcctgtcccttcttctctttcaccttcttcactttgccctcccctattctgcccccttttctcctccttctccttcttctcctccttcttgtctatagatgtctaattgctccaacacagtttgttgaaaagcctgtctttcatcc

SEQ ID NO: 67802 - DNA, 1073 bp, Homo sapiens
ttttctatacatgctgctgtcaaactctatttccctcatcctaaaattcaactcatcattccatctcccaatattttttttatcctaagacatctgctaaattaagattgtttttcagagtcatcttattcaaatgtttgactcaaacttacccaaaagagatcataagaagctgagtcaagtcacatactgaagttaggattccaaatgtcattccccaaagctatcagtctaataactaacaaagaaagaagtgaagttagttttgcatggttagttttatttgtttgttttcattggcctcatatttacatgttttttttttttttttttttttttcttaacaactactgatgctaggaagaagctatctagataaatgatggatagccagagaaagttgatctgggatcaacattttgcttcaggtaatcaaaaaaggcaacattttgtatgtgaataattgagattactatagtgcatacactgatgttttaaataactggatttttctctttcttgctatcttattgggttgataattatccttacttgaaagaggagatttagggtaagtagagtaggaaatcttctgtctatactatttatggatattaacatgtctatatatcctcaaaacttacctatcccacaaaataaagtaaaagtaaatgtgattcaaaaatatatgtttttggcttctcactatagtaacaatcctctatataaggtgggtatgatctggcacctgttcaaggggcttatctaccaaagtgcctaaagaaattaatagtaaggaatttcaactcaattagaattctttaaatgaattgaaattcatgaaaaagcagtttcacaatctggctcctgaagacagaattcttagcaaggctccaatgtactatgctgttgcatggtgatgtgtattgggtcattgaaagcacccttttcattcctgccctcactcctgtactgagagttggtgattctttctctgtattccatttgcttttgcccttccttctttcctttttctctatctttccttttctcattggtatttcatgtttctt

SEQ ID NO: 67803 - DNA, 5136 bp, Homo sapiens
ttttattttacaaaccccagggctccaccttcccggcccaccctctttctaaaaccacttactgagcagaacaaaggaaacagctaactatagaggcatcattaagtgtgaactgcaacagcatgataaagtatgtgatatgacaacatattttattgcacaaaagtgcagataattaaataattctatagtaaccctgactaattagccgaaagatcttgaaggaggaatcaagaaaatggatccaatcaccttgaataatatgcttcgttctccaagatcacaaatttattttggttatttgatgattgattaactcatatagaaagatgaggacaaaagcctgtttctcaaagcagagctttgatctggtgtcctctttaggacaaattaatcctatgttttagaagtgctgaatttaatgtagggctttctgttttcagtcaaagatataacctgccattctgttgaacatttctctattatcgagtgatctaagaaattatcaacccttagcttcttatatcgctgcctcaaaatatagatgtagcctcgttcacattttctaatgagtctcctgtttaagtttgtttcttattgcttgaagcaaataaatatcatgggcacagaaggaagagaataaataaccgtgctgaatattatgtatggtgaaaccctccccccttcctttatcaaggtaatattcctagtgttcattgttcattggtcctttaagagagagctttagcttttacttgagggttgtaagcacattagaggaataattccctttggatactatacagaaggagccacctgcaaaatgttgatgctgttattgaagtctcaagtggaatcagctttcaaaaaattagatattagatacatccgatataatttgcaatgtgtaattatactaatgtgcatatagttgtctgttgctttacatgttgcctacttgagtttttttcttttcttgtgcatttctcatcattgaaatggttcctgagtagaatctttttaaaataagcttattttaaaaaaattctttgttaattaatatagggatacgaggactctacgatctgtgttcttatgcaagaataaatatgtgcgacctagatgttggaaattaattatctctgaaagggttatcattgtggacacttgcttaatttgtaaaatatttgctactcttgattgatttagtctttttctgactttagacaacttgaagtaattgagaatattagttcctttgttggaataacaaaatagaatgccagggaaatgaccttaggcagagataataattttaatttaaccaaagtaatcaaaacaataacaataatcagcaatttcttttattgtttttcactgttttgcatggcacatgttgaatactgaaactctgccttaggttatttgtgcactaacatcaacttcccttttaacgtcttgacatgatgtccaaggtctactgatggccccactggagagcctccttccagggaactgatccctgaagatctacctattaaggaatagcccagtcagagcaacagcgagttggctggtcagcctggtagttggctcagtaggtgaagaggctcttgatgcaaatttggagaatcattaccatcaggtcacagaaggaccccgggcaaggcaatacaagggtctcgatttatgcttatgtgtttgggagacaaaaaggattccaagggaggcttatattgagatacaagatatgactcattgcaattgagtaggcatagagcccaaagaaagctgatttgtagaacagttgactcatagtagacacctagaatatggtcattcacatatttatactatctgtttctcaaaatttgttttaatgatggagtccctattagaaagagacattttgcgtgatgtatagctacctaataccaaagcaatacaaggtttacttttcacctgctcatgtattcaaggatttgccatcattagatatccaaatgagccataaaaaattgtgcaaaatgttattccttaatacataatattttaatttattaaaaaatgagttttacaaatgagtatcaaaagcttagcaccccatcatccctgtcaatgttcacaaaataataaattctaaaatctttaagatgtatatttaattactcatccaagatcagttattgcatgcttaatcagaaaaatacctattaacgtttaacacttagttactttacagattaaaaaacatattatacctgccatctagggagccagcatcctcggtgtatcaaaagtgtttagggcagaaagcagtgatgtgtcatagtgtaccccttttggtgtgcctgacttattagacatcttcattgtgtaagcatgatgaagaggctgatgataaggtcttcagttaaagaaacatctacctgagaagtatattttattcataacaacttttataaaaaaagagaaacattaataacaactcttctcaaatacccttatctttaaaatgcatgggttggattagttgggctctaaattcttttacagctttaagaatttttgaaggtattctaaagtatggaggcataggaacaactccagaaccggtggatctggagctcatttgttccaacagtcgtccttcaaagttatatttgattccacctccacgttctgtatttactaacatattttgcgttgatgctaaaacagtaaggactggagttcactttcaggaaggggcagtagcagaaaagaagaacagctgaagaatgaaaaaagctacacagtgggagaagcaaattcttgatctgagttctaagcccatttctctcaattaacattaacatagaagaaaccccgacaagcacctgcctttctattttaagactatattctttaggcctgccttcatttaatttcttgcagtatggttcgtttttttccattggattaactcctttgagtttcacgtttttccttccacttgattcatttgagtcatcttaatattcctctcagaagcctacaatagttacagtaacacatcatacttcccaaattaaatcttaacgtgttcaaagccacctggaaattgccctaccccattttctaaaaccactcagaatgtgtaatctcttcttgaattaagtgagcctgctttctctggcttctaagtcattgaatatgctccaggatatgcttttcctttctgcataatctgtccccccacctcttctacactttgaaaaccttcttctttatttctctccttccctccatccttctcggtttttctcctttcccccttcctctctctttttctttcttttctttctttctctctttctttccttcctttctttttcgttcttctttttccttcttccttccttcattccttccttccatctttccgtctttccctctttcttttttttttctttttttctttccataccatgttctgtgccatgcgctgggaatacaaagacaaatacaaggaattgacaacacctaacaattctagtgacttcattcagccctgcattcctaagcagttatgtacccacagctatcttactttgttttcactccttggatttatttgaatctgtcctcaatgtcatgtgttcttttgttctttccctatgtgtcccattttagtaagttccctgttggataaacctgaagcttttcttacacagcattttctcccagagccattagagtggtgtctcacacacactcaggcaatgccattgctgactgattctttagcaaggggaacaatgtaaaacaacagcatttttctagtgatgcagcatttcatctctagtgagacttagcatggtccccaaagtatcattacatttatttattattattaaagagtcaatgtgataactttctgtgacatgttctgttatttttttagttgtgttgatgttcctttcagctggtcctatagtacccctcctcaggaatgtctccccagtgcaaggacaaagactgaagagactgctatattgatggactctcaagccaactatgaagttgaaacaaagaaagtgatcacctgaagacacctcctctgctaagaaacacccccaaattgtgcagcttctgccactagaactctcagaacaagagacaatcttttcaagaaacagaaaaactcaataatgacatctagattttcatgagccaagaactttcccttcctcatgtgtattcctctgtttgtacttaaattcatgtgacattcatttttttcctagtatggatatgcttattaatgcacttgtttcaaaatcccaaattgcacaaatgtgttaatattttaagaaacaaaatgaatcctacaaggagaatgatttttagccacacatagggttggatcttgagagtgacctacagaataaaagtacttttaaaataaagtagtcagaggctattcaaagggtaaaataatcatagtaccacattggtccacttgacactaaccaatcgatcatttttttttaatcaagaaagctagattctatcagataaaatcactgcttctaaagagtttaaatctagttagaaaaagttatagaaatgtttgcaaagataagtaacagatagagtcagtagaggataagatcaaaaacaaaaccaagcaaaagatgagttcaggggagtttgccatcaagttggcaaaactgacttacttagggaagaaagttataaaacaggaaaatatgagatgaaccttgagtgatgtggaagatttagataaatggaaaggaaggagaaaatggagttctttaggtggttgtaattggaggaggaaatgaatacacacatcttgttgacttaaacccagacattcagcagctctctatacatatctggaaaagactgcacagtcacctcctgtctctcaccccaggtattacttagaattattatcatatttcccttcctttaaagtaagtaagggtgattggtgacaatatggagaactatgatttttccattaacctaataataattggtatttattgagttctgttaagcattttacatattaactcacttaagcctttcaacagccttgcaaaataggtattattatcccca

SEQ ID NO: 67804 - DNA, 2085 bp, Homo sapiens
gcaggactggcaaagtgcacgctaaagaaagaaggaagaaatttttcaaaaagcagctctggggaggtttcatactccccccccccccccgcctttttttaatttttaagtgaatattttccaaatttgatcagttccagcccctccctccactcccacccaactgcccttttttctctcgtcaaagcataagctacagagttacagtctcgagatttggtgtatcgcttcctgcccccgcctcccctccccgcccccgttctccgtcctctattgaaacacctcgcccagcctagcgcactgagagctctcattttccccccttgctcgggatggtgccacaggaggctgtgcgggccccgctccgcttcgaatgggtgagttcagaacgctattcgtctttacacttctatagcctccgaatcctacttcttggtcttctcctttgaaaacccgatttctatgatttttgcatgcggcatacttgccctgggggaaagagatgcctcctattttctcttcagtcatttgtgctagtcgtaaattaaagctttgaaaagacactaaatccttattgtagactatggttttaaaaacttgggcatttctgagtctgtgcatattattttccgttttagtgaactattttgcccaaatcttgaaagagttttctctgatgtactcgtgatcgtatgtgtatgtgcgtgattgtatatgcgcccccagatactgcgtatgtgtgtatatatgtattaggcttaaacggaatctcaattttgtgaaggaaaggagcttagagaagaaataccataccacctgtttgttgcatcttagttatgaacctcgaacagaaattgcctgtcattcttgttttgctttgctttgtctcaagaaagaaaacattgttgcgctcctctcagtccctgagaccctaacttgtgatgtttaccgtttaaatccacgggttaggctcttgggagctgcgagtcgtgcttttgcatcctggaaatttggtggaattttattctttaaagcaaaaacaaaagaaaagaaagtttgtctgaggtgattgagtatacctctgaggttttcattgttagatgggatcaggtgaccagagagtggcagctcctggatttctgttaaagtaggtatatattttgctttaatagcgtgttggctgctatgtgtatgtatgcatgttattgatgcctgaggcttgtggaactcatctgcctggtctattccttgagagcaacacgcagtagtatacgagcgtaacaagaacagctcagtacctggtgcttgacctcagaacatctcagctgaagtcccagcatgccccatgtctccaactttcaaactccacagttaatcttaaaattgtgcccaattaaaatgggcatgtgaatatattatatattcagtgtccacacatgtgtatcatggatggctagacagtgaacatacagacgcagataaaggcaaactaatagtttggagtaaaatattaataggttaaaattctattcttgcaattccacacaaaggatggaagttatggtattaataaaaattaagtttgtatgactttgcaagattttttaaaaataaaaggagggataccacctccttgcttggtatcttttacaaaatgttatactttatggatataaaggtgataaagattggaaataaatcttctaaatatgtaaaatgaaagcaacagcaacagcaaacacaattatcgtattctttgggagtaacaaatactggttttcattttaaaactaaggaaaattttatcagtacttaaattcaatccaaaaaaggttttataacacccaaactgtacatttaaaattatcctttcttaaggtaatggctagcattacctagtttgtagttttcttgagctgtaactttttataactgaatcatttcagtgatttagggctgtctcgtagttggggaagagaaacagtaacttacctttcctttgttgtgaaaaattctagtataaaatatcatttaaacaattttcgtattattgggccaacatttctcttctatgtttgaaaaaca

SEQ ID NO: 67805 - DNA, 1072 bp, Homo sapiens
ctgggaggtccaagatcaaggtgctggtgggttctgttgtctggtgaaggctacatcctccagaggggtacagcctcctctgtgtccccacatggcagaatgatgcgtgaagtctcttttataagggccttaaccccattcatgagagaggacccttcatggtctaaccacctcttaaaggccctacctcttaatactaccatattggcaacacctgaattttggagaggacacattcaaaccatagcggtgagtttactagaattatgacaaatgtttaaatagcatcagcaatctaggttattggtagactagcttatttccagatgtcttgtttaaccgtgacctaagatttccagtgaattttagagtttagccccaccgtctctactatccatactctattaaccttttttttaaagtctgttcccacttttaaaatagctagaagcatccaatcttgtgttcatttagtgcatatttggtacttgctgtgtgttagacagggttctagaccctagtaattcattagcccaaaatcactaccctgtgttagcatcaataattttggccttcccttataagatacatttcaatgtgtctctgagtctttagactccagcttttgataaaaggacttataataaggtttgtgatttgcttttaatttctaaaagaatatggagcacagttgaataacatagaaactctagaattaaaacaatttgagattttcaagggcatggccctttaaatagtcctaaatcaccactttattttgtcaggctcaccggcaaaggcaaggcagggctcaaggggcaattaccttctatgccatggctaaatgaagtgtgttttcttttcaatattgactgaaatctcaatccatcttgggcacaaggctaggcactgtcacatgctatttctttgcattgttccaatagccttgtgaaatatatctcatcgttattccaattttacagataagaaaattggggctctaagtggctaaggaaggcatccaacaccatacccctaataaataaggtagagaggactgaaatccagattt

SEQ ID NO: 67806 - DNA, 1050 bp, Homo sapiens
gtgaacacaacagacatattttatctcccagacactgagtaatgtaactgattaggttttcttctttgattggctgccagccagtttagagctaaatttttaccccctcaacacctcctgcaaatgtttaggtcttggtggcctgtatttctgtattggctccattcctgtctccattctttagtgttatccatatttttctcctttctttttctcttctacatctagtttatcttatcgtttctggaataaagcaagatataaataattaaaatgtaattaaattgccttagcatagcatggaatttgagagttttgccttgctctctgctgctgaggggtgtattttcatgtcagcccacatactttcactcactctttcctaggaccccagctcttgtttgtgagttggcagtccaggctttgtgaagctcagggagcagaggacatgctcagattctagtcctcacaaatctttgccaataaccttggtctaatcagccttgtgtgtctttactcttgagtttgttcttcagtcacactgcaggtttgccttatcttgccttcataaattacaacaacttttttgtttaaatgcagaaacttaagaatgctcaaagttatggaatactgggtactttctgccctgaaagacacacatgcaatttagtgtaatttagagcaaagtgatcggattaaatttagtaaatctctctagaagtggaacatcaaaaatatgttctatcttttagaaaataaggtattctttatatttcttggagatatttatttaaatctgttgaatatcaatatcgggcttggggctaagggcagtttagtgtcaagagcctggggcctggagtcacattcaactctgccactaggtttgtgacatcaggccaataacttcattgtgctgtttccttatttgtattggttaaaagagaacactacctcctccctagaggattcatgagataacacatgggatttatgggatattgtgatgattcatgggataacatatggaattgcttgtctgagtgcctg

SEQ ID NO: 67807 - DNA, 1073 bp, Homo sapiens
gatttgctgcataatcctgggtaattcatttgtgccatcccaaataacactcattataccccatgatgtaccaagaactgtgcttggctgctggatatgcaggaataaacaaggatgcctctgtgtttaagagccgtagtgtcataaccatgtaattcaggctgtgaagaggtacacgaggtactaagagacctgactaaaagccacgtagcccagaaagcacaagactcacaggatccaggaaggatccactctaaggaggtgccactggagctgaggttgggaagacagggagttgggcaactggacatgttgagggtgaaggggtggggcgaggaggggatagtgtaggtgaagaggtcagtgcgtgcataggcacgatggatgagaaatcctggtgcaccaacgcagtgtatttgggggcagaggagctggagaagctggcgacaattgcatggtactagggagtctcagtttattttgaaggccccggaaaggcaccaaaggatggtgagcaagttcacgatgtaaccagatttgtctgagagagcatagcctcgccactcaaaatgtggtcctcagaccagcccttttggtaccaaccaggagcttgttagaaacatagaatctcagctctacctcaaacccactacgttagaatctccactttaataagatccttaggtgattggtatgtacactgaagtctgggacaccttgatctctagcaaggaccagcaaactctgtagagggccagagagtaaatatttcaggcttggccgaccatatggtctccatggtggctactcagctctgctgttttgcaatagcagacatggatgatatataaacaaataagcatggctgtgttccaatgaaagtttatttgtgggcactgaaattttaatttcatataatttccatcagtcacaacatgtcattcttcttttgatttttttcttcttttcttttctttttggtttgagatggagtctctctctgtcactcaggctggagtgcaatgacacgatcttggctcactgcaacctccgcctcccaagttcaagtgatt

SEQ ID NO: 67808 - DNA, 1061 bp, Homo sapiens
tatcagagctggaaggggcccttgagatccacgtaagccccttttcatttttcatgacccctggaaggttggaggacttgcccaaggtcataccgctagtgacagagcaggactagacccctgactctaccaccagctcggtcctcctcctagagctgcacgatagtcaaaaggggtggaaagaaggctcacgttggagcggtggaatgggcacttgacacggacttaaatgtaagctctgcgccaagtcactgggaccttaaagaagccattgttctctctaagccttggttccctccaccatgcaatggagagaagtcagactacacggttctctcttttcatggttcaacgctgaataatctctgtgtgggtttcaatgatgccccagagctcttaagcatatgtagtgaaagctaatacccactgtcattctcacattgcacgtcaccaggagttcagtttaatacatgagcacaaggacgtgcagctccactcccatctctcagagtctcggtttcccacctcgcccatgcagaaggctccggtaacccacatagcagttggccttttggcttatagccttctgtggaaaagacttgaacattttcttctatcttatggaaagcgaggatcaggttatcgctttggcaagcagagggaacaaccgggacaggagggtgtggccacatggagtgctggtctgacaccgaggagctttgcctggccaggttcaaaaaagcctccaccatgaatgaaaatggctctgcagggaaaaggcatgctctctgctcctgggttgtaccaaagcggctctcagccctgagctgcttatctctccctcccactctgtgagggaggccatatcagtaaggaggaagcaaggcagggagaattgactcatttcggatcctcctctgaactggggacagaagtcaaattaggctttgtcaactcaggctttgtcgactcaggcccgaggtccgataattttaagattgggtatctattaagataaaaaagaaaacttatggctaaagataaccctggcataaacatag

SEQ ID NO: 67809 - DNA, 1067 bp, Homo sapiens
gtaacagctttcttgaagctttcaagaataaaaataaaaactttaaagtacatggctgtcagaaagtccctcctggtagctaacttgagccctttgtgcttattttatcttggccaagcctccccggagcatgtgtaccagatacgataaccttccaccaaaccagggacctctcagatctcggcttttcagaacaaagaatttggatttccttagcctttcatcatcatctcatcacccaaacctttcattatctttttcaattttttctttgaactctttccaaaacttgtcttttgagttacagagaccatcacttaattagatctttcatttccaggggatactcctagtgcctaggaagaaataaattaaatttcactcggatatatttcattgggggaagggtgtagaaaaaaagaaattgaattccttatataaatagcacattgtctggtgccacaaatgcgttttccttttcccagttgtttttggaacaatgggtccttttttggtgactttaattcctcagagattctaacctctaaaaggtcatgatttgtgttgttttgtgcatacacggcttctgtactgaaaaaaaaaaagcgagatgtgtggcctctgattgtctagtaagtcgtgaggaaacagacaaggctgcaacccagcagcagttgagcaccttgtcaaagtgtgggaatgagcgtgtgtgggtctctgtgcttccagccttttctgcaccagctgttccaagcggagcagaggggtctgtcttgcttctccgtaacttcatcaacctgtaagtaggcttgccttttacagtgctgttctcattagctgtgcagacttccttatcctgatcatttggtatctgtgcgcagactttcataggggaaggggatagtctttaacttgtctttctgtggagcagaacaacagaggctggcctttgctcagccatcaccccagccaggctgctttaagcgcatttcatcacttctttccacctgagtttttctttgtgtcaaatgaagaagttgggttcacagatgacctctgaggtccct

SEQ ID NO: 67810 - DNA, 1030 bp, Homo sapiens
ttctttatcctgaaaccagtgtaacaggaccctatgtgctccaaactgggcttatcttgtatgctttatccaaagaaatatacatgattaccccagagaccttttctactatatcaatagtagggttacttgtctatgtaatttaaaaatatggtgcctctattggagaatctgcttatcaactcaatgagcaaaacattgcccaactagaagaggtgaagcaggcttccatcaaacaaatccaggatgcaattgatttggagaagtcgcagcgctcactggttcagaagcgccattacctttttgatgtgcagaggaataacattgctatggctgtggaggttacttactgggaatgactgcatagagtgtataaggaagtaaagaatcgcctggactatcatatatctgtgcagaacatgatgcgttgaaaggaacaagagcacatgataaattgggtgcagagcatctctgcacaacaggaaaaggagacaattgccaagtgcatttgggacctaaagctgttggcaaagaagactcatgcacagccagttatgtaaatgtatctatcccaattgagagagccagaaacagttgactgactaaatggaaactaggctatgtggcaaaatctttctgtattgccctctactgaagtagatagtttatatctcctaaaaatgaaacatttgttccctatactgagagaactcaatctattggccaatcagatgtttcccatccttcttactcagcatttgagttgttccatgatcatttttttattgttgttttttttgctgttgttgttgtttttagacagactctcgctctgtcacccaggctggagtgcagtggcacaatctcggttcactgcaactccgcctcctggattcaagcgattctcctgtctcagcctcccttcaagcaattctcctgtctcagcctcccgagtagccgagattgcaagcgtgcactaccacgcccggctaatttttatacttttagtagaggcagggtttcgccatgt

SEQ ID NO: 67811 - DNA, 1041 bp, Homo sapiens
gaatggcgtgaacccgggaggcggagcttgcagtgagccgagatcgtgccactgtactccagcctggacaacagagcaagactccgtctcaaaaaaaaaaaaaaaaagactgaagatggattattctctggagaaaaataaaatagaaattgtacataaaaaaaattaaaattgtctgggcacggtggctcacgcctgtaatcccagcactttgggaggctgaggcaactcccaacctcacctgaggtcgggaattcaagaccagcctgaccaacatggagaaaccccgtgtctactaaaaatacaaaattagccgggtgtggtggtgcatgcctgtaatcccagcttcttgggaggctgaggcaggagaatcgcttgaacctgggaggcggaggtcggtgagcggagatggcaccactgcactccagcctgggcaacaagagtgaaactgtctaaaaaaaaaaaagtaaaaaagaaatgggggttataatactcaaccattattttgttatgaggatgaaattagccagtctttgccagactctcagagatgctcaataaatgggggctattatcactattagattgtaataattagtattgtttcctaaggttgctgtagcaaagttccaacaactgtgtagcttaaaacaacagaaatctactggcggctagaggcctgacatcaaggtgtcagtagggccatgcttcctttaaaggagggaactgtccaatgcctctctatgagcttctagtagcttcaggtgtttcttgcatcactccagtcacatggctgtcttctttctgtgtgtcttcacatcatctctctgtacctgtctgtctctgtgtccagattcccaccactcccctcccctctttttttgagacagggtctcactctgttgcccaggctggagtgcagtggcacagtctcggctgactgcaacctctgcttcccaggctcaagcaattctccagtctcagccccctaagtagctgggactatagacgtgagacacctcacttggctaatttaaaaca

SEQ ID NO: 67812 - DNA, 1033 bp, Homo sapiens
acaatgtctcaaatgaaagtgtagaaatttttaaaaaaataaaaaacaggccagcacagtggctcacgcctgtaatcccagcactgtgggaggccaagatgggtggaccgcttgaggccaggagttcgagaccagcctggccaacatggtgaaaccctgtcgctactaaaaatacaaaaaatttagccaggcatggtggcgcatgcctgtaatcccagctactcctgaagctgaagccgacaatcctttgaactcgggcagtggaggttgcagtgagccgagatggcgccactgcattccagcctcggcaacagagtgaaactctgtctcaaaaaaacaaaaacaaaaacaaaaacgaaaaggtctggacccagcagaatggctcttgcagagaagggcggtgagaaggaccattctgccatcagcggaggtgatcatctgagactccaccatcaacatttacatgcgtacccgtgaagtgggcttcaaaaagggtgccccttgggcactcagagagatccggaaattggccatggagatgcggactccagatgtacacattgatatcaggcttaacaaaactgtctgggccaaaggaataaggaatgtcccatactatatccatatccatgtgcacagaaaacatgaggatgaagattcaccaaaaacagcgctgtacctatgtacctgttaccactttcaaaaatgtatagaccgtcaacatggatgagcgctaactgttgattataaaataaaagtataaaactaccaaaaaaaaaaaagcccagtaaacccagcacagccatgattattccattctttgagagtaagaatcttattttttttttctttttccttcttttttgtggagtgggggggcggacagagtctcactccatcgcccaggatggagtgcagtggcaccatctcagctcactgcaacctctgcctcccaggttcaagccatcctcccatctcagcctcccaagcagctaggaccacaggcatacgccaccatgcccagctaattttt

SEQ ID NO: 67813 - DNA, 4643 bp, Homo sapiens
cgcggactcgctgcgccccaccctccctttccccggggccgtccggagagcgggggcgagcttgaaagttccagaacgctgcggtgagtgcgttatcgtgaggcggagcgcggtggggtgggtgcggaagggggcgaggcccgaggagtggagccgggcttgtgattgggtcttgtaagggcagccgggcgtctattggccggggaagccgtaatggcaggcagcaggggcgggccccttctggaaggttctaagatagggtataagaggcagggtggcgggcggaaaccggtctcattgaactcgcctgcagctcttgggttttttgtggcttccttcgttattggagccaggcctacaccccaggtaaaacctctgctcaagagttgggttgtgggtctgggagcgtgcagcctccacacaggcctgttgggcttgctgaggcttgggggttctgagaatctcgtcgaggcgagtgtgcggctccttctaccggcttaaagggcctcagttttcggtgggatggcagcggtatttggttgcagccggcaggacggaaatgtagggagtgggccgcagtggccccaggggaggctgggagacgcccggcggccgcgtggcgggggagggttgctgcatcggtttgcctggcgcgcggggaagtggagccagcgttttctttcacccagttccctgcttagtccagtcccaccgtggttcttcagagctgttcttggcgtgcttccagtatgggggtacattccggagtagttaaaagcccgttgactcccgggggcactggcacctggcgagggaggggaacagacagtgctcagttcggggtaagaccacgtgttgagcaacgccccacgccgtctgggtagatgggtccttcatctagggcgtgctctgctgcggttggcacggcaacctggactgcagcactagttctggacctcgcgcgtgcttagacaggaggtgatgggcactattacctcttggcagtggccatacgtttttcctggttaagtgttctgttaagggatgagggaaatattttgattaattgaatttttaaaccagatttttctttttttcagcaaccatgtccaagggacctgcagttggtattgatcttggcaccacctactcttgtgtgggtgttttccagcacggaaaagtcgagataattgccaatgatcagggaaaccgaaccactccaagctatgtcgcctttacggacactgaacggttgatcggtgatgccgcaaagaatcaagttgcaatgaaccccaccaacacagtttttggtgagttcctaattttaaatgacagaacaaatataacagggctaggaagcacaaaagtttatgaaacgtgaggagggaactttttgattttagaaaaactgagctgagagacttgttatcaagtctgttataaaacaggttgtagaaacctttcaggctgaaatctggataacgtaggaggttgaagtttgaacctttgctacctatatggtagttgaattcacctacctatgaactgttaggtatttgagtaatcatggacttgagttttatcagaagagctatgaaattgaaagtgttttcatttgacaccttttacagatgccaaacgtctgattggacgcagatttgatgatgctgttgtccagtctgatatgaaacattggccctttatggtggtgaatgatgctggcaggcccaaggtccaagtagaatacaagggagagaccaaaagcttctatccagaggaggtgtcttctatggttctgacaaagatgaaggaaattgcagaagcctaccttgggaaggtgaggttggtttttcagtatggggtgcattccggagtagttaaaagcccgatgactcccgggggcactggcacctggcgagggaggggaacagatggggctcagctcagggttaagaccacgtgcccaacagtgccctaggctctctaggtagatgggtctgtcaacaccagaaaccagtgaatcttgacaattacacagtaatttacattttggtggggggggtgctccagctgttctttcaccagcattaatccatttgctggagtttgcatatatgtaagtataatagttaccaatctgtggtcttttccttattcctagactgttaccaatgctgtggtcacagtgccagcttactttaatgactctcagcgtcaggctaccaaagatgctggaactattgctggtctcaatgtacttagaattattaatgagccaactgctgctgctattgcttacggcttagacaaaaaggtatgtaccatttgtgatgcaagttcggattattttaagattaatttgatccatcgtaaatttaaatgagattgtttttaacggcaggttggagcagaaagaaacgtgctcatctttgacctgggaggtggcacttttgatgtgtcaatcctcactattgaggatggaatctttgaggtcaagtctacagctggagacacccacttgggtggagaagattttgacaaccgaatggtcaaccattttattgctgagtttaagcgcaagcataagaaggacatcagtgagaacaagagagctgtaagacgcctccgtactgcttgtgaacgtgctaagcgtaccctctcttccagcacccaggccagtattgagatcgattctctctatgaaggaatcgacttctatacctccattacccgtgcccgatttgaagaactgaatgctgacctgttccgtggcaccctggacccagtagagaaagcccttcgagatgccaaactagacaagtcacagattcatgatattgtcctggttggtggttctactcgtatccccaagattcagaagcttctccaagacttcttcaatggaaaagaactgaataagagcatcaaccctgatgaagctgttgcttatggtgcaggtaacaatggtatctcaattaaccctaaaggcaggcaggcccaaggtgactcgctgtgatgagtgattgttaaacattcgtagtttccaccaaaagcttggctaatgatggcaacaccttccttggatgtctgagcgagtgatagttaaaacaggagctatgtactgggttttcttttaacttcttttaacgttaactttttgtttgctagctgtccaggcagccatcttgtctggagacaagtctgagaatgttcaagatttgctgctcttggatgtcactcctctttcccttggtattgaaactgctggtggagtcatgactgtcctcatcaagcgtaataccaccattcctaccaagcagacacagaccttcactacctattctgacaaccagcctggtgtgcttattcaggtatgtttctgtacttctcttgtttggcttactgataacagataaagggaagtcttgactgactcgctatgatgatggattccaaaaccattcgtagtttccaccagaaagtcttatgttggccagttccttccttggatgtttgagcgaccattcttccttagcaggaccctagcactgtcacagacctggagtccattgtagtaatttgttttatttcctaccaaggtttatgaaggcgagcgtgccatgacaaaggataacaacctgcttggcaagtttgaactcacaggcatacctcctgcaccccgaggtgttcctcagattgaagtcacttttgacattgatgccaatggtatactcaatgtctctgctgtggacaagagtacgggaaaagagaacaagattactatcactaatgacaagggtaaggaggcactgtcatctggtcttgacagggataatggtatttcaattgagttactggtgcctaagggcgtctagctaagagaaactagagttacacatacacaggtaatttaaggcttttacttagagttaatttctttcctaggccgtttgagcaaggaagacattgaacgtatggtccaggaagctgagaagtacaaagctgaagatgagaagcagagggacaaggtgtcatccaagaattcacttgagtcctatgccttcaacatgaaagcaactgttgaagatgagaaacttcaaggcaagattaacgatgaggacaaacagaagattctggacaagtgtaatgaaattatcaactggcttgataagaatcaggtttgtgttttttttttttttttttcctcccccactcaatggaggggaaggggatggtaaaccaagcttgagctggatttcagtgtagggtcacaatgatgaatggtccaaaacattcgcggtttccaccagaattcaaggtgttggcaactaccttccttggatgtctgagtgacccaagatgttaaggaagaataaggccctattttaatgttggtagtggccctcttgtaagagtttgcgccagacttttagtatcagattgcgtcagggagaaagaagggttattaacattaaaagaacttgcagtaattcctttttctcttcctcagactgctgagaaggaagaatttgaacatcaacagaaagagctggagaaagtttgcaaccccatcatcaccaagctgtaccagagtgcaggaggcatgccaggaggaatgcctgggggatttcctggtggtggag

SEQ ID NO: 67814 - DNA, 1483 bp, Homo sapiens
cagggtctttggactcttctcgtcattggagctcaagtcaccagccacacaaccagatgagaggtcatctaagtagcagtgagcattgcacggaacagattcagatgagcattttccttatacaataccaaacaagcaaaaggatgtaagctgattcatctgtaaaaaggcatcttattgtgcctttagaccagagtaagggaaagcaggagtccaaatctatttgttgaccaggacctgtggtgagaaggttggggaaaggtgaggtgaatatacctaaaacttttaatgtgggatattttgtatcagtgctttgattcacaattttcaagaggaaatgggatgctgtttgtaaattttctatgcatttctgcaaacttattggattattagttattcagacagtcaagcagaacccacagccttattacacctgtctacaccatgtactgagctaaccacttctaagaaactccaaaaaaggaaacatgtgtcttctattctgacttaacttcatttgtcataaggtttggatattaatttcaaggggagttgaaatagtgggagatggagaagagtgaatgagtttctcccactctatactaatctcactatttgtattgagcccaaaataactatgaaaggagacaaaaatttgtgacaaaggattgtgaagagctttccatcttcatgatgttatgaggattgttgacaaacattagaaatatataatggagcaattgtggatttcccctcaaatcagatgcctctaaggactttcctgctagatatttctggaaggagaaaatacaacatgtcatttatcaacgtccttagaaagaattcttctagagaaaaagggatctaggaatgctgaaagattacccaacataccattatagtctcttctttctgagaaaatgtgaaaccagaattgcaagactgggtggactagaaagggagattagatcagttttctcttaatatgtcaaggaaggtagccgggcatggtgccaggcacctgtaggaaaatccagcaggtggaggttgcagtgagccaagattatgccattgcactccagcctgggtgacaaagcaagactccatctcaaaaaaaaaaaaaaatcaaggaaggataaaaggaagttcagtattgtaccacacttggaacttcctccatttcttccattttagaaggatatgaacctggaacttttgatgattctaagccttaaactatcaaaaagatcagggattgccaatgcttctaatggcactgcaagtatatgccataaccgttccctcctaaaagtgaaaaatgagagaaattcagtattttcccaggctcagcatccagaagtctagctctgggctggaagaaaagggtactaatatttagggaagagatgagaataagtagtgggtggcaggagagggctgagctagtgcctgctaacattttagttgtatcttggaaagattt

SEQ ID NO: 67815 - DNA, 1054 bp, Homo sapiens
tccgaaagtgctgggattacaggcgggagccaccgcgccgacctccaggtctttatatctatcttcctgagtagtactgcattactctctcttattgtatgaccaaccctcttgatatatttgcagttgtagttactgaatcacagacttcgccagcaagtggccagggtttttgtttgtttgtttgtttgttttgagagggagtctcgctgtgtcccccagactggagtgcagtgacgcgatctcggctcactgcaagctccgcctcccggattcacgccattctcctgcctcagcctcccgagtagctgggactacagacgcccgccaccacgcccggctagtttttttgtatttttagtagagacggggtttcaccgtgttagccaggatggtcttgacctcctgacctcgtgatccgccctcctcgttctcccaaagtgctgggattacaggagtgagccaccgcgcgcaaccaagtggttatgttttagtgaataagtctgggtgggttcagatggtaaaactgggctgggagagaaatcatagcatgtctgaagatttgtctgccttaataggataacatttgggcattcctctggctctgccgacttccctgttttctctaacatctctcttctcccaccagtcatataaaagggaatgtaagaaaatttttttggctgggcacagtgcctcaggcctgtaatcccagcactttgggaggctgacgtgggcggatcacttgaggtcaggagttcgagaccggcctggccaacatggcaaaaccccgtctctactaaaaatacaaaagttatctgggcatggtggcacacgcctataatcccagctactcgggaggttaaggcaggagaatcacttgaacctgggaggcagaggttgtagtgagccgacatcatgctactgcactccatcaagactctgtctcaaaaaaaaaaaattttgagtagaataaaagttgatttttaaaaatggaatataacctataatgttagactctgtggaatttgacattggatcctagaatttaaga

SEQ ID NO: 67816 - DNA, 1097 bp, Homo sapiens
aaataataatgtccttgttaactatgagagggacatctgggcatggagggaagggatggtcaggaacagggctagagtattaatattatgcggtaggtaccagatactggatcatggacttcatatacactattttgttgttttaatgtcataactgttagtttcatccttatgaatgaagctaaagttgtaataggtcaagtaaattgctcaaggttttagacttaccatatggtggagctgggattcaaacttctccctactttcaggctgtttttagcagcctgtttataccaaggttagctacgtgtttggaacactccctcctgggggatgccttgtcatcagagggcagctgacagatcagaagatgctatggtggatatgaggatccttccatcaggctggtaaaaactggaaaagttgtctctggtctgaagaggtgtctatttttatcagacgcgtagcctgtcccatgcacaatgtagaatgatactgtcaaaatcgcgtttttacagtcctttttctagaactttgtagagagcatgacccttctgttacgacatcctttctttcttggacatattagaatatacttgattatgttataacattctttggttagtttcaattccaatgattctaaggtcacttttcctaactttaggagtgtattatcatgttttaaaaacatgttagtgcaaactacaaactcatttattcatctaaatgttttgagcacttactttattgaggctgacactaggttcagactgggaacaggaagatggataagctcatctcttcccatgtgagacagatgcataaacaagtacaatgttgtgtgctaaattgtcacggtgtttaaagtgctatacagatagctactctcacttgattagtttttcattcatttaaaaaaaaaaaaatcaagccaggcatggtggctcacatctttaactccagcactttgggaggccgagatgggtcaatcaactgaggtcaggaattagagaccagcctgaccaacatgacgaaaccctgtctctactaaaaatacaaaaactagctaggcgtggtggcacgtgcctgtaatc

SEQ ID NO: 67817 - DNA, 1838 bp, Homo sapiens
ttcaagagacttgagaattgaaatcctgataggcaggagcaagataaatatcactctagttccatctatccctaaggagaaccagcttaagcgcaaagacaatctctcatttgcaaatatgggcatgattcctttttttgcttttaattgcccaaatcttgcccctttgtccggcatctggtcaaggaacagggaagttctcagataagggatgtgggagaactgggaccaagtccttggaatttgaatttttcctcccacggtggttgtctgggttgctgttcttgcccactctgtgatccaagtagttgctgagttcagaattgccatgggcttttggaaacctcagtaactgctagttaactaaagtaacaggtgtgaaattagttctgtggttcagttctgccaatcttaaacccataaaaagtacagagttctacgtgtattaatcagcagtatccttctctctcccatccattttcgcctgcctgaataatctccaagaactactctaaaagaacacaagtattgactttgacaaattacacctccctttaaacattcctctgctcagcttctgaattcttctgacagtctaaaaaatagatccaataagacaatattattgcatttcctttagattgatttatcttgggagcatctcctctttcttgtctgtacacctggcactgagatggtagctggcataaaaatccaaagataaatgcttaaaaacatcagcaaccaaattaattcaggaatttatctcactcatgtgaacttaatgatcattctcatgtttgatgagatgttctgggtggataaagcatcagagcaaagagagcaaaatgcgtggtgggtgcaggaaaaaggaaagttccttaggagaaacagagttgagcagtcgccagagtataactcagtagtaacatcaccaaggaagagaaggggtctgtgatgcacaggaagccagcgccaggcctggtgaatatcaaaagcagcagatggggagacaaggaggccggctggaagggaaagggtggctattgtcctgctctgtttatctgttgcttgcttttattgagcacccaagaggacaaatctctgaactagacgtgctccctgacctcttcctgcaagtaacattcagaagagctggaagataatatacacttagaaggtccagtggctctccatttgttattcttccaatggaagaccctgaactaggaacttgaggagaaagattagccatctaaagaaaagacttgcaaaagatctcaaactcaaatgaaatggatcgccttccaccaccatgcgcttccagctgaaaagtggtcatgtgtgtgtatggcagtggctctgccaccttctatgtggctcctttgtgttttagactgagtatggaaaggtgctcagcacactctgtccttttttccctgttagcataggtatatttctgtgtccacaggtacaaagccaaggacctatgtgttctagtggtcagaacactggacttggtaatggttatcaaagctactgtttattaagcgttttctctgcaccagggaggtagtcgaaggtgctatcttacttctgaagatgctgaggcttgaagacattgattaacttaccaagaccgtggaattagtaagaggaagacctgcattggcacccaggttgatctgacttcaaagcctgcattttttttactgcctatggcaatctgtctcccagaaaccagaacaactagtttaaattcccagctctgctactccctagctgaatatttcatgactctggccctcagtctgtcaaatggaagggttgtgctaggt

SEQ ID NO: 67818 - DNA, 1007 bp, Homo sapiens
gagccatgggcaacagaaacagctggaaagggctgaaggatgtgttttgaacagggttttaacggtcaaaagggttatggcttgaaaaaaagaagggactgcaggtgcaagtgagtaaggacagcgttcaggctaagagagctcagggtatctgcttcccaatcaagtgaaacattttagattcctgcttggaggttttccctcaggccgggtgaaatgtaaatgatcactcttagccactgctgtgcccaaggcttgaattaaatctcacaggatttcagttccagaatctactgtgagtgggaaaagtggctgaagtgtgtgggaagagggtgctggtggcttttcttccttgtaagaggtatacacttaaattcagagtgcccagaacaaacttaaagcttcctcccttgtttcttctccctcttcccaagctgcccatagaatcttctggcccctgtcttgtggaccatccttttgtgtttttggcctccaagcgaatggtggtgtcctggcttcctttcttcccataagcccctgagaccctcatcttctatgtcaagagcccgcccaaaactcaggttccttgaactgggaagttatcagatcccttgcaaaacactcgtccttggaggaagtacaaggcagtgaacaaactctgtggaacttggcttagctcccgatcctgaagtttggagttacagtgcaatctcctcagcatccctggagccggaagaggtgaccttggcaggcctgacacctgatggcaaggggtttctgctttctgtgctatgtccaggagttaaagtagagtgaaaccaaatcactcctgagagggccagtggctggatttcagaaacgggggctgacattccagggagtcatttatgggagggcctggccttggctcttcagccgcagtatctctctccctgaggaagaaatatttcccttggtttcccagcctctcaaaagttgtgtaatgtcaggatgccttgagcttttcc

SEQ ID NO: 67819 - DNA, 1026 bp, Homo sapiens
tctttagattatgaagtcttgtgagttctgccctggttctcagttttatgccccctgttaatcaaaacagttcagcttatcaatttagaccgacgtatatggagacatggcacttccaaggagcaaagactaatcattcttgtcaagatgcttaatcaggtacgatctgatctgatggcagttctctcagtccctggagtaccctccactctctgtgcaaagctttctagattgcagcaatcataatctcaaaattagaagaggccacagaggtcgcccagcacagccaccttccctgtgctgtgcaccaaacatctccagaagtatactgtccgtttctgagcgtgatgtctttgcctgctcttcttctaccagttctatgattgacagttcctcaactcactttatattatctctgctgcttggggcattcctggaagagatgagtagtgctgagatgcatataccctaatacattttccccaaggacatagctgcttgctaactagagagaactctgccttttgtttggtatttgggactttacactgatataaattctattctaatttctcctctctaaccactcactcctccaaccacaggaaatgttacaaaggttctcccatctaaacctctgcccagaaaaactctctcgatttcttcccgggtcctttgttcccatcctggcccactcgcagtcccctaagctctttatggtggatggggatgttgttttgcatcaactcgctttggagagtatgaggaacagagagaatgtggtcagaagtatgcttcctctggtggtccctgtgaccggccccccctccaacccccaaaacctcagaaattggctctagtatgtgttcactcaccatagcccttccgaagaaagtctttcttctcatcttggctgctgggttccttctcctggagagaacaagtttccggagctcaaattagtctcccaggctcagctcagaactaacttacgctctgcacctaattcttcctacccagttaaga

SEQ ID NO: 67820 - DNA, 1004 bp, Homo sapiens
agtgactcccgctgtgctagtttttcttgtgccaggcagcttctctccatccacagctcctctctgtttcacctctctcctcccacttccaaccagatcagtttctctgattttctttttttcttttttgagacaagatctggctctgttgctcaacctggagtgccatggtgcaatcccggctcactgcaacctccgcctaccaggttcaagcgattctcatacctcagcctcccaagtagctggaatcacaggcgtgcaccaccaggcccagctaatttttgtatttttagtagagatggggtttcaccatgttggccaggctggtctcaaactcctgatctcaagtgatcctccagccttggcctcccaaagtgctagaattacaggcttgagccaccatgcccaaccagttctctaattttctttatgacttttctttatttccatgtagactcttactgtttttgatgacatttttctaccactctccccaaagcccctcttaatgtcggacaccctgttcggcaagtatctcctgttgtatttccttattcctctttttctatattttccttattttagtgactgtctcacctctctctttcaatgtctttaaaaaatatattaatttttttttaagagatgggagtctctcactctgttttccgggctggtcctgaactcctggcctcaagtgactcttcccccttagcctccccaagtgctgggattatagacgcgagccatcatgctcagcttgttttgatgtctttgttcacctaaaacagcaggtgggtttgactgctgtccactctacctctacaatcatcaattctgtgggggacataaaatttcctgctctggggtaagaggtcacatggattaggggaagacaggtggtaaaccactgaatgaaaaacaaacacctaactcttaggtaatatttattatgtgccagacacaactctaatccctttacatatgttatctcagttaatctt

SEQ ID NO: 67821 - DNA, 1007 bp, Homo sapiens
ctctttcattctcttttctggagttttctttgactctgggacttctccccactctcattaaagcctcctgcccagccccactgttccctgcctcctgcccagccccaacttctaggttgtctactctgcagttaacagcactctccctcctgctttgagttcagacatatgaatctctgtgtaatacacatatggtgcttctgaagccttctgcacatgttcaccagggctgtgtcacagttctttaaaaactgagtcggtagatgtttttggtcattcaggagactgggtggacccccattaacatggatctgatttctgtgtgactttgatgtaatagaacatccttctccatggatactagccttctgctctccatgtgtttgtacatttgactatcagcccaggaataaagaggatggcaggccacagcaagagccagaagaaacattacaggcctctgagcagagaagatgacgtgtagattggcttggcccccacacctttggtttgtggtgggggtatgattgattactctactgcagtgctagcaaagcctcatggcttttcaagtttattgtattcaagaccatagtctagggcttatagaaaccaggcaataggctaaagaaaaccatctattagcctaaattccactactctcatcctcaaccttttttattagtgtgggatggaataggaatgggagaagtgttgaattgtttattgtggctggaaaaaaaacacgttcctctaacaggatgtgtgcctgtatcaggatatacatccttcccccttacctcaatttgaatcagagtagttaaattaaaataaggtgaacatgagtaaattcatttaaatactttttatctaaaagcaattttcactgtacataggacataggagattggtttaaatgtatataccaatctctgaatagtcccaagattttttccttaatgtttaataatgcattttttataatttgccatcttcagtttaaaaaa

SEQ ID NO: 67822 - DNA, 1126 bp, Homo sapiens
gtctgctgccagcctgaaccggcaggaatgtgttacagtggttagaacatgtctctgggaatcatagaacttggttttctgctcctcccagccctacaggctgtgtgatcagatccgagtcacttaacttctctggacttccatctcctggtctgcacaaaggtgaaaattacacacatctgttgttttaatcagtttagatctgtcaaattctcagttttcttagaaaggagccagagagagcaaactatagagaacaggtctccctggacccattctctcctctgtctccgcttcctctctcttttccttccttccacaaacatctgaatagcccctttgaatatgaggtggtgcaaagtgcttgtactaccttgacagtgggcagtggcgaccatgaaagcaggcatctgcaactgtgtttggatcccaaactgctgcaagcagtttgctctctggtgggaacgctgctgtctgtcttcaccagggccttgcaaagcctctagtgaactagctcttgaggttgtaggtggtttgttatcaaccagctggttctcaggggatggtggtggcaagtgctctggaaaaggtatgatttggggattttggggatttattctgtggctggtttggaaaggtctgtttagtttctatttgcatatggaggcagaaacagcctgattttacttaggcccttgctgtcccttagtccagattgcacatgatctaagcaggtatagcatcagatgttagagacgaatcattccttttttattttctacaaaaaatgaaaaattagccaggggtggtggcatgcacctgtagtcccagctactcaggaggctgaggcatttactttcaggaccttgaccaagagagaatctgattggctaacagaaaccgatgtcatttcaaagcagcattgtgaatctttttttttttttttttttttttaaccttctctaatccagaccctttggaaatttacttcaggtattttcagtctgtgcctgtgaaccattcagggctctgaatggacttcaggagagggtccacgagcccccttcattggtaggcagaattttgtatctctgtacatttttctggggagagtatccttggcttt

SEQ ID NO: 67823 - DNA, 1033 bp, Homo sapiens
gatttgcttgggtcatgaacatattagacgctccataagtatggttctgtttttgagacggggtcttgctctgtcacccaggctggagagcaatggcacgatcttggctcactgcaccctccaccttctgggctcaagcaattctcctgcctcagcctcccgagtagctgggattacaggtgcacaccaccacgtccagctaatttttgtgtttttagtggagacggggtttcaccatgttggccaggctggtttcaaactcctgacctcaaatgatccacctgtctcagcctcccaaagtgctgggattacaggcatgagccactgctcccagccatatgtacagttcttgttgaaaaaataaacagctgattgacctaacagaaagagcacaaaacaatgcaaaaatattcccaacaaaatagggaaaattggaaaatttgttgacataaaggagaaaaagtagattaggagcaggaaatggagcctgtggttcctgtagtatatagtggtggttctgtggacatgggttgggaataatcacagcagtggtgaaaatgtattgagcacttacttgctcttagtgtcatccgctccgcatagcaacctgatgggtgcttgtcatcctcacctttttaatggatgaaggagttgaggcttagagaaatggagtaagttgctcaaggtcacatagctgttaagtatagatttgaactcaaggctaattctagaatcgcggtgctaaaccacaatacacaccaccgggggtggtgtcagtccctgttcaatgaagaatgcggtttttctgcacttgtcctatcatcgaacaatttctctgccaacaataaatagattcttattgtgtccttgggcagacgactttcacttttaaaatgagttaacgctcaattcatctgtatttttaaaaatggtaatactgatatgtaatttagtggaagaagcagaaatccccatttggtgggaggacaacaggaagcagctggctgtgggtgtatgggtgccccctcccgga

SEQ ID NO: 67824 - DNA, 1080 bp, Homo sapiens
ggaggtgggaggcaggagggccgaattctcccttggcttctgccactcagtggcggaagcctgagataggagccgatattgtggcatttgagttcacagcttccaggtttcccttggccggatggccctgggtgtctgcaggcaaggtcaacagcagcatgctctggtgacctcttaccattctagtccccatttatggatgagacaagaaacaccaatcatgtttttgttggattaggaaaggaacagtgccagggtaggcgagactttaagactcataggagaccaacagaaagtcaaagcagctgcaatcaaaaggaaaaagctgaactctttccggcctccattctaaacccagtaaagttcagaagaaaccgtggtaacaagagacttggagtaatacaaatcaaaccaacttcatgttcattaaattagtggactcagaaaggccagtttctgtgaaagtatagctgtgaaaatgcaggtaacacaaaatcttgtctagacccctgtgccctaccccctctttatcaagcctgtttataaaaacccaaaaggggttggtattcagttgttttctaaatactctgtgtattttaaaattgtttgcattgaatagttagctaatacaaaataatatataggggggcgcgatggctcacacctgcaatcccagcactttgagagaccaaggcgggtggattgcttgagcccaggagttcaagaacagcctgggcaacacagcgaaaccccatctctacaaaaaataaaaataaaaataaattagctgggcatggtggtgcgtgtctgcaatcccagctattcaggaagctgaggtgggtgaatcactggagcccaggaggtggaggctgcagtgagccgtgatcatgctactgcactccagcctgggcaacagagtgagaccctgtcaaaaaaaaaaaaaaaaagaaagaaagaaaaaggaaaataaataatatttataaaatatataaaaatatgtgtaaagtataaagaacaaatgacaattgcaggagtacctctcacctgttctgctccattgcatgtgactgatttatgcat

SEQ ID NO: 67825 - DNA, 1279 bp, Homo sapiens
gcaaattaaggcactacagttaggctgggcgcggtggctcatgcctgtaatcccaatactttgggaggccgaggtgggcgaatcacctgaggtcaggagttcaagaccagcctggtcaacatggtgaaaccccatctctactaaaaatacaaaaattaaccgggcatcgtggtgcgtgcctgtaatcccagctactcgggagactgaggcaggagaattgcttgaaccctgccggcagaggttgcaatgagctgagattgcaccacggcactccagcctgggcaacagagtgagactccatctcaaaataaataaataaattaaaaagacactacagttagtcttcagtgtcattatctgaaaatcatgaggtactgccttataacatggatgtgaagattaagtcagagaatacaggcaaaatgcttagcttgatgcctgacataactaaccctcaatatactcctattaatagctgagaaggagttgactttttggatttttgtttttgtagttaaaaaaaaaacagctagagcaaaagccaaaaaaatttacagttacaataatgtttctaatataatacttggaaatctttgatccaggttttctgtgttacttgtgatcagagcagttgatgggccaggatgagaatacagtattcacgtgtacctggagtactctcagtgacatttgcctcggggctggatcacatgacctggtatttccattgagtgaattatctaggtcataaaggacaactctttgtacttctggaatctgttgcatcccttcaatatctgtgctgaaagtatggcctgggtacaggctccaggagctttgaaaacataattttggatgtgttcagaagtcctggcagcatttgggtttgtctggcatggggctatggatagatcaattccacagccaagggctgctttgggaacacctttctgaaaactcagtataccttatttttttctttctttcgttttttacttgtggaatcaggtcacaaaaggttagtatatcttaaagagtgtttcttctggaccacgtggacattggagagataacatggtgttttagttcggtttgagtaaggtcacttaaacgcttgcttatagtaccctacaatccccaagccctcctcctcagtggggatatagagattgctgaatgacacacagtccttgtctccatggtgcttatcctctaaaaagaacaaagcagataataagtcattacaagtatgatgactgttaccaacgagggtctgcac

SEQ ID NO: 67826 - DNA, 1092 bp, Homo sapiens
ggcaggcggctccagccccaggctggatttgcagaatctgtcctttgcctccaagcccagctttcagctgggagagggggaagaaggggcagtggcagcagttcttctggctctttctccctttctctctttctctttctgtgttcaagtcacattacatgggattctgttcttttgggacttcgtcatcttttccaatatgtcctgggacctccggagctgtaacggggatgctaaggacacggtcagtggattatcgtgactgtactaatgaaaggattcaagctctcctggtaagtagaggagggatagggcaccttcctcttctgcctttcttcagccctgtgctcgccccagcaccctcaagaggtctccttcattgatgccatctcaccaggcatcgaggggttaagatgtggggactaggcactttaaaagttggggtactctccctggctcccccagctgctgcactgctgcactattttccttaccttcttcgaggtcgggggttttgtggaagttgaggggcagtggagagaatcaaattgcagctaaaacgttctccaacttcgagtacgtgaggagtggtgcgcacagagggaactttataataaagaaacatcccttccctttggcgaggtgttgtgcgtctgcatcaggctgggggtgcagttgtactcttccttagccctgaccaacacgtgattttgagggagggtgtgcggggggcctttctcacgtcagctgcttagggcgggcagtccctaggggcatccctctgaggggccaggctccatcttctaggatgcctggtgtccagaggcgagtggaccgctgcctaccccaacacaagcactcaccttgggcctttgcaagtgcctgttcctgggcttaatcttgggacattaaaggcatctctcgcttggggtgtgggagtagctgtattctagctacagaagtagtcagaatatttttaccttccatttaaaaaataaaacctttacctctctctgttttttgacccaataaggagattgcacgggcaggtgaattggcttttcatctggtggagaaactgcagattttgct

SEQ ID NO: 67827 - DNA, 1108 bp, Homo sapiens
cagcttaggcagcaagagcgaaactccatctcaaagaaaaaaaaaaataatgagggggtctcaggcaaaggagaagcaagactgggccacagaaatcagactgagggccttgggaagggagggagctgagcagcctggtcaggacagggatatgtggccatgcaagggtagacgtttaagtggcaaaacagggctcacctacagacaacctcaaaagtgaggcagaggcctgggctggctagactcagtgggaaaagccctcaggctcaggacaaccaaagagcatggagatgcactttccaattcagtgggcaggacgcttggggctgagaactggagtacacacgttcttagtgtgggaagagctttagaaattacaatcatgatgcttctgtgagctttccatttaaaaaaaaaaaaatctcatacaaccttaatacaaccctacaggaaagatgttttttttttttcccccattttatatgttaggaaacagagtctcaaacaggtcttaaataactagcccaagaccatataataaatggcagaactgggataaaactgaagaggtgatgctctaaagcctgtgctctcgacctccacactccttgatgagtgaaatgttgagctggtaggaatcggtagctttatatttcacaattgagagaaggtttgctgagggggtgaatcatcctttttggatggtggtgtgctctttatcagtaggtgatgcagtagaagatagtttccccagtctaccttccctcatagtgagccatggtggatgtcacagctgatctggtggctgtcacttcagggctgggttaggagtgattacaaaaaaattgtgaaatatatcatgcatacacaaaaatgtatataatgtatccatacagtgtaaagatgaacattgtctgttcaccgttcagttaagcattagaacattgcctatacgtgtgaggcctttttttttctcttttaaaaatctatggcaatatgcaaaggctgggaggacaagccccagagaatggaaatcttgggaaatgagcactgagtaggttcctgagtctgggtttcagagtctcccacttggaggtggcaggctatg

SEQ ID NO: 67828 - DNA, 1005 bp, Homo sapiens
cttgaggccaggagtttaagaccagcctggccaacatggtgaaaccccatctctaccaaaaacgtgaaaattagctgggtgtggtggtgcatgcctgtaatccaagctacttgggaggttgaggcatgagaatagcttcaaccccagaggtagaggttgcagtgagccgagatctaaccactggactccagcctgggtgacagagcaagaccttatctcaaaaaatatgtaaataaatgaaaaataaaataaaataaaatcgggttaatgacatctaccccagagggctgttgtgaagactgtcaggattcaatgaaataattcgtgttgatgctcttgggatggggcctggcacgttataaaagttagctgcccctatattttttttgttttatatttagcactatatacagaaaacatggctacagtccttgcctttcctgcacttaaaatttactactgtttttcatgccttaggtggggccagcgagttctgatcattattatttttctagtagtgcctttctcaggacacaaggtcactatcagtcagtttgacccttcctttcaagtgaacagcctccccagtcatgtgttttggtctcattgctggagctcttccaactcctgtcccacaaggttatggtcacttgaccactgcactggaggctggaacttgttctacatttactggaagtgtgactttgggcaagtcaccaatgacctcatctctaagatgatgggcaggattagagcagtagattggtctctcagaccttcgggggcttcatgctaaggatctttagtgtacaagacctttaatattcttcctgagtttccactggattctttctgccccgtcttgaattaattgtttgtttactaaactgacatttcttgagtatctactgggctaggtggcaagcataaaaggatgagtcagtactggttgttgctctagcagagtgcctgctgtcatgggggtagccagagctggacctccct

SEQ ID NO: 67829 - DNA, 1064 bp, Homo sapiens
atgttacaatgaaccataatcatgctactatactctagccagggtgacagggtaagaccctgtctcttaaaaacaaaaaactccaaacaattgggtccaattttcattcagctgtcatacaagtaacattaccaacgcttcttcaacacctgaatttgggttaaatgtggtggctcacgcctgtaatctcagcactttgggaggctaagggtagagaattgcttgaacccatgagttcaaaaccagcttaagcaacatagtgagaccccatgtccaaaaataaaaataaaaattagccagacatggtggtatgcacctgttgtcctagctcctcaggaggctgaggtggaaggatcacttgagccaggaggttgaggtttcagtgagccataatcacaccactgcactccagcctgggtgacagagagagaccctgtctcaaacaaacaaacaaacaaaacccaaaccctgaatttgattcccattacttacaaaatacagttgacaccctgaacggcatgcagggtgttctcttggctgtccccatcctgactgtccagcctcatcactcagtccattctcttattgcagctaccgacaccctcatccattgcagggcatgtcacataccgtttctatctctgcagtatttaattctgctgttcctttgcttatgcttagtgtttctgcctacggaaatcccagttatcctccagaatttagtttcagtacctcctccttgaagaaatctttgcagatttaattgatccgcgagtaggaattagttgttttctattctctgagcactatggattcctataatttcagtgtcttgggttagatatcattctgtcttttataacatattaaatcttctctaagagtaaagagttatctcaatttttctatcttccttttttttttttgagataaggtttctgtcatgtgggctggagtgcagtggcatgaccacagctcactgtacccttgacctcctgggctcaagtgatcctcccacctcagcctcccaagtggctgagactataggtgtgcaccaccatact

SEQ ID NO: 67830 - DNA, 1043 bp, Homo sapiens
tgtgccactgcactccagccagggcaacagagggagaccctgtctcaagaaggaaagataaaagaatcattaacaagtaaaaacatggaaaggtctctgaagaatggaggtataacagatgcctcttgttataacagatgtagggagcagctcctaggattgagccactcactcactgaaggacaaacttctaagaaggctccctgcacttcctccaaacccaaggctaaaattcagaacttattggagagggtgtggccattgcccagtgtatggcacagaggctctagaggttctggggactggggcacataagctggaaactgcccattagggtatcagtgaaactcattgggaggctggtgacttctgcagaaaagcaccagaacaaaaaagggcagccccttctagtgtctctctagcgccctctactgacaagatataacattgtgccagccggcaaagaagaaacgttgacagggcacagctccagcatcacaaggcagggaaaagaagggtggatttgcagctgaggggcaatacatggatacgtagcctgagtaggaacaacggaacttaccttgaagggttgttttgagggttaaatgcaatattatacaagcaccttttgccttgtagatgtttatttatggaagtagcatggtatggtgaaaagatggattttattttattataattttttgagacagagtctcactctgtcaccgaggctggggtgcaatggtgcgatcttggctcactgcaacctctgcctcctgggttcaagcaactctcctgcctcagcctcccaagtagctgggattacagatgcctgccaccacacctggctaattttttgtatcttcagtagagatggggtttcaccatgttggccaggctggtctgaactcctgatctcaggtgatgcacctgcctcagccttccaaagtgctgggattacagatgtgagccactgtgcccagtggaaaagatggatttttagaaataactgtaggatcatgggtacttaaagtacaggctcc

SEQ ID NO: 67831 - DNA, 1039 bp, Homo sapiens
gatgtaaaaccaacagaggacaacagaacctgcaattaagttctaaatgtatactgtaagggcaggggcaggagaggtacccaaccgttctcgggtgctttcacatgcttttttgacttcatcatcttttcaacagtacaaaggaggaaatatgtagtattagcattttcagatgaagaaactgagtttgagataagagtacgtgggtgaccaacaagcaatgcaactcagttttggtttcagatctgactctagtccaagatctttccgtggattaacagagaagagccagaaaggcatttcagaagaagtcggacttgagccagacaaggagggaggctgaaattggggcattgccaatatacctttctttggagctgggattcctctaggtaacggaggcagggccagacagcccagaactatctgcttcccggatactgtgcggctgctgttctatcaacgggctgcagacagaagcaatcttggaaagacttttcatgatgagcctgcaggggctggccctcccagaatgagacattttgccaacagatgcccaagaaatattagctctcagcatgagttcgagcaggatgcaggtgacatcaatggattgtaattattattcaccttcagcatgttttcctatgcagctgcagtggacagacaaaactgtctttttggaagattcaaagcatgagaatgcataagccaaacatttgctgttcagggtggtcccggaatagcaacgtgggcatcgcctggggtttgttagaaaggctgacttttgggtggtcccctagacctgctctatcagaatctgtgggtgaagaagattcttaggggattaaagtttcccaggcattgagctaaccatcatcattgttagtgttgtcggttttgtgctacatccctcaagagatgacaatggttctcaaatagttggggtgtgaggcaattagttaatcgccatgggtctagaggcaggtgatctggattcccagctctgcctctttcttgcatgggaccttcacttttc

SEQ ID NO: 67832 - DNA, 1089 bp, Homo sapiens
ttttagaatagagaaaactgtaagaggtcggtcccgctgctggcttcaatcagatgcccgtcaaccaagagaggctttagtctaatttaaaatacattcagggtacgaaatcccagggctttcccttgccacccttctcattgtctcctgctatcatcaggaagttatttatgattttaaaaagaaaaagcccagcctgggcaatatagtaagagttggtctctactatacttttaagaaaattaaaaaatgttcttaaaattagccaggtgtggtggttcacactgtgtaatcccagctacttgggaggctgaggtgggaggattgcttgagccctggagacagaggttgcagtgagccgacatcatgccactgcactccagcatgggtgacagagtgaggccttgcctcaaaaaaaagaaaaaaaaaaaaaagaaaaaaccctctgttatattgcacttaatcccattttcttttattccagctatcctggactgcaggtcagttcatcagttataatccctccctctgttcctatcctcctttctttgagtgaaacaattctacttccttaaacctattctctgaagttaaaaatcacttctcctacaacatccccacccaatctttacctctcaagggccagtcactaattgatgtgtaactcattgcaccttgggacagctctgatagtttttattttaagctcaaactgtttcctgtggcttcctaccagaggtcctatcctactcccttgtgagccatagaacaaatctaatttctcctccacgtgacattttcacgtggctctcatgccttctcggcacctgctggactctcacattaacatggcgatggctccctcagccagcgactgggctccttctcctctgaacggagtccgggtgatctcaactttcttaactgtgaagcccagacagagttgtaatactgcagagaagtggcctgagccgctcagaatagagcagaatcatcacttcacctgctttgggaatcacaatgcaaacatatattttcagtcattttctgaatcaaaagaatcaagaaattgctcactgttcctttagg

SEQ ID NO: 67833 - DNA, 1052 bp, Homo sapiens
ttatctcaaaggatatttcaaagaggaacaaattataaccatctttgaaaacactgataatgctacagaaccagtgtcagaaatcagacataaatcactttacccaaagggctcatctgcagtaaatccatctgcttcctcctccgaagctgctggggaaaaggttcatatcccctaagagaaggatttaatgaccagctatccaacttcttatagaatccaactatttcctcaacttctcttgcaccatttcctccctcattttattctagcctccctggacctttctctttcttgaacaaacccagttcacctaggatattggcacttgttggtcccaccgcctggaactcttactctaacattttgaatgctggttccttttcagccttcagatcaaagctcaaatgtcacctcctcagagcagactttcttgaagggccactccatataaagtggccttcctaaccccaggcaatcattaccacgtggccctgtttcttttcactgcccttataggagcggaaattgtcttgttttcttgttgttgttttttccttgcttaccaccaggctgagcactccatgggggctggggccacgtctatgtgtgcttccccagtacctccagcaaaatgactggcacatactggggttgcagatatatagtccatgaattttaaaaagtgggatcttctttccttttttttttttgcttttgagatggagtctcgctctgtctcccaggctagagtgcagtggcacgatctcggctcactgcaagctccgcttcctgagttcacaccattctcctgcctcagcctcccgaatagctgggactacaggcgcccgccaccacgcgtggctaattttttgtatttttagtagagacggggtttcaccatgttagccaggatggtctcgatctcctgacctcgtgatctgcccgcctcggcctcccaaagtgctgggattacaggcgtgagccaccgcgctcggccaaaaagtgggatcttcttaaagccattcattccatcgtccagccactctgat

SEQ ID NO: 67834 - DNA, 1387 bp, Homo sapiens
agagaaaggtccagggaggctagaataaaatgagggaggaaatggtgcaagagaagttgaggaaatagttggattctataagaagttggatagctggtcattaaatccttctcttaggggatatgaaccttttccccagcagcttcggaggaggaagcagatggatttactgcagatgagccctttgggtaaagtgatttatgtctgatttctgacactggttctgtagcattatcagtgttttcaaagatggttataatttgttcctctttgaaatatcctttgagataacaggaactcttgcttttttctccttggctctggcaggacccaaacaaacttattttgtttttgtaggaagggggaaaagtgggtcaggctgttttgtcatttcgggcatggagtcctggttctattgcagggccttgtctccatggaaatgaaaaatagtgtttgtcatgcctgttcctggattgaattccaaactctggactgaacagaagctgcaggaaagccaggcagcaggggggagtgggatggatggagactccagccatggtgatgaaggacctcttctccttgcctgagcaggaaaggcaaacaacctttgcccaggtccagctcttcctatcacctctctggactgagaacaccactggaagggtaactgaagtgctacttttctctacttcgccaaaaactttccgtgaactttgcccttatgttaattagtcaattaataaattcatcaacaaccaaagtcagtgctcagactttcccttgtaccaagtaattccttccaggcttgaggagatccctaatgagactatttctaggtattaaattagtcagctggctgcaaatgttttggatgggctgtcccatctttaaatttctttgtaaaaattttttaaagttttgggttttttttttaactgaaatatttatacaagacagggaaggaggaatcagtaagtggggcttgttgcccataggaagtgccctgaattatctacacagtatttacagagatagggcatgtgaggggcggagtgcagaaggaggtaggggcatgggccgtgtggacgctgagtgaatgttcggatggcccacagtagctggttcatgagcctggagaattgtcaggcttccatttgtaaggtgtctctaccagtggtctgaacccggcaacagtccagttccacctttggtccaaattttgggcagatcctgtccctgaacaccttgtacacttcacccaagatccccatttggaaaggcctccaggaatctccacaattttcccaaacggaggagaggggacaagaggttcatttctgtcaagatgttgcccttgcagcgggtagggaaggcccattctgtgtca

SEQ ID NO: 67835 - DNA, 1020 bp, Homo sapiens
tcaaaccaactttataatgtgccattcatctgaccctgccactattattaataacaggattgcattatatttcaaaatcttgggatttaagagctaaaaataaaaaagaccttacatatgctgtagggatggaaggaagactggtgttagatgggctatgggactaagactccctcccagagtttagagttagtatattcagctctcaacttcacatgtaagaaacctgagtctaggggggttaagtacctagacaaggtgatatgactttggatctggctcttcagttccacaaatatttcctgaccacctggcatatgtgaggcattcaagttcattttggtgaatgagaaaggatctgtgtgcttgggacatttccagtcaggaagagctagaggcctattcttcccgtgttaatataatcagtaggtgggatgatagaagagaataaaggaaaacaagaaatgctgccttgaggatgtggcacttgagctagattcagaaaatgtgttggagttagccaggtgaagggtacggggttcaaggagggcacggtaggagagaagagaatgttcggggtggcggacagcatgaacaagggtgaaaaggcataaaatagcatgggatatatggaacattgacagaaaccatgagtcaccaggtataacatgctcaagctgatgttttagagattcctgaaatcatcagctctcattcataataggtcttctaagacccccaccagccacctttaagccatggcaggggacccggaggtcattcattcatttccccatttcccctctttttaagacctgcaacacagactattattgctctcctcccctggttaccttgctagcaaacagtgctccctgaagtctgatcacagtatctcatgctacctatggtttgatcctacctcctatagttaggtctagctgatgtccttgagaaaagggaagtagaaaaagaggatgaggactctcttcaggctttcttcagtgactctctgcggca

SEQ ID NO: 67836 - DNA, 1061 bp, Homo sapiens
attttatttgcagcttataagccttgatgtaagtggatttggtcctgtgggaagtacaaggtacttattgggaataaatgttggggtaagggaatatggaatgtgagaacttcggctgtgtgcatctttaccctgggcagaggaagcaggaacccacatggcttccttacaaggaaataatatggtgtgggtgagttacaaatcagaagagctgcactttgtttctctcaacagtgggcatttagcttccctctgtcaggcactggtcttcattttttaacatagggattatggtacttgccattactcccttggtggaatgttttaagaaataatgcgtatgtgaaggctgtgaaaaataggattgtaattgttattttcatgaacaaaaatatctgaacaaaatatagaagctttgcatttgcagtatgtataaaatgagctgattgtattggatggtctccagtgagcctttcaggtattaaattctatatgccccagacaatttttggcatataataggggctcaaacaataacaggttggacggacggatggacggatgcatgtctagatgtcgattgcccgttggctcgtgcgtctgtgtccacatgggcactgctgccctcccgtggccaacggcagtattacggtgcggcaagccgcagcctgggcccctctctcccggtttctccccagcccctcacctggctccctgagctggctcctttgggcttgtccttggcctcgatcactgactgcctgcctttcctcctccttctctttccaccccgctccctctctccatctgccgctgcagcactgccagtaactccaaccgcagcacgccggcctgctcgcccatcctccggaagcggtctcgctcgccaaccccgcagaaccaggacggagacaccatggtggagaagggctcagatcactcctcggacaagtccccgtccacaccggagcagggcgtgcagcgcagctgctcctcccagtccggccggagcggcggcaagaattccaaggtgagcgggaccccgttgaggcggtacctcc

SEQ ID NO: 67837 - DNA, 1029 bp, Homo sapiens
agcaccccctccctctggccctgccgattctggcccttatatcctgcttggtccctttcccagaagggccggccccactgtcccccggcaggctggcttggaagtcattgaaggcccattttcactgcacctgatgtcggagaacagaccctcccccactcccgaccctgcacccatgtctgcctgctccctggacactgcctctggctgggagtttattccctccttacatggtgcggtcgagaaacagagccctgcctggcgttagtttcattcctttggggcaggagaccccatctggttgtactccaggcccctcccctttggtggttgattctggattgcccagcagtggtgagtgaggatggcaggagggctgcgctgactggggggcaggggttcaggtcgatgagttcattggtgcagcagccacgccctcaggagctctgcctgcgtactctgttcctccccactcgagagctgctcaacctgggcaccccttagcatttctaaccactgcccagactggggttcatggtgtgcttaggatcctgaatcatgatcagaggggaaagctgttctcccagagggtggggtgcccatgcctggaggttggcaaacattggcagaacctggagagatgtggccagtgccagagtctttcccgggagcccaggaattctgaggccacaggagaacgtgcagcgagtggagggtgagcgataggtgttgtggaacaacaaggcccatggggcaaggaggtgggatgcagcccgaagaaggggaagccgaggatgacttaataatagtcccaagtctctccgtgctttggggaggaggagggtgaacagctgttccctttcctaagggaagcacaaggggcgacacggctaatcctgtagtctgtgatctttagactaaatgcacatcttggctgtgaggattttaaatggccgttcctggctgtggacagggaaggaggaactttacctggagcgaggaagccagcaggagatctctgtgggctcc

SEQ ID NO: 67838 - DNA, 1892 bp, Homo sapiens
tcttcctgcctcccttcctgagtttttcagatgagcccccagcccagcccagccccaccccttctctacccttctccatagcccccatgcctgcctcagtctccctttccctcctttgctcagttacgtcctcgtctcccgtcccactctgccttctgcctatccagatttggctgtaaggtcagagtttcctgtgtggatcttaactggtttcttcctagctgagatcaatgccccaccgaaatccatctgttttctcctgggctcctccaccccctccttctcgccatccctgggaagagggtaccacttggtcccagctcctggtgtttgccgtagagttaatgtttagcccagggtcaattcgttctctgctggctctcacccagccctgcccagcccttggcatgggtgtgggggagacaaagccttctgcgtacgggactcatctcccagggctttatctcacagggcgtatcctgtctctatctcaccccttacagctcaggcagccacttggcctgtagcaatactcaaatgtttttgggtagttactgtaaggatccagagcctcctggagctacctacagcctacatactggggtctggtgtcaccccaagggaggcattctgatcaccttggaaaatggacttgctacgtttgcctgccacgctgctcgggatagggctgacatgcagggcgaagagaagtttgcacgtgtgctggggagagtgttggcagcaaccaggtactgacacgccaagcatatagaatcagggatcttcgtgtgtacatgtaagatgcagtgtcaacaggcatcctttgagaggtagataaggaatgcattcacttggtaaatactttcttagcacctgatacagtatcccttatccaaaatgtttgggatcagatgtgttttggatttctgatttttttggattttggaatatttgcatatatatataatgagatatcttgggacccaagtctaaacaccaaatttatttcctatatcccttatacatatagcctgaggataattttatataatattttaaataattttatgcacaaagaaaagtgctgactgtgttccattcctacaaacctttgtttgtgaccggaatgtgtcacatgagcagcgtgtcacgtgaggtcaggtgtggagtcttctgcttgcggcatcatgttggggctcaaagggtttcatgttttcagattagggatgctcaacctgtccttgaaacatatcacggcaagtgcagtagaagatatgaacctgtttgaggcatagatccttcctggaggtgtccttcagacagagtgagacatgctacaccatgaatggagagctgcgtctgcatccgtggggtgtccatctagagagggttgtaggagtttgttaggggagggtttgcaggaggagtcagactcttctactttctccaacactgtttacctgggagaatccaggttcctttaaattagcgtctttggaatctactttttttgagagtctctctctgccgcccaggctggagtgcagtggtgcgatctccgctcactgcaacctccacctctgaggttcgagcaattctcctgcctcagcctcctgagtagctgggattacagacacctgccaccatgtgtggctaatttttatatatatatatatatatatatttgtagtagagacggggtttcactatgttggccaggctggtctcacactcctgacctaaagtgatccgtccgaattggcttcccaaagtgctgggattacaagcacgagccactgtgcccagcctggaatctacgtttttacatgtgttcactgggccattttgaagtacagtaaagtttgggggctgctgtattaaattaccaagac

SEQ ID NO: 67839 - DNA, 1100 bp, Homo sapiens
tgcctgttagctaaatggagatgccaagtgggcatttagatatggagtgtggagtgcacagggaagcctgggctgaggccataaacgcagcaattattagtggatagtcatgagactagctgaaatttcaagtgactcggtgaacctaaaaaggagttcaaggactgcctgggagcactcagtgagggaaagaagcagctgaagagagcttgaaagcacatgcagtgagggaggaaggccctaggaaggtttcctatcctggcagccacgggaaggaagtgaagcagaaggtattgtcactgtatcacatgctgtcgataggttaagcaagatgggaagatgtgcctgtagactggcacaaagcatgcttgagggtggaagggtagctagctgcaagcttggtggtcgtgcaagaggcatacagggaaaaaagcaagaaaagaacattgaatgtctgttgtgcttaggtctgggctcagtcgaaataatagtgttgtcgcttaacctctatgaatacccatttggttatctccaaaatgcacataaggatttccggagagttgtcaagcatctggatttgttaagtacaggtcagatgatggtgatgatgataggctgatgattgctcccttagaggaggctacagcggcatccctgaagtgttcctcgacgagcacccaccttcatctcaaggaggttttctttctaggtgtataatgcagggaagttttctagttatcatcaagaatttgggcaatgccacttaaggagcgctcatgtccagagtcctgtcttcgtcaccgtttgggaaaggaaatgcatgctcagaacccagatatttgattcagaggcttcaaataggatgggcacccatggaaaaaaaatagcttaagacaaataatcctttcagttaggtagggataactctaaggaggctgcctaggaaaggtgagtttgcagccaggaattttacatggggggcagggaggggtggggtgggatatgaaggagatttcagaagagcaatggggtaggcaggggatttttggttagaggaagatcatacacaaagcaaagaagcaggaaatctcatagatatg

SEQ ID NO: 67840 - DNA, 1046 bp, Homo sapiens
taagacgtgtatgccccaaattgtatacatgagggtgcagatattgggaacatatggttccttgcaatgttgaacaaccccagaggaagggtttgactggggctgggtcccacaagtacctcctgaggctcatgggcatccctgaggatcctcaacccacccaaccaacttcccagaatacagaataggaaaatggttctgcagagagttgcattggagggctgaaggtggcctctcctgtggtccttttgtctctgatagagagcgagctggccaaaacggagagcacttatttggctgagatgcacagacaatctcccaaagagaaggccagcaagactacaacggtgcggaggaggaagcgtccccatgcccacctgcgagtccctcacctggaagaggtgatgagcccggtcaccacgcccacagatgaggatgtgggccacaggatcaaacatgtggcaggtgtgtgccaggtggggacaggtcgggtggactaagctttgggctggagctgcatgcccacaccaaggcacacacatgcacactcattttgcaccttggctataatttgtatataatttgaacgtaagtcactaaatctgaggctcccaatgctctgtttctctttgctctttaagttcctcagccccagctgaacccatatgtgtgctctaattaacaaaagctgccttagtgtttatgctttcgtgttgccctagttccatggctacctgcataggctcaagtatgaagcttccaagttcttgggaaatacactaaggagatcccacagctcagaccacagagattacctcattacacaaagatcagggagaccaagacagtccccgttcacttcaacccgcatgggccaacccaggcttgccctctcaggccgtggactcccttaatatttcttcctcttcccacccagccattcacatccttgtctttgctgaatcctggaaacctgggactctaaggggccttagagaccaactaattgagttggatatggacaggggaggcagaagaagagggga

SEQ ID NO: 67841 - DNA, 1078 bp, Homo sapiens
taaatctcttgtattggattttggtttgtagagcactgtaacctcaagttagttctgtgtttaagctctttctgcattttgactttaagtagagaaggcctgcacccctgagcaaattgtatagcatgttattaactaacttttgggttttgtaagtttagaatgatcagactctctaattcaatgctgcaggatccaggccaagtgtctgccgacagcctacacgtgggacgggctgacacagcacagcttgccctgtgtctggcaggctcttgcccccacatgcctgctgcagtgtgactcagccacctcctttctctatttcgacaactgcgcaggcttcacttagacagcacacaggggtatcccttgaccttcacttagcacagagaggattgcaaacataaacccaaatgcaggcaccaagatcgtgagcaggctgtgccaaagaggcgggtgttcagatgacccagtgagtgctgataaaattaaagaccgtggcactgaaattcaacataaaagttttaaaggccttggggacaactcagagaggcctgagaacacagcagccccagaaatttgtggctgtcagtttaaggaagactaccttccacagtaccagaagcacggatgacacacacggtaccacttgcacaggcataagctttgaaaagcctaaggcatagcataagcttttctttcttcgctggtcttttatccatctctcttttatctgtttttctttctttccttttttttttttttttgtttgtttgtttgtttgagacaggttctcactctgttgcccaggctggaatgcagtagcatgatctcagctcactctaacttccccttcccgggctcaagcaatcctcctgcctcagcttccctagtagctgggaccacaggtgcatgtcaccacacctgactaatttttaaaaatatttttttgtagagatggggttttgctatgttgcccaggctggttttgaactccccagctcaagcaatccacccaccttggcctcccaaagtgctgggattacaggcgtgagccaccatgcccagcctatcttct

SEQ ID NO: 67842 - DNA, 1094 bp, Homo sapiens
tctttcttttcttcttccttccttccttcctttctctctttctttctttcttctttctttctttcctctctctttttttcttttctttctctctccctctccctttccccctctgtctctctctctttttaaaaggcagggtcttgctctgttgcccaggctggagtgcagtggtgcagtcatagttcactgcagttgcaaactcccgggttcaagccatcctcccaccccagcctcctgagtagttaggactacaggtgcatatcacaaagcctggctataatttttaaattttttatagagatggggtctctctgtgttgcccaggttggtctgaaactcctggcctcaagtgatcctcccacctctgcctcccaaagtgctgggattacaggtgtgcgtcactgcacccagcctgactgtcccctttctgtttgaaacagtgttgagaaccacccttgctttaggtgcccgactcttttcagccccatggcgtggttggaggcctgccctaggcgggtgtggggagagggctgctcggtggagaatcccactaaaagcgcagacccaggcctggggtggggttttctgtcttgcagatgaaggactcgctcatcaaccttcagaacggcatcaggtcccgcgactacacgtcggaaagtgaagaaaagaggaatcgctatcattgacaaggcaggaacagggtggctgcaagaggcctgtgcaatacatgtacatagaccatataaatatatatatataaatatatatatatacagaatataaatatatatattatatacagattttaaaaaagagataatgcctatgtaccagggagaaggagcgggccctcccgcgccctgtgctggccggagcagcgttttcttatggtggagcagctgaggagggcaggaaccgcctctcagcaccgacctcccctgatctccctcctcccaccctctgttccccaccccttcccttgctggccattcttggcttttagaagggaaatgttgagccaaagttatgcctgcgaagaccctaaggtctcaaaaagaagtcttaagacggcattgcttaaggtgcttcat

SEQ ID NO: 67843 - DNA, 1052 bp, Homo sapiens
tccctgaggtagtcaggggaaagagtgctatttccagtttagagatgagaaaatgagctcggggaagggaaaggacttgctagagaacccttgttttctgatttcagtcttccagtgctccttctagcacctctcatggacacatgtgctactatgcacaatcgccaggagggcacctgtcctcccatttctcttctgagctaccgtcccatctctccccaacaccatcacctgtcctagggcctcactcactagcacctagtaccttctctgcccttcttctccaggcctgcccttctagttgccctgtgtgttttcctctcttcccctggtgatctttcgtgcatcctattcaaggccctaagtgaccagctaaattgacagaacaagtcacgtcagggtgtcagcatctaaaaataacctcatttattacccctttttggaaattgtttatattctaatcaaatttttcattatctcagtgcaaaggaaagcattctagagcaatctcaggaggaaaaattgggcattgtccaaagaagagaaagatttgagggtatcagagaagctggttcataattctttattatctgcctcatgatagatggatgctactactccctagtgaaatatgatcattattaataatcatgtttttccttctcataaatttcttcattattattatgggaattgaagagaagaacaaaggtcaaatgatttggtcaacattattccaagagtttgttacttttagtcagcaatgtagtttgagctcctgccatatttacagccttctttgaatacctagagggtttcatagaaagaagggcagtggtggactgggtgctgtggctcatgtctgtaatcccggcactttgggaggtcaaggtgggtagatcacctgaggtcagaagtttgagactagcctggccaacatagtgaaaccctgtctttactaaaaatacaaaaattagctgggcgtgatggcaggtgcctgtaatcccagctactcagggggctgaggcaggagaatcgcttgaacccaggag

SEQ ID NO: 67844 - DNA, 1031 bp, Homo sapiens
taaaagctggatgcatgaattttgagagtgaaaatactttagttgctcatcatcttcttaattttaacaaggaatgggaagaaaacagccttcagccatttactgctatatattaaataaataggcaactgtgaaatgcatctttctttttcttcttcttcttttttttttggtttgtttgtttgttgcatgaacctgtggaactaagatgctttggtgttaggggaggagagctgggtttttgccttcaaaggtgaatagattcttgcttgtcagctgtgagaaactgaggtgaccttccccctccaaataagggaatcttacacttggaacagtaaaggctgaagagagtgtcagagacggtcttggagtgcctgaatgtgtgtaaaggggattgatctatgtgataatgtctgattgtgtgattgagacaatgttttactgtatgtaaatatatttcagtgtctggatgtgtgcactagcatgtgtgtgagcatgttggcatagacatctgaatgcatgggtgagtgtagtagtatgtgtatggcaggggtgggggtggtagttctgggcatgtctgccttggtgtctatgattagatcctcagataaaatataggttctcttcagcagacagattgctttacatgatcttagctacctttctccgtgcaaaaatcaatacacagggtaattggacacaattgtacccacctgcctccctgaaacgaggcatgtgagcttatgttcccatggttggcatgaaactcatcctgcctatacggtggcagacatgctgatgggagctgcctctttgctttagtattactttttcaagcctccaggactaactctagctgccagcattatctggattttgcatgtgaccagaggcagagccaagcttcctgtcaaaatgcctgatgagacggactaggaaggttgaggagggaggtaatgtcagccccaaaggcggactcatcaccagccatccccagtagagtagaccagacctggagatggagcagctat

SEQ ID NO: 67845 - DNA, 1476 bp, Homo sapiens
agttctcccttttcctttaattactcctttttaataaagcagatagattgtgtttggcgtcttccaactattagccactccctagtcctagcagctgtttgagtgcccccgccccatctctggaagggaaacctgaaactttacattcaactataaactcaaattgacataacagattaggaacgcctggaactgaagtaaaagagtaatccaagagcccttcttcagcttcctttttctcctcttctgctctttccaaaaggggaagcttaacgctgatattccaaaatggaataacagagcaacagctgacggtgagtggaccagaagcaggaaatgctccctcctgacatctcacagagtaacagaatgtccccagtcggatcttcctgggcagggagccaccaggccataaactctgtgctgtttggaggactaggccttgaagcatgtatactgtgttaaatttggatgggaagttaaagttgacctaattcaaccgcttttccaatttgtgacttcccccaagaacatttcggacgaatggacttgattttatttatttatttatttatttatttatttatttatttattgagacggggttttgctcttcttgcccaggctggagtgcaatggcgcgatcttggctcaccgcaacctccgtcccccgggttcaagtgattctcctgtctcagcctcctgagtagctgggattacaggcatacgctgctacacccggctaattttgtatttttagtagagatggggtttctccatgttggtcaggatggtctcaaactcacaacctcaggagatccacccgcctcggcctcccaaagtgctgggattacaggcatgagccaccgcgcctggccttgatctttttagtgatgagaactttctacatcacaagttcacctcttctgatgcttaaggaagttctttatgttcagttgaattccgtacactcctcctccccctccaaactccattaagtggccctaatgctgttttctctttaaaagagctatgcttcctcacatccgccctaagacatttttgtttgtggctactcttccttagtttcttccaatgtattttctagtagtttccaatcctgtaccaccctggctgctttttcagaaggactttcagtttctcagcatgattctccaagtgacgtccagaacaggaactgatggtccctgtgtggtctgaccagcataaatccagtggaattatggctacatttgctttgaaggatataactagttaaatacatttacagccacatcttagtcataatcagcttatgttcaattaaaatccctgagtattcttcacttgacttgttgcagagtcattgtgtcttgtacaggcaattttggaaattttattatgaaactttgcacttattgctgttaaaatttattagtttcaaccagttatcacactgtgttaatacttttattg

SEQ ID NO: 67846 - DNA, 1784 bp, Homo sapiens
ccactgagaaggggagtcacctgccttctccaactgggagagaacctgagggactaactgcccattatacagactttcaacctaatcctcccttttctgtctacccctcttcccacctttgtatcttggtgcttccagtttctaaggcttttcaagtattcttgaacacagatcagcttgactctcattgacatttccttctgcaaacacttaggctttagctattccaactctctaaagtcagttgtttattcctctacttacattccagttttcaaaaatgtgttgctatctctggtctgttgttttcttctctccgttttatttgtctttatgggcttataacgttcactctcattttagggggaactcagaactcaagagggagtgtagataaacttatgtttaattcaccatatataattcaaaacctgttttccttttctaaagcccagataattatatttataaacttcctagtttgaagatcatacttcgtcaatggaaaattctatctaacttcagtctaacctgttgtaatgcatgacccagtagttctcaactctggctgtatataataatcatttttctagctctgaaaaatgctgatacttggacctaccccagataaaattaatcagactctctgaggtgaacatgtgcagcaaataataagtatatttgatgcgtagccaggaaggagaatcaacagtgtgacggtggtgatgggggtgtcttagtccatttgcattgctagaacagaatactggacactgggtaatttacaaagaacagacattcatttctcacagttctgaaggctgggaagtctggcaagggctgatctctgtttccaagatggcaccttgatgctgcattctttacagaggaagaatgctgtgtcctcatatggtgaaggcagaagagcaaacaagcctaatgctgtgtaaaacctcttttataaggatcttaatccattcatgaggggagggtcatttatgacctaaccacctcttaaaggccccatctcttaatactatcacattggcgacacgtgaattttgaaggggacacattcaaaccataacaggggggtgatggtgaggctggggtggcagtgtctgcactctgactgactccaaagtctgttaactcttgaaaaccaaccccccacacaaacacacacaccacacacacacacacaaactcacaccactttcccattggcttcctatgcaatgttccatgcctagctttggaaaataaagtatttggtgctgtcactacctgccctgatttttacttttttgttacacttgtatcagaaccactagagaactcaaaaacatgagggggaacagatccctagaaccctaatttcagttacttatgggataagaaatctcctttctacctcttctgttctagttatgttagtctgtactgaaaggcaagttgtggagggaaaggaaaaatttaaactggatgatctcccaggctttctagacttcggaactttgatcttcaatctttgcataggtgttttaaattaggtaatgtatataaagattctctgaaaagtgtaatgtgctagaagctgtttttaaaacatctaaagtgtgtaactttatgtggactcacaacaaagtcataaattaacagtcaagttagcaagtcaggtaaagtctttatcaactcagtctaagaaagaaagtaattaaacagtgatttaactctaccctgggacctgataatgggaggcccacaatcttggtaggattaat

SEQ ID NO: 67847 - DNA, 3579 bp, Homo sapiens
tttttaattattgtgaataatgttgctacgaacatgggtgtacaaatatttctttgggatctttctttcaattcctttgaatttatacacaaaagtggaacatatgataggtctatgtttaatttccaaggaactgctatgctgttttccctagtggtgacatcattttacattcccaccagtagggcacaagggttccagtttcttcacatccttgccagcacttgttgttttttgctcttgggtaatagccatcccaatggatgtgaggcatttgaaacctatgtcttttgacagcaaggtcagtgtggatcataccacaacacagaaactacactgcatcgcaccaaccacagatgcctgcagaaaacacaggagaagctctctcagaaatatgcagtcctgaatctaatgggccctgctgccctgatcaggatggcttatacaggaacagagagcacttctagtgcagtgctgtattggatggaattgcgtcccctcaaaattatacgttgaaaccctaacccccaatatgagggtatttggagatggggcatgtgggtgataattaggttatgaggtcatgagggtagagcctcctgggagaattagcgccctcataagaagagacaccagacagtttccaatctgtctccctgcttgcaaggaaagaagaggtcacgttagcacacagcaagaaggtaaccatctgcaacccaaggagaaagccctcaccagaaacccaccatgccacccaccttgatcttggacttctagcctccagaacagtgagaaaataaatttcggttttttaatccactcaaactgatatatgtatgtgtgtgtatatatatatatatatacatatatatacacacacatatatgtatatatatatgtgtatatatatacatatatgtgtgtatatatatatgtatatatatatatattttttttttttgagacagagtctcactctatcgcccaggctggagtgcaatggtgcaatctcggctcactgcaacctccgactcccgagttcaagtgattcttctgcttcagcctcccgagtatctgggactacaggtgcacgccaccacgcccagctaatttttgtatttttagtagagccagggtttcaccatattggcctggctggtctccaactcctgaccttgtgatccgccctccttggcctcccaaagtgctgggattacaggcgtgagccaccgcgcctggccctatgatatttttttttaatggcagagcaagccttgatcattgctttcttcttaaaccttattcagtgtttacttctaccagcgatggtaaatgaagtctgctgtttagtcataaagctgctaaatttcaaagtcttactgaacaacagagtgatcaggatgaaaggctgccatcaataatacgttatcttagatgaaaacacactggactaagcgaagaagtcccaatgtgtacagataagtctgtggaatggggtttggaaataaaggtttttgagactttttagaagtaaatgggaatggttaacatgtagtcctgtccagaaatacaaatcctaatcatttcatacatctctacccaatgaatctctgatctttttttcccatctttttctagaacatattccataattgcttccaagatgtgaagattttcactctggcttcaccgtatttttaaaatctttgaatttagccttggtccatatacttggcaaagaataatttctatatttctcatgcatggagggagaaaagggcatagaggagctggctgcactctgatcttcactggaagctttccctgcttagacaagcaaaggagggagaaaatatcttgtttcactggctcatattgatttcctggtcatgtctgatacctgcctgtggatagacttaatggctgcagataaatgaggctcagctagcagaagggaggctgcaaaaaatcacctgaaaatgctttgcttgtgtgggtctaatacaaaatttaaaaaaatgcagctttttgagttgcaacttaccatgacccagccaggcaaggcactggggagaacttaaattatggtcacaggactcctgatttgtggataaaagactgaggatcacgtgtagtgaggggcagaaacaagattctgcaactgctattacacggagtgaactgcaaattgaggggacactccacagagctgctttgccatttttttggtaagctcaatttgtacccctatggggcaccctttaatactgggatactgggcttggtgcagaagataagcaggaactgtttagattacatcctgatcattattctttattctctccctaatgccaggccttaatgctaggcctttatcacataataaatatttgtgctgctctatcatcgttcagtgtgcactactttgcatttagttttctatagtctgtctgccaatgagattgcaagtcctttgcatgcagggacagggtatcatgctctctgcatccccagggctctccttgtagtgtcacatacatgagcaacactagctacaaactgcttcagacagcaggagaggacagatggggtagacaaggatcctccccggaatggggaagggaaggaggggaaagacttaactgaagttgcagggaggaagtactgcctgatatgcaaaatatggcatatgattaacagacagtacatattatggggagctattcagtaagcacttgtcatcagggagctccaacaagaatgatgggtgggtgttccttagatagagagaatacagtgacagagacactaggagtaagccatatctgagaactcaagaagacaaaaggcagaaccagggcatcttctcattaggcagcagaagccttggctctgctttgctgtcaagaacagagttccagttcttgaagactgaaggacggattgacagtaagaaggcagggtcctcaattcagaaagcctcgcactagagagtagttgttgggtgtgtgtgagctctggtgttaaacccccttggtctgtgtcccattacaagctctgttactgttgaacatttgctaggcttccaggtgtgtggctacatgtattggctgtatgtctttttttgagaagtgtctgttcatattctttgtccactttttaatggggttgcttgttttgtttcttgtaaatgtgcttaagttccttgtagattggtggatattagacctttgtcagatggatagattacaaaatttttctcccattctgtaggttgcctgttcactctgatgatagtttcatttgctgtgcagaagctctttagcttaattagatccatttgtcaattttagcttttgttgcaattgcttttggcaatttcatcatgaagtatttgcccatgcctatgtcctgaatggtattgcctagattttcttctagggtttttatagttttgggttttacatttaagtctttaatccatcttgagttaatttttgtataaggtgtaaggaagggatccagtttcaattttctgcatatggctagccaattctccccgcaccatttattaaatag

SEQ ID NO: 67848 - DNA, 2945 bp, Homo sapiens
tgttgaataagagtgatgagagagggcatccttgtcttgtgccagttttcaaggggaatgagggaggctaattttctaataataataataagataatattgaagatttgcttggttccagatatttccatgaatgctttacatgtatcaagtcacaatctcagaaaaccctatgaaagagttcatattattatccccattttatagatgaagagactgaggcacatgccctacaaagacctaagctgggaaacccactaccttgagtgtttttgttgccacctgagcacagggatctcagattgacattgcagtttctcagcattccacctccaggaaatgttttatttcacaacaggccaatgggccacgtgactgaggtgttctactgagaaggggcggggagcaaggagtctgaggctcacaggctataatggatggaggaagaaaaattagagaactgggtttgggggcagagtccttgccggccttgtgaggctgtggctgggtctgatctcatctgctgtaagagctggtcctgaactgtgtggtttgaggcctgggcagtggtgaaggcaggaggactcacaaatcaaccaggctgttgaaaaccccaaggagcaacagtacgggccaaaggccagaggtctgaggtctgggttctagccctggctttgccattaactagctgtatgattctgggcaaatcggttcatctttctaggcccagttacttttttttttttttttttgagatggagtcttgccttgttgcccagcctagtgtgcaatggcgtgatctgagctcactgcaacctctgcctcccgggttcaaacaattctcctgcctcaggctcccaagtagctaggattacaggtgcctgccaccacacccagccaatttttgtatttttagtaaagatggggtttcaccatgttggccaggctggtctctaactcctgacctcaggtgatctgcctgcctcggcctcccaaagtactgggattataggcactttttttttttttttaataaataaaatgcaagtttttttttgttattgtggtgattgttgtttttaatctcccaagtgtttttgaaccccatcattctgtggttctatggctttactgccatgccaagcaagtctcagaatgttggcacgctgaccattactgcttccctccctgccctccattcttttataaaggccaaccaaagataaccatgctggtcctgtgctgggctagaacattctctcctcataacattcgtaagagatagacattattttgattttatggataaggactcatccaagtacacacaccagcaatccacattgggaattctaattgaggcttgcctctaaaatctaggttgttcatgaatatgtgacatggcttctctattttatgttggtttctattggccactggcaaatactgctctttttaggggctggtggggtggtgggaatggtgtctgaagtggaaagaaggcactaggtttggacccatgcgccacagaggcccttggaaggggtgcaaatggcattggccttgtggctccagtcttttccaactactgctccaagtggggcaacgaatgcagattttcctgctaagaacttgcagagaatcccaataggttgtacttcttttaacgcatagagttttcatgtgccagcagctgccataacacaaacacagtcccttactaactgctctcctaggtcgcttttcctgccacgtggcctccctgcccacgtcccctgggaggtggccggaaagctgagatgggggcggctgcagttgctgcctctggctgacgttcagctgcagcaggcagggttgttcaagcttggaagaatcaccactaaaatgatttgggtttgtggtggggaagcggagggcagtcccttttaagagtttcctttcacattccagccatccaccccctgaaatctttcaatcatccattcatgtattcattcaaaaattatttaacgtgttctttttctgtgtcaggcactgttctaggcactagagatccagtggtgaacaaaagaggcatgttccctgctcccaggaaattaatgttttaattgaagggtcgggggggatttggagataagcaatcagacaaataaatacatgatataatgtgagatagtgctgagtgtctcaaagaaaatgattatatggagccagagagtgacagaaatgctgttttaagctgggtgtcaggagaggtctccctgaggaaatgacagacactgagacgtagtcaaggagcaagctgtggaaatctctgggggagagtggccccaaagagggaggagaaagtgctaggtcctgagataagaaggggcatggcacttctgatgagcagtaggaagccagtgtacctggagtacaaggagcaaagcagacgtaacatggagttgcagaggcaacacagaccatgtaagggcttgggattttcttttatttttgagacaaaatctcactgtcacccaggctgagtgcagtggcatgattatggctcattgaagccttttctcctggactcaagcaaacctcccacctcagtctcccaagtagctgggacaacagctgcataccaccactcctggctaattttgtcctttgtgtagaggcgggatcttgctatgtttcctgggctggtcttgaattcctggattcaggggatcctcctgcctcagcctcctaaagttctgggattacagacatgagccaccgtgcctggctgggattttattttaaatatgatgtgaagctgttggaacattttgaaaagggaaatgacacaatgagatttatgtttaaaattatctccgtggccatggagattgtaaggagctcagggaaggagcagggagatccattaggaggccattgcaaaagtccaggccaaaagtg

SEQ ID NO: 67849 - DNA, 1031 bp, Homo sapiens
aaaatacactaacattaatgatagctgatgtgcttaaaaaaaaatcgcagaaaagtctcgttatgttttaagaaagtttacaaatttgtgttgggccgcattcaaagatgttctgggctgcatttggcccaagggccacagtttggacaagcttgccctagaatgagggcagccgtgccaacacctggattccaacccagtgaaatgggttttggacttctggttcctagaactaagaaataataaatttctgttttaagccaccaaatttgtcatagctgccatagtaaaagaatacaatgcaggaaaagattcagcaaagacacctgtaccaagacaaaggccatcggtatattaggccactcgtaaatgaaatgggacattgagaagtggacaagaatcacaaaaggtgtgggaaaaaccaggaacttctgttggaggagagggaggggctggtagaaagagtggaaagagggggaggagctggcataagctgttgtctctgggctgtggcgccttggccagataagcatcttaccttagtgctgagacaggcctacaattcaatccaagttggattttttatacattaattgagctttgctgaaactgtgcttttcttctttcaagtctaaattcaagtcttgaaatgattccttggctgaaattagatggttttccagtgctggtttctttctactcaaagttgtctttcattggctggcaataaccaattatttgtgtgatttgtttgcatttggatttggcctgattcaacagggcaagcagactagtctccctgtctgaatccccacctgccaacccaccgacaccatcctttcttggagttcctgtagcctggagtttaaggcctttttatgtatttgagggtacaattttcataagaagtaattttttttgcttttttaaaaaaataatttatttatctaaatttatttatttattttgagacaaggtcttgccatgttacccaggctggtctcaaactcctgggctcaagcaatcctcct

SEQ ID NO: 67850 - DNA, 1085 bp, Homo sapiens
taggcctgtgccaccatacccagctcatttttgtatttttagtagacagggttttgccacgttggccaggctggtcttgaactcctgatgttaagtgatccgcccaccttggcctcccaaagtgctggcatttcaggtgtgagccaccacacctggccacttcacatgaatataatcatacattatgtgatctttagagtctggcttctctcaatcaatattatatttttagtgagattcattcatgttgctgcaagtagcaataacattttggtcttcattgctgtataacattccacttattgcataccacaatttatttatatactgtactatttatggacatttgagttgcttcctttttttgctgttaaaaaaataattttctatgagctacttacccatgtctttggtttatgtaagcactcatttccgttgatatacacccagcagtgaaattgctagggcatagagtatttgtaaggttaactttagtagatcctaccaagcagttcttggtagtacaagcagtgcaagtgcttgtaacagtttacattcctcccagcagtgtgaaaggtttccagttgctcagctgcttcaccatcactgggttttctgaattcttttcatttagtcattctagtggcaatagggtagtatctcattgagctttcaatttgcatgttcctgatgactaaaaatgttgattactttttcctgcgctttttgtccatttcgatatcctcacttgtgaagtgcctattcaggtcccttgcacctcaaaaatgttagctattattttgtatcatactaattgtgcttttaagttatccgtatatctatctactctccaaatagatgataagccctttgatatgcaaggtctgtgcgtcactcatttacgaattcttagtgcctaacgtaagactcatgttatacattcgttgaatacattgtcaaacgtctaggactcagcagatcatggcaaaatgtcgccatctggtgtctgcagggaatgagatgtggaggatgcaaagccagctggctggataattcattgttttccatgtgagctttctcttatg

SEQ ID NO: 67851 - DNA, 1064 bp, Homo sapiens
tccataaagtgtactgaggtggggaggaggtggcgaacttcactgctcttctcaactctttcttccctctactcactgctcctcaatccaccaccaagacaaatggtaacaatggattgatcaggtttatttgtttgttttttgagacggggtcttgctctgtcacccaggctggagtgcagtggtgtgatcacaacttactgcagcctcaaccccaggctcaagcaatcctcctacctcagcttcctcagtagctaggactacaggcatgtgccaccatgcccagctaattaaaacaacattattttgtagatatggggtccccaccatgttgcctagactggcctggaactcctgagctcaagcgatcctcccaccgcagcctctcaaagtgcttggattataggtgtgagccaccgtgcctggcttgatcaggtttagaaacattgtagtgcccatgggtaaagtctctgtccaggttacaggctagagctcacatgggcgtgacctcccagtcactgtcacactgttggaggacataggctggggtggcaatacgcttctgataaaggccagtagtaggtgtcttaggctggcaatattttaagcactgggagatatgatactgcacctttcctcttatactttttttttttttttttgagacagggtctctaccacccatgctggggtgcagtgacactatcatagctcgttgcagcctcagcctcccaggttcaggcaatcctcctacctcagcctcccagattcaggcaatcctcctacctcagcctcccaggttcaggcaatcctcctacctcagcctcccaggttcaggcaatcctcctacctcagcctcccaggttcaggcaatcctcctacctcagcctcccaggttcaggcaatcctcctacctcagcctcccaggttcaggcaatcctcctacctcagcctcccaggttcaggcaatcctcctacctcagcctcccaggttcaggcaatcctcctacctcagcctcctcagtagctggagccacagctgtgtgccaccacatccagctaat

SEQ ID NO: 67852 - DNA, 1540 bp, Homo sapiens
ggcctcccaaagtgctgggattacttgggtgagccactgcgcctggcctcctctgatgcttcttgtgagcagatgtattcttgaatttcttcacagcagttcacaaaaagtgtctatgacctcatcacccaagttttttttttttttttttttttgagatggtcttgctctggcaccaggccagagtgcagtggtgccatctgggctcactgcaacctccgcctccctggttcaagtgattttcctgcctcagcctcccaagtagctgggattaacaggcacgtgccaacacgcccaactaatttttgtatttttagtaaagatggggtttcaccatgttggccaggatggtctcgatctcctgaccttgtgatccgccagcctcggcctcccaaagtgctgggattacaggcgtgagccaccgcaccaagccatcacccgacttttacacattctcctagacttcttctgacattacaatgcaacaaacatttatttatttcctaatataaaccaaaaattctgctagatgttggcaaaaaacaatgaaagacagtgtttgccttccaagagaaaaggtaacagatgattaacatatgtaaagggctatgacagaagtatatgaaggaaatatgagagcttgcttcttggatgaagtcttaagaataaaaaggaattatccagcaagagtgggtaagagtgggggatggacaataggagctgcatgagcaaagggcatgcatgcagagctgtttgcattccatcttcaacatgctgggaagcttttaacctgagaagtagcagatacaaataaatattttaaaaatttattggcaaccatatgaaggatgaattatggcatggtaccattggaagcaataattctgttagcatgccatggtaataattcacatggtgtagcctcagtcaatgcactgaaagtgagggaggagagatgagagaggggcacagatgcagttcgttaaggttagtttagaattagtatcactgatagatatgaagagcaagggaaaaagaaaaatctgggacaaatcataggtttctgatttaggtcaatggtggccagtcactttcaggaagaagaacagatgctggggtactggctttagtgagggcactaatcccttccccctgcccattccaacttatattcacttctagaaaggatgaatgggattttggtgtaataagaagacaggttggccaggcgtggtggctcatgcctgtaattccagcactttgggaggccaaggcaggcagatcatttgagcccatgagtttgagaccagcctgggcaacatgatgaaaccctgtctctacaaataatacaaaaaattagctaagtgtggtggcacatgcctgtagtcccagctattcaggaggttaaggtgggaggatggcttgaacccaggacatggaggttgcagtgagccgtgatcataccgctgcactccagcccagatgacggaacgagactccatctcaagtaaaacaacaacaacaaaaggtcaagaaattg

SEQ ID NO: 67853 - DNA, 1069 bp, Homo sapiens
aaaacctcactggttagcagtaaaaagctttcaaaaatttataattccagacatttccctatttccaccgttttgcagagttagagtccctgtggactgagcgagcttccagcactgggagtcgacctctagtggtaattctttaaactgcaagtcctgactttggtgatttggcttattttgccagaaccagggcagctgagttcaggttttggttacaattaataaaaaatgttggcttctaagagatctattaatatctcagttttacttatgagaggccttagagatatgaagtaagatgaactcacatgcccaaggtcatacagctagtaagtgatgaaggtaggattcaaatcctggtccgtaggtttattaatccagagcctgtgctcttaaccactacctgttctgcctctgttgttacttgaatcatctctttaggcaaagttgaccaatctttttctttctttctttctttccttccttctttctttctttctttctttctttctttctttctttctttctttctttccttctttctttctttctttttccttccttccttccttctctttctttctctttctttccttctttctttctttttctttcttctttctctttctttctttcttccttcctttttttgtttcttttttttttttttcaagttctcactctgtcaccgaggctgaagtgccactgtggcctgatcttggctcaccgcaacctcctcccaggttcaagaaatccttgcatctcagcctcatcagtagcttggactacaggcatgtgacaccacacctgtctaatttttgtatttttggtagagacagggttttgccatcttggccaggctggtcttgaactcctgagctcaagcaatccacctgtttcagcctcccaaagtgttgggattacagacatggggcactgtgcctggccttgaccatcccttttatatgctctctaatatatctactgtagcacatctcatacattagagaccagtctttcccaccagttcatgaattccctggaagcagagctcttagtaagtaca

SEQ ID NO: 67854 - DNA, 11041 bp, Homo sapiens
tggctaacatggtgaaaccccgtctctaccaaaattacagaaaatcagccgggcgtggtggtgggtgcctgtagtcccagcttcctggggaggctgaggcaggagaatggcgtgaacccgggaggcggagcttgcagtgagccgagatcacgccactgcactccagcctgggcgacagagcgagactccatctcaaaacaaacaaacaaacaaatactggtgtggaagggtaccaaattattaacctgctcaacatgtcatcagttactatttctcagttcagctttcattctagaaaactactatggagccgttaactctcatttggattactgtcctttcagccagtctggtgaatcaaaattttttatttattaaatatcccatttttcgcctgtggcagggtggtggtccagaggccttgactgaaggggactggaacaacttgtctgtgccatctctgggcttttctcctctactactctactgctcagtgcaaacaatgtatcttctattagatccattacttcagttgtgctttgaagggggcaacaggtttcttagtgggttttgattttagtaccttgatgttaatctgatttatgaaattctccatggagttcatctgagtttaccggattctgctccggaatatgaggcctaagtcccagataataaaaatgtattttggcttgatctcttgggcatttatttctcctcggactttgtggtgaagaggttaaatattccttggttattcctaaattatctggtcaaacatccttatattatcatttttaatgtgtcatacctctttagcacatttccaaccacctgccacttctgttaattaagtagcgtattaacttcctccaaataatatctttaaaatcccaccgttttctccctcagaaacttagtatggtattcaaggatgctagaattctactgctcacaagatactagaggggacccctccgaatacacaccctgtgctccaacctccctgctcacgctcagctgcactacttctttcctgccgctgcacactgtggttgtgtttgttcagatttgggagacaacatgtccctcccagaacctcagaaaattcagtaatttacaaaagggaccagagatttagtgtcagcatatgaaactctgcagggagatcagtaattaaggactatttgatgttccaacaaaccggcccagcctcacaagctttccctcatgtagaactctgacagattttcatttattggaataatgcaaataagaaaattaaaaagtcaatttgttgtcactgccagtattttaccaacctttataaatggttaagtctgagctaggagaaactatcttttgtggcagacatttcacccaggacaagctgtgcttaggcttagatacttggtttagaaatgcctgcttattaggacagtatcttctgcaaactccaggcttggatcttatctcagagtgcatatgtttcaccggactctgctaatcatcccaacccttcctttcctcaaggaaaaatactctgtactcccagatctatttgagtatgaaccaccctcagaagtatcaggacactgaagccctggaaaaggaatgggtaagatgggaagtcccagaaaccagggaacttggctgcaagtgttacctttatttatttcatatatgtatatttccagaaggacaacggttgactggtattaagaccaaaccagtccatcagaatatcatcgaccaaaatgagaatttccctgttgggccattagggttggagtcttattaaccctcccctattcctcgggcccataatgcattatgagatagaggagaagaaaccaggcacagaagactctccctgtcatgctttaaccccataccctgtgctccacttatggaggacgtctccccagttcttgccactcccacaatcagagaaggtgaggttcataattattcagcctcatctccaaggaacctttaactggcaacagagattgttgggccatcatgagatgctactttctagctctatgaacataaaatcacgtaagaaaaagcaaacaacacaaatacatgaaagccatttactcctggtgaattcctcagggtcccaggttcaacactttccgtgatgtcagagtactcagtcagggatgatggggacagggtgtcagaacagtcttgatggtcttgccagcaacagctttttcttattttccataatttggtcttagtcgttctccagttgtcttcatgtaaataaagtggcccatggcaatcatgattctgtaattgttatagtgcctttgtaagttgacagtttccaaatccccttactcatacgacccctgtgaaggggggtgtgaaggggttggtgggcttgtgcatatgagggaatgtgaacgatttcattatgaccgaattatgctttactcaataagcactcaaacactaccatctcacttgtagtagaagtgctagggatgcaaccaagagactggttgaataacgggaaggttaaatgcatgagtattttaatagaaaaaaatattaaaaacaaaaccaaaactcgtatggaaagaggcttctgactaggccctcctttctagcagtgtttggcacctgataacaatttgacgctgggggagggagcagcttgacaaggtccacatgaagcagccttgagatttttcgcccacttccatttctcctcagcatcaaaggaaagtgcatggtaagaagtgaatcagacagcgagggatctatgcagttatcctgtgaatgtgtggcaaagccatcaggacgcaaacctcctgtcttgagtccagagctgtgtgctttaagatttgaccccagtaaagacagaatccttcaggctcgtcccttcccaaacctaaggggctgtccttggccactttcaacttgaagctgttgagcagtctttaggatatgtaacagcctattttttggacgatataggaaccacgacctcttaagtctcttagttctcctactttatacccatgaggtagaggcaggtgcactccagtgaaggagaagcctcaattcaggttgtactttggatgaaacatcccctcaaggcgtagaggaaggctgagaggttctgcccaggctcgtgtttagttgcaggaagaggtaatgtcagatctgagcaggtcagggagactccctcgaaaaggtcttcccaggctgacaagagggcttttcctcttcctcacctcccttaggtgagggctgaaagcagatctcctcacatggggacctagctaggaggtcttttctgagtgggtcctctgatgcctaattaagtgatatcctctgctgaagctttttccacaggtagggcacgtgaatggtttctccccagtgtgtgttctctgatgcctgacgaggtggtccctgcgactgaagctcttcccacattcgttgcatcggcagggcctcactgaggcgtgtcctctcaagtgcttggcgaacgctgcgctgtgggtgaagcagcgcccgcactcgctgcagaggtagagttcctcagcagcgtgcgtcttccggtgcgccaggtaccgcctgtgttcactgaagtcctcaccacactctccacacaagtagggtttgcctcccaggtggattctttggtgtgttgttaacacagatttctggctgaagcttttgccacaaatagtacaaaagaagggtttttctccagtatgtgtcctctgatgtctgacaaggtctgaagtccagcggaagtgctttccgcaatcatcacatctatagggtttctccactgatggagttctctcagcctgtgtcacaggggaggtctcttccaaattcttccggtttaggggatatttgtaaggcgcgttcatcttgtgaaccttttggtgcctggcaagatgtgagcttcgtgtgtaactttttccacattccatacatttatagggtttctctcctgtgtgagtcctcaggtgtctaacaaggtgggagttacaagtgaagctctttccacacacagaacagtcatgatgcctccctaacagggggtggacgggtgtagtttcccgaaggttcacaaaactattcacttgagaaatattagtaccaaatcttctttcattaagtctacctggattgtcctcaaagactatttcccaatctggagtctggtgaatttctggttctcccaaaacaggcctgtgtatatcctccaaactcagatcttcctgctccagacactcttcctcatctttactcctatctcctgtagaaagggtgagaggaaaaagggggtcactgtagcggcaacaatgccttctacacaatggggagatttttacaaagggttttgagatggcaagactaaatagaatgcctgtcctgtgccaagcactttctcatattgttatgctatcaacaaaccttggtatgcacaaatataatcttcattttacaaatgcagagattgagaatcgagggtttaagggaattgtacagtaaatggtatagctgcaattccaaaagttaacatttttctttcacccttttgtattacattgctatcagacaaatgatgggaggagaaaagaggagggcaatgacagaagaaatggctgtcagagggagaaagcagtactggctgacatgttagaagaactgatgagagcggggccctacagagagagagaagcactgcctagaggaactgctggctcagggtgggtaacaccgtttttgtcattcctcacctgtgtaggtaaaactcaggatttctggctcttgagtctcctgaggctcttggatatctgggacccaaggctcttcctctctaacctgggagatctcatcaggtctggggattggaaatgctgctcaagagagggaaaataggatatcacgattggctcaacaattccctgtgttaagagcggtccttttctatttggtaggttgtggggcaaatacatagctagctcaggtgatgaaatctttcatctctttagtttgtgtacttttaaccaaggactgcgtatctcttgcctttcttgtggttttcacctgcaacttaataattataccattgtacaccttatcctcttttcccatattcaagaaagattatctccaactcttactgttttaaaactcatgtgcttacttcaaatatttctgcactaaagctgtcatattacaagtttgttttcctattagaggtttccatttccatccatttatcttttacttgaaaggacaccatatttttcacctaatccctcaattttattggtggggaaggcataagagaagttcactgcatacaatctaaggtctaagatcccccaaaatttccagcaggaaaaagatctctgggcttagaacactctagaatacttgaaattccttacacagagagacaacaattccacagtcttcttccaagacatattctccatagaactctttctgtgttgggtccagatcactccactggtcctgggaaaagcatacggccacatccttgaacgttaccagtccctgaaaccacataaggatttcatcaaaacgtgatgctacgggtagcctcgtattttgtccctgttgaaggtcatacaataggtggactcctctaggagatgaaaggagcttgagtggcgggctgcttaaactcattctcgggggagccatgtgtcccctgtggcactggccctgccccctccaactccaccacttttcctgaggaccagcttatgttcttcttctttaaggtattgtttaaaatttaggaaaggtcttaaaaatcatcattcagctccctacttgacactttaacgctatatacatttctgcaaaattcatcttttctagtacactttccctaaagactctaatcactttcaatagtttctatactctatagccaaaacaagacttttttcctcagttagattacaatctaaaaccatacatgaattctatttctttttctccagccacatggcttagtttcagagctttgatcatggtgaatacttcctaaatgtctcagcagtacagtctgtcatacttacaaatgactatcaaatttattcctttaaaaaaaaaaaaaactaaaaaaccctcatttgacaacttcgcagttgtactggagtgttacaaaataatcccattttgttagttcttctagtcaatggcaaataaactggtgttggtgcctgtggatccaatataaggtatgataatttatctcattatctcctccccttccaggtacctgcagaactgtgagcttaaaactggcaagagtgtaaatgtgcatcctgcttcacctgtttagtatggcttatgcccagtggttcttcaaacaaattctctgtggtacagaggtaactagggcacacctgtgacagagcagtaagaagagcaaccatctctgagtctccagagctcctctctgcaggaaggtctgggtcctcgggcactgggacctctatgaagaaaagaaggcaaagatcagtaatatgcagcatgccccaataatgggcaaaaatctgggcatcccccaccatctttggtaggaaggtggccctatcctttctattatgggaaccaagaaactggcctaagggtagctcccatatcccaatcccatcacctatgagactatcagaatgccaagagaacaagcaacaatctgctgtctaagcttggccctgtttatgggggactctagctggcggtactgtctcctcttgacatcctggattctgtgatgtctttccatacagtctatctacccagcttccttggtataggagaaatgtccgagaaatgtccccctccttgcctgccttctgccacaatcccccctttctgctgatgcttcccaccgctctcctgcagggtctggagctcctcttcctggtgtggacgctgctctgccggtgcccccagatctgggctctgtgtggtttcctcaggagactgctcgggggtcgagctttgcacaggatcctgcagctcattaggtgactcaggctccactcctaaatgcaccgtctcctctgacaggacttcctggccgtgaacatggacagtcacctgggaataattccaacttccagtcaccatggagtcaggaggaagttcttggttgtcacgggagcttattttaggagaagatgcctagagaaaacactcccagagggacccagacaaggaggggaaactccagtttcaatggagcaggcaaggaggagctgaaggttatcctccccaggacaaggcaggggatgcgcaggcctgcactgctctctcaccacccccagcctgggcccctgtcacccaaggttccttcccatctccacctgtcccacctgcagctctccttgctgcctgcttccctagctgaccagccaggaagggggatctgtgactggggatctatgagaaccttcgaggaagtcacaaaattctcctctccaggaacccacggctcaacattcaaagaagggaaaaccaaagccatgaccctttggtggctgagacccctcagatggtccctatacaggtgttccaatatccagaaagtcacattcatacacacacatccccctaatccatggggctcatggtatatgagcaacccaagggcagagcccactaataatttatggggatcctgcaagctctccccgcaaatccagccttccagcaaatagtccccctccacatcacacagatcaggactccccctcctcacccaccgccttggtctcctgggttgtttctgcaaaccctccaccagcgtcactgcctcctcgccactttctggccgttggccccgcacccagctctgtagttctccaggtaggacggtaagaaattgttccagcacaagcagctctaggatctgctcctttgtccgcctctctggtctcagccactggtgacaaagttctcggagtctgatgagagcttctctagggcttgctgcctcctggtagcggaagcgtcggaagttctggtgggaggtttccagcaccgggtcatccctctgtaagacagactctggccgacaggtgaaatcatcttccagtttcaccatcagaattccctcttcttcccaaagatcctggtcctctggttccacggctgtagccatttcttggctttggggtggtctcacaccatctagagctcacactgtcattagccccccgcctcagcctggacacagcgaggattttcttccaagggccctggatagagaagtaaagacaaacaagagtataagcatgaaactatacacaaggacaacagcctgagttcaatcataatcctctacacaaacttcttcaaatggttaaatcctcttttccccaaccaccatagccataaatcaacagatccagttgggagaggataatttacaactaaaggtatggtcctctactccctttcctaggcaaggttcatactctgcaagaaaatactgcatttccacttcacaaatactgccaattcccccgcttaagtctccaaaccggttcccttctcttccttcctacagactgctttagtttgagccttcatcatctcctgcctggactactgctctaacttcctaagatccctgcagtactcaactataagcaaagtacaacagaattacctgtggagattttgcaaaacatagtatcacacatcatttttcagacactctgattcagtcaattcaggtaactgtatgtttagagatgctacttgcagttcgaatgtgtatccatggttgagaaacaccaaccatgagggagatgtgtaaggttatgagcgaaagttctggagtcaagctgcctgggtttgaatcctggctctgtcgcttactaggtatttccagagtgggaccataggcaagttctcattctcctaatgccagtttctctgtctatagaagggagataataatggtttttatctaataggcttactgtaaggattaaatgtattactaaagcctatgagcattaaatgtattactatctttgcttagaagagtgatggcaccagctattatctttctaaattatagttccaactatattactcagtattttaaaacaaaacctttttcatgttagtaaaatcagttccaaaatcctgggaatgacacgaagctctttacaatcagcccccaatctatttttcaagcttcagatcctaccttttccctgtatcacctggttataaaaaatgcattgctgatctccctacaacagggtgtcttttcagtcttccatgtctttttgaaggttgttccttctgcacaggctactctccacccttctcctttccacgctacatggtgtgttctctttctttttaacgggtcttgtctttattcccacaatttacagcttaggtccctctcacttctcatctggatgactgcaactgcctccaaatgtgagctatctgcctccagatttgtcaccttcacgtacccactatgatcagaacgagctctcttggcaaacgtgctcatgtccctttcctatctaagatccttccatcactccccgctgtcttgttaagtgaaatacaaacttcaaacattctacattaggttgacgttcatcttgttattctcttcgccctcctctccaatcctttcagacacacacgcacacacgtgtgtacatgcaaagcacacaagagtcccgtgttctttagcttttgaatatgctgtttcttctgattctttatccttggttaggttaaactttaaatttttcaagacataagctcaagcttcatgtcttctgagatgttttctttgatcccatttcccctactctcagacatagttagaaatcacctaagtcctcccgtagtgacctgggcacctctctatcccagtattggtcatattacatagccatcgctcatctttcctgtgaaactctttgaggtcagagactattttccatcaatctccaatacctataataaagtgcacaataaatgcatttaaaatgaataaaactctactccaaagcttcttcctatggtaacaggaagaaccattgtttcctccattatgcttttactatctcttgattattcaccatatcctgttaattccaacttccaaaaaatgtctttcgaatccatccatctcttcatctctactgccatttcccggttgagccattatgacccactagaaggtattcataggaactttaaaaaaaattacaatatcctctgctcctaaacggcactggcacgtaacaggcacggatacattggagagatgacttagttcaacctccatgactggttttcttggtcctgtccccctccagaccagtgtccacaagcagcttaagggctccatcatttctcaacctttttgtgctatactacagttgcctcacatccacattcaaggttatcgatccactcttaatagctgtgtctcatctattgttgcccatcaaatgagtttacagtcaatgatcacattatcttcattctttctcaaaacgcttctaattcatgctcttatgacatttttttcattaccctcagtcacttgcaacatactttcacagtctatcttggatagctccctaattcctagatcttcatgtgtaatttttcctctgctatctctacctcatggtgatttatttttttctcaagtggcttgtaatttttttattttatgtccatctttttactttgggagtcctgagagccctggatttaaatgtgagccccttgaatgtaatttcatttgtttcttcctaagtgctaatggtttcaatgatcttggacagtttgcttttttaagactctccctctgttgcccaggctggagtgcagtagtacaatcatagctcactacagcctggatctcctggcctcaagtgattttccaaccttggcctcccaaagcactgttaccagaggctgagccaccatgcctggccaaatcagtttt

SEQ ID NO: 67855 - DNA, 1070 bp, Homo sapiens
atctcactgcgccatggtaaagtcagcttatacttatttttctagtggttatttctttttccttctggaacctatgcgctttcctttagcttttgagagagagagacagagagagagagagagacagacacacagggagagacagacacacagggagagacagcatgggctgtcctgttcctgacaggaacaggatttaataatgggcaggaggcccatccacattagctccacctgcaatactccaagtaggtgagtggtgaacttcctaacatacaaaatctgccaatggcttcccagtgaccttaggttaaaatttaaacttcttaaaatgtgatacacaaagaccttcaaaagctggtccctgctacctctccttccttccatgactgccactcccattgaaagccactgcaagaattactgttctttcttttctataccctccctgggctttcctgatgctgttcaccttgtctgaagtacccttctccactcttcatgtggttaactctatccatctttcagagctcagtttttccaagatgccttccctggtcctcccagatgatgcttccacaggaacttgtatctccccctatcacagcatgcacatgtgtctattttttgtgtcatcaaaactgttcatcttctgttgaactcactggactgtaaagctctgagggcagggatatgctgtgcccagctcgatgcctggcacacaccaggcactcacttcacatttgatgaatgcagagaatgcttagtaaggttttaaaagtctgtttccagaaggatagataccatgttatattaacccatattcatccataagtctagcaaactgtgtgctggataaaggcatacatagggaaaaaaacatttattgtttggattgtgagtaaaacagaattctcttagtggttcccaagatgatggaaccacaactcatcacaaggaatcttcaggttgcaccgggaataatccaaatgcaagtcacacaacacttggcatttgaaaaaaaaaaaatcattttccattgaggatttaaatcaattttaataagcgca

SEQ ID NO: 67856 - DNA, 6446 bp, Homo sapiens
aaataaatggaactacaatactaattatttatccagacaaagctttccaaaccccaccccaactcctacccctggaagacagaattaatacatagggtcttttggcttaataaaaggacttctagtatcttaaaagtttgagaaccgacgtccagtgaagtagacttggaatcctcattgttttcacgcagcactaggtacaagagattccacagtatggatcctacaacgtatgcattgacagaagagttcctgctctctcaaagggctttgctctccaaagaaaaaagaacatgtaacagtgccacaccaaacttgccatttaaaaatgcccttcagaaatcacaagctgagatttctggtgcttgttttgcatttactttggcagcctaggaagatgaaggaaaacagatcagcaatagaaggaatgaaggaaggagtctttgtggggtaagagatgggaaatgaataggaggtacagcagtgctgtgcacagcaccaaactgggtatccaaagacatatgccccggccccagatccccaagaaactggagcttccctgagggtttcgtgaagtaacgtacccaagagcccttgtaaaggataaagccctctgcagataaccagtctcctaactcagtgattatctgagatatgagagctttatgaactaaaatgtgttgtgcaaatgtcaagatttaatattagaggcagaaaacagatgttgtgtttttattctataattaatgggatgtgctatgccataagtataccttgcaatttgttgcctttgctattctaatacctttcttcaatgtctgtccttggaagagttccagagtaagacaaaaactatagagagaatacaatagagagaatatgaaaccaggccaggattaagtaagagacttggttccagaagacactaaaacagtatctgcaaagatacaacctagtgtcttgagtgttcctaggatgcataggattggagaggagctatcaaggtaagacctctgtacaatcctcaggccagctgtctctgccccttatctgaaggtgtcacgtggcagtgaagacccaagctcaattctcttacaagaacagaaaaccacaggcaatgaaacaatatctagttctctaccttaaaacgctactagctagggtgatctttctggaccctaaatgacaaagtctgtagtcatataccatcaacctaaaggagagacagtgatctgcctatgtactggcaaataatcttcagaagaaaatagtgattagaactgaaattattatatttagcagatatttatatcccttccagtccccattcttattttataccttaatgcaggcctatagtttggtaattttaatacaactacttgctggggctaaccagggcctgtcaacagctcctctcagtgttctagaatagaaattggctaataaaaactgttaaccgctcttttccaatgctgctgctgttctttaaaacgaaagattagcccagtacaatccttctaatggacatattcttttattcttgattgtcctatatacaagcgcttacctaagctttccacataatggttagtggccttggcacgctgggtttgaatccctgacctcgaatccctgacctcgcttattagccttgtaacacaatttccctaagcctcagtcttatcctcaaaaatgtggctaatactacttatctcatgtggttgttttaaggagtaaatgaaataacctatagaaacccttcagtatagagtctggcatagggtaggtgctcaatatattttattcattttccttcaagctatttgaaatcgttttgggaagaaggcaagatttaaatgataaacaagcaaacagttctctattgcatcataattacaaaaaaacagatggcataaggaaaatcttggtcggtctattgttatatcaaagaaaccatgctaaaccaaaaaaaaaatccttgctttggaggcacttatgaagtaggattaaatgaaagtgttggaatacagatgagaaggaaccttagacacaggttctcccaccgaagaccatatcagcaatgcttctaattaccaatatatcaaagtcctctccactccctgtaactggcaggagacaatctgaggcaaactcagtgtaccaagaagtcctgtgaaaacttaacctagacagcacaatgaatgaaagggaatgaattccctggcttttggccttctaacacgtgaccagtatgcttcaaaacatgtttaaaactgtttctgtaaaatatttttgccacctaagtttcccccccgccccttcataaaagtgatatttgagtagtgaggggagaaatggctcaaaatttgttacaagaggttccaaagaaagacaataaggtatagagaaagggaagacaggaagaaagagaaagaggtcaagtatgtagtggatagtacagggaagtcacaagtatcttctgtctggaaatgctgcagattttgtggttagcctcaagatattaggtgggaataaacatgtcattgagagtaaatgtaaacacaaaaatgaaaaataaaaattgtaacaattcactttattctaaactgtttttgatggttatatatggcaggcctaggaggcaatgttagacagtagatagttgccttcggcggagggtgacctgtgttctgtccactgctctacattgtaaagaggtgtcatcttggacaagtcacggcagctcatgttgagtcttgggatgattctttatctaaaggtagagaactgaaccagctttttgatggtgatgaggaggggttttgagaggaacaaggatatacagcatctctattgaatatttgggccataatgtaacagcctaggatgctgagatttactcaagagctgaggacggctaggggccaaacacagatttttaagttttgagatagggtttactctgttgctaagactggagtgcagtggcaagatcacaactcactgcaatctctgcctcccaggttcaggccatcctcccaccccagcctcctaagtatctgggactacagcacatgccaccatgcccagctaatgtttaaattttttatagagaaggggtcttgccatgttgcccaggctggtctcaaatacctgggctcaagtgatctgccagctttggcctcccaaagtgttaggattacaggtgtgagccactgcacccagcctcaaatacagatttttaagaggccagatttatacacctggccatcatggtcatgttggttaacctccatcatgaagctaggctttttaaccttcaggaaaactaccccagagcagttaatggcctaaataaaggaggtcaagctatatgtctcagtttaaaacagaacatgacaaattaacctgaagcaggaaaaggaggggacatcaaacctgacacccatcctgataagagtaactgctctcatttgacagccagagttaaactagatgtatgcaatctctacaacaaacatagtcaatgccaatcagatagtcagaggaaccatcatttaatgggaaataacgcaataacatatataacagagctgaccggaggtgttgctatagataattcataacagcagtaaattcaaaagtcatttactatgtttttagctttgtcattaacacagcctgtgtggatactccctgtttcacgtctagatgacttcctcctggctttgctcaagggtcctttagcatttgaggagatgataagggatgggatccccgcctgttgaaccagaggaatctgaggagtaccaggtttccactgaagactaaatcatgatccagagaaggaatctcagaagtcattcttgtcgtgggcatggcttaacgtctgtctccccactgtgggccctgccctcgagagcaagggtctccttattcatttttatattcccagtgcctaccactttgtggagcccttagtagaaaaggtattcaataaacgcacattgagtttaagctttctatttctcctcccccaactagtatatattacagaagcactgaaaattcagaaatcagccagtgtcagggctcctgggtaataaaccattcacagggatagctgtaggaatttggcataagcatttattccaatctcttgggggtaatcaagtggcataatcatgccctgctttactgtgtagcataaggccagtagagaaaaacatcaagaggggaggaggacaagggatggagttcaatacacaaatatctactgagcgtcaattacgtgtcccacactattcaaggtgctgggcaaagaaagataaaaaaagcagaagctctgaccttgaggaacttaacaggtagttaagaaattgcagaattttagcaatactaggaattcacagcaaaagcccagaatacaggtgtaatattttgatcaaaacgtgaagcccctatcaagagaattaagaaaatcaaggggaagaacttatcaatatttcacctcaaatttggcatatagcattcagttgttttaagtacgctttcttaattttgcgaacaaaatattcagacctaagtgattatctataaaagatcagattactagtttccaacacagaagtactcaaacaaaggtattctgaacctcaacctactgcaatacatatatcacatttggccaaaaggtagttgttctcaaagtgaagaacccagatctgcagcatcagtacctgagccttgttagaagtacaaattctcaagccccagcacagacctattaccagaaactctaggggtgggccccagcaatatgcgtttaactagcccttcaggtgcttatagtaagtttgagaaccaccacctagcaaatgaagtaaatctgaagttcatgcagaaagccattgctggccaaactaaagggtttgctggtgagagaacagcaaaaacaaggggtatagaactgtttcacattttaaatctgtgccaaatttactgggaaaaaaaaatgtaaacctgtaacttacctcatctgtacaatttgcaatggctgagtccctcacattgtggtaaaccttgttgtacccttggaatgattgtctactgcaatatagtatatacacagagtacaaaaagggtatagctggaggagaaagggtgaaagattatgaatcccaggcgtttggtcctaggaggaaaaattcctgtcctctctccaaccctgcccaccctcttatgctagatagtaacagcagaaagttatcccagactgctccgcgttcacacgcttcccaccaacaaacctcctcccaaggctatcccacaacctttctgaagtagcttcctggatcaagccccacggggcagcttggaagagaagctgggagggatgaggggctccactagcattccttgtggcttctgagtgtagctgccctgggtgtcacctgcagagcgtggatagagaaaaagcaacagttctaagcccagcctctaattgagagcctgggatctagcgctgctccccaggaccaaggttgttcaagaaaggctgggtctaagagtctccctctggggaggtcagtacagattccaaggcagacagggttatcaaagcgcctagaagatgagaacattcattgttcagaaaaacaaaaattagactgacacctttctgaaggaacacagcctatccatggcacaaaaacaaatttttaatcaagacactcaagaagtaggtatactcctgctaaaagtaacgcaggtgctgagaagaggtgccaaaactggctgttaggagtgggaggagaggaaagttgcaagtggagacagcagctactggcttgaggggacctcagggtctgtcacagtggcagctgaaaagcctctggccaaatggacgccaaggactactatcatcacaggtgacaagatcacgggtgagtgtatctgggtgtgtgctggggggctgaggggggcttggtggtgtaaggagatggggctagccggggcaaggagcccgcggagatgatcttaagcaatctgagaggaggggtaagaaaaagctgcggaaaataaaggggcctagaccactcctccctcggttccggggggacagttggcgcggaagcgttaggaggtacgaggtacggactaactacatttctgcaggccccaggagggggcggagggcggtggctggaaaggaaaggaagccgggagcgccatccgtgtccccggagatactggctccggccaccaggaaacacagagaccacaacgtctcggcaccctcagtacaccgccgccaccccttccccaggacacggcgatttccccagactctggggggcggggtctccggtccctccccctcctccccgccctgcccggctctgcccgatctggtccggcccggtccagcccggcccggccca

SEQ ID NO: 67857 - DNA, 1046 bp, Homo sapiens
cgggcagagccgggcagggcggggaggagggggagggaccggagaccccgccccccagagtctggggaaatcgccgtgtcctggggaaggggtggcggcggtgtactgagggtgccgagacgttgtggtctctgtgtttcctggtggccggagccagtatctccggggacacggatggcgctcccggcttcctttcctttccagccaccgccctccgccccctcctggggcctgcagaaatgtagttagtccgtacctcgtacctcctaacgcttccgcgccaactgtccccccggaaccgagggaggagtggtctaggcccctttattttccgcagctttttcttacccctcctctcagattgcttaagatcatctccgcgggctccttgccccggctagccccatctccttacaccaccaagcccccctcagccccccagcacacacccagatacactcacccgtgatcttgtcacctgtgatgatagtagtccttggcgtccatttggccagaggcttttcagctgccactgtgacagaccctgaggtcccctcaagccagtagctgctgtctccacttgcaactttcctctcctcccactcctaacagccagttttggcacctcttctcagcacctgcgttacttttagcaggagtatacctacttcttgagtgtcttgattaaaaatttgtttttgtgccatggataggctgtgttccttcagaaaggtgtcagtctaatttttgtttttctgaacaatgaatgttctcatcttctaggcgctttgataaccctgtctgccttggaatctgtactgacctccccagagggagactcttagacccagcctttcttgaacaaccttggtcctggggagcagcgctagatcccaggctctcaattagaggctgggcttagaactgttgctttttctctatccacgctctgcaggtgacacccagggcagctacactcagaagccacaaggaatgctagtggagcccctcatccctcccagcttctcttccaagctgccccgtgg

SEQ ID NO: 67858 - DNA, 1423 bp, Homo sapiens
tcacggctccgacagctccggcggctcctcccctgccccggcttctctcccacccactcccgaccgaaacagcgccgccggatccgagccgcgcggggcctagcgggtcggaacacgtggggcctttgcgcccggaaccggaagcgatcgctcgccccgccttctcgccgagtaggagcctttctaggctgtgggaggtttgatcctctctatgcgccctccgcgggttgcggctcagtgctccccaaggacccagtgcgaagaagcctcggaccccacagctgccgtccgcgacccctaactccactctgcagcgaataaattaacatcttgggcctttcatttacaggcataccttctgcaagggttttctttttcttttcttttttcttttctgtttttgatcttttgtgtgtttgttttcatttggatacctctacgtgtttttcttgatttttttttctttgcattgtccgctgcaacatggtagaaaagggcagcgttaggtttgaatactggctcttgcagtcaccatcagcagcagggcctcggccgaatctctccatctttgaaccctattgtgcatcatataaaacgggcataataataccgttactctgaggactaaatgatacattgcacatgaactgaatggaacatcagaagctcagaaagaaaatagttatggtatcactgttctttcttttcctttgagtgttgcttcgtatttctttactttcaggctgtcttccctgatctcatttgttcatttttgtccgttcggtgacctttctgcccatacttgacattttcctttgctctctgtcccttttaccctgtaagtcaccactctccacgtgccatgtgccacttccttttcatgggacacattgctgggatctgtttactgggtttgaaccaaaggattagttacttttggtggagtggcagtgtattagcgaaacagaactaataggtgtgaacccagaaggcaggacaactcaaagcggggagggggcttccaggtcataggtagataagacacaaatggttgcattgagttgctgattagcctctccggaaggaggcaatcagatatgcatttatctcagtgagcagagaggtgactttgaatagaaggggaggcaggtttgccctaagcagttcccagcatgaattttccctttagtgattttgggggccccaaatcactttcctttcacacggggtatgtataaacatataaaaggagatttattataaggagttggcttacataattatggacgttgagaagtcccaccatctgcttactgcaagctggagaaataaggaggttggtggtataattcagtctaaagctgaaggcctgagaactggaaagggattgaggtgctggtgtctgaaggccagagagcaggag

SEQ ID NO: 67859 - DNA, 1876 bp, Homo sapiens
cttgcccaagcccctgcaaatgtgaagtgcttcctaaaatttctgcgtattctgtggccatctctgtgagattctctatgggctgtttctaatccaaattatgtcattccagacatgaaacgttattcctccttgactcacacacaacgcacacatatatgaatgcatgtgacatgcatgttctgttcatacatgcatttggtaatatagaagactttactgaaggtttgagggggagacagattaacattgtagaaatgtgacttcaaactgagcattaggcatccccattcttaaactgctttctaggtgccctgacgctggggaatttccactgacttcttcccacagactcctctgctttgctccattttggggttccttttttcttcctttctctgtcattttcttttttgagaaatattaactattacctttttttcctcattcagggcactctaaaccattctttgatgacagagctcatgataatattgatgtccttaggttctctctcttcctttatctccaaatgatctatttctcctgcacagctccaagacagttccctctctaagagaaaatcaggtacagcagttgagataataatatttttgcctcattacattttgttttgaattttcaattcaatattaaaaggaatgtgtgcagtgttgatgaaaggagtcaaactctgcaaaatattggaagagatttattctgagcccaatatgagtgaccatggcctgtggcacagccctcaggagatcctgagaacatgtgcctaaggtggttggggcacagcttggatttatacactttagagagacatgagacatcagtcagatacatttaaggtatacattggttctgtccagaaaggcaggacaacttgaagtggggagtggggggcttccaggttataggtagatttaaaaatgttctgattggcaattggttgaaagagttactatcaatagaaaggaatgtctgggttatgataaggggttgtggagaccaaagttttatcatgcaaatgaagcttccaggtagtaagcttcagagagaatagattgtacatttgtaaatgtttcttatcacacttcaggtctgtgttgatgttaaatgctggttggcttttcctgaattccaaaagggaggagggcataatgaggtgtgtctgaccccttcttcccgtcatgacccaaaccagtctttcaggttaactttggagtgccctggccaagaggaggagtccattcagatggttgagaggcccttagaatttggtttacagcagtaatttttttttttagtcatagttttaatggtcttttaatgctagtttttctttactgttgggaagagacatatctaatactcattatcacaaactgaatcacctgcatcatcattccctaaaaagatatcttgcctgaagacaagggtcagatcagtaggtttgtagcctactttgagggactttgcacactaaccctgaaaccagcccaattgttccacacaaaagatatttatggatttttaaatgaacacagaaattgacactctgtcttaaaacctgaaacttacatttgtcttaactgagttccttcctcaggaaactgaccctcaggcaagagactgaaacccactagatcaccaatccggacaacaagatgccaggcccctcattcatcatgatggcttccttacccctccctaattcctattttctcaccttaccagctcttcttccttacccctctctaactcctattctccctcccttccactatatataaacctcccaaatttagttggttggggagatggatttgagactctacctcccatttttcttggctgcagcattcag

SEQ ID NO: 67860 - DNA, 4411 bp, Homo sapiens
aatcctacatgtgagccctgaacttcatgtaaccttggggctgcattttccagtaggaaagtgtttctagatatattggctctgagacttttcctagcttcctaggtacatggtctacttatattggagcccagaaactgctgtaatccatgaactgcaaatggaaattttttacaagatgttctcaagttttggtattatctgaggatgaacacctctaagtttatctaaaaatttgtattatttcaagatggaagtccccttattgagatattatcaaacaaaaagctgattcatttcaaatattttggaaggaccattagaattattagaagtctgtagcgtgcttctctcatgataaagatgataggaactaagaaaatgagatgtggaatgttttatgtttttgacaagaagatgaggcaaagagggtggtcataaaaaaaaagatggtggtcataaataaagagggagacaggattccttatacatttttaaagttgttgacatttgtctctgaccttagtggtttctactttcagtttgcagttgacaagtccagagttctacttcatgcatctgaggatatactgggacttccttgttgaagaattacattgtttcttctcaagaaaaactcctagttcatttacatgtaacaagttctcatgggagaccttaaccatcatggtttgcttttgcatctttatcttactatagcattgaatcagaacttctgggatttggggggagcctgttttaccaaacttctccaaaatcctctctcaactttcattgtttttatctgcattaagctcactttgatgtgttgcatgttttactttgcatgaccagtctttgggcaagtcattgcctttcttaaggctcccttcacctccttgtttctaatagtataaataaagggattcagaaggggggtgaggatagtatttagcacagacaccaccttattaatcttaaaggaggagtgtgctgtgggtcttaggtacatgaacagaacagccccgtagagcagggagacaactgtcaggtgcgaggcacaggtagagaaagtcttttggtggccagtggctgaaggaattcgtaggattgcggacagaatgtagatataagaaatcatattaaagagaagtgaccctgggatcacaaggatggttgctatgacgcccaggagttccaaaatgctggtgtctatgcaggcggctttcaaactgggcccaacatcacagtagaaatgactgataacattattgccacagaatggcaactggatgagcagcatcgtctgacaaaagacaatggtgaagcccaccacccaggagctcagggccagctgcaggcagagtttgctggtcatgatggtggggtggtgaaggggattgcagatggtgaggtagcggtcaaaagacatgatagtgaggatcaagaactcggtggtgcccacgaagaagtggaagaaggcctgcagcaggcagcaggacatgcagattactgttcttgccactacaaaggttcctagcagtttggggatgactgtggtggtgtaccagatttctaagaaagacaagttacaaaggaagaagtacattggaatttgtagcctgggctcagcccacacagtggcaataataagcccattgcctgcaagggttaatatgtaggtgagaaagattgcaataaagagaggtgtttgtaggccttggataacaggaaagcctagcaggatgaattctgtgattactgtgccatttctcatgtcccttgataccctagaaagacaagcaagaaagctccttagaatcttagagcacagttgattatagttgggacaaaaaataaggaggattctgactatgtaaggtccttcgggacctgactctatttcaggtcctccctcacccacatacaaatacgcactggccaccccttctttactgatgatttggctggttcttttgtcagcaaaaccagcttctaatggactttgaatgtattaaaaacacttgatgaatgcaaagtgttttttcacccttatacaactatgagaataatcatgtgaaatgtggttgcttcttgtcaattattcatataactattttcaatgcatagtgtgtataccaacttatgtacgtaaacgtggctgtgagttcataagaaattaatccctattctcagagtctgaaaaagaagttactgattacattacagatacgtttaaggaagccattattgtgtgtgggtgtgagtgtgtgtcttaaaataaccccaaatcattgctattatattagtggtgagataaagttagataacagaagaggtgtttttctgaagaatccacttccacattctagttcagactcctttgctaaaggtatcaaaaataacatttaaaactaaatgaataaaactgtttaggaagtagagaaatattcaactcaaattcaaaatttcagaacaagctgagtcaaagcctgttatatggaagcacctaataaatgtacatgggataaagatctgcagacactaatctacaaaagtgaaaggttagcaaatgctaaggataacaaaatgggaactctgaaaagtacatttttgtcaaaattttttttgtgactaaatgtctttttataccaagtaaagtatttctatttgtatatgcaaattcatgggctgagaacatcctttctgttctaccaaaattcagtagaaaatagtaaaactacttcctttcttattgaggctattcttccatgtgggtttcctttgaaatgggtgagacaaattactgtgaaatgaatttcacatttttcaaagtacataagaagcttagcatgaaagaggcaacttacaggtcattgataggttgtttcattcttccctcatgtgagataactgtaattctctgagggcttgcttagggaagaaaaacacttccattttctcccacctcttttctagaccaggaaaagattctttgtctacaatgtcacaagctctagtgcctttccacaaaacgatgagagacagagaagtatttgaatttgcactaatggccaatataactggccacgaacgtgatctctttatataggatagatatggaattatcttcattccccatgcagagaagagtggcaatctctatagctcaatataacatttccaagggctacacattctaccatttggagaattagacctatgaattccacaagcatttgttgagagcttactatgcttcaagtactgccaggcaattaaagagcttatcagatagatagatagataggtggatagatagatagatagatagatagatagatagatagatagatagatagatagataggtggatactatatatagtataataattgcaacatgactcagtgagggaaagtgtagagctgtgcacagattgttttagaaacacttagaaggggctcttcgcccatctttagcaggggttaaggaagtttttctaaagaaggagaggcctaagctgagtcctagagttcaaaaggaaatgaaagtgaagtaaggagagagggggaatgcattccagacaaggattcagtttttgtgaaatagaaccagagcagagaatttcacttgagctggagctgggagtcaggcttgtcctggcacttatggtaaattaacagttagaacagtttacacgagagattcatgaagcttttggaggacagaatcttgagtcacggagtttgcaagtgtgtgtgtgtgtgtgtgtgtgtgtgtgtgtgtgtgaagtatggtgtcagccattctctgtaacacatgtacatgtggatctaagcttcatggaggaaggggctgcaggtggtatgtgaatgacctcttttgagattctggtcacagacagtactgccgtggtatccaggtgaccatgtgggacacatacaggggacagacatactctctctgcttttgtcaggaacatggcttggtttggtagcatgagggcccaggagtagcagcagcagtggcagcagaaatgataccagcagaagtggcagtgcctgctgagggggctggtccacagcagaaggaatgctgagcaagtagaagtggcagaaatgaggaatcaggcagtagctgtcctgacagctgcacggactgggttttgagcacatgagaagttttgtgagatgcagagggaggtggggatgtctcaagttagcaggtaaaagcaatgttcagagaaacacaggaaagcaacccaaggaacctaaagttatagagctaagatgctggattaaacactgcagtctatatgcctattacaattcaatcctacactctagacttcttcttccttttaaaaagtcacaatgtatagggtcaaatggattcctccatatccacc

SEQ ID NO: 67861 - DNA, 3019 bp, Homo sapiens
gtgtcctttccgtctctccctggctccggtaaatcatgctgtcatctcccatcaggattcgaacacagcctcctaacaggactccctgtctcctgacttgctgtgctctttcctaccgatggttcaaactgtagcaagggggaccattcgaattctgactacgccactcctcagaatcttgaagttaacatcccagactcctcagcatgacatttaagaccaccgatgatctggtcttacctacctttccagcatgattttctgccatttgccatttttccttctgccttcttctatgctccacacttactgaattactcaggtttagaggttagcaaactatggccctgtttttgtaaagtttcactaaaacatagccacactcatctgtttacctattgcctgtggctgcttttgtgctatcatggtgaagtttggtaattgtgacagagaccatatgacccccaaagtctaaaaggtttgctatctggccctttacagaaacagctggctgactcctgctctagttccccaattatgccatcttctttcttgcctcccagtcattgcacctgctgttctcttcaccagaaatacccttcccgactttctccattatttggctaagtcttgtctgaattctagatttaagtttaggagccacctccatgggaagccttccttaacttgccacctctagtccagttaaggtgctgctcctacacacttttctaatgccctgtgcatatctatacctgaacactttgcagaattgtgtttattgtttgcttggtgtctgctatagactctaagccccttgcaggcagcaacagtgtctgcagggccgaagcatagagcttgacacaaaataagctctcaaaacatagtttctaaatgattatataaatggatagcttgttgacactctgtccccagttacctagaagtttatggaaactgacacatgcacatgtttatacatgtcaccgtttcctgtatttcaagtgctcaagtcatatcataacagggactctttgctaaataatttgtctccaagttttcttctgcttccaactttttctgatgtgagttttgccgcatgaaaacctttctgctccatctttccctaatcagggatatgctggtgttttgttttgtttttactgtgttctggttcttttcccagcttcttcaggctgcctgagtacagataattttcttaactcatttaatgctcaattgcttgaaattgtattgagtcatttttttctgagttttgttgtgcgataaagaatcccacattttctaaaactttttatagttttagaagaagacaaaaagaagaaaagtattaacatattttcttctctggataacagcaaaatgttccaagtcttgtttgtttatttatttgtttgtttttaaattgctgatgaagaccaatttcaattttcaagactttgattatggaataaatttgaatatgcccagtggtgtagaactctaaaacagaaacattaagtacatatagaataagcttcacaaagagaaataaaccaagattcatcactcaggggacttgtgctaagctgaaacttgaatgaagaaccaatttgaaattcctttcaaggactgatggttctaggtaagatgtggtgaataaagactgcttttctgaggaagatccaagtccaggtcattgtgatgacttttctacatgataccaaaattgatttattaggatttactttaagacttcaaggggtcaagtctagctgtatcaattcattctagagaaaagcaaaggtttttccaaaatagtactctttcttggtgacaaagcaatacttacagcactactgatttccaggaaaacacttccagccgcaaggtgtgtccttgcccacagtagactgacagaaaaggagagctgggttataaaggcagtataattggaacagaaaatttttcttttttttctgcacagaaaatgaatctctttttctatactttaatgcaagtgtccttatgcattactgaattgtattcataaagctttcatgacatggcaaggtttcttcagcatttaggagaattgtattgagagtaattaattcatctgttcctgctaggtcaggataccttctctgaaaataacaatttgttagtgggacattttcacaggttcctatgagacatcagtctgcatggatttgctccagagagtcccaggagatagggaagttctcactaaaagtttattcacaagtcaagctgaggaatttgtagttttctaaattctaattggtatcaatcattcctgcactcctgaggtaattaaccaaagtctgagaatcttttaattttgtaagtttttagatcttggatttctcagttctccaagaaggaaaattattgacatcttaataaataaatggggtcctttaatgaactgaattgaatcaaaggtagtcaatttggtcaataatataaaaatggccatgtattcagaaatgtgagattgaacagaataaaaattgcattcactcacgcctgtaatcccagcactttgggaggccgaggtgggtggatcatgaggtcaggagatcgagaccatcctggctaacaaggtgaaaccccgtctctactaaaaatacaaaaaattagccgggcgcggtggcgggcgcctgtagtcccagctactcgggaggctgaggcaggagaatggcgtgaacccgggaagcggagcttgcagtgagccgagattccgccactgcagtccgcagtccagcctgggcgacagagcgagactccgtctcaaaaaaaaaaaaaaaaaaaaagaaattgcattcagttttcttgtgaactatcttatggggataaatgaaaagacaggggcctaaagtattgagggtcatgtagagagttcatggatattgcatgtgtaactaattattggagaaggctctctgcaaaacaggaacataagagttggaattgtaacttgaaaatcaacgct

SEQ ID NO: 67862 - DNA, 2530 bp, Homo sapiens
aaagaggtttaactgaacttacagttccacatggctggggaagtctcacaatcatggtagaaggcaaggaggagcatgtcacgtcttacatgaatggcagcaggcaaagaaagcttgtgcaggaaaaatctcctttataataaccatcagatctcatgagacttattcactatcacgagagcagcacaggaaagacctgctcccatgcttcagttaattcccactgggtccaacccacaacacatgcgaattcaagatgagatttgggtgggttcacagccaaaccatatcatctcttgtccaaaattatcccacttccacctgtgttatgtacttgaaaatgcaccattcttaagtgattatgtttggccttggattattctgagtcttctgtagttcacttttgaaatgcaaacatccaagtaggtagggaaacacttaaagttgttctgatcaaacatattaatgaggatattatctgtttgctaagaaaaataggcaagtggaattgatgacagtggagagaaaaccaggaacataaaatggacccaaaagtgatagaaacataaacttcaaatcgttttaaaaatggggggaaatttttgaggaactactcccagatacactatttttgatgcaatattttattagatatgtaagtaaactgggatttggctcttgcttgctagagaatcaagatgtaagcaggtgtagggaagttcaaacttttcctctgaagttttgataatttgagtatgtaaaacaaataggcagatcaacaagagaaaaagcaggtatgcattggagccacacgaaacatgagactcaaaaaagggccagatgtcagaagtttttataccatacagaaaggaataaaggtttgaagctcctggtgggaggttgtgacagactatatgagggcctggggaggaaatgcatggtgagcaaaggctatcttgttatgcagatgaatcctcacaggtaactgctctcagaaagattagctggtagcctgtggtgaaagtttctctgtcagacttttgaaagtatcagatctcagtctccttttcctatgagctaatcttttctagatcaggataaggcagataatggagtctcagagaaagctcatttgcatctgttgttttcgtcactaatgtagcttttctctacagatgcaaatcttccccaggaaagcacagctgtttggagctatttgtatgtctgcagcttctctgaataggccaaagaagcatattttgggtggcatattttggttttccatacagataaacttctttcgtttttcttagcctcaggggcaatgtttaaacattattaatataaaatttcctacacataaaaaatttatttttacttcattgtttagctacggtacatcatatacaccctgcttgaaatgttcttcctctttatcaagccatgcttcactcctccctgcagagtctactcaatattcattttcttcacaaacattttccagctaagctatttgcacattagtcttcatgactgaagacatagatacacagatcttttaacccaagtatcccacgtggttgcagccctggaccaacagagggctatggtaatgggctctaaaagcaatcattctttggttcagtaaaaatctgctgcacaggaacttaagccccttttataatcctaccagagagctttcaggaaaataaacatctgaatctaccatccttcccaggcctcaaggtatttccaaagagcctaatttccacaggacacacaaagttagttcaggttaagcattcggagttgtctttaaaaataataaaataaagtcaataaaataagaaaaaaataaactaggcaagaccatctggggatgtgaaggggtggaaatgtgcatgagtaaggaaaaatcttactgtagcaatgactaacttctctgttcctccctcacacccagtttttcttatgcccttcccagtggggcaaacttttacattattccacagaatacttaatattattatcctaacatttaatttctagtttttttcttttttttgagagggagccttgctctgtcacccaggctggagggcagtggtgcagtctcagctcactgcaacctctgcctcccgagttcaagtgattctcctgcctcagcttcccaagtagctgggattgcaggcatatgccacaatgccaggttaatttttgtatttttaggagagacaggtttcaccatgttggcctggctggtcttgaactcctgacctcaggtgatcctcccgcctcggcatcccaaagtgctggaattataggcgttagccaccgcacacaaccaaaatttctaattttcaaacaaacaaattagagagtaaaatgattgatatggcagaagggttttctttctgcctcatattttcaaccattttttacatagaaaatgaaattagaatgatctgggaaatctatctttactaaaagttggtcctgttataactttatggggaaaacctgacttcta

SEQ ID NO: 67863 - DNA, 1036 bp, Homo sapiens
ggaatgacactgccaccttctcttgttaaattatgggtgaatgtgcacattgcctttcatggtcaaaatcaaaggcaaaacaacagtagcagcagcaaaaacaaggacaacaccaccatctccttgtaccctgagataaataaacacttccccactcaaacaaacaaggttgttccatctagttctagtctctaaaataaatggaacctcagcgattcctataaattactgactccctaataaaaacaattttgtttctgacctttgtaatgcttatgtgtaaaggtatgtgatgacttctgtgtgtataacaattccttgagaaaactgcgcatttttcactataaacatattaactgtaaactgcacaactacagtcaattctttttctttaaatgcctgtttgtttttattaagttttatctggtgagccaattattcaaaggtctagactctagtaaaatttgctagaaaacattttattttctaaaagctcttgcctgtaagaatttttgttttaaataaaaaacaaaaacagggtaaaaactgttttcagtaatcacaaaagtcaccctttgcttcatcccttctccctttattgtgcacctattatatgttatacaatgtgtttgagcagatgcaaaaaataagactaatttactaacttaatctaataaaggggcacagatacaaataatcacaacaaaacacaaatgtagggtatatgcaaatgcaaattgggatgtggcaacaaaaaataaataacaatgcgaggtagaaataaatctaaagttattcaagcctaacctcctcattatacagatgagactactgggagtattttagtcaatgttgtacagtgatttaggggcttagcctggataaaatccagtttcctggagccttccagagctctctctaaaatatgtctgtcatacctgttgttgcagtgcctccctatagggctatactcataggatacaaagtcattattggccatccaattcagtcacatacttattggtattgacttccc

SEQ ID NO: 67864 - DNA, 1132 bp, Homo sapiens
gtgagagggcttttatataccttttcaattttgcaattatttctattacaatcttgcattatttttatttttattttttatttttttgagacagaattttgctcttgtcactcaggctggagtgcaatggcaggatctcggcttactgcaacatccacctcccgggttcaagcaattctcctgcctcagcctcccgaatagctggtgcccaccatcatgcccagctaatttttgtatttctagtagagacggggtttcaccacgttggccaggctggtctggaactcgtgacctcaggtgatccaactgccttggcctcccaaagtgctggtgttacagatgtgagccaccgtgcctggcccctagcattaatgttatacttagaaaaaaagttgaaagaaggaaaaaagtaagccttaccttgaaaactggagaaaccattaagaaagaatatagaaattacaagaaggaaagtgtgtctggtttgggggaagtggataggagtgaaaattggtgggagaggatgttctgggttgatctgtgttctggcagtagagtagtcacatcctgagaacttggcagcaagaaacttcaaccctagaaactcttgggaatagccctctaacagctgcgggtagctctgccttagcctagctggtcccagcttctcctgcagctgcagactctgtgggtaatgaggttcctggggctcatttttgttttttcaaatctagatcttaaagcagcttcaggtcttaccttgagagactatacaagacctgattggatagaattccccaggaaaagaggttgaataagcaaatagctttgggagagcattttttatttagaacttaaatattttctctaaagtacatgatagacaactgattaggagtgaagagtgcactagggctcttgtgatggtctaagaaggtcgtagaaggtagaatataagattgtgtgtggaataaatatgttaataaccacattgtcttaccaagggtttcttacatttaccttcaactgtgtatgtgtgcacagaaatattttaagttgcagtaaagttcagaggaaatataatggaggagaaaaagaaaccaagggaattggaatgaagagaagaacctca

SEQ ID NO: 67865 - DNA, 1024 bp, Homo sapiens
tgtgagttattgaattttgcaaatgtcaaccatattacactctatctctaaagtattcaacactaaattcttattatccagggacagtttgtaaataatagaaagtataattgctcaagtttgctgaatacacttctctcaaaagtttaaggtttgtctctaaggtggaaatcaacagaaagacagatggctgagaccagtgatactacattctcaatattgtgaccagctgtctacagcagctgtagccgctcccacaaatcccttgaggataagagcaagaaaaggcgtgctctttgttactggccttggaggacaacctcaatgtgtgcccttgatgggctgagttgaatgatgcgaaacataccaagactttgattgcatgttagagaaggtagatccatgactgaaagtagctcaggttcaccctgtattgacttccccagtggcataaagaagcatggaaggaatccaaggagagcaactcagggacaataggagtatttgttcctaaaacccagagccacaggcctacaaggacttcatgcctctcttggctatatcattaatgtcttaatgtggaaatcgtaacagaggaagggcatctgtctttagtagtaggagagcccagacctgtcttactgcataagccatatatgtgcaaaaaagagaatccaaagattcttaaacggttttaactggttcacttatatccaaagcacctgaaccctaatatattttgatttgaaatgtgtcatagactataatatgagtggtgaccctcaccgcacctttctccatagttgtgcaacacagtgaacttgctaattgcttctcctctgattggaaaaggaggtgagttggatgggtggtgtgggggtgtgtgtgtgtgtgtgtgtgtgtgtgtgtgtgtgttttgcactccctcttggagaatgttataatgaaacttaaatttaaccctgagaggaactagaatttctttatggtatttaactatgaaaacaaacaagtaactagatgt

SEQ ID NO: 67866 - DNA, 1055 bp, Homo sapiens
taaagttgggttgatgtgtacataggtgtttgatcatcattttgtatttcttatgtatgtttgaaatatttcacaatacaactgttatatatcattataagtgtttgtgatgtatagacttaacaatacagaaagtattatttatatgataatatttattatattaacaacaaatgttgcagaagaaactattcgttcagcaggccaggattttttaaaaaaccatcttccagatctttttacaaaccccaaccataattccaaatagagacaacatggttggagacacagcacacacccacaaagctttttccataaagatgagcatatactgcaagaaatagattgccaaatcacagagcccaggttacgtgacgtgtttggacttttttgtttagggaattcacagtgtgtgcacggacaatgctacgaggcattgcagtgcattctggtaatgaaatatcttcgatagaattctcagattccttacattcgttgtcagatttatggatgttcaggcaggtacagctactggtagacaacttgcactctaggagagagaggactcctagggaaaagagattccagggagtgggatgaagggacaatggagagtcagaaacaattctctccaatttggctgaagaccctgacccaaagcccagtggatcccttttaactaccgaaagccatctgggaggtgaatgctttagtggaagaaaccggaagtgtatgtacaatagcttaaattctgctcagcttaagaaaattgaggattctttttgaaagagaacatgcttctttttgggttaggaagtgtaattacaaatgaaattttaaagacttcttaggaaaggggagacttcggtttcggtagatggccatctagcatcagatgttgtttctctctgccctcaaactgccttgacactacactgtactcccaaggtcactgttcctctccacagaggctgagcattctgtctcagacacccaccttggtcatgactttggtggttatctctgccccaaagcggggagggtgtgaaaggcaa

SEQ ID NO: 67867 - DNA, 1005 bp, Homo sapiens
ttaaaatgcaaggtttggcacttttccctctattctcatctttttacccttccctctgtcggggatggattggttcttaacacccttcaggggccctggagacactcaccacagacagacaagaagaaaacatttaagtaagcagtatacatgatccaggtgatcctataattagagaagtgcatggattgaccttgcttcagcttattgtgatatagtatgagtgcccagagcagagagatacctgatgtccagacaaaaaaaaaaaaaaaaaaagaaaaagaaaaaagtcccttctgaggaactttggctccttgatgcaagtcttcattccatatacacttgacttcccaacccccacccggtccaactacaccttgcccaaagactgatcctgatcctgcttttatggtagatctaactcagaagctacatatatatatatatagttttcagagactgcagcctgaacccacccatcaaagtacacctacaagcttgtgttaggggagccaggaagttacctgagaagaaactgaggatggtagtgaagagttgtatatatttattttgaggaatcagataggtgaatttcatacccaggattaagttaaggaggaaggaaaggccaaggctcgacgtcatcataatcctgaccactttcaggtcatctgttggaaagcaaaagctgttttgagaggacagatatttcttctagactcatttctacctggggtccagaagtctctaggtgaaaattggaatagggtgaaagatttgattaaacaataagaaagaagttggaaaataacaagcaggggaaccttaagctgaataagagaaccaaaaacattttctctatcctgatgtctctctatgtgtctttctcttctattattttcttcaaactctattcttgttaaataccgcaattcactccatcatctagtggcaatacagattacttaatgccagttacgtttctttcttacccacatgtctagt

SEQ ID NO: 67868 - DNA, 1144 bp, Homo sapiens
ataatgacattttggtcaatgatggaatgcatctatgacagtggttccttaagattataatagattataaaggataaattatataatttatcttttctatgttcagatatgtttaggcacataaatacttgccattgtgttataattgcctgaagtattcagtacagtaacatgctgtacaggtttgtagttcaggagcaataggctataccctatagcctgggtgtgtagtaggttataccatctaggtttgcgtaaatacattctatgatgttcacgcagccacagaagtgcctaaatacccatttctcagaatgtatccgcattactaaacaatgcatggctgtattttaaagtgaaagcacatgtctacctgcctgtactccactagaaatattctttggcttggagttgagaggccatatgctggcagtcctcactatatgaggccttggtagtctgattcatggccaagaaacgtgtttccaaggcagtactatctcctgctttgcgtagctgaaacagctgttcctgacatccttctgaagggaaagacacaaaggggacagtgcgaaacctgggggaacatatataagagtgggaagtttctcttccacttgttgggccttagtgaaactaatgcttgtgttaatgagtgaaaaatatctgtgcagcatgtttgtggtatatgtccatcgttccactcagatagtttttcatggcacttggattccctattcttttcttcatcagcataccttcccaaggtgtaggcatgtgtcattaggacaggattccttggtgtgcagaagtggataatggcattttgccacactacagaatttcttgactacgtaaatctctggaatgcttattgaaatggaaggttcctgttcccaaccacagatttgctgaatcagagctttgggggctgggggaggagcccctttttaccagctgctctgggtagttgtttttagcacgctaacatttaaaaatcttttccagcgatagcacagttagcctggcacctaacgatgttgggacatgttgtggtacttcatttttggagatgttccttatctttttagaccctttgtacagtggtcaggttctttgaggaaataatccacaagctcaggaa

SEQ ID NO: 67869 - DNA, 1040 bp, Homo sapiens
gtcttcaaagatgggctttacataatcaggtaatgctttctggcacaaaatgaatcagaaaagtttagagaaggaaacaagaaagaagatcgatgacttcagctctaggagaaaataactgaaaatagcgcctctcaaatgttaatgcactcacaaatcatgtgagaatcccactaaaatgtagatcctcactcagcaggtgtgaggtagggcctgagactgtgcattgctaaaaaaatctctgagtgatactgctactactggttcatagaccacactgtgtagtacaaacctaaaccacagaaatgttttagaaagtgagaacacaggaaaaagaaacctcacaggcttgagaagagggaagaacagtgcaggacactagaataaaacaaggaacatgagcagaataagacattttacttggagagggagcccagtaggaattagggggcatgcaggagaattaaatataagagtggtcagtgtgtttgtaacactcaggacagattttaaaacatgctttaaaaaacccatgatattaaagacaaaaaactgagcatataggttttttgaacattacttcgataagcctctgtgactagactacacacatgaatgctaactggtaaggagtaatgggaaaggaagactccgggtatttctgtaacaggcaaagagcaattggacactcacttttgcacgtgatcttccatctccatcatttaggatgagagaggagcagatacaaaagacacaggttctgaagaatggggaagcctgctcagagaatagctgttcagtgctcatgcagcttatttgttttaaactgtgagaaggatttgggaaataaggagtcacctgcatcctgggaactcaagctgcctacggaagtttggcttgtcctattacagcagtaatatattggaaacaagaagacatgaacagcttattaaatagccaggtagctgggcagaatgagaaaatgcaaccctagacaattgagccatttgggcaaatatgagagtctggagtgagctctg

SEQ ID NO: 67870 - DNA, 1058 bp, Homo sapiens
tgtcgtttgctaagagaatttgttccactggagggtatggaaaagtgtgtttctggttcctaaaatctataggtaggtagatgcttaccgactccatttcatctgagtgttcactttttggttttcgtaacacaaagtcagtgttttcatagagagaaaacactgatatttgttttctatagaaacaaacactgatagaatttgactttttctctctcatctccacagatttctcagagaagaatgggtgtaaaaaaccattccacagtgactgagtttcttctttcaggattaactgaacaagcagagcttcagctgcccctcttctgcctcttcttaggaatttacacagttactgtggtgggaaacctcagcatgatctcaattattaggctgaatcgtcaacttcatacccccatgtactatttcctgagtagtttgtcttttttagatttctgctattcttctgtcattacccctaaaatgctatcagggtttttatgcagagatagatccatctcctattctggatgcatgattcagctgttttttttctgtgtttgtgttatttctgaatgctacatgctggcagccatggcctgcgatcgctacgtggccatctgcagcccactgctctacagggtcatcatgtcccctagggtctgttctctgctggtggctgctgtcttctcagtaggtttcactgatgctgtgatccatggaggttgtatactcaggttgtctttctgtggatcaaacatcattaaacattatttctgtgacattgtccctcttattaaactctcctgctccagcacttatattgatgagcttttgatttttgtcattggtggatttaacatggtggccacaagcctaacaatcattatttcatatgcttttatcctcaccagcatcctgcgcatccactctaaaaagggcaggtgcaaagcgtttagcacctgtagctcccacctgacagctgttcttatgttttatgggtctctgatgtccatgtatctcaaacctgcttctagcagttcactcacccaggagaa

SEQ ID NO: 67871 - DNA, 1128 bp, Homo sapiens
tagagcttttaatggtgtctaacaatggcctggtgaccctgatgtgttttctggtgcttctgggatcgtacacagcactgctagtcatgctccgaagccactcacgggagggccgcagcaaggccctgtctacctgtgcctctcacattgctgtggtgaccttaatctttgtgccttgcatctacgtctatacaaggccttttcggacattccccatggacaaggccgtctctgtgctatacacaattgtcacccccatgctgaatcctgccatctataccctgagaaacaaggaagtgatcatggccatgaagaagctgtggaggaggaaaaaggaccctattggtcccctggagcacagacccttacattagcagaggcagtgacctgagaatctgaaagatgctacagggtattagcctgctggataggaccctcgaggtagataaaatctatgcctacttcttctccattgttcttaacctcaatcaggttctggtgacctgaactattagccacaatagaagatgggatgagtgtcttagaactgcttctaaatgcctcccagataaaaagtatcaagttctatgtagaagtactgtttggctcaggggccactttcccacgtaagaatgatgttggccttgctgagaaagtttcaactagtaaatctggtgtctctttcctgatatcactttttggacacaaagtacattggaagagcttaaaatatttttaaatttctttgagacaagggttctcttgaaatattggaccctgagtcccagtggagactgattgattgattgactgttcgtcaatgaggaaaaaggaaattaccttgggcaaatcactttcttcctcatagtttcctagggtcactgttgttgccatcagtgtcatcatcatcatcatattaataacatttagttagaacttactatgttccagacactgtaccaggtgatttacatttattattttaattttctcaaaattcttaggaggtaggtatcatctttactttaaacatgagtccattacaaattagagacattaaataacttacttaaggctacagagcttgttttctggaattcaacccaagtctatacaacatcagagccc

SEQ ID NO: 67872 - DNA, 1324 bp, Homo sapiens
aaaatgaggtgcatatacaacgtatacaacatggaataccatgaggccaccaaaaggaatgagatcatatccttcgcaggaacatggaggaagctggaaaccattatcctcagaaaacgaatgcaggaacagtaaaccaaaacccgcatgttcttacttgtaagtgggagctgatcaatgagattacatggacacaggggaggaacaacacacactggggcctgtcagggggttgggtgggaggaaggggagcattaggaaaaatagctaatgcatgcagggcttaatacctaggtgatgggttgataggtgcagcaagccatatggcacacgtttacctatgtaacaaacctgcacatcccacacatgtaccccagaactaaaaataaaaattaaaattacaaaaaagaaaaaaaaatgttagtagttagcctcagtgaataccagattgttataaaatttcaagcatctttaaaaatgagcaacagaggtgagtgatgtcagcgagatgacagaatagagattccagccctcatcctcctatggaaacactgattttggcagcattcatggatgagaatatctttgtgggagttccaaaagctagctgagaagttccagcaccccagtaaagtaaaaaatccaagagtggacacattaaagagagaaagaagggaagttaaattttatccatattttccctcctcaatactctctctgctgagtcctctcagttgtgattttttttcccatgaaacaaggtataagtgaagtgagctcctggcttccccagtcttccaggagccccttgtaggtcttttcttacccagaacactgagaagttcaacataactgaatgctgtgagagcagctaggcacagggagaagaggcagggagtaacagaaaccagggtgtggaattcaacagcctgccacagatcctgctgactaacttgcagactccaccaaaaggcccacctacaaaccttgcctgtggactccccaaaccagtcaatgtaaaccctcagtgcctcatgcaccaccccccaggtggacagtgcactgtgtacacctgtgatggcctgcacaagctcctacagtcagcacacagatcttaacagcaggagtgaatcttggcagttgtctcaactctgctggtttgggagaaggtgcacatcttgtatacttcagggcacttccctagggaaaataaacaggcagctgtttgcaacagcccgagctttgtaggatcaggggaaggcacacaatcctaagactttctccttaagaggaaacaagaggatcagaggaggcacatctatac

SEQ ID NO: 67873 - DNA, 1244 bp, Homo sapiens
actgcaattatgacatctgtacaaaattctacaactagacctggttggatcagtattagaatactggtaggttcaattgacaccaaaacccatgttatttctatctctcaatgtggcctaaagtatatactaccatgagtgggagaataaagaaaatgtgactttctaagtcaccttggacaatcacttttctccttgtattttatcattttaaaaaatgtggtttctaagctgggaaatatgtatacaaaggttttttcattgccttttatatttttgtttacagtattctgtatgtatttaataaagttatttcataaaaagtaaaacaatcatttactaatacaaatgaggatacgaatagcatttcacatacctctgaaccatagaacatagattttggagagactctagacatcatctaatccagcctcctcattttctagatgaagtgtttgcaagggagagagtgaggtagaccatttggccaaagctgggggaaagtgtgtgactgagttgcaactcagttattctgatttccacctgaatgatttgagatgtgaatagttgctttcctggcaggcaaattgtgagttttgatagcacagactatgggggtgggctgcctgctgtagactctcggaagctgctgcacaaaagcctttgcagagcatgcttcacctccttgttccgcaaagtgtaaatgaatgggttgagcattggagttacgattgtgtagaagacagcaggggccccagctcctgcctcactggagcgaggctgcaggtagatacagacaggtggcacgtagtacaggagcaccccagtgagctgggcagtgcagggggagaaggcccgctgccggccctgggctgtgcggatgcgcaacacagctgccacgatgaagatgtaggaaataacgatgaggatgaggcagcctgcagccacgatgccaatgctggcaagcatgactagctcattaatggtggtgtctgtacaggcgagctttaggacagggggtatgtcgcagaagaagtaggcaatgtggcaaggcccacagtagagcaggcggaaggtgagggaggtgtggattgcagcgtgcgtggcacctatggcccaggtgattccagccatttctgcacacatccttctgttcatggccactgggtagtgcaggggttgacagatagccagatagcggtcataggccatgactgtgtacaggaagcactcagtgctggcca

SEQ ID NO: 67874 - DNA, 1052 bp, Homo sapiens
tcatctgtggatcctgctatctttgccttttgaagataccatccagaaaaagaagtgcctttaatttgctactgtcatttcctctagtatcacttttgctgtgatgatgtgttcttgtgtattataactctttattttttgccataaaagtaaaggatgcttactccacttcgcttctctgctccaggttcactttggatatgatctttcttttcccaacatatgccctcagaaaagtgacagtggtcccagaacctattccctttcttgagggagttcaaaacattcataggcagtaatgttcctcccagggtttccagggaaacaacatgaaaaacaggtgacatgaactacagactaaagattgcagcatttatgttagagaatgcttgaattagagaattttctgcattatctttgtctgttcactttctatcttatatacttatcagggccatactggtaagcttgcgtaggaggagttagagggaagttgaaagccaacatctggatcaatgtaatgtcaagatcacaaagacagagactgcaggggtccactgtgagaggtgacactgttggggaccttcctgattcattcttcttgggctttgctagcctgtacaacctacatgtcttttcttccactgcctgaaagacttgggttgaactataactgttggagagagatgttcctctttaatcatgaaacaccttaagaagtctataatgcaatccttagtcctaccctgaacctatgtgtcctctaagtcaggccctgatctagtgcagtaaagggaagggtgggcttaatgggagctttgcctgggacctgaacctggagcacttaccgcattaggaagaaaggagctccccgtaatcgttcctgacccttgtgtctcatataccctatcctggtggaaatgaccctatttgatatgctgtcccttaaaataacttgtatcaatattaaaatgactatttctaccctttgatgagtaaatgcagtggttcttaaagtggtctcgtctccctaccccacaatattttggtac

SEQ ID NO: 67875 - DNA, 1040 bp, Homo sapiens
gaattgtaattttccatggacttaattaatcatgtagctatgtcatattttatttcagctttttcctgttgctaaacattaacactgtgtcagtctccccaacatttaattgatataaataataccataactatgagttttgtgttaaaattttttaaaaaattaagcaatctcctactgaaagaatgtgttaaaatttttatctagatttctgattattttctcaggagagattcctgttgtgtctttcttatttttctattcaaaatatttttcgattttccctgtgatttcttcttccttgacctatgtgttgtttagtcattcttttctcagatatattttcgctaagttgacaggtgagccagagcttcaaccctctctctactctgtgttttggtcaccctaactgggatgaccacaccacacctccatgtacccactgccacacctccatgtacctttatatctttagcttttccttcataggtttcttctattcctctgtcatttctccccaaatgacaataagctttgtgacagaaaagaacatcatcacctatgtgacatcaaacactcagccttttcctctggcttctttgtcattagtgattactccatatttatcccactggccttggatcactatgaggccatgaccctgccggtctctttcataagtttcatttctgtagatggttcataagttatagaatttgctgatgctgtggtccatcaagggacatggaccaattcctgttttgtgatcacagttgcatgagccttaacttgtgtaacataggcccgcttcaggctgcctgaatcagtacctatgtcagaagcaggtggatttgtattcatgagaaccagcagtgtaccatgctgtgttatcattttcatattttgttttcattcttttcaacatttttcattaacccagtggtccaaatcttcagccagattccataaatctgtttatttctttttttggattagggacattcatgtacctcagatctccagaagctatgggttagtgt

SEQ ID NO: 67876 - DNA, 1091 bp, Homo sapiens
tgctctggagactttttttcccagtgggattgatgcgtatcgcacagccccttggccacttgatcaagcacagagaaacttacagcctgaggcattggtgcctgcacacccaagttatgttgggccatggcgatgagacagctcctctactcatctttctgaaaaagccatcttgccacatctaataaataatcttactaagattatttaatcttatggcccaattataaaagccaagtgataaaagcaactgcctctcgttctacaaatatttattctgtacgtactattctgtgcaaagcacaatgggtatatatacatgtgtaaataatgtgcctttcagaagcctaacaccgtccaacatcaaggtagaggaaccgtccagatgcaagagataagctacagttcttatccttggcctcttgaagtattgattatcctccagggctttatgattcatagggcctaataagaacctttcttttatgagtatagtaatctttgtatataattctggcttttcccagtacttgagtaaaatactgaattgagacaatacggaagttcatttctctgctcctttccttcctgatctcaggtacttgctaaagaagctcctccagcttcaggctctaactgaaggggaagtacaggctgcagctccttcccacagttccagtttgcccctgacttatggtgtggccagctctgtgggaactatacagggagctgggcctatttcagggcccagcactggggctgaggaaccatttgggaagaaaactaagaaggagaaaaaagaaaaaggcaaagagaacaacaaactggaaggtactttggggagatgatatcagttgccccagtgactcacctactaatgacagttagacctggtactaactgacagacacacacagctgcagatgtacttagagtctcatctggttcttaaggagccctaggagcccttgagaaaacaaatgtcaaatgtattagagccactttgggtggagaaattcgagctagacttcgttaaatgcaaggggagcagactgagacttcccccttcccccaactctctgggttgcatt

SEQ ID NO: 67877 - DNA, 2031 bp, Homo sapiens
gaattagtgtaatttcgatgcaacagtttctttttattaacataaccaagatattttaacgttcaaaatgaaagtaaatacaatgaaatggcagtttgcagtcagcctgtttctcctagatcttgtaaaattgacttaaaagattacatggagagtgatctcatttgtttttaaaataccatttgtatttgtacttaaggatataaataagtggattggaaaggtacacaacaaattaaacgctcacttttggaaagctgtcaaccaagaagggtagaactgaaacagtcaaaggactttctctaggtacttggatttgtttcaatttttagcagccctataggaaagtatgtgtgtcccttctgaagatggtatacgtcagcttcacgttccagagtaaagaaatatttacagagtagtatgcccctctctccttccttcttgaggattgatctcattgctcgtttgtctttctcagtttgaaattgttcctgaagatgacccccagaatgccattgtcagctcttctgcagatgcttgtcatgcagaactgctcaggactataagcactactatgtaagttgaccaaaagcttgaaaacaggctaaaagatcactgttggtacagtgaaaccttttctcttgcttttaatgggtggagatactttattttatagaaacctatcctggatcctcctgacattgtgccaactagagcctccacattatcaaagtcaagaaagcttatcctgtttgttcataccactattctgttcttaaatccatcttcatctcccgctaagctctcaaactaaaattatccctctcctgtttagggggaaactaatgcctaacctgcttccagctggagctgacttttttggattttctcatccagccatccacaacctgatccagagctgtccaggagctcgaaaatgcatcaagtaagtgtgatcaaattcattcccttgagaaaagctcagtgatcatccggccagggactggcagttcctactttgttcactgaccttctgtgtccaaagcctgcctgcttctcgaccagtagggctcagtattggcccccttagccctctggacaggtaagcaagagccaggactccactgttcgctgattattactattttctgtatgtaccatgacagcaaaaggggtgggaaatctagcagactaatttgtcactaaagaggcctgcttatttcttttaggtttttgttagcaaatatgtgttttagatatatatgggcggaatataaagaaaaattacctgatccctttagtgataggaatgggtatttatgtctagcagataactctcaagggtgatttcccttgattctgcagttaccagtgggtgaaatttgatgtgtgcaaacctggagatgggcagctacctgaggggctgccggagaatgatgcagctatgagctttgaagcctttcagagacagatctttgatgaagatcagaatgatccccttctgccaggtatctttaactttacctttctggtttgaaaattgactgtgtttaggctaccttcccatcttcacacatagccgagtaccctaaatatctatgcattgagtgataaaagctttcattgaatcagccttgcggagtgctgagttagagggggacctgcggcctgcatagcttcctagattactcacagatgtcatggggagcacctgcgatcatagtaaggcagggtaccccagaaactaaggtatctcattctgtaacctaagcaagactggagcagaacaccaggggaaagtttactgtgcagggaataacatttcaagtgaagtcagtggggtcaagtcaaggccttggccctgcctgtgttccatgagttcctcccacaaatgagtgatcaagggttcaggctttggggtcatatagggaaaactctgggttaaaaaatggaattgaaattctcactctttgcctaatatactatataaccctaggcaagtcacttaatgtttcaaccagttttcattgt

SEQ ID NO: 67878 - DNA, 1030 bp, Homo sapiens
tactatctatgggtagctttcctccccttaatgtgaaaaatgagaactaaagcaaaaagcatcactcactgtacatatacaatgtattttacgtagtgtaaaaaatatggtttagatagtgaatatattaatgaaatcatatgtaaatttatttttagtggctgaataatttaaaacattatgtggaattcactatgtttcccccaatttaggaactttttactgtgtgaaaatgaaatttataatactctgtagggtgaatgatggtttttgctttagttctacccctctgtagagttccaaggggttctggtgtagctccaaacagcaggaataactttgtcagtgccaagattttatttagttaaaaaacaaaaaatctacacactttacaaggaacgttggctcccctgaggacttcctagcattcaactcgttcagttaacccctattgcccatgctttgacctctcatgcatctggccccatagaaaccatgaaccttgtaacagattgatgcctgagaaaaagtcaatctacccgtccactcctccactcccaatacacatacccccatgggctgttctaattcgggggcagccagaggtagccaagaactctaagtccagattcctttcacctccaggaacctagagtacatagtgtgaaaaatacggttcaggcaatgattatgttaatgacgccatgcacattcatttttagtggctgagtaatttaaaacatgatgtgggaattcactgcatttccccaaatgtaagaactttttagttttaaaatgaaatttatagtcactgtagaaaatttggacactaaagtataagcaagtaaaaatcacccccaaattcatcattcagagaaacactattttgctgaaccattcacttgacttgagttatataattttatacagtacatattattttgtaatctgtgtttttgacttacttactttaccaaaataattttcttatgtaaataatagaatatagatttagagtgtttcagtttgt

SEQ ID NO: 67879 - DNA, 1037 bp, Homo sapiens
acacagtgtctggattataggaggaacttgattgatttattgaataaatgaataaaagctctaggggaccaaataatgaatcagctgattccaaagaaacctgacttttagtggttaggaacaatcttatgagttagctctcttaggttagttctggtatctttccttcttccatgtctccctccctcctcccaacctgccctttattccttccttccaagtcatctattatttcaaggtttccaacccatagaaggcccagagccccatctatggttaccattcaccatttcccttgagctgactagccactgatcacagagttcagtcaactttattcttactttcataaagggtgctttgtataatcccccttttaaaaaaatgtggtgattgttgagcttaaacccaaagttctctacttgttccttatcctgtagcatccaccctcgagataaacagactgtggcttatcggctgcatttgggggcccgtgctctggcttatggtgagaagaatttgacctttgaaggaccactgcctgagaagatagaactcttggctcacaaggggctgctcaatctcacatattaccagcaaatccaggtgcagaaaaaggacaacaagatatttgaggtgagaagaacagcagaataaacaggggttcattttgtggtggagtcaagatttcctccgcacttgaggccatctcttttgttattacgatgtggcgggtcttggttggttgggggctgagcttatttcagagctgcaaataaacagctgttaattcagtagcttggaggcacttttgacagacagcacaatcgagaaagggaaaacaagtccatattaaaatggactttaaaaaatttttaatttccttttacattttctctgccgaagcaaccatctttgctagggcagggcctgcagctttatttgtaggttacctattgaaggatccttgctccagaatatttaccccatccttgggtgtattttttgttacactctcctaaatcctgacattttct

SEQ ID NO: 67880 - DNA, 1104 bp, Homo sapiens
ccgagagtctgcagatcctgtaagtgatgggaagcatggggaagcctattgcctagccagagttttaacttccatgttatgtaagtgaattatttataatcagactgagagcaaaatcgctatcatatctgcctctctcccaggcagagagagctatttccttgttatgagaacaagcattttgagtaactgaaaaaacatgaagacagataaaaggaaactatcactaaggttacagttttctcccttggaaaagattctccttagggaaggtttggaagagataatagtgttcagaccagcatattggtcttgatgctgtatcttctctgtgcctctcaatcttatcctacttttgaaagtcttagaaaacaacagaagaatgacctctgcccacccttctcacctcgacccacctagcagctgcagtttgtatccatcaacctttctctggctctttttctttaaccatttctctgaacagaaaacttaggccatggatatttcaagtacatgtcagcagtgtgctggctctttggacgtcacctttatgacactctgcagtatcccatcgggctgatcgcctccagctggggcgggacacccattgaagcctggtcatctggacggtcactgaaagcctgtggggtccctaaacaagggtaagacagcattctccagtctgagaaagagcctaccagggaattatgcaagagagagggtcatcgtcctctgtggggagttaagtatatggtgaatgtcccaatatgtgttgaatgtatgtaatttattcatgtagagggaaagcattattttcactgtcactgccaccacaatcgtttgagaacatgtaaaaaaaaagtatcttttcccccagtaatagtaatagctagtggttactgaaagctttttatatgccagacactgtgctaagcactttatatatataaattatgaatatattgaatatatattattatatattaatatattgaagtgtagatattaaagaccatgggtgaagacactacatttcagagagacttagtaacttgctcatgagcatgactagtaagtggcaagtctggcttcagtgtctgtgca

SEQ ID NO: 67881 - DNA, 1035 bp, Homo sapiens
agtaaggagggattggtacagattaaggataaaaatgctgctgctcgtgttagttctatcctcttatctgaaatttggccaatcttcatagctttgaattcggtttattacagaggctgggaatagccacaaatgagtataattgggctttgatttcactttaattgattgattaattccttggagtcctgttactatttcagctcactctgatacgtggatggtggtactggatcctatgaagcctggaggacctttcgaagtgatggcacaacagactttggagaaaataaacttcaccctgagagttcatgacgtcctgtttggagatgtctggctctgtagtgggcagagtaacatgcagatgactgtgttacaggtaatttgcagagtctcagcaataatacacagtgttggtgatgaagaaggaaaagaaggaggaataagggggcaacaaggagaagcagggctgtttctatttagtgagtaccatgagccaagatatgttctaaatgctttgaatgaattcattaatttgacttaacaatcttaagagataagctattgattaaattggtagttattgattggtgctaatgtattctatataggttaagaacttagaaggagtattgttttctctagcactttctccaaaactgagtttcttctcaagttgatttttattttcttgcttttttttttttttcttttttgagacggagtttctctcttgttgcccaggctggggtgcaatggtgcaatctcagctcactgcaacctccacctcccgggttcaagcgattctcctgcctcagcctcccaagtagctgggattacaggcatctgccactatgcctggctaatttttgtatttttagtacagacggggtttcgccatgttggccaggtttgtctcgaactcctgacctcagatgatgcacccgccttggcctcccaaagtgctgggattacaggcctgagctactgagcccggcctgttttcttgccttttaatcattcctttgagaaata

SEQ ID NO: 67882 - DNA, 2823 bp, Homo sapiens
cttgaaatctaagcctaatgtgagccttttccatctgaattcccagatcttaattctgtgctaacctgacttctattaattttgggattagtaatgaatttcagacaaatagaaaatgtcattttaaaaaggtcattagccataatcagttgtatattttcccacagcacacacaaagcccattattggactttctgaatttccaggttagaaattaagctgttaattattttaagtgacgccagatacttttctaaatacagcatttttcaccttattttggtaggtaggtaggtctgaaggccatcatagacataatagccactttaaaatattatgatccatagatttctgaaatcctagagtctaaggtattgattctgattatacagtgaggctgtagaagtcatggaaagcagtttatcattaattcttagaaacttgctaggggtgtgtttcttttcattttaataggttgattgtctagacttacactgcccagtacagtagctgctagtcacatgtggctatttaaatgtaattttaaactaaatataattaaaaatgtaatacctcagccacatttcatgttctagtggccaccatattgggcagcagatacagaacatttccatcatcacagaaagttctatctgacaccgctgttctagatacttagggaatttgacttttatttgtctttccaggaagagagacatcatgcagaatattgtacagattttggaatcggtacagttgaaatgggaactttttcagagctggacagacttttcaaggctccatctttctaataaactggccatttttggaattggttataacacccgttggaaagaggatatccgttaccattatgctgagatcagctcccaggtgccccttggcaagcgacttcgggagtacttcaactctgagaagcctgaaggacggatcattatgacccgagtgcagaaaatgaactggaaaaatgtttactacaaatttttagagatcactattagcgaagctaggtgcttggagctgcacatggaaattgactggatacccattgcccactccaaaccaactggtgggaatgttgttcaatatttattgcctgggggtattcctaaaagcccaggcctttatgccattggctatgaagaatgtattgagaggcccctctcaccacacatggagcaaagttccctggacccaggaaaagagggccgggttgacctggaaaccctttcagcacaagcctcattacaggtggaaatagaacccacccgaattatctattgctacctcgggattgctgaggtcaggactctacagcagtgcttatttttacatttccaagcgaataccaaaaccttcagcaaagattgggttggtattaacgggtttttgtctcagaactgtattgtggatcccggagtttcccccaaatccatctacatcaaatttgtagaagtagagagggattttctttccgcaggctctttagttgagtgcctggaaaaagccattggataccccttaaaatttaacaactgaatgtcatccttcataaggatttgggctcttagctccttcttctctactcacttcccattacccggaccacccctcatccagatgccgccgtcagactcttcatggaaaccctttcttcaattgggccagtacgacttctaaggaatcatagtagacttgggccagaaaaaacagacctcacctgaaaatgctcattttgagcaagcaagatatatagcgaacttgcatggtgggtcagctatttcttttttaaaaacagaaaaacaatttttaaatggattttagagccctaatataaacaaatgtaggtacattccatattggacaaaacttatactttgagtttcatatgaaattgaaaaattgtatttttttcacaatgtttcatttttacacatctctatgtctctatataagtaatatttacaaccctgaataaataagcaatagataatggcaagttaaatcttgattcacagttaaaaagactttttcaatatcacccttagctactattgtatataatttagattttcatttttttcaccagccaagtgttttgctatttccaatcagtattgcttgcaaagacctttgtttctgtgatgtaccaactttacagttgtgttgccatttaaacctttttttaaaaaaaaaaaattaaagtaattcctggccccttggcgtactagttgagctttttgtagcagagtgtggctgcactggcagtgggggctgcgctctgacttgactgctaagaatgaagagaacaaacagagcagggtatcttcacatcctttcattctctatacctcactgaccaatgtcattatttactgtcagagtaccaaaggtcactgaacatctcattttgtaattctttgaaaaatgactaaaaatgactaggataatccttttgaccctaagtacatcaatttgtaagagactcattcctcatcttttacactcagtactcaggggcagctctcaaggagtacaactggaaaactgatgtaatcttgctatctctcaaaaggaaggaagatccagtagaaattttttttttttttttttttttaagacagggtcttgctctgtcacccaggctggagtgcagtagtacaatcatagctcactgcagtctcgaactcctgggctcaagtaatcctcctgcctcaaagcttcctgagcagctgaaactacaggctcaagtgccaccacgccagcaatgtttttcacttttttttttctttttttggtaga

SEQ ID NO: 67883 - DNA, 1030 bp, Homo sapiens
acaagatctgggtaggccatttattttccagtgcaagagtttatttaaaatggttctttgcagggtctgactatagcattagtgccatgacaatgctgaaaaaaataacgtgatttgggcatgggatttctttttctctgtaggtataggtgggattagctgaacctggctaatcccctagtctgctcatttattcaacacacgtttctcaagtgcctactatatgtcaggcattgggatacttcattgagcataatagacaaaaatctctgctctccatcccaactccttagcatagtcctctgtaagatcaataaaacatttcaaaggagggcagggaaagatggtagctatgaaagataattttcctttaaagcatcgacctatgcagaaatatggtctatgtcttagcctcataagcaccacaatcagacatcataaaattgaccaagtgcttttgtctcctctgagaagaggaataattccctgagaaggtagtgatttcatctagatagccactctcatacttgaaagctttcaagacaaactaaaggatagagggtaaattcagggcagtcttagctccaagaagcagctgataacaaaatattaattctctgccatcttgcaaagaaagtcaaggagagcgagaggacagactgagaatggccacgtgaagcctcgccagaatgttcccaaagctcctcccctagaaggtatgagaacgtagcaggaaaagtctcaaggatcaagctccttccagagcccgttttcaagaagctgttagcacgcacaccccctttcttgcctgtgtatgattgtatgtaagtgtggtagttgagtgtttttataggttaaacccgtaattgatgtggagggtagtagtttgttgccaagttaatatttaacgaaccaatcttccagtatcaaagttttgctgtacttgagaagcaaactttatatagcttcatatatatacaaattacatgatttaagcagcccgtgaaataaaaattccagcattttctgt

SEQ ID NO: 67884 - DNA, 1032 bp, Homo sapiens
gggaaagtaaggaacgccattcattttttttacctgttaaccttggagcattgatagcacccacttattcttgagtgcttcatcccacacatgtgatcttgatgtctgagagatggtagagaagaggcaaaaagggctgtgataggtaacaggcagcacaacaagaaaacattagttgttttttgttttgtttgtttgtttgagacagagtcttactccatcacccaggctggagcgcagtggtgcaatcttggctcactgtgagcacctgtaattccagcccgagtaggtgggactacaggcgcgtcaccatgcctggctaattttcgtatttttagtagagatggggttttgccgtgttggccaggttgatctcgaactcctgacctcaagtaatccacctgtctaggcctcccaaagtgttgggattacaggcgtgagccacagtgtccggccacattagttgtttttattcagcaagacaccactaccacctcccctttgtaaatgctcatttctttttcagagtctctctttggaatcaaagaattcccattgtcatctgattccatgtctggaaagagggtgagagttcagggatgaggagtttttcccccaaattgtagccattatttcattcctcaaaaaagaagctaatcgcccacatcagtaagtttaaggccatttcttattgggaagtagttgtcttttaggagtgtgacatcaaagtgtaccaaaggaagggaaactgattaatgttgtaaaaagtaagttgggcgtggtgactcatgctcacgcctttaatcccagcactttgggaggccaaggtgggtggatcgcttgaggtcaggagtttgagagcagcctgtccaacatggtgaaaccctgtctctactaaaaatacaaaaattaggctgggtgcagtggctcatgccggtaattgcagcactttgggatgccagtgcaggcagatcacgaggtcaggagttcaagcccagcctggccaacatagtgaaaccctgtctctactaa

SEQ ID NO: 67885 - DNA, 7030 bp, Homo sapiens
gattacaggcatgagccaccgcacccggcccttgtatgcttttactgatagaaattatttccttcaagaaacgggaatttggctaatttacctcttaaaggaaattaatgctgctttatctaaatgaacagaatagtgagtgaactgataattgtacttaaagtaattgttccaatctttagaatctcctataaaatctaagatacaagtttaccttattttagggtttcaaactaatgtatgttatattttatggaggaaagaactacataatgcagagcagaattttttaacgacgttcttgtatgggttctttagtgagtccaggtacccccttgaaatcgtatgggacaggttgtgtatgtgtgcatttttctgaggagtggatccatgactcaaaaaggttaagaacttctgccctggaaaggaaaagcaaaagattgaagaataaaaacattttgtatttgccaaaacttgttctgtagcagtaagtgtgaaacaagtttgctacatttttctttttggttttacttggttggggcttttttgtttggttggttttaaaggatttaggggattggcaagtcagtttgtcagatgtcaatgaacagaaaacctaagaaaaaaggtagcaaaagttctgctggccccagatggattttgccttaagtaatttcctaatcattagttacagctctgtgtcaaaagatgtacatagaaatttatgctagattcttaacatctttcttactgtgtgcagaaatgtttttttatttatgtatgctacataagatattgtctttcctacttttatgctcacagtaacaaaatatagctcaagaaattaatgtttttcttaaagatattaaatggtgtttcgttgcctcaattaactaagagcaactagttttaacagttacaatagtaactttaaaggtataagaaagatctattttgcaaagatcttgcttcaaaatacaaatctgctttagtctgaggtatcatttttaacaattttataagaaaattagtcactggaaatttactcccaatgtaatttcttcatctctcgtggagcacaatatgtgatttttaaggccttgtttgtgaataagtgtgctctttaatcatttgggtaaaaggaatctcaaatttatcatgtgtacttggcagtggattaagataactatgtaatccatttccagtgtggccagcttgacagctacatttgaaaatctgtttcactgcttgttttttcttgtaacattgtttcctgctattataactaagctgtcctccttgcagattgactttatttttcatctgacatcttagactgatcaagccaatgttttctaaacaatacatttatatagctgttatgccttatttctgttcctccacgttatagtgctccattccatgtatggtcagttagctagaacagtgtttttgtcctggtgaatattttatgattgtatgaaatggggcaaactttgagaaaattattaagccaatactggaattggttggcatatgcctttatgatttatttagtttgttttctactttgccctaccagggaagaatttaattcttcccatttcctgaaagtcaaaggattggaggacactaaagcaaaataaaccttaatttcaccccaaaagtagcttaggtaatgtcaggaagggctttgatgaaaccactgtccctgcttatagatcttattttccaagcctttcaatattttatttgcccttttctgaactctacaatttccctctcttgtagctggttcgatgcccagaactgaatgctgtgctccagctgtggcctcaccggtgctgaatagagaggaagagccaccttcatagcttacatgtgattcctctgcttatacaacccaatactggatttacttactttggcaagatagctgcattgtgcactgtatttaatgttacgtgtactgtaaccctgggtctttctctacattgctgccgttaaacccccaatcctgccaatctaaaactcctgcctttgtttaccttccccctcccccatagactccccatacattcatccacaatgaatgtcatctttttattctctcatttccttttactctaatcttaaactttggcaaaactttcactctgtcctataaattgtcagttgtcagccatcttatttttctccctgctttggtaatgggacatctttgaagtcttttctctggctcttttcccttcatagtcatgaagcacttggcatggtggatttagtaagcattctcttgccattgcttccaaatcaaataccatgaactcctctgggttgaccaccgatcaagttgttacctatgctttagttcttcagtccaggttttcctgactcctcctgacctctatccctacagcttctttcaggatacagtattctctcacaactcttcctccagggggagacaacagcatcatgtcaatttaccggggagatttccaacagtcaggaaaattacaatctctaattgtgaatagaatagtttttaataattttaagcacatttctgcccctgccccagaccttaatttttagaaactattaagcttaagttactacaaatttctaggatgagtaaaataaaggaagaagaaagggaagcaagatttttgtgttgaataggacatggttctccaagaaagccaaattgaggttcttgttgggtttgagagctgtctgaaatgggaattgaggcttcgtttttctgagcattattgtaatctcagctctagagtaggtttttaagtgggtttatttaggactgggacacgcacagtcttaattccatgctttggctaatttagagtgtggaaagtgtaacctcttttgctttattgtgggtgataattggaaggtctccatagttcctttttatccatctctaaactccctcaagtttaactcaatcccagtgcttcttacagtaccagtcaagccgaagtttcagttcttactctttttttttcttagttgatgtgatttaaatagcctctccttggatctgtggtctttactgaacccagaagttacctcttaagtgcatttatatcttgagagagttaaaatcagttgggaaatcttttttaacatgatttcaatacatcaaattcctatcatggatttaaaagttaccaaacatctttccttcaggcccctgatagatattttacatactagcatagtgcagtattcaagtgtattacaaaagtacactacaaagtaagaagtagcaagatctgttagtgtcttttgataaattgtaaaatgtgtcacctgacttttcttccatatctgtaaccattagatactgctagtttccttattcacaattacataagccaagtgaagtattaagctcaatttggtggttccaaagagagtaagagtctttgctgtggtttcctaccatgtctatcgccagagattggtggctttgcttatgcttgtgtcacttcctgatatgtgtggcacctttcttgaaaggaatgttagttttattccctgacttccgaaataaccgtcagcaacagagccaactgggcccttgtgtgtgctgaatgcttttctccagggagtcagtaagtagtgagcagtggcatggtttccttctccatttatggccttggaagggtgaaagggacatggttgggactctccatttacggtccttggaggagttgaaaagagtggttggggtgttcttggaggcagaaactagacattgtgagataaaaataaattggcaagggatgtttggaattcaaattccaatccctgcaaggagggcagagggcgctgggaaagggggagtgtgtagaaagtcaaatgagctctgccgcaggcatttgtctccttccattggaaggtttgcccatgacacacatttgccaagttcatatttctggtttgttctagaaagttttgtcttatgtaattgtgactatcttttacaaagaggaagaagaaacacttttaaaaagagtgtatcgttggaaacctcagttctctaaggcatcatttgaggctccagaagagatctcaagaaagggagaatgaggcagatgcttgtgcagggggtaggccggctggctttagggtgggagactcttaattgttgctctgtttttgtgtgaggaagatcatcacacatgtcgtgcttttattattccttttacccatctagatttctggcttcaagggacaaatttttaaagtatctgatagagtgtcttgtagattgtcaactgtgatttaaagatactgaacttcctggctgggtgtggtggctcacgcctgtaatcccagcactttgggaggccaaggcgggcggatcacctgaggtcgggagttcaagaccagcctgaccaacgtggagaaaccccgtctctactaaaattacaaaattagccgggcagggtggcgcatgcctgtaatcccagctacttgggaggctgaggcaggagaatcacttgaacccagaaggcgaggttgcagtgagccgagatggcgccattgcactccaggctgggcaacaagagcgaagtgctgtctcaaaaaatatataaataaagagactgaacttccttggaggctttgtagatattattaagagttgttttagtttggtgaaaatagttaacatattggcttatggagagcaatctcacgtttaggataaatttagtctggcagtgcctacaaattaagtctgaggtgaactacttttgaacagttgagttagaaagtatttggtagccaccagggaaaagagatcttatttcaagaaaataattagtgaaactcagtaaagtagaagggagattagaaggaacaaagggaggcagagatgggatagagactggttgcaacttaactaaatttggaagctgggattaagcccttgatttatcttttgaaatgccatataagatagcataagatgtaccattaaattcaggaaactgggctaataatcagaaatatgtgttagaaataaagaccatggtaaaaatggaagggttgtacaagagaataaaattattcaggttttgtctgtggatttgcataatgatatttatttgctgtgtgccacatggcagaaaaggaagtgaaataacacccctctgtcccgtccttttccccagaaagaaatcactggcttcatttgttggtttgtttagctggcagcttgagttggtagaacagacgagtagattgtctagctttagacgtaggtattagtgtactgtttcttgatcattgatgtttgagacctggaatttgtagcattattgatttgacctctgttttaaattttagcggcttccacaaagactgagttagtaaggaatacaactatgtaagtaatatgttttactagctaatttgtctaggcaattatttttaccctgtattcattccttcttaatcaagagtaaggcaggtattctttgctttgggaaattcttctttctgtcctcccttccctcactttttccaaattctgggcacaacagcagctctctctcttctgtggcaggtgtgcatcctattggctggctggtatttcttgttttttttcccccttattctttttaaatgggggtgggggtataaaaatatgtgtatggggtacatgcaataatgttgtaatgtttcttgttgtttaatggataattaattgcaaaataattgttttaattataacatgtttgagtaaatgctaaattagtatttttttctaatataataatgaatttgaaatctagcattcctgtaacaatgtgtctatgtttgtctgtctgtgtctgtctaatagtaattaatatctgtggtccgtacctggaagaggaagtacagctttaaaggaataacaaaagactttgtgtcttagacccttcgcaggtgttacagtcgggtgaaagaacatggtgttgggaaaagaaagagcagttacacatttgaacagttggaacaggtgtttggtcagggaggatgggatgctcagccctgccagcctgtacttattaacagtagtggcttgtaccaggagctggagtcagatggcagcactatggaggactattcacaggaggactggggaaaccacagtcaggatctccatggctatccaacagatcaggaattgggtaagaaagccaacatatatgatacttatgtttgtgtatatttatatacctttatgtatgtgcaccagtacttattacctgtaaatatctttggtactgttccctatagtggtcagcataaggcataaagggcatctctgccttgtatgtctttcatgaatttgcatgtcccagtctatttggggcaatgtgggcatccttggtttagccttaaactgccaactggtgcttggtgttgttcatttggcaagttgtttaccagcaggattcccaaagacacagaagaatttctaattctgagctatacaagtacactcagtgacaggtaacatcctatgcaattctaaatatcctgtaccttctagttctaagatgactgctaagatatcttggcccaactgctgtagatgttgttcttaggaattccttcttttatcccaaatacatttttcttttctgtttatgatttggaaaaggtcttctctcagacttgagcctgaacacaaaatgaggggaagcctccatttatcttgaatagagctgttatttgaactgtgtgatcatgttccttcacacttcttaagggatcgcatcccaacagtagctggaattatttatacagtcataggcattaaaaatggaaaataaaattcctggtcatcaaatctaaacttgtagggcctaactaagagtatatatgtagttgtgggattgttctgtttctttgcgcattacatgctccaatttttattttcataatttgatttcataatttggaggtactgatcaatcagccattgtacattaacaggaggtta

SEQ ID NO: 67886 - DNA, 1043 bp, Homo sapiens
ccaagcagtgtttctctggaacccatgctcttcttaaccacttgcttatatcacctttttctgaatcagcccatctttattaaattttgacaattgaagtcatgtttttggcaacgacgtgattatcaacattcataaatacgataccaaaatcatatagtaacacccagatggacagcattatgctgatatttcttgtcattgaaatgaaaagaattttttaaattcttggagataatttatcgtttcctaagattagaaacacaaggagatttggaagtcctgaggaagaatttaagataagtattgaaacctaataagtaaagacttaattgtattcattcagtcattcattcaagatctcagataaatgatggcatttattggatcaccaactcctccaaaaagaagtaagtttgaattataggagcagaaacacaatgtagaattactttttgacagtaaaagcaggtaaggatgtggcttatcaaaggaggctatggaatgttcactaccttatgcctgccattgtttacctaatgtgtaaatggtttgggtgcttcttagagatagatgatggggatgagatgaactgttttttaatatatgatataccaaacaaaacatatcagcatattgagaaagctaaaagtagaatcaggaaataagaaaacagagaatgccagcttggcgtggtggtgcactcctatagtcccagctactcgggaggctcaggcaggaggatcacttgagcccaggagtttgaggctgttgtgcataatgcttgcccctatgaatagtcactgcactccagcctgggcaacacagaccccatactaaaaaaaaaaaaaaaaaaaaaagaagaaatgatgcagggcaaatagcagtaacctaggtaaatatgtttacttaaactaaatattaaaatgagctatgagcttcctggcaatggtagcaaaaaagtaaatacagtgacttgccataattttcagtgtcttctgaagagaagtataccaggtcttagttttgaaaccaaagatgaa

SEQ ID NO: 67887 - DNA, 7672 bp, Homo sapiens
gaccaccttcctgaatcaccttaaagcatgtcacttaccttctttggactgtgccttggtcctcttatctatacagtaaaaatactaaaattataagtattgaaattgaattaataatttaactcttggattttgagactaacatcctactttttaatactgtctaaatgaacatgtttctaagcacacaagattttaatttacagtcagatatgaaaatttgtttattgctgcaaagtttgattttgatgtctgtcatcttattggtatttgttctgtcgtttgggtaaaacggatgtgtttgacactgccttactacatagattgtttatcttgaagttttgttgcatttttgtttgtttgccagaagaaaatttgtctactaacaattccagcccaattttggagtcagatacacaaatctaggtagttttttatctagtgattgcatgatttttctcttttactgtaggccttttcatatctccagtcaccaaatacttaagtgcttactatgtggagggctgtctgctaggtgttaggatgaataaaagaactgtagttttaaaaataaaaataaaaataaaagtataatatacactcctgtagtccaagagcataaaatccaattgaagcttgtgtacatacatcaatgagttaaaaagctggtcaagacaacacaagggatggaatgcaaggcggtacttgatttagtgttatttgcctaaagcagactataagtgtgatgacttcaaaggagtgaccagtctcatcgctggccatactgtagtagttgaaagacctatctagacttggaattcatgaaagcattcactctgagccagatgctgcattcacacttcagtcagttaatctgatgcactgcaaaactcattctcaagtcccatatttttgggtgttctccaaaaatttgcctcttgagagttggctttatgtctttgaaacagatgtgtacttctagctgtgcctcaagatgaaatgcaaggtgattgaatgtgacctaaaagacttgccttttctgaatcagtgctggtcgctcatcagacaaatttaaaaatggtaaaagaggccgggcatggtggttcatgcctgtaatcgcaatactttgggaggctgaggcgggcatatcacgtgagctcaggagttggagaccagcgtggacaacgtggtgacacctgtctctaccaaaaatacaaaaaattagccgggcgtggtggcacacacttgtagttacagctcctcaggaggctgaagcgggaggatcgcttgaggttgggaggtggagtttgcagtgagctgagattgagccactgaacttcagcttgggtgacagagtgagaccctgtctcaaaataaataaataataaataaaagataaaagagtcttctgcccagagaacaaaatgattaattttctggggacattgcttagatttattcatcagtaattgtcatcatctttggaacaaattttgtactctaacaggaaaatcaccatatagtatatttggtctttcattttagctctgaagccttgcaattatttataagaaccaacagggcaaagataactaacttggagcaaaaagctctcattgtccctgataagcattttaatagactctgcccatctctgaggacttctctttggcgtttgcagacaagacatttcttctatcttctcattgaaagatttctaagaaatatgataagctactcaaataggtttagatttatttcctgttattttttatatatttagtctctgttgttaccatcccaatgttacctgaaatcttgtgccttccagtttgcttatctgcttatgaatttgacagatgcttgatgtgtatcctctaagaatagaccatctttgactaccaatcatacacttatatttaagatttcagttttagaaggaaaggagctaagaagcacatgttaaaactgaatgagtagaattctgggtttattttctggcattttggaaatacagtgaagggtggagttaaatattctggttacttcattaagaggacatgttaaaggaaaaaataatttagaaagcatgtagtacaaatagtactgttccataaaattttgtgatgatggaaatattctctatctacctcagttcagtatgatagccactggtcacatgtgtctgttcagcccttaaaatgtgtggcattgtgcctgagaaacagaaattttaaattatatttaattaattcagttttaagttataaataggcatatgtgagtagtggctaccatattgaacagtttcaggtaaaaagttgttattcacagtattaaattcatctttgtaaaaggattctcctggccacacactcaaacctctagggggagctcaaagttccttcttgacctttctgtcactttacccctgtgtaggaggaatcttgataaaagtaaaaaaaaaaaatggcctgccattccaggaggtggtgccaggaataaaagtcttataacttcaactcactggggcaaacagtgcatattctaggttccctaggacagccctgtccaatagaatttattgtgatgatggaagtgttctgaatttgcactgtccagtacggcattactagccacaggtggctcttgaggacctgaaatgtggctagcgtgactgcaaaattgaatttttaattttatctaatttacatttaaatagtcacctgtggctagtgactgttttgttggccagaacagcttttgaataatgggtgttcagactttttgcttgtgtactcccaaaaggctttgaaacccatgtatcctctggaagatttttaagctgacattaaaatttttcatgatgtgtttggaaatttatacgaggttagcaggacatagaaaatgttaagtctggtatgagatgaatatgatgagagttggcgataaaatgtactgaataacaaactgaatctgaaaaatacacattaaatcattatttgtgagttttatcaactgtctcttgaaatttttgctgtttaggaaatattcaagttacatttaaaagaaacagtatcactggcctatattgtttttgttattctaaattcaggggccaggattgataacttaaacaatataaataagagggggaatgacaggaatccctaaggtttcaagttgcctccatcaattattaaaggagactaccccagttaaagactgctgctttagaactcagtatctttttgatatctttcttggctgatgtagtggtgctgggctcctgaattcccttgccattagaaagccagagggaaacagggaaaggttacaggggaaaagtgtggagcttaacttttggctaaagttcaggtatctggagggggggaggggatttagatattttgctcattccctgtcatcagattcaactgacagattcatcacaagatttctttaaatgctaaggtctgaaataaggtctttatttttttcattattcatcaacagatagtgcctactgcagtaggtctgagagttacggtagtataccatcaccttcaagatgtccatcttgtaataaaggagtcagattactaaggaaccaattacaatattgtgaacaaggtcttgtgtgtcatgttaatgttatgcttatggtgctacaggagcacacacatcctaggctttcaaaaggtggatcctgaagggtgaaggtggactcaaaggtagatgaatagttagtgtaaaagctcagaggcagcataacctagaatagtgccaactgcaaatataatgagatatacttaccaaagaatgcaaaactggaagcatccaaacagtgttcagctgtttaaaaagtcatgctttttaattgaagaataatttgccagtagtgcatggcatgtggtgaaagagtgatgtgggagccgtaaatgatgccttagtggtgtcataatcacgtagaatggtggagccagtagttttgggatgacattatagtgaacataccaattccaggtcatttatatgttgtgatgagtaacaacttttttatggtgttgaattgcagttgcgcaaatatccattacatatctcatttcttaatttgtatactggaaagtaaaaccaaaacagtgcatctttttttgaccacaactcacaggaagaagaaatatattttaccctgggacctagtagtttcatgacatatatgtataactgaaacagatttcacaaaacagtgattatagccaacacatagtattttctatgtgccatgcactattctaagtgctttgtaaatattaacttaatccacataatgacactatactgaactacatgtaatatactctgatatgttctgttctaattgaaggcagacactccagctgtagagcctctttcataacagtatacacagtgaatgcacctaacacaatacctgcccctggcgggggatctttctctgccccacatcctcctcctccccagtgcttgtcagcattggctccccttttcaccccagtctctgtggtacctctcatctttccccttccccagccacagccttgcctgtctccagaaatgccctcaccaaatgctggtgcaaagaaagtctggaaggatggaagctgccgatcccactgatattgggcagcgggcttactcctcggagactggcagctcagggtcacattggtgacccttctgtctgcacccttctgtcgtttcatttatcccttctccaactcttgccctcagccatttaggagagtgactcgcctgacctcccagtgcaggtggggaggggtccggaagtctgtgcttctcactcaccctgtacactgagttctaaggttttgatgatgtagcccgtaatgatgccttgtttgtcttgcacattcacggagcagctgtaggggccagagtctctctcctggagaccctccagccacagggacagttctaggagggcatggagtagaccaaggatactccaggtttgcttgttgtgaccccattgatggtcaatgatggcattctccaaatgtccctcacatgcacccattcttccaacctgaaaccagctcccattcaccttttgtccctagccccctttcactgtccctgggtcctcttcaccagaatagttcacttcttggtcccttacacgttatctcttcatctcctacttgtgtttagaaaggtggtcacaacttgctaaaattaattgtacaacccactaatgggccataacctacagttaaataaaagaggactagaagataatacagtgagatcaagattttttcattcattgtgttcttttagactgaacctattgaaactccagaaacattaatttgcaacatctgtcccagatattctggtgaaattatattacatagttttagatagcttgagcctaagctttgagataaagggtgaagcaggggagtgggaagtagtaagaaatgagactggagacttaaacaagaggtcaggtgatacgctaaggcgtttggactttattctaatcatcaaaggattttaagccaggcaatgacatggttagtcttaaattttaaaacagtccctggctgtaatatggagaatcaaaagagtaagactggaagcacaaagattatttagaggcttcttgcagtaagctagatggaaagtgaaataaagcagtggtaacgaagatggagacacaagaataaatttcatatacatcaaaaccgaggacctgtttcgaagaatctgggaattttaatttccagaatttgttagatcctaacctgtgagacaactcactatctacttctctaccagcttacacagagggttcttgactgcagtcaaagaccataacagtatttcatagctgaagttttcaggcttgatttctaagaacccaaggaaaaccaactgaaataccaaatgaagacagtcctgtctgtatttcctctaccatatactctctgcagactcttcagttctgcttcccagtcttcagaagtgattatcctgctttcccccccgactttttcacaatattaccagagagtaagaactaaaattcagatccagtatttcaaatgttaagtgtcatgtagctagatacctagatttgtgctcctagtgttacgttaacgtagaaccagcagttgttttctatggaaaattgtatctgtgtaatgttaaaacaaacgaaataaaatagaaggaaaaactttctgagtttcaaaaacaacagactagtactctaaagaactctttaaaacaattaactgttaggattgcagttatgattggatattatttaattctgtttctgatgtggggttcctccactgtgttctgtgtgctattaatatttaccattgcagaagcttcattcagtgttgaaaatgaatgcttagtggatctgtgcctcttatgcatatgttacaaattatctggagttcctaatcaatgcagagttcccctcccctccgattgttctaaataattgaaagatgtctgctgtggaaaaaggcatgtatttaaatctgtatgattctcaaccatctttagttgggaaaggtccttgaaagccaatggaaatactttttttttttcttggcactaatcaagtgagtgttaccttttcacttagtaggatgtgttgttacgctagtaaaatagaaacctgtgtttattctcaggtattttagaaacaacagccatcattttattttatgtgtgtgttcttggctgtattcataaattatatattttgggctatcaaatattacttcattcaatataaataacaatagtagaagttgtttacttagatatgctttctagttgcattttctcagcctatgtaagactactttgttgtaatagcctttgaaatttacagtactgtctctctactatcttcagattacttgattcaaataaaccaattatgtttgtaattgatattaataaaaccagaataaaagttcatatctacccaaaactgcttttattatttttttaagttgcaaatacttttctctaaagggaaatagctggtttataatttagaaagaataggataggtcaaaaagcacttcaacctaatatttggtatctccactacctatacaccatcttaaggaattttccattcattcattcatcaaagatgtattgcaccccattaacatgttaggcattgatttgggctctgggaatacctcagtgaacaaaactgacaaaaccctgccttcaaagagcttacattttggtagaaaataatgtgatatttaaaatatataattaagcaattaacacaattagggaaaaagaccctcaaatatgatattcattgataaatccttgaagttgagctctttcattatgcttatgaaagaaattcatttgctattgttatattaagaatgatttacatgattttatatcattcctttgtcttgtgtatatccagttgtcattgaggtttgtactaccaagcagcaaagtgctacattcttactcatcaaccatcagttcatgagcatctgctgttgtgccaggcattatgtggagccctaaagagtcagttttaaggaaaaccaggagagatcccttctctgttatacagtttaggaaacatggttaa

SEQ ID NO: 67888 - DNA, 1073 bp, Homo sapiens
tttaaaacctactattgttcaaggaatttgccacccattaattactccattacaaatttaaattagtgtatttgataacatttatctttgggacttcttaagctttctctttttttaacaaagacattaaagtagtagctaataggacaaagctactcttctctgaatctcatttgttctattcaacgtcattaaggttaaattttaatttttatttatttatatttagagagaggatctccctctcttgcccaacctgaagaactcctgggctcaaacaatcctccccagtagctaggactgcaggcatgccccaccacacctggctcattaaattttttttttttttttttttttttttaagagacagggtcttctacgttgctcaggctggttttagctccctggtctcaagctgtcctgcctcagtctcccaaagcactaggattacaggcgtgagccaccgtgcccagccaaggttaaatttttgggagactttttgtactgtcttggctagcgtctatccatgacctcttcttgagtttagaagtgcattttaggcattttaaactgtttcagcttgattgatttctgtctgtagaaacttcccaatcacgcagaaaaagtgtgttgtcaaaacctcactgaatataaatctctccataaaattgtttctcaaccagggagtatctaattgggttgtttcattgtccagttatgagaaggataacttaaagcaagaaaaggagatttatttgaataatttttagaagaggattggtttacctgtgtccagacaggtaaaaccaagttgacctcaagctcttagggtattttgggaatgtgctgatgagtatgggttctctgatccatagtagctgttaacaaggagggcagataactgttttgtgttttaaagtgctctactctttatgtgatttcaatcaaagaacccagactttttcattagtaatgttgagtgttcctgccagaatgataagctctctaaggacaggttctggtctctcttactcactgctgtactagcatatagtagacactacatttttttt

SEQ ID NO: 67889 - DNA, 1167 bp, Homo sapiens
tctcgggctggggctggggggccgcagcgccgcctcgtcctcggtctccttctcccctggtggcggcggtggcggggctgcggcagccgccgccgccgcctgccggggcatgtcgtggacgccagccgagacgaacgcgctcatcgcagtgtggggcaacgagcggctggtggaggcgcggtaccagcagctggagggagccggcacggtgttcggcagcaaggcccccgggccagccatgtacgagcgcgtgtcccgggccctggccgagctgggctacgagcggaccccgtcccagtgccgggagcgcatcaaggtaaccggccgcccggcctggggcagcgaaccagaggcagagagaaggcggggaagcgggcctcgggggcgggggccggtctgagggcagggctctcctccggggcccggtgggcgattcgcatctcctccgcctttttcttctctccctgggaagggggctttttcccagatggccgccagcccgtaggtttcctgagtttgaagttgggcgtgcctgccgccgcccctctttcttgccaattgagatgttcctgcgctctgaagttggtagtttctcattgtgcgccgtgcggcagtccccgtgccgctggcgcctcttgcccccaccgccggggcccctcgctttgttccaggcggaggggctcccaggcagaggcttaccggccggggcaggattgaggaagggcagaaggggggggcattgagcccctagtttaggaatagttaataagtggccgtagcggagccatagaaaaagcgccttgggacgactggcctttgtgtcagtcgctttgcttctatcttgagctacgaaggacgagtaagactagagatgctttggagaattggaaaggcttgattgtagccagattgtgtattgttaccgcggagttagtgtacaccataaaagttagcttggccaagagttggtctggaatttggattgtcgatgcctccagagttagattggcttgaggccctgcggtttcttaggaagctccttcaggaaagccagtttttccctgcttcagtttctgtgccggatgtggtgacaagtagaactctcagtgtgcatctggccgtccttgtgtacctgcatgtttaaatgcagaggcttaatttgggcta

SEQ ID NO: 67890 - DNA, 1057 bp, Homo sapiens
gagacccagtctctttaattttttttttaattagccaggtatggcagcgcatggctatagtcccacttactcaggaggctgaggcaggaggatcacttgagcccagaaattccagtccgcaataagccatgatcgcaccattgcacttcagcctggtgacagagcaagaccccatcaaaagaaagaaagagggtgagaaagagagaagggggagtggagaggaagggatgaaaggaaggaaggaaaggaagaaaggaagggaggcagaaaagaaggaaaggaaaggaaaagaagagagagagaaagaaaaaggaagaaaggaagaaagaaaggaaagaaagagagagagagaaagaaagagagaaagaaagaaagaaagaaaaaggagaaatctcattgaaccaccaaatccaggatattgcagcataggactttcttttctgggaaaaagctgtgttttgagcaggattaaaagatgaccaagatcctttgcctttctctaattgttggtcaattgagttggatccttccagagacggacactgagacaagcttttgagtgcaagaagtttctctggggaagatcaccaataggaaaataaaggtctgagaagggaaagaagccaatacagggtaaattgtggatagctggggcttaattccttcagggaactctgggacagatggcttaggatgcacctcagagttttcctacctgaggggcaaggaagttgggatatgtatctaccaaccctctatccatcgtttgttaagatccacttctgggagcattaactgttgcaggcacggccttgccacagaaccctagaggccaatactgcagctttcctaacagagcttgcaagagactctgtgtggcctacatgcctgcaacaagcatctctagcaccatggaattaccaggcacatggcccaagcagaaaggccgcttaaactgcagctagaacctgctgcgaagtgtagtcttgctctgggcctccctcaaaatccgtagccttctgagtcacccaatacatgcgtgggagcagtattcaaa

SEQ ID NO: 67891 - DNA, 1135 bp, Homo sapiens
tccctctgagctctgcatcccatacagagcaggccatggagcgagccacccaagaacccagtgagcatggtccctggaccctggagcagctgagggctaccttgaagcggcctgaggtcattgccacctgcggtgttgcactctggctgctgcttctgggcaccgccgtgtgtatccaccgccggcgccgagctagggtgcacctgggcccaggtgagagtctgagggggacccacatgtatacaggcctcctcagcatccagccagaatggtgcaggggctttggatctctgaccaggtgatccagcctctggatttagctttcctcctgccttctcccaggtctgtacagatataccagtgaggatgccatcctaaaacacaggtgagaggtgaaaggggaggtctgaagtaagggagggtggcaagggacagtggagctgcaacagagaagaatggagtactagtctacctgccagggagtttgggactgtcgtacatgaatctctcctgtaactccaactgatagttcatttctctgtcattaatattcctatcacaccacttgacagactagtaaactgaaactcataaaaccttctaaacccccaatccaggactcttgtcaccccacctctcctgctgcctcacccgctaggtggagaataatcagcatgagacgaccacctcaaatgtctcatcttatgcgtgcacccatggtctaccaagtagtgcctttgcactcagtaattctctcactgagccattgtgcctacatcatagtccacccgcagctccagcagagggtgttcagtgcctacatcatagattcttcctcactgttctcaaaaacaggatctgcccatgggcccttctgcttccggtatattcggctgccagaacaagtctgcagttctgggacatcatgctgatagagaacacatccttcttgctcccgttgtctgagttttgtactaagtaaccgcctcatctctctgtctgccttcttggctctttatttcgctagatctcctctgggaggcttcccactccaggtctgcatctatccacagaagttactgagcacctactatgtgccagcaaatccaggcctagagctgccatttcactgtca

SEQ ID NO: 67892 - DNA, 1045 bp, Homo sapiens
catataatatatataatatataaatatatagatatataattttgtatttttttccatatcttgacccaaccattaaaaatgtttgtctcatatatgttggcaattggttgaatactaaactgtaatgtttttctctttaattacaactaagaaatttatagttaaatttaaaaaacaagtgggcgtggatatgtgtccatgtatggcaacacatcccacgtgcgtttatatggttgtctttttctagcattgccttgtggctcctcagagtttcttttgtacctaaattattttcagatgttggtttcttgacagttttcatacctatcgtggtttggtagtactatagtttgggccattagactgactccagggtactgttagatgaggtgattagacactttctactaaatcagaaaaaaaaacacagttatcagatcttagagatggatatttatattgcttggaacatgctcagacctttcaactggtgtttttccagaaagtgtactattcacagttctgattgaaataattatccaatagacgggaggattaagtctgagataacatctttgtataaaccagttttttacgtcagaggtgccatttaagtgtaattcattattgttatggtgataatgatgaattcaggctacctacttgcttccaaagaaagcatatatgtttttcaggtaaaaatatgaaaaacaaatctactcaatacaattgggaatgatctaagaaattggtgaaatttttcttattacttgtatcaagctttccctcaaatctcaacaattttctaccttcttagttgtgtgaagtgggaatttgcaaatcagaaagaacaatctatgattgagttgaaccctggttttatttcattattagtctttagtgacattagaatctgtctggttgttattgatccggatttggagatacaagtggaacacatacttgcttgtactctggcaggttgccaagactaaaatcatgagtcttctgaaattgttactggctagaataggtgcaagttgtc

SEQ ID NO: 67893 - DNA, 2146 bp, Homo sapiens
aatgtaactgcttcaggaatttagtgttaaggttagtaataacgggcaaagaatataacgttcttttgttctgtgatgtatcacaccattctgacctattgaaactacctcagtcttcttgactgaagcttttaccattgccacaggaatgatgatcccgcttggataacttatgttcagtgtttatgttgtcttttagcacaggaactatgagtaggcctcacgtgatatgagagatgagagatggaggaaggagttacttccatagcgccatggatatattttacatgaaatccaagatccaggctctgccagagagcaggtagagcagggtgtattaaagagtaagcaacagaaagcaaattagagtttgagctgggcttgtcatagtttcgttaccaaaaaagatcatgatgatcacgttatctgtttttaagattagcaatagtgttattaatattattatgaataacagcttacattcattgaacacttaccacagccaaaatggttttagaattttatatgaagtatcttatttgattttcataataaccatagaagatagatactattattatccttggattatagatgaaattgaagattgcttcgcaggtagagttaagatccagaatggtgacaagaagtataatgtctgcttttatgccataatatatcagactattctgactcatttagattacttcagggctatcactgaagcttacagtattatcactactgtgatacccctgctcacacaatttggtaagtgtttttgtatcttttagaacttatacattaggcagcagctatctgtttggtcagctgaaagacggccacaggatttgcttctgggtggccattagcacctttcacccatgcaccagagagatacttccagcagacgacaggtagagcacatcacagggtatgagcagtggaatttggacaagattataggtacctactaaactgggagtggtcaggctgatcaagaagcacattcctgttttatttcatacagcgcaaaatgtatcctgatattattatcctaatcctaagattattttaggtctcccattgaaacctagggtattttggggagcatttattgtccatttgaaaaactatattttagatgtatttttataaaaggtatatttctgatggccattgtcttttacagtgtgagaggggaagaaatgagcagtttctgagggcaggggttatgaggatcttccaccccatggccagtactagatctccatcagtaagctggtagagcataaggcaggctcaccaagaaataaactaatcaggtttgggctggagcttgttaggtttctgttgcctaaggtttgggggcattgagttaagatctgtagtttttcaagaaaatgttacaacatcctggcctactaagatttttccgtggcttaactgaagtttagtttattatcactggaattttacccctctgtgcataatttttattttctgattttatgtttttaaaaatgaaggcttacggcaaccagcagtgttaggctgtgtgagagactgaagagaaattttctcttggcctctttaagagggcaaaattcaaaggaggcaaagaagcagaaaatagagtttgggctgcggttttcaggactgaactgcaactcttggtgatttttagtttgggtctgtaaggttggcctaagggtatgctgctgtgttttagtctacattgtcatttatacatcctgagccctgccaggctctttcctacctcaggtcttttgcatatgttgtttcctcttgtctgggtagtcttcccttttttcttcataaagtcggtcccttcttatccttcgggtttcagcttaaatgtcacctccttggaaaaggctatccttaccaccttatcaaaaatagatctccttttttctgtttttctctatccttgcattctgtttgttgccttttcagtacaaaacaatttgtagttaattattaatttgcttgttttcttattgtctggagatttcccactagcccataagcttcttgagagaggtaccatacctgttttgtttaccattgtatgaacagcacttggcacagtggctagtacctagtagtcacttggtagata

SEQ ID NO: 67894 - DNA, 1065 bp, Homo sapiens
ttagctgtaattgtgatctgatctgcatgaaaaggtcttttcagttctgtattgctcatatgtaagcattttacaggctagcaggtaaaagtcaaaatgagaatttcattcagttcatttgactgaaggcaacatacccctgctgtgggtgttttatgtctaacctaaatcttctcatgacatgcctaccacatggcatagtcagtgggaaacttctttagcaatactactgaccttctttgaaagcttttctgctaaaggctttttgttttattgccatttcctactggataatcttttccttcttgtgtttatactcttgacctcagaaaaaatatgaaggactgattgctttacagatggtatcagaagacttaatcttgtattgatagttggcaaataattaaaaattaattttgccttttacttactgaagaaactaaatcatttatgccttctttgcatggaagtcacatgatttaacttgaagacaaaaccaccttagcagcattctaaaataatcatacatctgttttataaacagtaattgataactactttacctcactcagttgttataagaataaaatgatatggtttcattcattgatttagcagctatttattgagcatctgttaattggtagagatgatgctagacatagggtatgcaagaaatgaaaaaacatgatccctgtcttcaaggatctagctagataagtttgactaaccagtggggaagcagataaatacggtcatgcaccacataaagatgttttggttagtgatggacagcacatacactgttggtcccataagattatagtggagctgaaaaattcctatcacctagtgatgtagcattgtaatgcattcctcatgtgtttgtggtgatgcttgtgtaaacctactgtgcttccagttgtgtaaaagtatagcacatacagttatgtacaatgcataatggctgatgacgataatgaacacctatgttactggtttatatatttactatactattctaaaagaaaagttaactgtaaaacagcctcagccaggtccttc

SEQ ID NO: 67895 - DNA, 1027 bp, Homo sapiens
tgggtaaagcatgactggaaatagatcattataataccgtatatttagtattacaagataatacagcacgtggttaagaacatggggagatatgtttccaagtcccagctctgctacctaccggctgtgtgactttgagagttacttctgtaatcctcagtttcctctatatacaataaggataataatgatatatacctcataaagttcctgcaaggattaaatgaggtaacgtgtaaatgtgcttagtacagaatcacaaatatagtatgtactcagtaaagattagctgctgcttatcatgagaaggaaaaaagtacaagaatatgtggtagcacagagactgttttaaagccaaagttggggatatggggtggcagaaggaaagggagaacttcctgaactgagttttgaaggatttgtggggatagtataagacaaagtgggaattggagaggggaaaggctggacaggaattccaggcaaaaggaatagcactgcaaaagcagtgcttcatgaaagaatgtgacacctctgaatttgatgtgattggagctaaaggaatagcaataggtgagccttaagaaataaggaaagacatgattgtaaagaccttagtatgtcatgagaaaaaaatttgacttcatgttgaaaacagggagctcagtggcatcatggggataagatgaaatgactgttaggaggttgttgaaataatatatagagagaagagaggtgaaattaattttttaaaagatcgttatatattaagtcctaactgtgtgtcaagcacttcgcatagattatctcctcttaatggataaagtagtcctgcaaggtagcagtagttagcattcactgagtgcttagaatgtgctaggcgtagtgttgagtgctttagagacactaagttatttacttgtttcaataaccttttaaggtagatttgattactcatttcattttacagatgagaaaatgagccctagaaaggttaggtaatttgcctaggattaagggtacattt

SEQ ID NO: 67896 - DNA, 1031 bp, Homo sapiens
ttcccttagcccttagctgactggtctagagaataattcgtatagagaattacaccagtaactaagcttttctgtcatcattgacttcgctctgtttaaattccatcattgaaaacttcaatttgattcattattcacaggaaaatcttttatcatttactttttttacaaggttgggagttaccgaacttaacaaatatgaatgtcttcaagacacttactttactggctctcattggaataagatctcaatatacgcagatccctagccaagagctcctgtgatcttaggctcgtcttttaacttttgtattttaatagttttctttcattctctaacttatttcacacatgatcttttaagagagcaagatgacatatattttaaagtcaagtgtgatgtgtgtatatgcctgttttggcctttttctatattaccttcctcacattcctagtgtactcctttatatgcctttaaatctttatcttcactagtataaaagcatctccctctgcccaagctgcaataatgtttttcacttctcccctattacaactttatgttgttttgagtttgaatcataccataaaaacgatgtttatgtcctgtactcaatttagatttacagttgtagctcaagaaagactggtaaatatgggagaatagttgtaagaaaatctttgtttaaagtggctttgtcactttgctagagatggccagtgagtagctgtcagaatctggacagacttggtttcacaaataccatctcttgtgtgtttttccaatgcctgatctttcagcctttgtaggatgtcttcctgatttttaacttatacctgtgttaatctaacaaaatggaaggctataattcccctggagtcaatagcctgccacaaatggatagaagcccagaattttcaccagcacatgctttattgaagaagtatgagtatgaactggcctcatactactgttcagaaaacaatagctcatttgtttcaaagtaatttttagcaattggcctcatcag

SEQ ID NO: 67897 - DNA, 3067 bp, Homo sapiens
ggttatgtgtttttaccacaattaaaaattttaaaaatagaaaataaaggaatcccccatacccattagtagccactccccattttctctcccaaaatgcacctccaaccataggcaatcactaattactttctgtcctatagattggcctgttgtggacttttcatgtaaatggaatatatcatatgtgattagattttttcatttaacatgttttcaaacatctatcttgtagcatgtatcagtacttcattgctttttattgctgaatagtactttattctatggatataccacattttatttatccatatatcagttgacagacatttgaattgtttctacctcttggctattatgaacactgctatgaccatttatttgcaagtttttctgtagacgtatgttttcatttcttttggatatatacctgggagtggaattactgggtcttctgtcagctctgtttaaccttttgagaaactgcaaactgttttcaaaagtggctgcaccattttacatttccaccaacagtgtataagggttcaaatttcttcacatgttcgccaacacttgtcattatctgtgtctttgcttatagccatcccagtgggtgtgaaatgatatttcatcgtatttttaatttccatttcctcatggctgtaatgttgagcatcttttcatatactttatctctttcggagaactggcttttcagatcctttgtttactttgtagttgggttatttgtctttttattattgagttataagtgttatcattgtattctacgtataggtttcttttttttttttttttttttttttgagacggagtctcgctctgtcgcccaggctggagtgcagtggcgggatctcggctcactgcaagctccgcctcccgggttcacgccattctcctgcctcagcctcccaagtagctgggactacaggcgcccgccactacgcccggctaattttttgtatttttagtagagacggggtttcaccattttagccgggatggtctcgatctcctgacctcgtgatccgcccgcctcggcctcccaaagtgctgggattacaggcgtgagccaccgcgcccggccaggtttcttaccatatatatgatttgcaaatattttgtgccattctggggattgtctttttactttctctatgattttctttgcagcacaaaagttttaaattttgacaaagtccattttatttactttttcttttgtggtttgtgcttctgttgtcttgtctaagaaaccattacctaattcagggccacaaatatttactcctaagtggtcctctaaaagtcgtatagttttagctcttatatttaggtctgtgatccattttgagtaagtttttcatacggtgttaggtagtgttccaacgtcattcttttgtatatggataacaaggatcccaacactgtttgttgaaaaagactattatttgccccataagattgacaatacacatgaacttctatttctgaactctcaattgtgttccattgatttatatgttttaccttatgccagtgcaatctgtcttgattactgtagctttgtagtaaattttgaagtttggaagtgtgaggcttccaactttgtgctttttcaagattgttttgctcttctgagtcggttgcatttttgtatgaattttaagatcaccttcctgcaaaaagctggctgagattctgataaggattgccttcaatctattgatgaatttggggactattgccatctaacttatgaacataggatgtctgcccattcatttagattttctttcatttccttcaacaatgttttatagttttcgaagcataacatttgcatttattttgttaggtttatttctaagtattttattctttgatgctcttataaattgaattgttttcttgcagattgtttatcacaggtataaagaaatacagttgacttttttgcatttattaatagttttttagagaaaaccttaggattttgtatatataagatcttgtcatctataaatagccttttatttcttttccttgcctaattgccctggctggaatatccagtacaatgtttcatagaaatggcaaagtggacatccttatcctgtttctgattttaagtgggaagcatttagtccttcaccactatataggatgttaactgtgggtgtcctttttcaagttgaggaagtttctctctattactagtttgttgagtgtttttgttatggaaaggtgttggattttgtcaaatgctgtgtctgcatttattattatcatgtattctttgtcctttttttctgttaatatgctgtgttacattgttttcaggtgttaaattactttgcattaccaggataagttgtattggtttttatttgtttctttctttctttggtcttataaaacaattttattttgctcgtttgattctactattttttttttggtttggtaatctgaaacaggtgaattgactgtttgacatcaaattagtagtagaattatgatgggattagatcttgcattggattaggagactttcaagtcttcttttagcctatgaatataaatttcatctgagaatgtgtgtgcttttacattataatttggttatatgtagacaatgtctaatgatttatgtttgtggagttagagaatgctgagtagcagctaccaacgaggaagactgagtctcatgaccctttgtgatagtagtatggtgaatcctgtttggattggatcagtgtactttggaaaagagcctggaatcttaagtgtttttttttgtttgtttgtttggttttttagtttacaagtttgtgaaatcagagttgtatagacatattccactgttgcgggaagtcagggaccccaaacggagggaccggctgaagccatggcagaagaacacggattgtgaagatttcatggacatttattagttccccaaattaatacttttataatttcttatgcctgtctttactgcaatctctaaacataaattgtaaagatttcatggacacttatc

SEQ ID NO: 67898 - DNA, 1774 bp, Homo sapiens
aaacagggtaaatggcaggcatttcaattgaaaaatgattaagtaagaatgaacatttcctcgatgactgtttacatcttactcaaactttcctcaaacttcctataggtttttccttactttcactaccagttggtggcagtacttcctgtgccactgaaaaaataagcaatcaaaaggaaacttcacaagtttccaccatcatacctacccatctacttgcatctgttaattcctgttaatgtggatgaactgtttgttctcctatcttaggcctaccctgacatgtggctagatccaattccttcccacctactcaaggacatttcttcagcatttcttccccttcttttctgcatcatcagtttttctcctgtatacaagagtattgctatcagtttataaacatgttgtaattttgcccatcttaaaaaccaaccaactagaaaaaaaagaagagaggaggaaaaaaacacctctatcccacatcttccttcagctgccactgaacttctctgcttccctttataacaaaaatccttgagttgtacatatttgctgctcctattcctctcctcacattctctcagatgcattttagtgagactgtttgcctttacctctctaataaaagtactcttattaaagtcacccaaaacttccacattgctaaatctaatggtcattctcagactccatcttactgtcttacttacttgcttactgtcttaccgacttatctgtcaacagaattaaacaattgatcaatctttttttttttctgaagtaccttattacctggttcccccaacactagagctttttatttttcttccaactacaactggctattgcttcttaggttttgttattgttgttgttgttgttttttgctgtttctcccccatcttcaatcccttaatattggagtatcctggggctcagtccttggacttcttttctgccttgcttttcgcttgctcttttggtgatctcttcttatctcatggttttaaatatcatctaaatactgatagctctcaaatttatatatctggtccacagctgtctctaaccttcagactcatctaaccctgactgcctacttgacatttagtttttcacagatttgctcctcccacagtcttcctcatatcagttaatagcagttgcatctttctagttattgaggccaaaaatctcatggaaatcattgactcccacctccgctgctcatctttcatcactcactccatcagcaaatcatttcagttctaccttcataatagatctgcagttctcatgactccctttgccatatgcctgacccacccaccgttctctctctcatggattattgtaagagtttcgcaagtaatcttcctgtttgcaccttatgtattttctcagtacagctaccatacttaatattaatgtatcccaaaaccaaccttctgatctctatcattgcacactcaccaataaaactaaccaacacaaaaatgttttccttactatagtcttccccttctcagtaaacaacaactccatccgctgtttcttctgtccaaaaaaaagtgtgaagtcaaccttcattcttttcttaaacaacccatattcaatccttattggatccaccttgaaagtatactcaaaacgcaattatttttcaatgccttccccactacaaccctggtccaagtcatcatatctcatctgagttcttgcaatagctcccaagttggttttcttgcttccatacttcctcctataa

SEQ ID NO: 67899 - DNA, 1089 bp, Homo sapiens
ttatgacagaccttggttgaaatcctttcaccactgtgagccttgactttgctgagccccagtttcctcatcaataaaagtcagatgggttcttgaggataaatgcgataatataaggaaacattcttgacgtcttgtggctgctggagggtactcaacaggtatccttttacttccttccagataagtttagatttggattcctatcaaacactaaatgtcacgtagttcttctgtaagtacattattatgctgagctctgaggcctgcaaagacaatcaagacagggttctaccttcttggaactaagaatcaagctggagaggggctgtgtacacacagtcagcaattttagaaggccctgctctacttattgagtgccaaaggatggcatttcctatgtgccatgtcattcagaggaccagcgaggggaatgcagaagtcggttggggagattttgaagaaaactgacttgctgagcacttaacacataaaaggttagagattatatgtatacattgcctggtatacaggaagcatggaatacatggcggcttttactatcattattaatgatggtgatgttattattacagatacatattaacccaattcacctttcttgtgctaaacaaaatacaggccagggtgcagacaaataaaaataaagacttatagtctgaaaatgagaaatcaaatctctgtcacatttaactgctttcacatgtccccaaggagggcatttaagaagtgaagaagacagaataggaagctgaaagtggactggccctgggccttggactcctcctctgtaaaatgaggataataataatacctgtatcacacgagtgttttgaggtttaaatgaggtactacgtgtaaggtacttaggtcagtgccaggctgatatgaaacactgagtaaacactaatgattgactatattctatttgtttttcctactactttgtgccaggcattgtttatttgtaatttttgtggaactgcaaggtgaatgttagcttccctgtggaacatatgagtgtaatgaggcacagagcagttatgtaagcctgtccagcaccacaca

SEQ ID NO: 67900 - DNA, 1048 bp, Homo sapiens
tctttggcctgggatatttctggaacatccacgagctctggtactttgtggtcatccaggtatgaatcaccgtcttgcacttgggcctgtgttgccgtctcgggaaggacctgggagaccgcagctcacagcgggtgggagcctgtgttcctggctccctgtccagtgctctctattacactgcactgagttctacctcctggccccactgcccccgcatttgttcactcagagagttggccttgagcacaacgctgtggtcacttccaatgcacgagaggcttggtctctgcttgaacaatcttgagcgagagaagccagctcatgccattgaggaggtgtggcatgtgtgtaagggaagggtaaggtttgtagtgtggggtatggagggccccttggccacgaaattgaacctcctcagcccagggtggtcagagcagggagccagtcgcacagcccaggcctgttcccaccctcccttctctctccctgcaggtctgtaatggactcgtccagaccacaggctggccctctgtggtgacctgtgttggcaactggttcgggaaggggaagtgagtgtaacaagggaggaggagtgggaaggattgggagggctgggggtcctgagctggtcaccgtggcctctgatgtaatttcagagggaagggtcagaaagcggcctccacgttgctgttcacgtgcttagaagtggctaaaagcagtgctgattttctcactgatgaggctttaacccatagagcaggcaaccttagttatgtttttttctaataatagattaatttctattttcaacgaagacaaaaagaagcctataaaacttccgccctgccccccaaccccgaccccgaattggcttgtgtgcaaaacaaagttgctttggagaaggagttctcacccttggcactactgactttctgggctattggacccttgtttggggactgtcctaccactgcaggctgtttagtagtagccttcctggcatctgctcactggatgccatagcacaccctgagctgtgaccatg

SEQ ID NO: 67901 - DNA, 1121 bp, Homo sapiens
tcctcatcgaacgtgagtgggcccctcactccccacaagtgagcctagaagttctcggtttctgggagaaggcagctggatctactggaaagattgctggtcacagagtgggaggaccagccgtgtgactttggacaatctttcagagcctttattttctcatttgtaaaataataatagtaataataatgtctatttcgtaggatttctgcaggcttaactgagacaccatagttaaaatgccaggcccacaggaggtgcttggcaagcattggttgaatctgagaggtgtgatcagggagggtggagttgaagggacattgttacagtgaccaggctctccacttgctgcaggtggtcttgtgcactagccaggccaggtatgagagccactctgtagctaagagtactaaagtccaagaggcagtagtgacactgctggttgttaggaaagccaggcctagaaagctgtctcctgagccccaggccccgctccctcctgctgggacacacactggccaccttaggagctggaggcggggctggttcccgggatggcttagatccagtgcaaggtgagggcctggcaatcacctcgggattgggggggcgggggttgggaaacttcttagaaagcgatttttttttctagacccagaagatgtggactgcgcccctcctcagcaccacgtgagtgtgagccctcccagccctatccctgccctccaactccatccagagggctggacccggagaggcctggggagctagagcagggagttctggccctcactgacctcaccgacccagtgctaggcccatgggttggccctacagcctgatgagtctggcaggtcagtccagcccgagacgaacgtgtgcctccccatcctgggagccagtgtctcttgcctgggctgcaccttcagctggtgggaggcagcacatggacgcacccacagcagggctcatctcctctgctcagggtgagccagctgagaaccaggacaaccctgaggaccctgggaacagtccctgctctatcagggagagcggccttgagactgtggccaaatgctccaaggggccatgcgaagagcctgctgccatcagcttctttg

SEQ ID NO: 67902 - DNA, 1028 bp, Homo sapiens
ggcaggggaaaaggaataggatgccctctggggtttcagggcaggagatggttgttgcagacctcagggctccaggccagcaaagggattccgggtgactctgcctctcccctctcctctctcagatgttcctgtacaactacattggccaggacgggattgccagctccataggtgaggaggaggttgcaagtcctgccaggccaggggaaaggcactgccttgggggccccatgaggctggcccacggggggcactgacaggtggaggggctgggagggctgaaggctggagagtgctcctgccttggggttggggctgcgggtggtgctgcttctctgactggctgtctctatgctgtcccagtgatgctgatcatctgtgggggcctggtcaatggcccatacgcgctcatcaccactgctgtctctgctgatctggtgagtggggccacctcccgagggccagggaccgttctgggggcttggtcagggccaccatctccaggtccatttctccctgtctcccatcccgcagaggagaaaccgtcaaagtccttcagaacgcaccatgggcccctctcctctcaagcccaaaccccagttaccaccttccctgagtcagcccctctcctgtcctggttctgctcatgctgctgctcagctgggcttccccactccactgtctctctccaggggactcacaagagcctgaagggcaacgccaaagccctgtccacggtcacggccatcattgacggcaccggctccataggtctgtgactctagctctgttgtgggccggcccctaggcatagtgccctccggtgggcaggggaggtgcaggacccctgctcacgaggctgtgctccattcaggtgcggctctggggcctctgctggctgggctcatctcccccacgggctggaacaatgtcttctacatgctcatctctgccgacgtcctagcctgcttggtaagagtcttggggtacacagataggtattgagggatgctctgtcctgccag

SEQ ID NO: 67903 - DNA, 1137 bp, Homo sapiens
tttattatactattgcatttttatgtatgtttaaaattctccgtaataaaatgtattttagcaacaacaaaaatgagcctttctaggaccatgcaaaagcttctcattaactctttcaggtaacagatttcagaatataaaagaattcatccagggacttcaaagtgtttaccaacatcctaaattgagccatttgttccctgtccctcattaatcccttcttgtgtctcctgctcagggagttgaggaaaagattcttttttctcatgtacagaggagactcagggcaggatgttactggaagttatacacatgaactaactcttggcccactcatcatggagttcaggttaacccagccagggtgtctaactggtagtaatttcattttgatgttttctttctccagattgtggatgactttttcattggccgctatgtcctgctggctttccttagtgccatcttccttggaggcctcttcttggttttaatccattatgttctggagccgatctatgccaaaccactgcactcctactgaccactcttcaggaaaacgaaaacctgttctctccttcattgtgatgacattgatgagcaggaaggcactattcagagccttgttttgacagccctcatgccttaaggttagaggagtatctgtccatcactaagacaaatctctggagtcctggcttccagaaacaggattgccaaattgtccctgtggggctagattcttaccagcttaagaaggatattgctatcttcttagtacccgtaccttaggatttccaactgttttgaaagggaaatagtaacagtgatctgcttagagtggattttcactcaagtccttagtaagtggattttggggaaaaaagcacctgggcttctggttctttttgataatatataaaattattcattatgaggttgcagttgtttgcaaaggagaggcactcaaatttgaaaggttattttaatgtgataatttggaagacttactcagatgttggtcattgaccactctgtgcatatatttctgcagagctctgtgaaggcaatgagtgtcacttccctctgctctaataaagcaataaataatagctaaagggctgactttcacttcga

SEQ ID NO: 67904 - DNA, 1044 bp, Homo sapiens
actatatccactctattggcagatatttggattgtttaaggttttagctatttcaggtagggctgcaatgtcttttttttgaatttaggtgtgcgtttctgttgggaatacacctaagaatagaagagctggatgtaggatgcatttatatttagctttattagatactgccaatagtctccaaagcagtggttaacaaattatggcccttgccagccgtatatgagggttccagttactccacatctttgtcaacacttgctgttgtctgttgttttcatgttagccattctggtgggtatatgaaggcactgaatttggttttaatttgcaatttccggatgactaatgaagttgagcacctttttacatatttattctcattcaggtatcctctttctcaagtgtttattctttttttatctgcttgatctatcagtttctgagacatatattaaaatctcctgctaaattagtggttttatacatttattgtagtacttctgtcagttttggctttatatatttggaggttttgttgttaggttcacatttgtttcaggttgtatctttttactgaatggttccttttgtcactgttcttaatatttttcagagctttacatctgttttgcgtggtactaatattgcttcatagcttatattttattttgtttcacttggttttttttcaactgtggcttataaaaaaacaaaaacaaaaacaaaaaaacagaatttcctgtcttaaccatttttaagagtgcagatcagcagtgttaagtatattcacagtgttgtgaaacagagctccaagatgctttcatcttgcaaaactgaaactctatactcattcaccatctccctattccctccttccctggtttttgtcttgttaatatttgctttgcatgtctttctcaatctctttattttcagcctctcattatactttctgtagagcttttgtacacagctatttttaaaaagaaaaatctaagagaatttcttttagtagtcaaatataatgtttccatgtactat

SEQ ID NO: 67905 - DNA, 1096 bp, Homo sapiens
tctctgatgtccatacttgtgccacttacttcctattcgttctgcgatcatggcctgattaattctctcaaaatacggtactccgctgctcaccctcttggttccttatttatgggatacaaatcaaacatcttagtctggcacttaaaaccctttagagcccagcttctgctttggtctccctcttttggtttctcagcatgaagtctcatttccactctaattggttgatactctgtcccccgaccctgccctgtgatggccacctgtgaacatttgctctcgagggtccactttcctgggctctcactctggccgtcaccacagatgcaaatccgtgcctgcatccttcaagcccagcagggattcccatcttttaaatacagcgctctgtgaccagcccacccctcagcactctctcctcctctgaactctttggcctagagcaattattgtctgcacaattcatttggcatctaatcatgtactgcctcatgacttttcatatattgtttcttgaactagggctggaattatttgctgcaatttcactttttgttttcatatgcctgtctccacagtgaaactgcaggttcctgaggacaggagccgcatctttttcatcttttcattccttatggcaccaagtgcctagtaggtataacataaatactttccagaaattcttaagaggtgttcatttaggagtcttgggactggaaagatccttataataacatagcttatactcttattttgtagataaacaacaataaaaaaatgaagagacaagaagtcaagagacttgcccaaagagacccagctaatgcagatggcagaggcaggattcaagaacagatcttttcattctaagtccaggacactctccagtcaccacaggctactgcctgtgtgttgattttattttgtgagtgggttgcattcattttcaagggtgtgtaggaatttagaaagcagaataaaccaaagagagcaagccaggagtggagcacagcctcagcaacgtccaagaggtgcaaacttgtgtggcataactctggtgccacagcaattaggccaccataatttcactcta

SEQ ID NO: 67906 - DNA, 1077 bp, Homo sapiens
taatttatgggccacataaaattctgtgaagttgccctgcatctttctgaggcaaagttgaggttttttactgtttcaagctgctaatttttccatttaaagcgagccttctgtccgtgccagtgtgcatgtgtgcatacaagttggccgctttaatttatgtgcctctttctctctgtgtaaggctataacttacaaatgtctgcatgaaatacagagccactcttcctattacaagaggcatggatgctttgtcccatgcgtgggataacctggaccccaccctgcctcaaacccagggacaaagtaacctcagtgcagagaggggcattgacctaggaacaggagttgatgggactcatcatgtgaaccaagacccagtgtcctcaccagtaagacgtggggctggatgagaggcagcacggttgggggcaggcataggaggttcagagcaggggacaaggatttaaggatggaatggagcacattcaagaactgctgccttgggcaagccatgtaagctttccaagcctcagtttccccattttcaggatgggggtagggttacaaatttctccccacagtgttgtgagtaccaagtgtgctactgactgcaaaggcccttcctcagctaagacaatatcgaagggctggttgggagctattccaagctctgagctgccggcagggccccgtaggaggggtaaagaccaagagcaacgtgatgtctttgggctttccaaagtcaaacctagatgcctttgtgcgagcccttcctccctggtctctgctgagccctgtgtggagagcggttgcgtagcacagggcaggagagctctgcacatgcttctccttttccagtagggccctctgggctggagagagcagtcatcccttgctaagagcagttggcatccccttccccaccccaggccggctcccattgcggcctttcttgagagcaataatcctctcctggtctttgctgatgcttctcatcagaagataacacagcgagtcttttcagggtctcctgagaacctagaagatattgagcaggtgctgggggattcacag

SEQ ID NO: 67907 - DNA, 1040 bp, Homo sapiens
gtgcctggcccaaaagttaaaaaaacacttaaaatgtgaacatttcaaattctacggcaattctggccacatgtgatccgggaggggagtgagatggtgcgcacagaggaaaaaagccccaaaccacgtatgtggaaagtaaagacaaggactgcctgtgccaccccaacctcagtcctcgcagaaggagggccagggaggggtttccagcacctactgcttgccagctgcccggcttggccttttggctcggctatctcacttcctcacaaaaacctggagatgatattatctccatgtgggcaaatgataggaatgagacccaaagaggttatgtcacttgcccaagatcacaaagttagcaaattgtatcatggggaatcaaactcagttctgcctggccctaatgtctacgctgtgccatcccatgtcaggacccacctcttggagggtggcttggaagagagctaggctgtcatctgagtgggctccatgagcggccacctcccagccccacctacccttgaacctgaaattctaccattcccagtttgttcctcagagctggcatttcctcttctgattcgctcttgctctccctcttactccctttctgtccccctcttttgaatgccctactcgggagggggttgctctggagcatggatttgtgttgtcagcctcttttcttctggctaagagtgacagccagagtaagaggtctaaatcatgtacctgggaggatagctgatcctgaaaagggaaaaaaggaaaggctcctccacctaagacaaatcttatacccttctgagttttgcctgggctggccctgcctgggtgcaagttgagccataccctgggccagcctctgaggtctgcgtcctgctgtcagcaccccctagttagcatctgcaccatcaatcaggcaatgcagcccctgcctgaggggtggaggggatggggtgcagcctctccaactccttgccaacccttagacacagagcccttccctctccaccctcctctttttctctctcttc

SEQ ID NO: 67908 - DNA, 1008 bp, Homo sapiens
gcactgcttttcccaagggaggtgagccccgagagaatgacagccacgctaccaatcctggggctgggctggtggatggggtgggaggaatctctccaggtttgaggctagacagataggctgggtcctgtgtgactgtcctctgtagcagccgcctggtcaggaccctgggaactggaacttcctaatgaagtgtctttgagagaactcttccaccctgtgaccaaagagtgttctggctccagtgaagttgaccctggggcttaaccctctgccttccctggcattaggcttggtcattcctggaatgtgctgggtgaggtggcctgagaatggtgtgggagacatgcagccattccaagcagagaagttaggaccggatgcttcgtgccagggcctctggactactaggtgctgtgggcagatgttccaggctgtgtccttggctgggctttgtgggatgggggttcttctggtggatagtccctgctttttgaagcagctgggttcactggcacctgaggtaacatctcagctgctgactatagtcaggggggtgatcctgctggagctataatctgaaaagtgaaaccatgctcagatttcctctgtaccaggcaaagcctattccctgccctttctatggcatcataaggcctcccgcaccaagcccagccttgcaactgatgctgacaggcccagaggctgcagctgtcttgctcagggagcaggtgtgctcaggagtggttggtcgtgctgcttccacggctcacctccctgacctaggtagagctccatcatccagggtccccgccaagaccaaagatccaggagtcctgaaatctgatgacttttatcctcacaaggttatgttaggattcaatgagataaccaatgctaacagctggcagtgcttggcacacagaaggctcttggtgaatggtatctacattcatgaagaaggactgcaccgggtctgtcccccttacaagaaggaagacaaccagc

SEQ ID NO: 67909 - DNA, 1050 bp, Homo sapiens
tcctcactggatcatctttttttttttttttttttagatggagttgcgctctgtcgcccaagctggagtgcagtggctccatctcggctcactgtaacgtccacctcctgggttcaagcgattctcctgcctcagcctcccaagtagctgggacttcaggcatgcacaaccaccactggctaatttttgtaattttagtagatatggggtttcaccatgttggccaggctggtctcaaactcctgacctcaagtgatcctcctgcctcgatgtcccaaagtgctgggattacaggcgtgagccactgtgcccagcctggatcatgcttttggtgtcaactctaagatctctttgcctcaccctagatcctgaagattttttcctgtttttttttaagaggtttatagttttctgtcttacatttatgtctttgatccattttgagttaatctcatctaaggtatgaggtttaaatcaagattcagtttttttgcatgtggatgtctaattattctagcaccatttgaacaaccccctgttgaaaagcaatttggcaatatttatcataatccacaagaacgttcatagctttttttcctgtcacttctgggaattcatcctaaagaataatgcagaaacttttaaaaaaaaaaaaaaaaagctataagcttagaaaatattcactgtaacattttttataaaattgaaaaattggaagtaatctaaatacctaacaataggagactggttaagtatggcacacacatgaaataatatgcaacatttaaaaatatgtttactcaataactttcacccattcagcaaatgtttactccatatccatatgtgttcgtgctgaagataacatggtgagcaaattagacatcatccctgccttctcaaagctcatagtctagaagagaggatagagaaaacaattctggcacttagaaaaatagatttgctaaactagagggaaaaaacagaaaacaaaattgcatgcacaaggttattgaaactatgttaaaatatatgggtgtaggaaaaaat

SEQ ID NO: 67910 - DNA, 1055 bp, Homo sapiens
tatgtctggggcttcttgtcatttctactgttctgcagccctggcagctacaggaaagtattcagatgatagaaggctcctgagatggaggtgaaatcccagagcctttttgctgttaggctgcagtgagattgggatcgtttcatacgttagctgctcgcctctgagtccctgaagaatccagtgacattttcttgctcttgcatttggctgaaagaggccacactcctgctggaagcaatcattccatagcagactcaggtcggccgagagcccatggcagagagtcctcctcttggagggtggagaggtaggcactgttccccatccccagcttctactccaccccttctgctccagatcttggagtcttcctgacctgccacgtgattctgctcctttccatcccaaatatgacatctgtctgtgctgctgccagccaagcacatgagcagcttttcagaatatgctctgtgtgcggggagatcctggagaccaggccccagcaggccctgccatccaccagaggagccgcttctgcattagccactgcagcgtgccgggttctgcactaaacactgtaacgcatcatctcatttaacccacacaaccaccctaggaggaggtaatacaattcgcctcattttaccagtgacaaaactgacactcgaagaaggcaacacatttctcaaggtcacatggatgacaggtggcacaggatttgaacccggacctatgcaacgggaggctctaatctcttacccaccactttgacccaagaaaccacagacatctcttggctcccatgcaaagtctgggtaaagcaaaggggaaccccaacgcccagcagaggcgtggagccccgtcctgggagaggtgtagagattttacatgtccagtcccggtcttcagacctcacagcgatgctgcctttgatgtctcccccaccccactcatcacattcagaagcctggcctggcatccagctgcactctgccatccaccaccccatcttccattcagccacaaggagctgagggctcactccagggccc

SEQ ID NO: 67911 - DNA, 1029 bp, Homo sapiens
tgtcttgcagtatctgaacacagtcattccttacgagaagaaagcctctcctccctcagtggaagacctgcagatgctgacaaacagtgagttcctcttgttctcagccagatcagtggctcctttttctcccttcctgcctgtacgttgtacctccgtgccgcaggcccgagactcctcaaagcaggtttacatgggccaaaataccctccaaattactgcgtcacatcctcccgcacagtgtaaaattaaaatactctgcagtgataaccagagctgttttttctttctcctggttcccataagggaagaggcctgctgggggaaaaaaaaatgagctggtgaaagaggttggggtgctggtgcaggggactttttgttttcccctgcagttcccaaggcttggcatcctctgcctccctgttctctctctccctgcaacttgaggttgcctggtcggcacttgtgccccttgaagcagggcgcctggtctctgggtctggctgtatttttaatgagaagcaaggtttcttgggtggggtaaggctgactggaaaaaatagagtccagctttccttccaggaagtgactgcctcctctcctccactttgctctattgtcaaatattaataaacattctgaactatgagggaaaacagtgtgtaacaaagagccttttgtagacagtaactgtttatatacatcaaacagtacgacccccaaagggctggggggcacatggtgttagccatcagtgtcagcttggccctcttaggacgagaaaaatcctaggctgagatgtggtgacaggcccagaggatcacgagggaaattccatttccttggcaaccgtgccctgcagagagtgacagctaacgaggccccgcccactgcagcctgttctggagggaaggggccagtgcggggctactggatacccaaggagaggggaagttgagcttctgttcagctgaggaggatggatacctgctggggcctggtgctgaaggtgaccaaacgtttcatttt

SEQ ID NO: 67912 - DNA, 1061 bp, Homo sapiens
taacttttctgtgggacttgaatgtaaatgccagactatggcagtttgggatatggtcagttaagccagatatgctttgaatagcttgttagatttaaacatctagaattttgatggctgtgaactttgaggatcttacttgggattatggaattatagagacacagggcaaatgagataaatggggttctcttttgtagttttgttgttgtttagttcatgtggtcaggttattcagtggcatgtcccatgcagatttcttacatctgccatcagctatgacatcatgcctggattccagtaacaggatggcatttcatcaaattctgaaagtcatcattatttggactagaacaacctattccttaaaatgcctagtaagacgaaatctggaaacaaccccccaggttggaactccttaacaaaatcagggcacctttgctgcagttggctgcagtgtcacttacctggagaaggcgccttgttcaccccaggatgacctgtctgtgggttaaaaaacggtgctgtcccctttgagtcagaatggtgctggccattcccctgtcgtcttttcctgccaagttggattcagtgctgcatgctggatttctggcatgctggagttagtgatggggcaaagatatgtttggaattggatgaaactctggacacctcttcagctccactgtttagacagcagctggctggagtggcctcccagtcagtatcatccattctcgagactagaggcaatcccacttctgctgatggtcacccagaattccatctccccacctcctctccagatccatgagaaagaagaggaagagttcaatgagaagagtgaaaatgattccggtatcaacgaggagcctctgctcacagcagatcaggtataagtatctctccaggttatcgggaccttttgttcttttgatggagaaaaagtccaagagaacacacttgccacatccatttaaggcagaagaaagatatgtggtcatgtggtgcctgtgctcatgactcagagtattttttgtttcttttttttctttatatat

SEQ ID NO: 67913 - DNA, 1025 bp, Homo sapiens
cgtcgcgggggttgactttagttaggacccgactcactgctgggggtggggtctggtgggggtggtaaggaggccccgggattctctgacaggacggtctggggtcgccgcagctcccctcacctggtcccattctgggattagaaaggaacaacgggaggccgtcgccttcctgcccagcccttcagggagcgcagctgggacgccgcgccaggccctggagatgtgggatgatgggcacttccagtatcatctcagcatcggccctccagccaggcctggtgtgtgtgtgtgtgtgtgtgtgtgtgtgtgtgtgtccgcgtgtgtgtgcccgcgtgtgtgcgcgcgtgtgaaggcagggcggcgaggtatgggggctgggggaagaagggaacgccgcccgatcgcgctggggcagtgggtcggtacctcgtcccgggaccgttatctggtccagtcaccgtaaacgccccaagatcatctttgtccctaaaaacttacccccgaccccgctcgtgcccctccccagagtgcggagccttccccagaccgcgcattcctgcagtgtcagaaccgctggcagcggccgcagacgccgggagagcgattgttttactacagacgggcgggagaagggaccggggcggctgcgcggtggcggggcgcgctgccgtcgggtgggccccgggctctggaatgcggggagcagtgtttgacggcgtcgaggaggtatcacagcccgctcttcttcccttttgcctatcccttctctcctcgccgctaggcatccccgactctcatccctctcccgtgtccgggcttgtttggccggaagggcagtggagtgtgtatgcggcctgcacgggatgagtccggcttcctcagagtgccagccattgtgctgcctggaggaggctttctttaccccaccggactggggggaggagggggatctgagatggaggtgaatggagcagcgggaggagggggaggggagcaagcagaaccgcgaaggggttgctgat

SEQ ID NO: 67914 - DNA, 1985 bp, Homo sapiens
acttttttaaaaaaaaacctttaatgtaattttttggtttacttgtgtgcttttcctactaagttataagcttcttgagcatttctatatgacaatatatagcttattgaagatactcagtacgtgggtgggagatggatgcatgagtgaattcttagcctttgggaggcttaggcaggaggattgcttgaggacaggagtatgaaaccagcctgatcaacatggtgagatccccatcgctacagaagaaaaatttaaaagccaggtgtggtggtgcacatctgtactcatagctctttgggaggctgaggcaggaggatcatttgaacccaggagttggaggctgcagtgagctatgattgagtcactgcactgtagcttgggtgacaaagcaagaccctgtctcaaataataataataataatgatagccttttctatagggaatcaaagactccatctggggtatttgtaccatctcaaagctagatgctcgaatccagcaaaagagagaggagcagcgtcgaagaagggcaagtagtgtcttggcacagagaagagcccagagtatagagcggaagcaagagaggtaaggagtgcatgcctgatatcaaaatgtccaagggagggaagaccttacatagtgacttgatgtttcagtgccattttatttcttttgtgctttttcccagaaaaatgttgcaagtgatttccccccaacaacattgacttaaactagggtctaacaataatccttgctaaaaatgtcatggtgttaaatcagaaagctgaatagagaatcgcaaaatattatttggtttgatagatacttctagggaagcctgtgtggatttatgtattaatagaagaaccctggccccacactttctcttaatcttttccatcatcagactttagaaaataaattatttttcttttaaaagctggttccatatatatacacatttttttttttttttgagacggattcttgccctgtcaccaagctgtcacctgagattgccgtggtgcaatctcagcttactgcagcctctgcctcccaggtccaagcaattcttctgcctcagcgaaccggctggctggaagtacaggtgcgcaccaccacgcctggctaattttttatattctttagtggagacagggttttgccatgttggccaggctggtctcgaactcctgacctcagttgatcgcctaccacggcctcccaaagtgttaggattacagccgtgagccactgcgcttgaccatttttttagtcttttctcattgactgacattagaacattgggagaacatgaggcactgaaaaataatacagtacccacaaaagataagatataaaatgaactactgaatgacaattaggaaataacttatgctttataaactaaatacatgtgatcttttccagtgagccacgtattgttagtagaattttccagtgttgtgcttggaatggtggagtgttctgggtaagttctttaaattccaggtgccttataagcatcttcagattgttgctgggttgatagctatgaactgttttcttgaaacactgagacaaatagttttcatctgctgatgtacacttagaaatataactcaggagtctgtgcatctgcagagattttattcccactcaggaaagcacacttatatgtaagcaaacgtcacagccctgaatatacacttgaattttgtttctaaaatgactcattcacaagtattagaggtagcagtttctcttgacactgtctagacattttaaaatgctaacagcaactatggggactcgggaagggcagatacggctagacaagaacaaggttctccctgcttctgcttatagtgatcaacaagagttaatttgcattgaaacctatagcagaaaagattgcctaccatttactgagaatcccagtgcaggcttaactgaaatttgggtactttgaagaatggata

SEQ ID NO: 67915 - DNA, 3095 bp, Homo sapiens
gggagatgatgtttcagtctccctcagtttactgaacatttcctgtgtaccaggagctttcactgtttattttcttttttgttgttttattctttttaaaaatttatatttcgttattctcctagaggccctttaagaatgggtactgttgttctatccattttatgaatgaggaaatgcaagttaccaaggttaaaccattagtaagaggcaaagctgagatttaaacccagatggtatcctgcagatagcgtactggtaatcactgtggcatctcgttaccatcatgtaagcaggtttgtgtcaagcagcacatatctatggtttctttgaattggaattgtggccagaatgtggtgcgtctattatgagttagactctttgagataggtatagtgatgtgctggcaagaactagaaagatccaggaggagacagagaatagtcacgagatgggggttccgcatttggtcttctggatttccatttctccatttctagtaactcgtttcctctttcttaggtgacccatcactacatggagatgtttggtcgtggctggaattcttcctcacgtcaattttcagtgctctttgggtgctccccttgtttgtgcttagcaaagtggtgaatgccatttggtttcaggtaggtccagggcagaatggagtctgggtcccgcagcatgattggctgacaggtgacaagtttcagcctgtgaagttagtgggcatgtagggggacctgtttttcagccttaatgtttcttggccaggtagccagtagctgatctttgtgttcttacagaatggaattattgtctcagcatctcattggcaggtgtctggtgccttttctttttcgttttggcttttttttttttttttttttttttgagacagtctcactctgtcgcccaggctggagtgcactgcaacctttgcctcccgggttcaagcaattctcctgcttcagccttccaagtagctgggactacaggcacgtgccaccatgcctggctaattttttttgtatttttattagtgacagggtttcaccatgttggccaggctggtctcaaactcctgacctgctgatctgcctgcctcggcctcccaaagtgctgggattataggcgtgagccacggcataaggcagcaatcctcctaccttagcctcctgagtagctgggactataggcacatgccatcgtgcccagcttatttttaaataagccttttcttaactggcagctctagtggcggactagtggccttagctttggggatgtatatcaaggccatttaattcatgttttggtacactttctctgttacaggatatagctgacctggcatttgaggtatcagggaggaagcctcacccattccctagtgtcagcaaaataattgctgacatgctcttcaaccttttgctgcaggctcttttcctcattcaggtgagactgaccttctgggcatatgggcagctttattaaaaagaaaaactgtttcactagagagaacttcacaaagacagagtattatatttatacagagtattatatatatgctggtgggaggtaatgatttttaaatctttttttccccacggaaatgagaattttaaaattacattataaaattataagaaacatgaatttacctgcttttttctgctactctggttattctccagtcctgccaggtggaaactttttttctttttatagttatgcctaatttttttttttttttaaagagacagacgggtcggctgggcgcagtagttcatgcctgtgatcccagcactttgggaggccgaggtgggcggatcacctaaggtcaggcatttgagaccagcctggccaacatggtgaaaccccatctctactaaaaatacaaaaattagctgcgcgtggtggcaacatgcttgtaatcccagctactcgggaagctgaggcaggagaatcgcttgaacccaggaggcagagattgtagtgagccgagatcgcgccattgcactccagcctgggcgacaagagcaaaactgtctcaaaaataaataaataaataaaagacagggtcttattttgccacctaggctggagtacagtggcacaatcatacctcactgcagcctcaaactctgggctcaagcaatcctcctgccttagcctcctgagtagctgggactacaggcacatgccatcatgctcattttaaaaatcttgttgtagagacagggtctcagtatgttgcccagtctggtctttaactcttggcctcaagagatcctcccgcctcatcctcccaaactgttgggattacaggaatgagtcactgtgcccaccctgcactcggccttttagaaacttgagaagcagctaggaagctatctcagacagtgattggagagtgacaggtgaatggtgctaggtttccgaggctttgggattaagattttccatatttgttcttcagggaatgtttgtgagtctctttcccatccatcttgtcggtcagctggttagtctcctgcatatgtcccttctctactcactgtactgctttgaatatcgttggttcaataaaggtaagtccatctaaagaaatccagaaaatggaggcccagtttggaaatgctactgctaagcagacttcttaaactactcatagtcaggcttttggcaaacaatcctttgagggaagcagcctcattggcaagagggagcttaccttcggcttagtgggtttaactctcaactttgaggctgggggatgtggtagtatggcattatctttttggtgcttaacatggtatatctctgactgggttgtaagatggcataaatgagcatgagttgctctaaattagagaagtcaaattgatgtcagcatctggatccttttgggggtgttttagaaagaccttcagatatttaccagggtgtgcgtggttgaaagaggttaactgatacttacaggatggcatccttttgatttgctatcttgcttagttccagactaatcctgacaaaggatgctggtgctgaaattcttaattcacttagcctgtcagctttgaaattacgat

SEQ ID NO: 67916 - DNA, 1088 bp, Homo sapiens
aattctaagaaactttgcatgctttatatcagatttgtacacttctaatttatatgctgtagctctgttctaaatctgtacctaggctgggtgtggtggctcacacctgtaatcccaacactttgggaggccaaggtgggtggatcgcctgaggtcaggagttcaagaccagcttggccaatatggtgaaaccctgtctctactaaaaatacaaaaattagctgggcgaggtggcaggcgcctgtaatcccagctacttgggaggctgaggtgggagaatcgcttgaaaccaggaggtggaggttgcagtgagctgagattgcaccaccgcactcccgcctgggcatcaaagcaagactccatctcaaataataataataataataataataataataataaaatctgtacctaaaactcatggtttgtctaccatagttacttagtcacttgactaaaaggaaatataatatctaattgtattggctttcttgttttaggaattgaaatgcaccagcggttgtctaacatagaaaggaattggccttactactttgggtttggtttgcccttggcttttctcacagcaatgcagtcctcatatattatcaggtaatttggctacagggatttgaaggagactagtaaaaataaaaattcatgaagtcagtgccttttgtttgcttcgttctgtttcgcattctacatcatcatttgtccatcaggagacctgcagggtatttctacatttgttagcatgaagatctagtctgaatgtccctatatcccatattctttttctatgttgcctcctgaagcaattattctttttttttttttttttttttttttttgagacagagtctcactctgtcgcccaggctagagtgcagtggtgtaatctcagctcactgcaacctccgcctcctgggtttaactgattctcctgcctcagcctcccaagtagctgggattacaggcgcccaccatcacgcctagctaatttttgtgtttttagtagagatggggtttcactatgttggccaggctggtcttgaactcctgacatcgagtgatccacccacctt

SEQ ID NO: 67917 - DNA, 1515 bp, Homo sapiens
ctcttctccttggtggtcttcttaagcaacagactcttccacaagacagtctacctgcagtcggccctgagcagctctacttctgcagagaagttcccttcaccgcatccgtcgcctgccaaactgaaggctactgcaggtcactgagttgcctgccatccaaaggggatgggcgggattggaagaagctgtggcagctcttttccctgttcacctcccgcctgccagggaaggcaggacccgctctgccaagggccctctgcgtattcccttctctctgaggaattgaaatttttgtctctggtgcacgtaaggcagaatgttccctgacaccagtgtgtggatttttaacatcaccgtgagtctgaaaggaccacaggtttttctgcagctattttctagcatttgccagtccctgtgcctggactgattggaacactttgtttttctccctgtgccatttacccttccacctttccatcctgccttctaccacccttggatgaatggattttgtaattctagctgttgtattttgtgaatttgttaattttgttgtttttctgtgaaacacatacattggatatgggaggtaaaggagtgtcccagttgctcctggtcactccctttatagccattactgtcttgtttcttgtaactcaggttaggttttggtctctcttgctccactgcaaaaaaaaaaaaaaaaaaaaaaaaaaaaaaaaagcctgaagagatgagataggaggaaagacctcacagccagatctgctgggttttgaggagtgattttctttcttccccttgaaggggaaaaagctattttcattggtacatttaaagtcccccaactatggggaggtaccaattctggacaagtgccactacaacaacactaaacctgaacttttcaactccgttggtggtgggaggcagcgggcagaaatttactgttggccactgccaggtctatttcatatttcaaaggaatattgggtgctgcatataggaactgaaggggtcaatgtattaaacctgtgattggttgttttcctgtcattttgagagactaaatgtggggggcagatgtcaaaatacctgtacaattttaaaatgtcacaattaaacatgagctggtttcccacaaagtgtctaatggttgaatttgcaaatcttgatttcgagaaatgtattcatggaatataagactttgtcttggataatttagttacagttttgagaaattagccctgaaaaatgttccctgagaaagcctggattatatgattataatcacatttatatttggtagaagagtcagattattactttttctaaagtctatatgtatatcgctactgtatattcatgaagggagaaagaccctcctagatattggtgtattgagtattaatcgagggaagccgttaaacatctggttaacagagacctttactatgtgcaagataaaatatggaattaaaaattgttgctggggccaggcatggtaactga

SEQ ID NO: 67918 - DNA, 1031 bp, Homo sapiens
ggcgtggtggcgcacacctgtagtcccagcttctcatgaggctgaggcagaagaatcgcttgaacccaggaggtggatggaggttgcagtgagccgagatggcaccactgcactctagcctggcgacagagcaagactccgtctcaaaaaaaaaaaaaaaaaaaagatagtagtactgtcttatacaagaataactaacctatggtagattagtgctatattgctatataaataattcatatctgtcatgtgatttccattttgaactgcctacagatagtgtccctcaacattttaatctactttttttaatcccccgactcttctgcttcagtaggaaaaattcgttttctttccctctagattatcatctgatgccatcaaactgtctgtgtaatttaatcagtctcttaaatcagcattgtcagttacagagaagccttgagacagatgattggaagcgggtatagatctgagcagtcgttacagtctgatatatgggatgagaacacagtggatctgtgtttgggtacctccacctctttttgagtgcatgattgtacctgcattagttatcaggtatgctgttagttgacccgacagccccattgggatttggaaaagaaaaaagtttatagccattcagttgaagtttaaatttagggctcgaaattgtgttgattcagtcgtgacttctatttttcctcttaatgcctttcacttcttctttttttttttttttcctttttaaagagaggaggtctggctctattgtccaggctggagtgcagtggtgtgatcctagctcactgcagcctccaactcctgcctcagcctcctgagtagctgggactgcaggtgcagaccaccaagcctgcataattttaaacagttttttgtggagatggggttttgctgtattgctcagattggtcttgaactcctggcttcaagcgatcctccctccttagcctctgaaattgctggggcttgcacttctggtctcaatgtttatttcctgcttccccccc

SEQ ID NO: 67919 - DNA, 1045 bp, Homo sapiens
atttttgtaaaagacaattatcttcaatttagatgtctcctatagtatttttgaaagtctcttgagagtttactctgtattttagattttctggctcttcatgagtcctaggtgtaattttgcttgccatacctattactttgctccaaggttaaggttagttatgtgtgtatggtgggggagtcagcgtatataaaagatgaccatgtaagttgagtttggtattagtaggtgaatgtaatgttataggcttttataattagttaactgtgacctatgaaagtggaaaatgtagatgccattgtcaggggaaagtaaacttctcttgtttcctttatgtggggaaagatggataaagactttattcagggattattttatattttctgtgacctctctactggataatactgtcttcattataatactatatctgctgttctttcatggcacattaccaataaaatattaactctctggtttttgcagccttctccactcgtctgtttgctgtcctgagatttgaaagtgttatccatgagtttgatccgtgagtacctttgcttgatctggtattatttcctttgggaggcattcaggttcatgggtttcagattcaaatttcagtcagctctcagtgatagagatgtgctttcagtacatttaagggaaaaaaaaacccttaaattcttccaaaggagataattatctccttttaagacgtatgtgttggagtccagcacagtggctcacacctgtaatcccagcactttgggaggctgaggtggagggatcacttgagctcaggagttcaagaccagcctgggcaacatggtgaaaccccatctctacaaaaaaaaaaaaaaaagtatgtgttggaattgaccaagtaagtctctgaaactcaaaaaatgtgagaggcattgctagtatgtctgcctatcacttaagatctggctaggctaagagaattctggctgcccagtttggtaaaagtttgtgatgcagattgaaggaaagggtcctggtgtgtattccaggctca

SEQ ID NO: 67920 - DNA, 1023 bp, Homo sapiens
gaccagcctggccaacatagtaaaaccccatctctactaaaaatacaaaaattagctgggcatggtggcatgtgcccgtaatcccagctactctagagactgaggcaggagaatcgcttgaacgcaggaggtggaggttgcagtgagccaagatcatgccactgcactcctgcctgggctacagagcaaggctccatctcaaaaaaaaaagaaaaagaaaaaagaaatgaggagactcaggctgggagtggttatctaaggttgattattcagtacgtggaggaaccgtgatttgaatgttggtttgtctgactccagagactgtagtcactgtgttatattgcctaaagttaaggcttataacaaatttggagggccaaaatcataggttcttgaaatattattggtatcttaaaaatagtatattcaatcttgtggagtattgattgaaaatgcctgcatctatttgcaaatttataattttgttttgtgtagatatttgaaagcattttggaggcattacaaataattctgtttggggcctcccaaattcagtttatattttttctcatgaatgaggagacatgtccttttgttttttctttttttgtttgagattgggtctgactgtcacccaagctgaagtgcagtggagtgatcacggcttactgcagccttgacttgtggggcctaagtgatccccccacctcagtttcccaagtagctgggaccacaggcatgtgccaccatacctagctaattttttaaaaattttttgtagagatggagtctcactatgttgcccaggctggtctcaaactcctgggctcaagcaatcctccctcctcagcctcccaaagtactggcattacaggtatgggcttccatgcccagcctacttttgtttcttgatcccaatctgttaggcttctttctcagaccctctgaatgagcaaatattgatgttagataatcaaggaatgcaagagcatctgctttgtcgtcaagagctgttagggacca

SEQ ID NO: 67921 - DNA, 1591 bp, Homo sapiens
ttttctgagatggagtcttgctctgttgcccaggctggagtgcagtggcaatctcggctcactgtaacctctgcctccaaggttctagcgattctcctgcctcagcctcctgagtagctgggattacaggcacatgccaccgtgcccagctaatttttgtatttttagtagagatggggtttcaacatgttcgtcaggccagtctcgaactcctgaccttgtgatccacctgcctcggactcctaaagtgctgagattataggcatgagccactgcacccggctcatttccttatgagaaaagcagtgctttagttgagacaagcatggagatagaagtaaacagacttatggtagtgtaaaatgattttcatggcataatatctgatgttaaactgatttttcattgagtaatgctgaatttctcaatggtgtatcctgaggagcaaaattcaccacaaatttacaacaaagtttatttcttgctataggtactttaattatcggactaccaggttcctggctgaggaggggttttataaattccataactggtttgatgaccgagcctggtaccctttgggacgaatcattggaggaacaatttacccaggtgaggagaccagatgtgtttttttttttaaaaaaaaaacagaaatatttgtatgctagagaaccagtttcttttatttctaatagctttgtcttgtgacacttgtaatttcatcctgattacaggttcctaaaagtgcatcttacataaacaggagtacatttgtagtagagtggagatgggtggtttttatacattctagacttctgattgaatccttaggggagaaatttataggcttactgcagttgctatgttagtatttctggtgatttgtcaagacttacatagtcactttattgtatctgggattttccctttctttttcccttaagttctggtaagacaacctaatggagtttcttcttcctgttacaggtttaatgatcacctctgctgcaatctaccatgtactccattttttccacatcaccatcgacattcggaatgtctgtgtgttcctggcccctctcttctcctccttcaccaccatcgtcacgtaccaccttaccaaagagctcaaggtgaaggatttggggtgacaggaggcttgggaatgaatgttattgagcctctctaatcgatgctggagggtgggggacagagccttagaaaggcagggagccagaaggtgaagacagcttttactgggccaaattaattggcttcactccaacccctttctgcaatatgtgttttttatcattagcaactgtttgtccttatgagagtacagttgaaagtgaaatgtaaattgcaacataaagaaaaaaacatttaaaatgcaaaatgtgaggtttggattttgaagtcctcacaatgtaagggagaggaaaaaaaaactacatgaaacattccaaaacggttagtttttcctaccaggaatgtactcagcaattatttgttgatttaaaaaaaatttttttttattttaaaattcttaagccatttggcttccgtagtagactccataatgctg

SEQ ID NO: 67922 - DNA, 1061 bp, Homo sapiens
gtagattatcacttagctttcttggctttttaactgaaataataattttcttcctttgattgtccttgcatggcttttagaggtgtgactggtgttccaatgatgtacagatattgttaggggtagagacttacgagcttggggagattggtagccaaacagcccattctgggacagtattgatgtttgacatctcacttgatttgtctgtcctcagcatatgtgttctcagtgtcaggtttggtgtcatcatggggaattggtcatgaagtttttagcttgcttgtgctgtgagcatttctagcatttctaacatctcacatctaccttcgaaattgttggactgttttctgggctcattataaacagaatggactagtggatcctctgttctttctcagcattgtattggtgttaatgtcttattaccctttttttcttacaggatgcaggggctgggcttcttgctgctgccatgattgctgtagttcctggatatatctcccgatctgtggctggctcctatgataatgaaggtaagacttttaaaatgctgaagaagatcatctcacctcattatccaacagagcttcacaaagtgcagtctatggtttagcaataataaaaatggtaactgggtgagaatattagaaatgggcaggaacggatcttggacaagctcatgttctcttcccatcatcctttccagaaaggtagttggtaacttttcttacaagtctttggttcatctctgcactcataaaatagttaactattgttttaacattataatcatttgctttattttcctacataaagggagtggatgtccttaaaattttaatgactgattgacttattctcaattcaacatacatttgttgaatgttattgggaaaacatagtattaagtgttaggtaatgactaagattactttgtgcataattataagaaattaaagagataggtaatgaataaggttatattggcccatcatctattaaggaagattaaaatggacatgtaaatataactccagtgacaggagatagtactatgt

SEQ ID NO: 67923 - DNA, 2004 bp, Homo sapiens
ttttttaagaaaaaaaaaaagcagactggagaatcaaggaaggctttttagaagtggttgagggtcaactgggtcctgaagttgggacttcattaggcagatatcaaggaaaggggcaattggggcatgagtattatatgttaagacatagaggcaggatgatgaatgatagtataagatgtctttagaactatactagcaggatgtttagtgcttggaaagaatgataataatggccaatatttacttaatgtttattatatgctaggtactcttctaagtgctttacaggcattaattatatttgttttcagaacacttttatgaagtagatactattacttcttcttacatgaaactgaaacaaaaggaagtaaataatttgcctaaaattacactattacttggtagtagatccaggcagtctgttccagaacagtattcttaatgactatactagcctggcctcttgttgaatttttggtgtgtcctttctgcagggattgccatcttttgcatgctactcacctactacatgtggatcaaggcagtaaagactggttccatctgttgggcagctaagtgtgcccttgcttatttctacatggtaactttttctacatgttttcaatttttaaagttctctaaatactgtatttcctatgggtacttattgtttgaccaactttcttttctggtaggttcccctaaatttttttcttttccagtatattttttctgttcatacttacgtatacatgtagacttccttaattgcttccacttgctcacatatccctaaatcctctgtgtgaccttacagtagattgcatttagattaattctgaggcttgagtccctctcgttatgtgatcatgacatcagcaaccacaagggagcaggggattgagttacagtgatgggtttgaacttgattttatattttcttttttaaaatttattttattttgtgtgacctgtacatgtaaggacttgattttcctgtttaaaaaaaaaaatcagttatttgaactctttaagccatttggcataaataaagttatagttactataagtgttctttaaagagtcacaggtgatatcctacaatatagtggtggtggtctgaggaggcatactcagaggaactgtttttttctattccatcataggtctcgtcatggggaggttatgtgttcctgatcaacttaattcctctccacgtcctcgtgctgatgctcacaggccgtttctctcaccggatctatgtggcctactgtactgtttactgcctgggcactatactttctatgcagatctcctttgtgggtttccaggtgagcccttgactgagtagggttttcagcttctactttttctatgcagccccaactagactgatttatcttagattctgttaagaagagtacgacttattcacagcctttatattgaactacttgtgttagttgaagcaacagaattactggtcattaaagtttgcatccaggagtctgctaatatttgctccgtggagtttgaattccatggctcttactttggctttaagtttgtgggaaggggagggatatttagttgagttgagtttagatgagtgatcagagttaaaatttccagtcttcttaatgcagatgaccccatgtagtagcagagattcctgatcttaatggcatctaattgtaagtgcttcaggaagtaaagcacaaacctttaaccacattgctccacagggttaacagacaactgttaaatcaaagaataatgtggtatgtttgatttctcttgtgaaattatcatgaaaatgcaaaccttatctagaggtcaacaagtatttctttactgattacctactgcagattgtccccaacttatgaagcgtgacttaggattttttggctttagaatggtgtgaaagtgatctgcattgagtagaaaccgtacttccagtacccatacaagcattctgtttttcacttacagtac

SEQ ID NO: 67924 - DNA, 1544 bp, Homo sapiens
ttgcccaactgtaggctaatgttaaatgttctgagcatgtttaaggtagtctacgctaagctgtgatgttccataggctaggcgtattaaatgcattttctacttaagatattttcaacttaaaatgggtttatggggatataacccaatcataagttgaaaagcatttgtatatgcagtttgctaatcacttgaaaatgtaaaaagaataaaaatgcggtcatagtccttaaggaagttttggtcttcttacagggaaagaaatacaggcagctgtctatatccgataggctacagttctggaagtgtggttcttgaatcatcatcactagcagcagcagctagaaacttgttagaaataaatgcaaattctagagccccaacacagacctactgaatcagaaactctggaggtggggctcagcgatctgtgcttcgacactcctacctccttggtgactacgatgcccactagcatttgagaaccaccgatctaaggcaaagaatgattaagtgctagaagagaactaatgtgatatggaacatagagaggagtgattgatttcagtttggcagattgggaagagatgatatttgagttggaccttgaatgatgagaattttagtggatgggaatttggggaaaattacagtctaggctaaggaaataacctgagcaaaagccagagatgtgataatgatagtgtatcttatgctttagggggctgcaaatattctgtagaaaatatggctggtgaattaaacccttccctagattggccctgattccttcggggcctcagaactcatttgaccatttggtttgaactagataagaataatgcaggcctgcactggacttactcattttttttccttagtattaacatacatatccttttacctacagcctgtcctttcatcagagcacatggcagcctttggggtctttggtctctgccagatccatgcctttgtggattacctgcgcagcaagttgaatccacaacaatttgaagttcttttccggagcgtcatctctctggtaggctttgtccttctcaccgtgggagctctcctcatgctgacaggtagggaaggctcacagcttttttccttttttctttttttttaagatggagtttcgctcttgttgcccaggccggagtgcagtggtgcgatctcggctcactgcaacctccacctcccaggttcaagcgattctcctgcctcagcctcctgagtagctgggattacaggcgcctgccaccgcgcccgccaccacgcccagccaattttgtatttttagtagagacggggtttctccatgtttgtcaggctggtctcaaactcccgacctcaggtgatccgcccgcctcggcctcccaaattgctgggattacaggcgtgagccactgcacccggtcaggcttagagcttttactattaaatgcagatgggtacagacatagaataaactccaaaagacagggtattttctgaacacaaaagattatttttttcttatttcttttttcatcgga

SEQ ID NO: 67925 - DNA, 1100 bp, Homo sapiens
atcatagctgtttagttggttggaaagccaaattttccttctttttctctactttgctttctcagagatgaatttgattttgctcaagtctatctattgactaattcagagcaggacttgaggatatagttgatttaatctctacagttggccttggtttgaccaaatttggcctaaaaccctttcaggtagcatttctgcctctgttcttctctccaagtttatatacagcctggctttattctgctggcagtgctgacaaaagtactctcaggtttgaaagaaaggaaggagtgaaactctctaagtattggtggcaattaagcaaaaacctaatccttctctgtcactgagaatcttattaaaatgggaagttgtgattcatttggatcagatgtttgtttgaagagtgtgtgtggaatatttattgcctctttgctgctaggaaaaatatctccctggacggggcgtttctactcgctgctggatccctcttatgctaagaacaacatccccatcattgcttctgtgtctgagcatcagcccacaacctggtcctcatactattttgacctgcagctcctcgtcttcatgtttccaggtatgtggcctcgtgttctgaaatggccttgttcataagaatcacaatttgattccaaatttgcaagctaccctcattcgtgttttgtttttctttgcctgtttatgttgtgtaatacagaggacggctaagcaaattttctcatgtatgaagctgagcagaagtcagaagttcaacagttgtagatattggcaagttcagcctcacagttttctgttcatttgtcatttgtgttataagttaaaatttaacggtaatttttactccggttttgttttgttttgtttgagtacttctgtcgtactccttcccctttacccttgtttttcctcttggaagtattgaagtcccataatgagtactgctgattgtaaagcctcatcaatctcttatcttctggccaatccagatgtgttttagaatttaccggtgttagtggtctttttctcttaaaaaataacttttacctttttttttttttttttttttttgagataga

SEQ ID NO: 67926 - DNA, 1078 bp, Homo sapiens
aggagttctcactacccatctctagccactgttaacattttgatgtatatttatcaaataagaatgagatcatagttttttccctgatttttttcacttcataaagaatcaaatttctctgttacttagtattattttatagaaatacttaaaatgtatcatttattagttttttaaagtacagagatgtgtcaagatgtgtaagaaggcaagtagtacataatctcatgcagcaatattttaatatattccattttataaatatagtataattagctccttgtttttggacatttgggttgtttctgatttttttgctactttaaagtgtgctgtagtaaacatctttgcatgtttctatgattgtttttttaggataaattcctggaagtggaattgctgggttaaatgtgtggaatcatccagtcatataatgaagatactttaccttgtaggtttcaacctacaggactcagctgcttatttctccttccctcttttgtagttggcctctattactgctttagcaacctgtctgatgcccggatttttatcatcatgtatggtgtgaccagcatgtacttttcagctgtaatggtgaggatgccctcagtctggtagactttttcactctaactctgaggtgcttttttatctgtctggcagaattcagaaagtactgatgattgtgcacatgcttccctctgagcatttgagggaatgagttgtaagttgttgatcctttccaggaacgtatgggacactcatacattctggttgtggggtccaactttcttggattcgtaactttgtattatagaagcatttttgcactttgttggataatatgaccctgggtgtcttaaaacgggagatgatatttttttcttgaaggcttgggagtattacccagtgctagattgttagaggagggatttgaatttttttttttttttttttttttttttttttgagacagagtttcactcttgttgcccaggctggagagcagtggcgtggtcccggctcaccacaactgccgcctgctgggttcaagcgattctcctgcctcagcctc

SEQ ID NO: 67927 - DNA, 1050 bp, Homo sapiens
acactgattagactgatcatgcttcctgtctctgttaggtgcgtctaatgctagtgttggcacctgttatgtgcattctctctggcattggagtctcccaggtgctgtccacatacatgaagaatctggacataagtcgtccagacaagaagagcaagaagcaacaggattccacctaccctattaagaatgaagtgagaagcaatgttaagagtagacttgggaaactctgtgtgtgtgtgtgtatgtgtgtatgtgggcagcggggggtgggaggagtaaagtagagcactgtcctaggtggtcagaattaactcatatagcctctgacttattttgatcaatctcatctatatgaatgtgtctaagaagttgtcctgtgttgtgtgaatttagtttggttaactacacaattaattctttttccttgtttaggtggcaagtgggatgatactggtcatggctttctttctcatcacctacacctttcattcaacctgggtgaccagtgaggcctactcttctccgtccattgtactatctgcccgtggtggggatggcagtaggatcatatttgatgacttccgagaagcatattattggcttcgtcataatactccagaggtgaagatttgggaggggtgggaattgtgggttaggggcaaaggggaagacatttgatgttacagtgaatcatacagcttttagatgggtggaaagctgggtgaaactggaactttgcaactctagtcttgaatgagccttaaaggtgaacctccattcaattctgggatcttttgtagttactcttactagtaattatctagactttgcatgcacacttttattgatatgatgattttaacatgaggtagaacatcccagttataaaagaagaaaaaagttatagataaataatacatgttcactttagaaaaatcagaaaattgaatcaagaagaaagatataaatcttgtgtaaagtgatcaccttatgataactgcttttaacattttaatttatatcttttgagaatctgaagtgatttcc

SEQ ID NO: 67928 - DNA, 1289 bp, Homo sapiens
ggaatatcatttctgagacaatttgttaggaataaaaacttttaagagtctcttaattcttgtccatcgtatcatgtgatttgagtttccaccccatctttatagtaagtgatttttgcaattctgttaaaaggttatttaagaaaattgtctaatgacactaggctattgatgtggctacattgcacagtctcccacacctcccaccccattatgttagtataaagtgacctgggatgaagtgttgggaatgttggtttgttatttgtgctgagattttataattgtatataaatggaagaccaggtgccaggatttattttctggtttgacatgcattactttgtgaagaaattgattagttagccaggtgtcacttctgtcagaccaaagatgccttctctgttgcatttgatttttagagacagtgagaagcttgttatttccatttcccattctactttcaggatgcgaaggtcatgtcctggtgggattatggctatcagattacagctatggcaaaccgaacaattttagtggacaataacacatggaataatacccatatttctcgagtagggcaggtaagataaagggatgatctttgagtgtttggtgtacaaggtctaatgggaaatgtgtctgcatgaggggatcatatgacttgggattttgctctgagaattgtacatttgtttttccaggcaatggcgtccacagaggaaaaagcctatgagatcatgagggagctcgatgtcagctatgtgctggtcatttttggaggcctcactgggtattcctctgatggtaatatacttgattctgtttctagctgcaggacatagattctaagaaaactagatgaatatcctagttttctgtacttttactaatattttactaagatatttttctttcatgggaagttcctaagtatttgcaacttgaggtttgggtattttgatttttttctttttgtaacaagaggacataaatgtaaacaattcttgtgtaggtacagcatgctatatgattgtctaaggcatagaagtagttccacaaccagtaataaaaccaagctgaatataaggctcatgacaatgaacttaagaattagcatttttttagtggttttaagccatataatcattgaccagcttagaaatgttttatatggcctgacagcgtgtaaaaaaagagaacattttatatatatataaaatatatataaataaaagtgtgtgtaaaatggaggttaccatgtgccctatgattattggcacaaagat

SEQ ID NO: 67929 - DNA, 1132 bp, Homo sapiens
aaagtaattttaataattttaactgaatagtcatatcaaaacattattatttaatttaacatgtaaccagtatacccccttttggggtttgttttttttactaacttttcaaaatctaatgtgtatttcatacttacctagtgtgtattttatacttacagtacatcttaatttggactagccacatttcagctgctcagcagctatatgtagctaattgctgctatatttgatagcctagccctagctaatctataggaccaatctcagttgtggcttaagtctggactagtagcgtaggatttcaggagtataataatttctcagaaaagttgtatattttgacgaaaaatgctttgcccgtatgttgtcctcactatttttacaaattagagttaaatgataccaatccccattaaaaaaatgttgaggaattttcttagaaatactaacctgctttaactccagcaacttttgtgatgcagcagttctttttttttttttctcctagatatcaacaagtttctttggatggtccggattggagggagcacagatacaggcaaacatatcaaggagaatgactattatactccaactggggagttccgtgtggaccgtgaaggttctccagtgctgctcaactgcctcatgtacaagatgtgttactatcgctttggacaggtttacacagaagccagtgagtgactcataataatattaataacagtagtaataatagtgattactaatacacagtattttccatatgccaagcactagtaagtgctttgtgtctgttaactcatttaatcctcacagcaaccccaaaggcatatactgatattattgtcatattacctttatttttgttgtttgcatatttttttgagacagggtttttgctctgacacccaggctggagtgcagtggtacaatcatggctcactgcagccttgatttcctgggctgaaggagtcctcctgcttcagcctcttgagtagctgggactaaggtgcacaccacaatgcctggctgtttttaaaactttttgtagagatgaggtctcactatgttgtctgggctggtctggaactcctgagctcaagcaatcttcttgtcatggcctcct

SEQ ID NO: 67930 - DNA, 2748 bp, Homo sapiens
ttaggttaagtctctccttctgacttcaatttcttgattctgtactagggagaatttctgacatgaatgcaggtctttgacttctggtaggcttttttctctgatccatgcaagggttgctagtgtattagaggctctaaatgacaatcctcaggaatagagggccttggaagtcggctccctatgtctgtcttatcagagataagacattgactggcaagcatcatcttgcatagaacttaagctagggtaacacttgatttgcccttactacctcatgcccttttttgcaggctctactctcaacaaattgcaggctgaggaataatcatcaattagtagatggtttcctgaatccatatactgtctctctaggaaattagcactgtagaaagaagtgtgttctttttcatccctctctagagcgtcctccaggctttgaccgtgtccgaaatgctgagattgggaataaagactttgagcttgatgtcctggaggaagcatataccacagaacattggctggtcaggatatacaaggtaagcagatgctatacgtctcagaaagcaacttttatttttggagattggtttcaatgcttataaaatgggacatatatttctcaaatagggaaatttctcatgacacctgtgcttgaaaagtagcttgcaaactcactgaaaattttacttattttagattgttcttagagagtagatgatcccagtctgccatcattttggcggttgttgcagtgatacttttccagctggggcttgactaaaccagtttctgtgattatcaggctcacgggtggggagagtgcaggaaatagagaaaaagttcacatgtttatatttagctacattttcttctctctctgaagaacttaaggtatatagagtcatatagaaccacataggagtatatctctcatataagaaaagattgagaacccttgatctatgtggagggtagatcagtaatattggtcctcacagaggtattccaaaaggctaagcagagagaatctagtctctagtcagtgcttgtgtattcacagccctaaaccaggctgcagaacccaacataatcctgcccactctgggtgaatccattttagtagaaaatttctccaaagttgatctgattgtaaatattaaactgacatctttatgttgcaggtaaaggacctggataatcgaggcttgtcaaggacataaatgtcacgtccagctctgatatgcttcgcactgagcacatcacatttaggacgttgaagatttttttttttttttttttttaatatgcagtttgtaagaacaaaactggatggcatcagaattgtctggaagttttgtcttgggcagtatgggctgggccaaatgaaatgatttttataattctaaacaggttaccaaatgaaatgtcatggctttactttggtcaattaaaggggggaatttttttaaaaaatgtgccttatttgttttgacttataactgatttgagggaggcaaaagctatgctaggctgccagaaggacataagcagaccttgtccattctcttagctccctaaattagccaaatagagacttctttctcaaatcaggaaaactatcaaagaccaattcagatcctacatttacagacagttttgtcataaccctttgcattgcagcacctagtacaattccttggaaacagcgtggctcaataaatttttattgaatgaataaatgtgggaccagaagagtgctagaagagtgcctttctgggctactatgtctctgttctcaatgtcttttatccttagacgctctttgactttataaatcagcagttttgaagactcaagacaaacagtgaaattattggtttatcaatggagaggaagaaactcttccagcattacatatagagcttgatggtcagtaggtgtttttgaatcagcttaaatataatcatacatatcaatttgaaatggagcttttcagtactctcacttattcatgacacaggaatgaccctttactcaaaactcttgtggttgttcaaaggtgagcttctttttcccttagtcttagcctatgtgttgctgttgtatattgttaccaagttcaactacctaattttgaagctctttccaaataagatacaaattaaaaggggaagcattgccagtaacaggtccctagagagcagtgccagcctgcctgcaagaaaagaggagaaacttcttaaaaagttttaagcctgggcaacataaggagattgtttctatgaaaaataaaaattagccaggtatggtggtgtacacctgtagtcccagctactcgggaagatgagattggaggatcacttgggcctgggaggttgaggctacagtgaactgtgattgtgccactgtactccagtctgggcgacagtgaaatcttgtctaaacaaaaacaatttaactgggaagcacagtggtccttgaggacatttaatatcaggacaaagagcctatgaatatatcactgatgtatataaaccctaaggcgttaataaaagctaactgtttagtgttatccatttaagggaacaggaggaattgcataacttttagattagtcatagtggtgctcctaagggatatgctgttgtatatttgtatagccagggcacttagccttccaaaccaatttatataccatgttcttcaactgtgggtgagatttagcctcaagatttgatttactat

SEQ ID NO: 67931 - DNA, 2896 bp, Homo sapiens
tggtttctcggctccagcaccacgagtaccgcactctgaggtttacaaagcactctgcttcaccgactgtgatcctcacagtcctgtccggtggcctcacgcaggtggcggtgcagcctttcaggcccagagcggccaggagcgaagcccgcagccccgcctggaagcgcagcgcggtcggtcgcgcgcccctgaggcttggaggcctgggcttcccccagcagcgctcgagcaccgcccagtcgagcctcacaccggatgccacttcatatttgggcccagagctcaattcgcgccgatgcggtccgccgtccttaaatctcttcagccaggatctctccccgactgcaaagcagccctgggcgggagcggcaacatctccacgtcacccttttggagccgccgacattcagaggggcaggacacgggaacgcgcgctgtcttgctttacggcgcgggtgcgcgagtttgcggcagcgtgacgccctcaagttttggcgggaaaagcgctgcatttggattcctgcagtggtgggcaaaggacagtccggtgaggaagggcggccggtagagtagggaaggtttctaaagaaggagttcggggtctagattagtgagggagggcatggtgggagaaagttagcattgactagcgcaggggattggagagactcctgcggaggggcggtttcggagggtggaggaatggtaccaggaggttcccgttgtgggggcgggggcaggagggactaacccgctgctagctaagaaccccaaggaagagtcccagcccttcctttcgcctctgggggcagtttggccccgccccggcctttgggacgggtggggctgtggatggggatgggaattggaattgagcaattgggaggaggcgctgccgcaggcgttttctgccccataccgctccctatatcctcttcctctcttccccagacccccacctctccctcctccttccccagtcgttcgccggaaagcatttgtctcccacctcttcataacaacaattaatttcctctggggcctgaggagggcagaatttcaaccttcggtgtgcttgggagtggcgattgtgatttacacgacaaaatggtcaggtttagaatagttgttcgtggttgaaagacttggataaatgtggatgagatagaaggggaaggcaagagctgttaattttcgtgggcaatcctggggagaggcggggctcagtggcttcactggtgatcttacactctacatcttttctggattcctgccttttacagccgaggtgctcggtggagtcatggcagtgccctttgtggaagactgggacttggtgcaaaccctgggagaaggtgcctatggagagtgagttcttttaagcttgccttcgttttctgagtgcatattcattgttttggagtctcacactctggtgatttagaaagtagatgtttgagatccaagggttttggcaactgaagttacacagccttttgctaggattaaaaattttttccttccctttaaaaaaaaaagttttctttgtagagagctggaagggacacgaagttattgtttccatgcccacaaatggcttctcagggtttaagcattgcggttaatgagcaaatgagcagactctggagattgcctgcctggtttcagatccttgctctatcacatactggtcattgttttgtgatcttaggcaagcttcttaatgtcattgtgtacctctccttcactacctttagggtggcaataatcgcatctaccccataggagcttaggacagtcagttacacaagcacatatagtatgggattaatgctcttaaaagtatatgagtagaacatgtatatatgtgatgtggcttagaattatctcaatctattttatgaagcgtttattaaatgacttgtgtgacagcataatgacgtctttggagggttagctattgtatttcacattttagaaaagagtagtgtgtgttgagaacatagcagaaaccacttccttggtttctcctttgtggaaaaagtaatagaggtaaaatcgttttggatgagtcatgtttaatctttggaagttttagaagaaatggaattctgtaatgttaaaactcttttcctttttagagttcaacttgctgtgaatagagtaactgaagaagcagtcgcagtgaagattgtagatatgaagcgtgccgtagactgtccagaaaatattaagaaagagatctgtatcaataaaatgctaaatcatgaaaatgtagtaaaattctatggtcacaggagagaaggcaatatccaatatttatttctggagtactgtagtggaggagagctttttgacagaataggtatggaagaaatttaagataattattttaaacaagtttttaaatttgttttttaaatcttgggcatgctatttggtcgttgtcctttcaaaattgctcatgcaactgtgaaattggaatacattatctttaaaaaatttttccacctggtgttaataacataaaagcatatatagagtcaatgaaagaaaacttctttcccaagttatataagtgattttgatttaagattggtgtcttacagaatttaagagtgacaaacaagttttatggtacatcataaatgcagtgtatcctaaatgcaatgtattgcctacacaattttttctttgtagacattctagttacatgaaatcattgtatacattttatacatttacagatctaaaatagcatgctgtttcctcttggtttacatgaaataattgagaattttctaggattgctttttgtatattaagtaaattctatgtttgctattaatacttaaatattcgatgtagaatcaaaggattgatatttcagaac

SEQ ID NO: 67932 - DNA, 1544 bp, Homo sapiens
cctacctgatgaggggccttgctttactttcatctcaggtttagagtgctcttttccagaagggcagccccttctgactccagcctctttctttaatctggtccagactgttctgtgtgttgataatacttcttttaagttaatagaagaggtgaggcctttttctacttttagcatagatgatgatttattttatttttttaaatttctttttgtctattttgcttattttaagagaagttctacaaaccttaagtaacaccagtgattttttttcagtaaaacttaattcctgtaagtatatctatttgcaaaacatttttattcagtgtcatctttttttcttttggtttagataacctcaaaatctcagactttggcttggcaacagtatttcggtataataatcgtgagcgtttgttgaacaagatgtgtggtactttaccatatgttgctccagaacttctgaagagaagagaatttcatgcagaaccagttgatgtttggtcctgtggaatagtacttactgcaatgctcgctggaggtaagagctatttaatcatggtaaaactcctataaaaagtcagattagttatactgaaataaatgaaataaaccaaggaattcatgtttatataatagtttttgttttcttttttaagagacagggtctcactcttggccagactggagtacagtgagctgttatagctcactgcagcctcaaacttctaggctcaagcaatcctctggcctcactcttccaagtagctaggaccagtggtgcctgccacaagacatctggctaagttttaaaaattcattgtagagatgggatcttgctgtgttgtccaggctggtcttaaacacctggtctcaagcaagccttctgtcttggtctccaaactgttaggattaaagtaaagacatgagccatggtacccagcttttatagtagtattttaatagtgtcttgatcggtttggtaactgctgtaacaaagtatcatagactgcatagcttataaacagcaaatttatttctcacagttctggaggctgaaaatatgagattaggggtgccaacctggtcatgttttagtgagggccctcttcctgatttgcagatggctgtcttgctgtgctctctcatggtggacagccaagagagcagaagcaagctctattgtggtttttttttttttttttagaccagagtcttgctctgtcacccacgctggagtacagtgatgtgatctcagctcactgcaacctctgcctcccaggttctagcaattctgtcccaggctcccaagtagctgggattacaggcatgcatcatcacacccggctaatttttgtattttgagtagagacagggtttcaccatgttggccagactggtctcaaactcctgacctcaagtgatcccccaacctcagcctcccaaagtgctgttttttgggttttttgttaaatgaccagatgttgtgagatattgtgtctgttttttgtttttttgtggttttttttgagacagggtct

SEQ ID NO: 67933 - DNA, 1095 bp, Homo sapiens
tttattaaatgtatgtttctttctgtcttaatgcctcagtgaagaaaatgtgaagtactccagttctcagccagaaccccgcacaggtctttccttatgggataccagcccctcatacattgataaattggtacaagggatcagcttttcccagcccacatgtcctgatcatatgcttttgaatagtcagttacttggcaccccaggatcctcacaggtgagggaatttaattttttaaaagtaatggcagctctttattttttattgtcttaaagtccttttttaatgtgtaaatcttagatatataacttttaaatcacatgtattcttttttggtcaaggaagaaagagaggagggaggccttcatgcaaaataattttaagtcagactaaatagctatgatattactgtctttagtcctaatggatttattcatttgtcttctgtttgacatgtagaacccctggcagcggttggtcaaaagaatgacacgattctttaccaaattggatgcagacaaatcttatcaatgcctgaaagagacttgtgagaagttgggctatcaatggaagaaaagttgtatgaatcaggtgtgtttcattgattttcattataccttttcctgaagaagaatttaaatatttgagtaaaagctatcattagtatattttttaaatataggctgtggctcacacctgtaatcccagctttttgggaggctggggtgggcggatcacctgaggtcaggggttcgagaccagcctggccaacatggtaagaccctgtctctactaaaagcacaaaaattagccggcctggtggtgcatggctgtaatcccagcttctcgggaggctgaggcacgagaattgcttgaacctggaagacggaagttgcagtgagccgagatcctgccagtgcactcctgcgtggccaacagagtgagactgtctcaaagaaaaccaaacaaacataaaaatacaaagtaattagttaatttgaaaaagaaactatttaagtaaaatgttctttactttaagaaataatacttttttttattttgttttattttttaatttttaatttttagccact

SEQ ID NO: 67934 - DNA, 1019 bp, Homo sapiens
tgctgcaatactgtttttcagatgcttgctacagaattaaattaagatcgtagtataatgaaattcttctcataactaaatctattgattttggtcagtagtgttatgacaacaagacttcagtttagttgtatagtttattgttagtttccaaaccctcactgcctatggaatgtaatgacttaggtccagatataccaacacctgaaacagataggatgccatgtttatctgctctctgagctcagtgcagtaggaacagtgatgggcatgaaaccacatcagaattatttgtgtaacaattttctcttccaggatatttggtcttcataaacagaccgaaaagaaaatggtagctagacatacctaaagatgtttgtctcttgttaccactacaaagagattgattttaggacagaattttgtttttgtttttgttttgacataattttttaatactatttctaatatagggtgatggattggagttcaagagacacttcctgaagattaaagggaagctgattgatattgtgagcagccagaagatttggcttcctgccacatgatcggaccatcggctctggggaatcctggtgaatatagtgctgctatgttgacattattcttcctagagaagattatcctgtcctgcaaactgcaaatagtagttcctgaagtgttcacttccctgtttatccaaacatcttccaatttattttgtttgttcggcatacaaataatacctatatcttaattgtaagcaaaactttggggaaaggatgaatagaattcatttgattatttcttcatgtgtgtttagtatctgaatttgaaactcatctggtggaaaccaagtttcaggggacatgagttttccagcttttatacacacgtatctcatttttatcaaaacattttgtttaattcaaaaagtacatattccatgttgatttaattctaagatgaaccaataaagacataattcttgtgacttttggacagtagatttatcagtc

SEQ ID NO: 67935 - DNA, 1032 bp, Homo sapiens
accatttcagggctgtaccctccggctccctcgcacctttgggttcctcaagctcactgtgccttccaaacaccagaggacactatcaatttctccctgaagcaactttcatgaggcttctctctttcagaggagttgggagcaggctgcgcagtacactgataatgctcttcgaataattgtctctttgatctttaacctgagtatttccaatttcaacattctaaaaatgcattatttaaaaataggtaatacattgatgtgactaaatagtaagtaatagaaaaagaatgttgtgtaaagttgatctcccactcttgccagctagttatccagttttcatctgccaaataaaggaaaccagttttattcatttcttttatatcttttagattgattttcagtatattcaagcaaatataaatatgcacatgtatctttttacccccttttcataattggtagtatactatgcatactctgcactttgattttttgaataatgtatactaagtgtatagtattccactgtagtgctgtaccatgctttaattaaccagtctcttatgagaatttaagttatttgcactttttgatattatctgctgcaataaataatgctgaacatatttcatttgtgtgggagtatatctataagataatttcatgcaagcagaattgctggataaaaagtaaacacttttgtaattttgataggtattgctgaattgcccaccagaggagatgtaactattctgttgctatcaatgcttggaaaattcttgtctcaccacaactttaatactcaaatattttatcaaactcctggatgttgacaatctgataggtcaaaaatggtgtatcagtgttcttttaatttgcatttttcttagtatgagtgagattgagcactttttatatgtttaatagccattttcattttcttttgtgtgaactatctacatactttgcccatttttctattaggttgttggccttttcctttttgatttttttaaaggaggcattaca

SEQ ID NO: 67936 - DNA, 2084 bp, Homo sapiens
aactatgttcttgtcactctcaagccgtattaaagaattgagctgcctgaatgcatatgttgtcatctctaaccctttatacaaactggatcttctgacttagacacatttaaagtggttctttatcctcattttaactggctcccacttgttctgcaagatctagcttcaatatctcctctataagaacttgcctatagtcactagcccaaggcttggcaaacaccatggcccatgaactaagagtgctttttagatttgtaaaggattgtaaaaacatgtatgcaatagaggccatttgttgttgacacagcctaaaacatttactcattaatccttcacagaaaacatttaccaacctctgcactagatttatatgctttgtaagataaggtactgtgctttattccaggtaggtaactttgtgcctggcattaaaccaatttatccaatctttaattaaatgaatttaatattcttaaattctgtcttagaaaataagacactcagatgcagcactttatgaaaattcagatgagtagtgaatatcttatctgctttggagagaaaaacacaacaaatcagatacttgcaggattaggctttaatgaatttgaatacaaggcacaggtttccaggtgtatgtaaatacatctccattttacgttctttaatcgcttaatccttttggaccgggataagagaatatttgaaatttcttattaaagcaataacttccttaatagggctttagtctttttgcttttttttttcttttaagagctgatcatctgaattcctagtacttgcaagtaaatttttttttttttccttttctgtccacctaccattaggtggttcctagatcctggcaaattgtctatggttaaatgatgcttttaatttctgtgtcaacacagaccctcttcgttggtgtctccaaattagtattctcttcctctagtgtgtcattacagtcccttttggcttttgtttcttcctcatggaataaatgtgggtgctcaattcgtcccctacgtacaaaatgctggatccgggattccagtccttggcatttaggacggtccatgaggggcttatatgtgcgcatcttcactccttctacaaaggcactggtctgctttatgacagagggcttaacatttccccattctgtcattccatccatctttggtcctattccacagggtactggaacagtgtccagtccttgtagcatactatacaacatgtgagttttgacagcatgattagcccacagttgttgtaggtgggtaatattgaactcctgagcctcctggtcatagatccacttgacattttcaaacttacagtcatataagactagaggaaattctacagccatactagagaaaaagagaaaagaaagtttgagaatacataacatccatctaacagttctttaaaaactaagggttagttgcgttaagggagccgggtagggcgccaccattgatgttaatattgcctaatagctgagaaaatatctcaccatccctaaccttgaacacctttattacaataatgaaaaatgcaacaaatcatagatcaacctgatctatgtaaggtaaatgtcagtgctaacaagacatggctccatcatactgctataaaattaaaaacagctggtattttttccaaatttgttaatggcattgcaattttgtatagtatgagtaaaattattggtatctatctcagcctgttctcaaatgaaaaatcttgactattctttctttcctaccattttggaaataggaaattaggaaaaattcagaagtacagtaggatgactactcagtgatataaaacaagcaagatttaatatgaatagtttgttcattttaattttaccacatcctaacagtaatacctcttaacataaattcagaaacaccaatgatgtagaaattaatgtctttttacttaaggagcctggtcaaaacacctgcctctttactcatgggatagaacaatgagaggaaattaaaatacactgctccctcttacatgttcataacattctacaattcagagtaaag

SEQ ID NO: 67937 - DNA, 1078 bp, Homo sapiens
ggaggcggaggttgcactgagctgagattggaccactgcattccagcatgggtgacagagggagactgtcttaaaaaaaaaaaaaaagaaatagcatatcctcctctccaccgtaactgtctaaataacgaagtcactgattctgccttcatgaagctttactctgaattgtagaatgttatgaacatgtaagagggagcagtgtattttaatttcctctcattgttctatcccatgagtaaagaggcaggtgttttgaccaggctccttaagtaaaaagacattaatttctacatcattggtgtttctgaatttatgttaagaggtattactgttaggatgtggtaaaattaaaatgaacaaactattcatattaaatcttgcttgttttatatcactgagtagtcatcctactgtacttctgaatttttcctaatttcctatttccaaaatggtaggaaagaaagaatagtcaagatttttcatttgagaacaggctgagatagataccaataattttactcatactatacaaaattgcaatgccattaacaaatttggaaaaaataccagctgtttttaattttatagcagtatgatggagccatgtcttgttagcactgacatttaccttacatagatcaggttgatctatgatttgttgcatttttcattattgtaataaaggtgttcaaggttagggatggtgagatattttctcagctattaggcaatattaacatcaatggtggcgccctacccggctcccttaacgcaactaacccttagtttttaaagaactgttagatggatgttatgtattctcaaactttcttttctctttttctctagtatggctgtagaatttcctctagtcttatatgactgtaagtttgaaaatgtcaagtggatctatgaccaggaggctcaggagttcaatattacccacctacaacaactgtgggctaatcatgctgtcaaaactcacatgttgtatagtatgctacaaggactggacactgttccagtaccctgtggaataggaccaaagatggatggaatgacagaatggggaaat

SEQ ID NO: 67938 - DNA, 1240 bp, Homo sapiens
tagacagttacggtggagaggaggatatgctatttctttttttttttttttaagacagtctccctctgtcacccatgctggaatgcagtggtccaatctcagctcagtgcaacctccgcctcctggcttcaagcaattcttgtgcctcaagcgtcccgagtagctgggactacaggcatgtgccatttattttttatttttaactcacctatattgaggcttttggggatttttctctatattcagcagctcatcaataatctctggcttctccattccttggccaatcagaaagaggatagccatcatacatcggacttgatgataaaggaatgcctggccagtcacttcaaactgacataactggaaaggttcttgccatctcccctcacctgggctctggcccactagctgtacttgagcagatagaatagtcctctgaaaattaatcacaccgttggctacatccattttacacaagttcctgaaatcatgggtgccaacatacttctgagctgcataatccatggttacaatatctaaatcagcacgagggaaaaaatagcggtaagtccgctcaaggcagctgaacctagcactgaagcttggttctacaggggcccaggccaatatacggatgtctggagggagtacccgattgagaatgtgggtataacggatctcttcagcagcagcattagcctcctcttttacattaaagtcctcggaatccctgccccttggaaactgagagcgaaggtcaagtgagatcacctgtggagttagacaaagatactgggttttagagacacaaataatctcagtactcagtgtgtatacctagaatatcctagtattgcttgctttgagaaacagtgtattggcccttacctgtccaaaggcactaactcctttatctgttctcccacatcggtgatagttggatgtctgtctgctttctactagtcgagtcttggttagagcttcaaacagtttctcttcaatggtattatttgtgttttcctgactagcaaagccctggtatccccagcccatataggctattcttagggctacgtgtcttcggccatgagcactgaaatcaaatgcacgcttagtttttccagctcctgctgaattttctctaatgtttgagtcctccttatttttggcctgttcctttttaagtctttgcacctcttgctccagttctcgtactctttttaggagcttctcagtc

SEQ ID NO: 67939 - DNA, 1091 bp, Homo sapiens
caacactgcttttgtgattttttttttttagatcaaatcactcttttatggttaaaagcagggactcagtctgaagccaaactgcttgagttagaatttcagctccactacttactagctgagtaaccttgggcaagttatttaacttccctgtgcctcatgttattcatctgtgaaaagcagataatcccacagctgaaaattacatgaattaataaatgtaaagcacatagaacaatggcaggcacataaagtactccctaagtacctgttacataatgtgcattaagcagtatgccccatatcatgtagtttcaagcttttcttatgccagaactatactgtcctgttttaggacctgaaggtggcaagacagtagaaagcaggagtaagagtggaaatgaaagcaggtaatagattccctagaactgagttaatgcccctctaaactgttctgatactaccctgtattgaatttatgatggccttagccattctttctccatttgactgctataaaacggagataagggaatgagcaatttatgagctgggaatttattatcagaaaactgaccaatgttatctcttgcagaaggtcctacagtgtaggggaagcaatggaagaacttctacctgatggacaaatatgggctaatatggatccagaagaacgaatgttggcagctgctacagcttttacccacatctgtgcagggcagggtgaaggagatgtcaggagagaagcccaatctatccaatatgatccctacagtaaagcttcagtagccccagggaagcgacctgctcttcctgtgcaactacagtacccacatgtagaaagtaatgtcccttcagaaacagtctctgaggcctcccaaagactccgaaagccagtgatgaagagaaaggtgctgcgcagaaagccagatggggaagtattagtaacagatgagtcgattatcagtgaatcagaatctggtacagaaaatgatcaggatctctgggacttaagacaaaggctgatgaatgtacagttccaggaagacaaggaatcttcatttgatgtttcacaaaaatttaacctacca

SEQ ID NO: 67940 - DNA, 1082 bp, Homo sapiens
ttctaatagtaaatgtttttgtctctcaatggtaactttcttctcatttaactaggtataaaatcgagccaagatcttcaatcttttagttttcgtataaggatagcagaatttgaaaaattaccttttttctattattttagcgtagcactacaattcctccttttattgctgtcccgccacaggcccagattctgccctgtgggcggagaaacggtagctggactagaaaacctcaggtagattctagcaccaagctcggttctcagaactacatttcccacaaacttggactacacctcccatgagggctcgggcgcctgcgcagaagacgcacagtgacagcttcctttctcggaaacgcggcgcggccggctgccggaaagtaagtgtgggatttttggagtgggttactttctgggttccacaggggaagggacaaatggacacactgctgaacggttgtctgttgtcttctttttgccctctttcacatactttggtcttttcaggaaagcattgccgtatggaaatgagacctcgcttaagaccatgtatttttcttttgtgcctggtactttctggagctctcggtggaaactcgccgcagtagggtcgtctttaattccgttgtgacgggagcttcagtggtacttgtactgtggagtacaaaagtgctctgctgccccacttagaattgggtgctcataaaacagtagaagttgagaacccaggagtatgtgggaggctgtggcagcaattttcaaattattttggggattgccttacatacagaccacgattgctttctagtgatcatagtgcgtgtctgctaatcctttggacagtactccctcttcttccctttggattaatataaagtttatcaagaggaatgctatttatgtgttaacccactggttcctgagattaggacttttttttttttttttttaagactgtcgcccaggctgagtgaagtggcgtgatcactgctcactgcagcctctacctcctgggctcaagcgatccttccacctcagcctccaactagctgggactgcaggcgtgcgccatcttgg

SEQ ID NO: 67941 - DNA, 1028 bp, Homo sapiens
tcctgatacctttttcagaatgtcacccttgtaaataggcacctaaagccaagttggtcagcagagctcctgaccacggctgcctctgcgtgacaaggacatttgcagctgcctttggaaggctcttcacattaaaaaacaataattatgtaagtgtgtttcatagcttgagtcaagctttcaaggatcactgctcctttgtgcattgtgcatccctttggggaaagaaacagaaaattattctctttctatagagtcaagcaattccagcagaagtgaagaaatgttagtttcccagaaatcgcagtggaatagaatacaatactgtgttaaccaactttctgtataaatgcatcagtattcccttacatatgtctatatattttataatagaactgttagtgaaaatgtgcttgtttaagctgggtcactatgcaagagttacttccagtagaatgtagtgaatgtaattccctagtcggatattagggatgctgtagacccaagttctacattccagatgtccgtgcctatagtatactggatttattcttcatgttgcttaaatgcagttagctctggagggggatagctgcatcccttacttctgtgactagcaaaggacaaagtcccagcgcacagaatatgaaaacataccctgtgttagccaatcaagttacagcaatgctgtcacaaagggagttttagaaaactggggagtcattgtccgtagacagccattttgatttaggaaacaggtgtattagcatgagccttaggtcatgaactgcttttaaagattgagtttgaatatgggatctgtccacgaggaagagaaaatggctttacctttaggacaatctcattgtggactgctttatttatattattagtaacgctgttttaagtgttattctttttattgtattttatttataaaaaatgcctttatatattgaaatatataaatatatatatataaacacacacacacacacacacacacacatatatatatatatatataa

SEQ ID NO: 67942 - DNA, 1033 bp, Homo sapiens
caggttcatgtctgtcttcatgcttaagatttggtatttccagtaacttgaacgagtgtaactgctagcaacagttgattagacttttactgatttttctttgccccagaaacatatcagcccatgtttaaaggatgcaaatccaaataattcttatcttcattgcctaacgttatctagctccaggatactactggtcagtcctatgtgtttcctacctaacatgtccaaatcaaagcccagtgcaatgtcatctccagacttttcttactcccaattataggggggaaaaaaagtgtcactaaggctccaacttccagtaatggtagaatagcttgatcatcaacagataataatgataaaatctggataatttgaaagtattggagaataagcagaagcaggcagaaactgaataagagtctacccttgaaataaaatgtgtgagatttatgagtttatgggtttctgtctgaaagcattctccaatcttggggcaaggatacaagcagaagctatcagagaactgagtgtgatgctaacagagcagccagaaaattaaaaggaaaatctagtttaaaaaaaattattatatatgtgaagaaacaggaaaatgtgataattacttaagggaaaaaaagtcaatagaaacagactctgagatggacccagatgtcacaattagcagataatgactttaagcagccattataaatatgttcaaggatttaaaggaaggtatacacataataaatgaacatatagggaatttcagccgataaacagagccggtacaaaagaccaaatggaaattccagagctaaagagctcagtaactaaaatggaaaatttactagatgagcttaacagctgttggagaccacaagttaatggacaagaagatagatcagtagaaattgtccagtctgaagaacagaaagaaaaaaattaaagaaaacacacattgtacgtaaaggcaggaagtaaaagtagaacagaattgacgtgaaatactcagtggtaataaattcca

SEQ ID NO: 67943 - DNA, 1046 bp, Homo sapiens
acccagctaattttttatgtttttagtagagatggggtttcactgtgttagccaggatggtcttggtctcctgacctcgtgatccgcccgccttggccccccaaagtactgggattacaggcgtgagccaccggagaacgttaattatcatagcagttctttcaggcctaaggtttgatctacccagttggtttgctaagtattaaaacaacaagttgtccagttcacctgagctttttcttccagcagaaaacaggcattcagcttctcttccatctatggtaatctccctatttccctaagaaattcagagtgctgtgttgaattttaaaaattgatcagtgctttccttttggggaagttatatatctccccaagtctgtctcgtacttctaagatggagacctagcgcctgttgtcagggagtccagctttttgtctttctttataagctcgtgtgtgtctgtcaacttgccatgttcaggaatacactcagtcatttgttgtcactcaacatttactgtcatgttttatgtgacagctgctgatagattaattcccaaaaggaaactcccactctaatgctgcggtcatcgcagcatccaacagagcagatatcgagaagggaagacggccatggccctggagcggtgccatcagggttctttaggtagtaactgataagctcccgaaaataagagctgggtcagcaaaatgacacagtgactagtggaaacagcagaggtgagtggaattttaacataaactactggccgggtgcggtggctcacgtctgtaatcccagcactttgggagactgaagcaggcagatcacgaggtcagaagttcgagaccagcctgaccaacatggtgaaaccccatctctactaaaaaaacaaaaatcagccaggcgtggtggcgcgcgcctgtaatctcagctactctggagcctgaggcaggagaattgcttgaatccgggaggcagaggttgcggtgagtcgagatcgcgccactgcactccagcctggcgacagagcaagactctg

SEQ ID NO: 67944 - DNA, 1038 bp, Homo sapiens
atggcagtgaagtttttggaatacagttaaatctaatgcagaactctcattcactcctttgtgaatatgggtcagtgatattcacaatgacgttgctctgggagttggttagaatatactgtgtgcccatttatggttgacatggctcatgtgtatttgtgattatttggctactggtctgtgagtaccttcagcattccttcttcttttctttttctctgacactccttcctgtccagggtggtggaatgtacacggccgtgcctcagattgaccctctggagtgtgttaactgccgaaattgtcgaaacaacaataggtatgttaataatgtgtctgcacaagctgttgtgaataaggcatatgcatccttttatttttcccttcagcaaagaaagttcttggaattttacctaggatataaagttcaggatttgcaatcttaaatttaaagctgttactaattttttgcctctgctttccaatttttgtctttttgtgcctcggtttcttcagctatatagaaaccatcttaaaggctctatttgtcactgaaatattattataaggcttaatgtttttgaaaattttaaattagagtcattctctgttataaagactttatcttttctcaccttttattttctactctatgttatgggatgttatgaggatgaatgacagtgtttctgagtgttggggggaggggggaaccctctgtatatagtaatttttttcacagtaatgttactgaaattttcctaccagattatccagtgtttttttttaattcttaaaatcttaagaaaattaagcagcaaacccttgctttgaattttgtgttttaattttaaaagtggtatgtactcacaatatttcaaacaagatagaaatatggagagcaatgtgcatttaacacataggatactcggcacactttcctacgacctctctctatggtaatcccaaggattaccaagctttttgttgtattaaagttgtttcagaaatcttagttctttcttttacataatgatg

SEQ ID NO: 67945 - DNA, 1127 bp, Homo sapiens
ccatgatggaaagcaggtagtgaaaacttgtctaagtcactgtcactgaatgacacttcaccgatgaggataacgcagccctgtttctgtacctgatggactcaagactgctccagcatggcgtcctctccctggagtgtgtctaggaatacgtgtgcttgaacatcgatgatggccctgctttgaaataacagtgaagtaacctagaaccccctttctcttttctcttccttcagttctcttcacctcactgtcctacttttcctgttatctcagctattataaaatagggtaatcaaatcaagcagagagtttagtctttggtgggaggaagttttttggtttcccctttggctccagaataaggaaatgaaagaaaagtgagggaggaccccagcaggcacttccagtggctgttagccagttctcacgcatgctccccttttagttaccagttctgggggaagaaagtactctgtttgtattgaatgatgccttccaagagatagggggagagatggtggctgcatcaggctgaaatggatggtgatcatttgattttctaagtggttttaatgccatcgcctttaattgtgtgagtgcgtgttgaatcatgaaaagagaagtattaatctgaaagggatggtgatcatttgattttctaaatggttttaatgccattgcctttaattgtgtgagtgcgtgttgaatcattaaaagagaacattaatctggtcgtcccagccatattaatcagattaaagtcatcctactttgtgacctgataatgtttaaaaatggaaaattctcatggtggtgttcattcagtcatttattcaaaagataatcatcgtcttctgtataccaggcactgttctggacagtggagatgtaatggtaaataaaataaacaccacctctgccctctcaaagtgtgtagcttagtgagaccacaagcaggtgtactgagactacacacctgggcgagagcacacagtaatgtgggcagctaaggaaaggagggacacctaatccagccttggcaagctctcctaccttcgaagaatttatccagactccaacaacaaatcctgtacagtttggacactctagtttctaagagatac

SEQ ID NO: 67946 - DNA, 1228 bp, Homo sapiens
aaggagtttttgttccatccataagtagaaatacttttttttttttttttttgagacagaatctcactctgtcttccaggttgaagtgcagtggcgtgatctgggctcactgcaacctccttctcccggcttcaagcaattctcctgcctcagcctccccagtagctgggattacaggcacccaccgccacgcccagctaatttttgtatttttagtagacacggggtttccctgtgttgctcaggccgttcgcaaactcctgagctcagacagtctgctcacctcggcctcccaaagtgctgggattacaggcgtgagccaccacgcccggcctaagtggaaacacttttatttcaactctgggagttttctccaagtacagttaagcagataatcatatagcagtttggattagaccaagtgcatatgttcctttgcctttaggatttctctaaagtttgtggactaaaactttggcacatcaagtttttaaactttggagccctctttgtgactcattggtggtcaggtcatctcagtaacaagagtaaacagactggcttgcattcctaaccagacctccttcagagagtaaaccatttcatggagtctgtattcactctgacatcatgttttcctttatatttcaactagtgaaacgtgttcctggagcttctgaatatcctgtcaaagacttgagtacccctccaaattctttgggaagtggaggaaatgtggggcctgcaaccagccctgccagaagcagtgacatgttatatctgatcgttggctgtgtgctgggcgtcatggtcctcattctgatggttttcattgcaatgtgcctgtggaagaatcgccagcagaataccatacaaagtaagtcactcataaatatctccttctctttttctaaaggtgggtagacaaatattgtcagaataaatattgatttctaacactgttgtatattagtgtcatggtatgaaacacattagatactcttcattcagaggagatgactttaaaactgttctagctgtcagccagagtaagtggagcatcaaattaaattgcccagcagacataaacaccaaagccaaaactaagcaggtctctaagtaaatagctgacttattgctgggaaactccggctttgttggaccaccaaagaggacgcatatttgaagcctgagctctggaattgctgtaggaacacctttacactgg

SEQ ID NO: 67947 - DNA, 1056 bp, Homo sapiens
tgtctttcctgttcgtcatgttcccattgccaccttggctctaagactagcactgctgatagctcgccacagttctgggcatcacctttaaagtgttatcatatctgaccgtgtctattttcaggaacaaggaaaatttcccccaacgtcctctactagatcttcccaccagtctcattagccacaattcagccccacacagcccctaaaccattgaccagatttatcccagagttctgtggggttgaggtagacacccaaacaaaattggagctctcgtaacatgataaagaaggctgttgagtgagctgggcagccatcagggtctctacaggtgatcttattattcctttttaaaaatgaggacatgaaaaagtacgtttttaaaaaatgaggaaatggaggctccaaaagattgaatgataagccaaggcttagttccagcttttaaactctaaaccatgtgtgtttctgctgcaatactcacatcttaagcccatatttaaacatatatccatatacctttagacttaccttgaatttcatttgtttagcatatatttgagtgcctttttggaccagacgctgtgatgtgttcatgggatacttggagtaaagttaaataaaaatgaaatttatcatctctgtccccaggacatttaagaatctagccagacaaaacataaaacattataactgttatttataatagtataatagtatagctgtgattacaatagtatacctcattttctgacatcagtagggaatgaaaaggttctacctacagactttcaggtcagtggaaaacaaaaaacatctttgaaatgttaactattcatattgaatgacttttacgtaattacatattacataattcccagcctgtttacatggaagatctcatgtgtacttcaacctttaaaaaatgactgtaggttcttgtgaacaatgacggttttatcttgagtaattgaggaaggttttcagggatgacagaggcgctgaagcctggccgttttcccttcccaccgaagatcagagactgctgtgatg

SEQ ID NO: 67948 - DNA, 1125 bp, Homo sapiens
agagattaagggaatggagtccacactgaatgagaaggagaaagatgatggattgggtgtgggcaccagaagaccatttaccaagataagtagtaagagtttttaggtgaagattatggattcagttttggaaatgatgagtttggagttgtccaagaagaaataaccacaagaaaagatttatttaatattcaaaacaacctaatgaggaacagatttccacatctgttttacagattaggaaactgacacatgaggaggttaaccatgcacgatgcctcagatcgtccagaaagtggagaaacggcttgctacccaagtccgcttctaactccagtgccgtctttcttttctaccttgttaacagtcacatgctatttcttttagatatggaaggtattattttccgtgcagacattttccccaataactttctttttcctatttgaactgtggtgtttggtgagttttgatttcagacgaatcaacataaggaagttgtttggtttttctagtattaaaaaagattcactaaccatactattcattctgttttcattgctttctaacttgaaaggaatacagtaagtatcactcagcattgcctgctttgaatacattcctcttttatcccttaagcaatttattttttttaaatgctacagttttctccatacaaataccacattcaactttattttcttctttcgtatgtatttgtatggtgggttgaagacatgttgaggtggaagggtgttgctcaattgaggagcatggcatgggctagagatggggctccctagtggctttctcaaagtaactagcgtcaccatggcccagagttggccctccacattccagctctagaaacttgattgtcagcatgccaaaagatcactggtctctcaaaaaccggctcatgtctatccagttcacagatgatcaaggcaaagcagaatggcaattacaaatttgcaatgtcactgtcatacagaccggattatttctgtcagcattctttccttgtaggaaccaagtgggaagccagttacaaccacaagattgcttgttgtgttagcctgtttgtgttgctataaaggaatacgtgaggctgggtaatttata

SEQ ID NO: 67949 - DNA, 1661 bp, Homo sapiens
acaaatgctcattaaataagctacttctaagctctgtgtgctagggacgaactgtggatacaagaaggcatgagtggagaggactaaaacaaatggttacaatatacaaataattacggccccataccctgaggcctcactccctcagttccttcagacccccatcagatttcacttccttggaaaagatagccctcatggtcctatctaaaataatatgcctggtgctctctggcccctttatttcgttttgcttttctttatagaattgatcacacctgatactgtgttattcatatttctgttagtttattattgtttgtcttttcctctgacctccccacatacccctactggaatgccggctgcatgcatgcagggtttttgtctgctcttttccttgccgtagcacttgtgcctggccattgttggcagaaagtagccccttaatatgtatttgtggaaaaaaaatgaatgactagacagtgcaggaacaccatgtgaccagtgctgtagctagaggtttgccaaagtcaaagcatgtttcttgtgctttgagattcactaccgttaacatgcttctgctgggtttggtttgctatgctagttctgtagacttttttttctattctgccttgactttccctttccttcatttaagaaattttccttgattgcttctttaccgctaatctcatgtctaaatgtaacgcaggctggccggtggctcacgcctataatcccagcactttgggaagttgaggcaggaagatcacttgaagccaggagttcaagactagcctgggcaatatagtgagacccccatctctacaaaaaatttaaaaattaactgggtgtggtggcatgcacctgtagtcccagctacttgggaggcttaggtgggaggaccgcttgagtccaggagttccaggctgtagcgagccatgcttatgccactgtactacagcctgggtgacagaatgagacccccatctctaaaataaaataagatggaatagagcataatgatcagcctttgtgagttttagttgtgctgtggtgtccttcataaagggagaggcctaactgcactcccttccttcctcagagaattacttaatccttccatcaggaaatcttcagattttgaatgtatccttagaggacaagggatcatacaaatgtgcagcttataatcctgtcacacatcaattaaaagttgaacctattggccgaaagctccttgtgagtcgtaagtatttgggagaataatggtaactggaagaggaagagtcctcataaaaagttgggcaatgatagttcatttttttttcaaatcctgtttgtttatcataaaaagtcttaccaaaaaagtaaatacaggctaggtgtggtgggtcacccctgtgatctcagcactttgggaggctgaggcaggtggatcacctgaggtcaggagtttgagaccagcctgaccaacagggtgaaaccctgtctctaataaaaatacaaaaattagctgggtgtggcagcacatgcctgtagtcccagctacttgagaggctgaggcagtagaatcgcttgaacgtgggaggcagaggttgcagtgagctgagattgcgccactgcactccagcctgggtgacagaatgtgactctgt

SEQ ID NO: 67950 - DNA, 1038 bp, Homo sapiens
ctcctgagctcaaggattcacccgccttggcctcccaaagtgctggtattataggcgggggccccagggcccagctgcactttgctatttcttattaataggattgatattgtatctgatttatatcatcagcattcttgtcttttgtaccctaattgttaagtcctaggctaacatgttgctcttttttacttccaacaaataggcttataagaattttgctagaacttttacaagcatcaagaaccataacatatataaaataaaagattgcctttagttataaagatacagatgaaatgtgtttaatgtaatcttctttctctctcctcttttctcccctgctttctttgcatatggggaatattcccttgtagacttggcaccttattttacttctgagccgctctctgctgtccagaaacttggtggacctgtagtactgcattgttctgctcaacctgtgaccactcgtatctcatggctgcataacggaaaaacattggatggaaacctggaacatgttaagattcatcaggggactctgacaattctttctctcaactcctctcttttgggttactaccagtgccttgccaacaatagcatcggtgccattgtgagtggccctgcgacagtatctgtggcaggtgagtttaattttgtccctgttaggtatgggttttcttgaaattactgttagtgcttatatttctgaagaggggaaagaccatgggctttggtgtaaagcatataggagtttttatctcagccttgactcttgctgtgagtatattgtggaagtgcacttagacctctgtgagcctggcctcatgccctcatcagtaacaatgatatggaaatgatttttttaaagttacgcagttaggacagttttttttttttctttataatctctgcagctttgccagggaaggacactttttaaatgtgaattctgaacaatttctttgtgagtgcttggaaatccatgatatcattaacaacaaaagctgttgtctactctgacagttattt

SEQ ID NO: 67951 - DNA, 1042 bp, Homo sapiens
aagtgttatttggaactttagtctttctttttaggtttattttaggttataattgcacagttgtatgtgtttaggaatagattaaaatagctaaattctaagggtgctttttttttgtttttttgcttttttgatctttgacatttctaaaccacaagctctgcattctagatactattgacctaatggaaaacattgaagcgcattttgcctaaggtaaaattgactccctggtatcttatatttttaaactcattcttctaaagttcttctaaagaagtcatttcattttcttttcccctagccactgggatccttgctttttaacgcttttctttagagcaggcagaatacttggatgcttagaaattctttaacggtacatcctggctgaatatgaagtatgaaagccctttccaattatatgtaaagaagttaacgaggaggatgttttagttcgttatttgtgtcttggttatagaatgaatacaaaatctgaattgggatgctctttctcttattttaactgttgttccatggtgcccctgcacccaaaatggggccgattatattgaaacaaaatttgtttttcaatttcttggatgtgttacaacatgaattcaggctttgcagttttaagtgattcctttagtattgcttttgtcagttgttaactatttctgttttgttttatatcactgtgtaatgcaggccaaaacaaatgttttggcatttaatgatagctaattggtgtagattaaaataattattaactgtttaatgggatagtttaaaaatgactttgatgacttctgatgaccatattgagaaggaaggaaagaaaaatagatgttcctcctcctctgttgaaatgaagactgagttgtaatagcagtggagtgcagctcccagtaagaggtgtgaggctgtttattttcactctggagatgtatatactacagaaggaaaactctggccttgcttaacctaagcaagtcattacttatctacgatctgtcaagcaatttgattaaggttgaca

SEQ ID NO: 67952 - DNA, 1034 bp, Homo sapiens
cctccttgaaagtaatatccaaaattatcttaaagaaaacactatctgtgttttacttgttattttagggtgtgtcttcccagataggtagattgttagggaaaagataaggaagtgattacccttataaagtagaaactataacacttggctagattcacgtttccttagctgtacgtgaatacaggacacttaattcattgtgattacaggtgtcagctggccatggaatcagagcagcagccaccacatctcaaatgctacaggcctttaacaaccaagaatgagaaactgatttttgagtttttcatttgtgcaattaaggattttttttccttcatgttgaaatgtgagttttctggaaaaaaaaaaatttacatcgagtaggcgaagtccccatttgcttgtaaaggttctttctcattcactgagaaatactagtgtctttttccgattcacctagagtgaatgtatgctgcatgtgtacttgggcaatttaacagtaactaatatggtgtcagaggagtgaagtattgctttttgcagagccaggtccttgtctgtgtgtgtgccctgcagactataagaatggaggctccaggggattgggaaagaaaagtcctgacccaggctgtgcatggcgtgcacagacaggcttaggaggagccacggcacaccccgtccttggtcccctgctgaggagtttgtatttcggcaattacaaatcttgttttgtggttctttttattctgtatacagcataattttctcctttcctgtttctgataatgatcatttcttaaataacttttatagagccctttgtattttggagtattttacagacttttttttgtttgtgtgtgtgtgtgtgtgtgtgtgtgtgtgtgtgtgtttgctacttacaggaaatgtatgagattgtaaaatctttgttagaatggaaatcatgaagactaaatgatcgagcattgatatcatataaaagttttaatctagttcaaagttaggtgtccttcaaaatacctctttcg

SEQ ID NO: 67953 - DNA, 1030 bp, Homo sapiens
ttgacttaagccttgggggtctttgtctgtaaaatgggtataataacagaaattatgtcttaccattgttgtgggattaaatgagataatgaaagtcaagcacttggcatatagtaaaacctctgtaaatgttagctgctgttatttttattaactcctcctgtatatgtaagtgtacatgtatttctcagaagctagtaatagtgcgggcacgtgaaacaatacagctttcttaaatttgcagctgaaacttagaaggcacttggacattgtgtgtaatttttttccagttgaggtgtaacatagtaatatcacaagtgtacagctaatgtatactaagtgaacagctagatgaattgttacatatgcacatgtctgtggtaaccagtacccagatggagatatagaacatttccttggccttagaaagctccctggtgcccatcccaggcagccctccctcttgctagcaggcagcagctattctgaagagttggaatagatgagttttgcctgttcgtgaactgtatgaacatggactcctacagtatgtagtcttatgttggagttcttgcactgctcaataatgagcattgtaatagacataagcctgtgagatttattcatgttattgaataacatttatttatgtatacagtactaattcatgctttgtaaattgttgtagagtcttttgtgcggtttgaaattcataataattcattttattggcacattggatacacagtctttgggggaaaaaagaaaataacacttcttcctacattactagaaaatcagatcccaatggctatcttaggaaaacaaccatgacctcatttttattcacagaactgggtttattcactacttgaaggtataattaccttcagttacaattccataaaccaaatactttgaaaactgtattcatttttatgtgtgtgtttttaggagggagcctcaaaataggggaaaaggaccatctaaggtagcttatatccttcatgcttaggactaaatgccgtaa

SEQ ID NO: 67954 - DNA, 1352 bp, Homo sapiens
gtcagggtatatacagctgaaggcagtaggtaggaataggaactaatgtcctagggctttgttctaaagagagcaggtaaaaatttgttgactatttcttgggcttgcttcttattttcccacttcgcccatctgccttcatgactttgtagacaatttcatgtatggttttgtcgaaatgtaagttgaagtaaaattttccttctgtagaatttttttttttccacgaacgtttagactaaaaattggtgattgtttcgaagttaaatactagggaaatgatttcaggaattaaatattatcgtagtaaaaatcagggaagcgttagaaaataaataatgagttgaaaaatgtgttgctttaacgtgtaatgatatgagccagcgccttgtgatcagctatggcatgatgtagaagtatgggtaagacaatacagtggagctgtagatgagctgcgtacatggtagcccccctttaagtaaatgaacttaatacaaactaattagattagaaacagaatttggagtatggttgccaaatattttgagttgaaggacttgcttttttacagtattttttaatggggaattttttcaagaaatttcgtgaacttgaatttgagaatgttttatttttacttaaatttttatattgtatgtaatcattccatgtgataagtttttgttgtgtatttggcactaactcactttcaacagcacaggggagggctttacttgattcttttttgttaaaaagaagggatggtgtatggaatattcttaatgtcacttgaaaaatattggattacaattaaatgaaaaactggtttcttggtttttttttttttaatccttcaagttttccctcattgcttgtgctctttcccccattgtcaggcttaaaacatacagtatcattgtcatctgtctcctgaataatggtcctgaggtgatattattaatgtggctttttaaaatcaagctaattatacttgcctaaaagagccacatgtgtgtgattctagctgcctggtgccttttgagagccctggagacaagctagtgaatagagctgaaaattcattctgtatttgattaaatggaacagactcgctgctccttaccccagcgggggctatgagatctcttgatccccgaagcggctccaagaccctgggaattccattagcgagcacctgaggaatttctgccctgcagtgccttttttgtatgtgtgtatgtgtgtgtgtgcagagggagtggagcagagcggggattggggggatgcgggcagggggggttgagggggtggagggaaggctacattagaagactccatatgttggcagatct

SEQ ID NO: 67955 - DNA, 2069 bp, Homo sapiens
taataatagttaatgcttatatagttccttctgtgcaccaagtattattttaagcattagtcccaaattacaaatgagaaaactgagacatgaagtgccttgaccatagtcacacggctagtcagtgtcagagctcatattaaaactcaggtaatctgtgtctagaggctggactcttaattattacacattaatgtctccctacaataatgggaagtatttttattaatatcacttcaaataaattgatcagttaaactgatctgttcttttttagcaccatttgctcgcagtgccgcctcctgctcctcctgccgccactgccgccctgagtcactgcctgcgcagctcaggcctcctggcttcccatactagctgccgatatttggagttcttataacatggcagacactgacaatctgaacttgatcgagatttggatgatgttgaagaagtacatgaagaagaaactggtgaagaaacaaaaatcaaagcacatcagctaactgttcagataatgcaaagtcctcagattcttgcagtccttcaagaaagacttgatgttctggtagaaacaccaacaggatacactgaaagcctgcctagggtagttaaaagacgagtgaatgctctcaaaaacctgcaagttaaattaaatgtgcacagatagaaaccaaattctatgaggaagttcacgatcttgaaaggaatatgctgttctctatcagcctctatttgataagcgatttgagattattaatgaaatttatgaacccacagaagaacaatgtgaatggtaaccagataaagaagatgagatttcagaggagttgaaagaaaaggccaagatcgaagatgagaaaaaggatgaagaaaaagaagaccccaaagaaattcctgaattttggttaactgtttctaagaatgttgacttgttcagtgatatggttcaacaacatgatgaacctattctgaaacacttgaaagatactaaagtgaagctctcagatgctgaccagcctatgaattttgtcttagaatttcactttgaacccaatgaatattttacaaatgaaatgctgtcaaagacatacaggatgaggtcagaaccagatgattctgatcccttttcttttgatggaccagaaattatgggttgcacagggtgccagatagattggaaaaaaggaaagaatgtcactttgaaaaccattaagaagaagcagaaacacaagggaagtgggacagttcatactgtgactaacacagtttccaatgactctttaatttgtttgcccctcctgaagttcctgagagtggagatctggatgatgatgctgaaatccttgcacagacttcaaaataggtcactttttacgtgagcgtataatcccaagagcagtgtcatactttactggagaagctattgaagttgatgatgatgtttatgatgaagaaggtgaagaagcggatgaggtaatgtttaccaaatgagcaaataattctctgtgtttaacacattgagaagcaaattgaatgacttatgtattcctttgctataatcattctgcaatttgggttaaaaacattttggaggccgggcgcggtggctcacgcctgtaatcccagcactttgggaggccgaggcgggtggatcatgaggtcaggagatcgagaccatcctggctaacaaggtgaaaccccgtctctactaaaaatacaaaaaattagccgggcgcggtggcgggcgcctgtagtcccagctactcgggaggctgaggcaggagaatggcgtgaacccgggaagcggagcttgcagtgagccgagattgcgccactgcagtccgcggtgcggcctgggcgacagagcgagactccgtctcaaaaaaaaaaaaaaaaaacattttggaaaatatgattttagaattctacagccaaacagtgtatgtgtaaagtttcaataaataaactgaaaaaaagaaaaaactttgttgagcaccttttaagtataaagcacaaaattaaagacatacaaggaaatacctgtattaaaaacatcttggctgggt

SEQ ID NO: 67956 - DNA, 1051 bp, Homo sapiens
gaagggttgaggttgtcatgtccaaagctctttccttctcatcctcctaagcacccagcatcactcatccctggacaatttagctgccatcagcacctgctgtttgatgcagaaagaggggaaggggaggtcagaggagggaggagagcagaggggacaccagaggctttgttcccaggtgcccacctcctagggagggaggggtgggggtcagtggcagccccatgccctatctggcaggcaatcctgtgtctgagtttgggaattaagctgtcctcgcctctccagcatgaatgaggcctgggggactgtgacaagagctgtcagtgctggtatcctgtgccagtaatcgctcaaaaggccaggcagctcaggacgcctgggaaagatgggatggagagggcagggtccagggcctgctggggaggggccagacaggaacacagacacctttgtgtgcacctgatcagtgccagccactggctgcttcctgtcggaggggctttgtccctgtcctgtctcccatgcctggactttaggcaactctgggcctagggccacatccaaccacactgtgttctgtccccagcgcttgctcggggccaggctccgagcttcccctgaaagcttgtcctggaggggatcgaacttcaaggcgaggcaggtgacggtgaatgtcttgacggccctcagcagatggggcttttactgaggttgagtttctttctggcaagaagttttggggaccagggttctaggccgtgggccccagcccagctcattccaaaaccattaggccaggtaaccgcagcagcacagtggggccaggtgacagctggagcagctgcagacagcctcagtccccagcgtgctgacatgttagaagtacacgtcactatctcagcagtcagccgccacatctggaactgctctcggcctcctctaattgcctcattattttccgaggaaaagcgcccccgtccccagctctccgttgctgtcccttccctctggcctgtcccgaaatccacctgaatgagccccagaccag

SEQ ID NO: 67957 - DNA, 1036 bp, Homo sapiens
cagtgaccattgggggatgaatggagaaacaaaatgtagcatacacataaaatagaatgttattttcagctttaaaagaattaaaggaagggaaattctgacacatgctacaatatggatgcaccttgaaaacattatgctaagtaaaataagccaggcacaaaagggcaaatattatatgattccactcatgtgaggtacctagaagagtcagatgtatagagacagaaagtagatggtggttgccaaaatcttagggtagggtaaaggaggggagataaatagggaattgttgtttaatgggtccagagtttcagtttgggaagctgagaaagttctagagatggatggtggtggtggttgcaaaaacagtgtgaatacacctaatgtcactgacttggcatttagtataatgccagtggttaaaccaggaaattttatgtatatgttactacaattcaaataatgtgcaaatcaatactacttatgtagtaaaattactaaaaagttggggtaatggtagacggcaagttcatgataatggttatctatggtggaaagagggaattgtggtggggagaggtacttagagtatttacggcgtttacttcctaaactggctggtgctacataacttatagtttgctatattattcgttatactttattatagttgggacttggccagtttactgcactttgatgtaacacgatttgaagcagatgccaatactggtattgtttctgtagctcctcacgagttttctctctttctctctctctctcttttaaggaataaaacatcagcttcgagttcacttgtcttttggattggattgtccaatccttggtgatcacaagtactcagactggaataggttggccccccaggtaatactaatttgacccaatgtgcagcagatacgggagagaacttaggcgttccttttcttaaaactctgaaatgagttacaacaaagcctactgattgtcttcagacatgataccaagctcattatcttgattttagagaaat

SEQ ID NO: 67958 - DNA, 1022 bp, Homo sapiens
gacgcagaaaacgttaaaccgttgaggcaccggcatttcccagccccagcccggcttccctacacactcaccgagtctcctccaaacgccactgctccagctgcagctaccggccggcgcagccgcactgagcgcgcaccgtccccacgtgactcgcccaggccccaccccgcaccacgtgacctgcagggcccacccactcccgcctcattgtagtcgcccttctccacgtggtcttggctcgccccgcccttccttgtaagatggcggcgcccaggtggagcgcgtcgggcccctggatccggggaaacggccaaggttgcgggagtctcttcactctcgtctcaaagccattttgtgccgctgccgctgcctctacggccataaatgcccagagattagcggagaagctccgagcccagaaacgggaacaagacacaaagaaggagccggtgagtccaaagggaccagaactccctagaggcagtgcgctcattggtttcccagacggggagtaggtaggagggtcctctgagtgaaagcgtgtgagtcaatagcccggacgcaaggtgggagaatggggagaaggcggaggggaggggtcagtaagggtacggtgttttcccgtgagctggatctttggctactgtcaggctcagtcctaaccactgcgtcggtacgcaggttagacagatgggtatctctgctctcaaattagtcgaaggcggcgcgggtctgatgcaaagatagtcattccctactcagattctcacccagacctttatggaaggtcttctccacggcttccgcaccaggcattccccacggctccttctttctccctaggtgtccacaaacgctgttcagcggagagtgcaagaaatagtgcggttcacacggcagctgcagcgagtccaccccaacgtgcttgctaaggcactgacccgaggaattctccaccaggacaagaaccttgtggtcatcaataagccctacggtctccctgtgcatggtaaggacca

SEQ ID NO: 67959 - DNA, 1116 bp, Homo sapiens
ttcaaactcctgacctcacgatccacccacctcggtctcccataatgctgggattgcaggcgtgagccaccgtgtccagccacatctgagctcttgagcctggaataccagtatgatttattttgggggcttaagttaaagggcattctagaatttggggtttttcttctcaatccttaatgtctttcagaaaccttacctctagtgaggtctttctccttaccttgttcagatggggtcattgtttgctagtaaaatggcaagaacaagtggcatcagtctggcatttcctcagtgactctgttaaagcacatgttcaggaaatgagtgtgatacagatcttatctgacagaaggtagagggtctcaggcatgctaagggataaaattaggagccaatcgagttcaccatagatgaaatatttcaagactgggatccacagaggaatcagatcttggcacagctagacatgattcctgtctccctgtgtgctgagatagaggaaaccgtgagtttgctttatccactgatgggaaaggctgcagtctacatatggaactgaattcatcaactacccaagcaaagtctttaggattttatttaatttgttcactactgacaagcttgttgggaactctttagtagtacttcactttgggtatctttcccttcctcccaaatccgatagttgctaaaaacccagatgtgttggaattagtccaagagccacagttagaaaggtttggtttcttctcaagtcagaggatgactcttttcccttaagaaatgaagttaacccttttctatatttatgctagagaaataaaccattctttattccagtcacttttattttttaaaagggggtggaggaagcttgctgatccttttacagcaagaaacgtaccactttctcaagctggtaattgtagatcttttatttccaggcaaaaatactttttaaaacattagaatttttctctccatttgatttatttcgtctgctaatatacccaggtgtatcactctgagctccttctggcatgtcacttgtttgagctgaggagtatgcactggacttacaggagaaacatagctcagaatgaagaaggcggg

SEQ ID NO: 67960 - DNA, 1088 bp, Homo sapiens
agcatgtgcctgtagtcccaggtgatggagaggctgaggtgggttgatcgcttgagcccaggaggccgagactgcagtgagccaagatggcgccactgtactctagcctggacaacagagcaagacccagtctcaaaaaaagaaaagaaaagggctttctaataaaacagtaaacttgcagtaattattagtaattcagttctatatgttgccagtggaatgtactaaaacaccccaaacggtggtagtatgtattgtcttctatattgtgtgtgtgtttaaaatactattactatttttaaattcacagtctttagatttaacaagtttgccaaagtttgagcacttagaactttatagtattcattctaatccatggtaattatttacttttgccagttattccagcacccgaacataattggccatttttcatacatctttgcttgatgatacatttaccagtcatcacagtggcttgatttgaagtccacttcatgtttagttagagagacatgccccactggctacaaggtcaccatcgtccaacaacagagaatgtcattcagcaaattagtattgattgttctgttcttgactcagtaatttcttcagctgagagtaaatgggtaattgggggctattaatacacttatctatgggtggtttttatcccctgagtcttccgcaaacccatcttgtgggagaataactggtttttcttaagttctacaaagtgatggccagtaattgacatgagttgacactgtttttggtgggaacttgggggcaggccttcagaaacagaagcaagatggtagtatggagcaccaaagtcctataatttccagattacttcttttagactaatttaatttagctccttgtttagaatgttcattaattaacaaatttctgttaagtagggggcacctccaaaacacctttaagggtatacagcttttttaaactgtttaatatatgtgctattttgaatagtatactttacagatctaattgtggttcatggtgtttaatctattttagaaactggatggcttctacagggagccaggcctctgatatag

SEQ ID NO: 67961 - DNA, 1034 bp, Homo sapiens
gcctgtaatcccagcactttgggaggccaaggtgggtggatcactcgaggtcgggagtaccagaccagcctggccaacatggcaaaaccccgtctctactaaacattcaaaaattagctgggtgtggtggtgcacacttgtaatatactcgggaggctgaggcatgagagtcacttgaaccagggtggtggaggttgcagtaagccgaggtcacaccactacactctagcccaggtgaaagagtgagactccgtctcaaaaaatatataaagcataaaaaataaagaagtaaactactgcaccagtacactgacaccagctctatgaaacgctgattagagagcctacagaagaatggcaggtaaagataaaattttagaccaatcatcaagttacagcaataagcaagagatcacactccttgatgggacataccaacccacttaagtcttgcttaattggtcatcacagtctgctcaacgtagcatgaccttcttgtttcagacttgccttgagtgtgtcttcacaatgtcaatatgttgtatcttttccttccagagagaaattcagaaactctacgaaaacaagtcatttcttttcctgggctgtggctggactgtggatgacaccactttccaggcccttttcttggaggctgtcaagcataaatctgacctagaacatttcatgctggttcggagaggagacgtagatgagttcaaaaagcttcgagaaaacatgctggacaaggggattaaagtcatctcctatggagatgactatgccgatcttccagaatatttcaagcgactgacatgtgagatctccacaaggggtacatcaggtaagatgcattttgaagctgaggggaatcagagaacaacagctcttcagccttttgtgtatttgtgatgtgatgggcaaaatagttgccaagatgaggaatgtaatgactgaccaaattgtaaaggaggccacagtcttcaggttagactaaagtgccacttggattatgggaagacagacaaaaagga

SEQ ID NO: 67962 - DNA, 5069 bp, Homo sapiens
acggcccccgcctctggtgtctcaactctagccgaattccggcgcctttgggattctcctccgctccctctatttatccccagcagcttggttttgttgtttcgagcctaggtgaaataacagatgggaaaacacctttacaaaactaaatggtgtatagctgctagtaatctgattgtttacatgactacttcccttttggctcccatgtgtcttgctctctctctcatctttttcccccaacttggttatcttatttctggtggaatgccagagagaagtgccccaacatcctcttgtcctggggacagatttgagtttgggggaaatgtttggctctttcccaaaggttatccaaacccagggcccaaacctgggttttctggggatagtctgaacactgagacatactctttctccaggaacggggaggtaacaactccttcacccatgaggcactcacactcaagtataaactggacaaccagtttgagctggtgtttgtggtaagtggggtgttgtagagggacgattgcattgttaacatagccctgatttttaagagaactctgattaattgcagccagtgtatatgatgacgtaactgaaaaaactagaaaggtagatgggggaaaacagcagctactgggcccaggcagggagcttggctgcctctcaggacagggaaaccggccaggtagctgaacctatctctgaaagccagggttgagttggcgtccctccattctaggctagtatgtaagcagatctgttggctgtttcttcccctaaacaggttggttttcagaagatcctgacactgacatatgtagacaaattgatagatgacgtgcatcggctgtttcgggacaagtaccgcacagagatccaacagcaaagtgctttaagtttattaaatggcacttttgatttccaaaatgacttcctgcggctccttcggtgagagacctgccttctctaaaatcaatttatttccatgatttgatgacctctctgaaggtggttcaaaggtggtaaattgatgtgttcaaagacattcctaatttgctacccagttctcattgtcctcttgggtgtgagagtcctttctctggaccgttatttttccttctgcatggggtagaaagataaaccattctcctttttgtttagtgaagcagaggagagcagtaagatccgtgctcccactaccatgaagaaatttgaagattctgaaaaggccaagaaacctgtgaggtccatgattgagacacggggggaaaagcccaaggaaaaagcaaagaatagcaaaaaaaagggggccaagaaggaaggcaagtttgagttctttggatatactgggacatgaaaggtgttaacacggtgctaaggactgaggtggtccttccttttgtcattgcttacctgcttctcactcaaatggtcaccatcctataatccccaggccttatgaactccaagatgtttggtccaaatttcctttgaacaatttggaagacttttagccattgtctagtggttgggattggtcttcttttttcttcagtgagttttttccccaacaggttctgatggtcctttggctaccagcaaaccagtccctgcagaaaagtcaggtcttccagtgggtcctgagaacggagtagaactttccaaagaggagctgatccgcaggaagcgcgaggagttcattcagaagcatgggaggggtatggagaagtccaagtgagcactctttctccagtactctcaaaatactgttatctagacacaatgggtgcaagggagttctggtctctggctcatgtttcctttcctacttctccaccataactctttgtatcataacctgttgcagcaagtccacgaagtcagatgctccaaaggagaagggcaaaaaagcaccccgggtgtgggaactgggtggctgtgctaacaaagaagtgttggattacagtactcccaccaccaatggaacccctgaggctgccttgtctgaggacatcaacctggtaagaggtaacaggggtcaaagtgatctttaacaacaaattgggaggaagtagagtgtgggaacgtgatactgggatttgaatgaggggtaagttatacttggagcttcccaaaatgaaagagatagagcaatgtggacgttttcctcagagaccttagtgttcctgaccccacatcctttccccgtatcttccagattcgagggactgggtctggggggcagcttcaggatctggactgcagcagctctgatgacgaaggggctgctcaaaactctaccaaacctaggtaggggaatttcaggtgggggttggtatatgcatctgcaaaactggtaagatacaactcctgcctactggttttatgtgtatgtgtaatctcctgtccctgcagtgcgaccaagggaacactgggtggcatgtttggtatgctgaagggccttgtgggttcaaagagcttgagtcgtgaagacatggaatctgtgctggacaagatgcgtgatcatctcattggtaagttctgaggaccgggctgactcatactcgcgggataggggtagttgagagcagaatcacctagcgtttctcacctgtaccataaagattggtcattgctgacatggaactgacatacctgtccccctctcctcagctaagaacgtggctgcagacattgccgtccagctctgtgaatctgttgccaacaagttggaagggaaggtgatggggacgttcagcagtaagtacttacctaagtgagaaagtgcttatgtgtaggttaagtgcatagacctcagttcttactaggtatgtgactttcggcaaattccttaacctctaaacctctgtaacctagattttaagggttattgagaggattcagtgagttagtccttgtaatgtgcgtctgttctggatttctgggacaagagtctaatttactgttttagtccccttagctcagaaaggtgttaggcatttttgagagcattccttgagtttcacagctgcaacctcctccacctcccctttcagcggtgacttccacagtaaagcaagccctacaggagtccctggtgcagattctgcagccacagcgtcgtgtagacatgctccgggacatcatggatgcccagcgtcgccagcgcccttatgtcgtcaccttctgcggcgttaatggagtggggaaatctactaatcttgccaaggtcagtgcagttccccagcctatcgctgatatttctgtacttcttgtgtctcaaaatcctggctttaggtgacttttcttacgtctttttcacagatttccttctggttgttagagaatggcttcagtgtcctcattgctgcctgtgatacatttcgtgctggggccgtggagcagctgcgtacacacacccggcgtttgagtgccctacaccctccagagaagcatggtggccgcaccatggtgcagttgtttgaaaagggctatggcaaggatgctgctggcattgccatggaagccattgcttttggtacagtgcatgggaagtgtgggggcttatttggggtccctttttctccttgggttctcttggaatttgcagaagatcaggcttgtgctactacagactcgttggtcaattacagtaaaaagtcagatcagttacttgccatgctctgcttttggataacagatgtagttgcaggcaaagctaatataccttaaccagagaaacctgaatttggtcaccttcatcctgttgtcctccttttcctgaatatgtttggtgatggccaagcatataatcaagtttttctcacattaccttggaaccaaatccagagcccaagacagtgaacaggtagtcaaactaggactttttgagaggaagctgggaacgagcatgagtggtagtccaggtgttcagagttgactactttctttctctagcacgtaaccaaggctttgacgtggtgctggtggacacggcaggccgcatgcaagacaatgcccctctgatgactgccctggccaaactcattactgtcaatacacctgatttggtgctgtttgtaggagaagccttagtaggcaatgaagccgtggaccagctggtgagagcgtgggcccagttccctttacaacttgagctttggtcaatttagatggttcttacacttctatcactttttctttccaggtcaagttcaacagagccttggctgaccattctatggctcagacacctcggctcattgatggcattgttcttaccaaatttgataccattgatgacaaggtaaacgtgagactggaggctggaatgggcgtcctgcacaaaggagctgaggctgcaaggaaatcttggctccagcgcttcctgttcctgagagggtgagtgaaaagtgggcttgtgttgatgggctgtcctctttctccacttaggtgggagctgctatttctatgacgtacatcacaagcaaacccatcgtctttgtgggcaccggccagacctactgtgacctacgcagcctcaatgccaaggctgtggtggctgccctcatgaaggcttaacgtggctcttgcccaataccaaatcgccgctttccccacaagcccttcttcctgtatcaagaatgtgctttagagtatgtgagcaacctgtcttcagtgtagtacaaaggcagagtgagggggcttgtggctccttccaaccccactccccgttcagcacagccgccatctgcaaggaaggcctaatcatgttacaatcactgcccactgaccctctcccagcgggcctcccccttcctactcaggcacccccttcactctgcctacagactcagtcttattacagctttgaccaatggttggaacccaacaccagagctttgctaataattagtgtggtcaagagccgtctgagcctaatgagtcccagctgcattaggttaagagactcttccagagccagcgccaggtcttgaatggcacctctccctaggatacacagcctgcaggtccccaggacctggatgacacccgcc

SEQ ID NO: 67963 - DNA, 1014 bp, Homo sapiens
acttttctgcagggactggtttgctggtagccaaaggaccatcagaacctgttggggaaaaaactcactgaagaaaaaagaagaccaatcccaaccactagacaatggctaaaagtcttccaaattgttcaaaggaaatttggaccaaacatcttggagttcataaggcctggggattataggatggtgaccatttgagtgagaagcaggtaagcaatgacaaaaggaaggaccacctcagtccttagcaccgtgttaacacctttcatgtcccagtatatccaaagaactcaaacttgccttccttcttggcccccttttttttgctattctttgctttttccttgggcttttccccccgtgtctcaatcatggacctcacaggtttcttggccttttcagaatcttcaaatttcttcatggtagtgggagcacggatcttactgctctcctctgcttcactaaacaaaaaggagaatggtttatctttctaccccatgcagaaggaaaaataacggtccagagaaaggactctcacacccaagaggacaatgagaactgggtagcaaattaggaatgtctttgaacacatcaatttaccacctttgaaccaccttcagagaggtcatcaaatcatggaaataaattgattttagagaaggcaggtctctcaccgaaggagccgcaggaagtcattttggaaatcaaaagtgccatttaataaacttaaagcactttgctgttggatctctgtgcggtacttgtcccgaaacagccgatgcacgtcatctatcaatttgtctacatatgtcagtgtcaggatcttctgaaaaccaacctgtttaggggaagaaacagccaacagatctgcttacatactagcctagaatggagggacgccaactcaaccctggctttcagagataggttcagctacctggccggtttccctgtcctgagaggcagccaagctccctgcctgggcccagtagctgctgttttcccccatctacc

SEQ ID NO: 67964 - DNA, 1037 bp, Homo sapiens
tatccaggataagcatggcaccgcttagcggtgacatgcttcagagggtgccgtgacttggggtgtgccagggcctcttggtccaaggcctggaagacccaagtggggatgacagtgcagttgaatatgtgagttgggatcaggagaggtctatgcaggaggtaatgtagaaaattaattttaggaaattgaatcttgcagtgcttggcacaatgcatgaagagactgatggcatgtggactattcagaaaactgtggcaacactgttgggtgcaaggtgaccttatgagatgggctgacagtggggactgccaactcatgtgtctgtttagctcaccttttcctgtgcccatcctccaaccccccaaccatgtgggaaggaaatgtttggccctctgaccctaactacatcccacagactgggatggaaaggtgtctgagattaagaagaagatcaagtcgatcctgcctggaaggtcctgtgatctactgcaagacaccagccacctgcctcccgagcactcggatgtggtgatcgtgggaggtggggtgcttggcttgtctgtggcctattggctgaagaagctggagagcagacgaggtgctattcgagtgctagtggtggaacgggaccacacggtgaggtctggggtagggcagagtcatgagtggggcaagaaagatgactcattttattaaggactctagcgacaagggaaggagaggaggggaagacctcaatctcggagggtccaacggacagagattgtgctttggactttgttgagaaattttcctaggatcttcctcagtcgaaccaggaagcttggcaataaggtttgttcttttgaaagcagatatcaccatattggatttttcgagatctcatagctctggtcatgagagcctgcattcaagctataattaagtgtctcaattttctctttttttttttttttttgagacagagtcttgctctgtcacccaggctggagtgcaatggcacaatctcagctcactgcaacctccacctccca

SEQ ID NO: 67965 - DNA, 1028 bp, Homo sapiens
aacaaggttaccaccttgttgtgaaagttcatggaataggctgggtgcagtgtctcatgcctgtaatcccagcattttgggaggccacggcagatggaacacctgaggtcaggagttcgagaccagcctggccaactggtgaaacctcatctctactaaaaatacaaaaattagctgggtgtggtggcgtgtgcctgtagtcccagctactccagaggctgaagcaggagaatcgcttgaacccgggaggaggaggttgcagtgagccaagatcgcgccactgcactccagcctgggtgacagagccagactcattgaaaaaaaaaaaaagaagtcatggaatagactgggatagcagggagctctgtgtgctgaagggagacaagggagtagggaaggaaaggcagtcaaggctgaagagcctgactaggaggcttggtcttcagccgctcagcaatgaggaaaaataggggcatttggggcagagaagtgacatgactgagctggactccccacttgtggagttggggtccatacatcatccccctgcacactcccctctctgacacacatacaccgacccacacgtttatctcaggcaggagggagccaaagtttctctgatgtctcctgatcagcttcggaacaagtttccctggataaacacagagggagtggctttggcgtcttatggtgaggcttgcttgcagaggggacagcttttttcctgaagatggagactaaggggtgctacacgttgggagtctcggtactccacagccaagctgaaggaggaacacttccctcctgtgtcacgggaactgccctgggccgtggtagttctctgtccttcatcaggctttgtctctgtggttcagttggttaagatgaccttccccggcttacaagccctagagaggggttggggggcacaggaaatacaatccaagagcagaagtcctcatccctctttgtgagttctctttttcttatcacagggatggaggacgaaggttggtttgacccct

SEQ ID NO: 67966 - DNA, 1040 bp, Homo sapiens
cctggctggagagtgcttttgatgtccaggtcgagtggattctcttttcttgcattccaacagtccttcaaatcatgctgctttttagtttgtttcatatttgaaccactgttttattagcttttactttttcatggagtttttagttgcctcttttttcattgtggttaaaggaataatgtacctttactctgctcttgaaattatccagtgtgataatccattacatcaagcttgtccaacccgcagcccaggacagctttgaatgcggcccgacacaaatgtataaactttcttaaaacatgagattttttccgtgatttctttttttttttttcagctcatcagttattgttagtgttagtatatttcatgtaaggcccaagacagttcttcttccagtgtgacccagggaagccaaaagattggacacccttgtattacatcatatttccttccttgctggtaacattgtttccagaaagctctttcctgcttctccaatctggacaggtgattctttaagcaagttgttcaggtctcaatctgagacttccttttgcaacttctgtgagttagatgttttctgtattctacgtctgtttctttcttgttttactctcttgattagctgaagtacattttttttttttcatgtttttcttgagatggagtctcgctctgtcgctcaggctgtagtgcggtggcgtcgtgatctcagctgactgcaacctccgcctcccgggttcaagccattctcctgcctcagctcccaagtagctgggattacagacacccgccaccgcgcccagctaattttttgtatttttagtagagacagggtttcaccttgttggccaggctggtcttgaactcctgacctcaggtgatctgcccacctcagcctgccaaagtgctgggattacaggtgtgacccaccatgcccggcctctttttttttttttttttttgagatggagtctcgctctgtcacccaggctggagtgcagtggcgcgatctcagctcactgcaagctccg

SEQ ID NO: 67967 - DNA, 1174 bp, Homo sapiens
agctgggattacaggcatgcgccaccacgcccggttaattttgtatctttagtagagatggggtttctccacgttggtcaggctggtctcgaactcctgacctcaggtgatccgcctgcctcggcctcccaaagtgctgggattacaggcgtcagccactgcgcccggcctttaagccatattttcagctttgggtccagaaagccacatacctagaaatttggtatgtgagaagagttagagacctctcattcctgtgcctggaagatggagcaggaagggctggggtttgcctgatgaggggcccagtgacccacaggtaagaaccttgtgttttccagattctgagtgtggctcagctcgtgaatgcagtggcacaaggcactctgtgggagtggatcttgggtgcatgatcctcttggattttggcttccctcagggaatcaaagccagggtgggagttctctcctcaccgtggtgcctgtggcatagagagtgggcattgcttccctgtcacgggctgtgctgtatcattgcagatgtaaagacgaccgtggtttaccctgccacagagaaacacctgcagaagtacctgcgccaggacctccgcctgatccgagagacgggagatgactacaggaatattactttaccccacctggagtcccagagcctcagcatccaggtgactggctgcatgtctcagacgcagagcactgctcccgtggctggtgcctcctcttacgagtgtctattggggtcatattaggggccaggcgctgtgctgggcgaggggatgggggtacagtagagagcatggcggacagaatccccacctcgtgcagcttacatcccatgcacagtcacacggtgtgtgaccatacacagatatctcaggatctatgtgctctgtgagataatgagggctgcagagagaaatagacaggataagtgggaccagaaggcctggggcgggcaattgccattttatatcgcatggcgagagaaggctttgggggtgggggaactgatgctggtcttggtcccacctgatgtgcttgggcatgccatggaggctctctggggacctcaaagcaatccagtcctttggaagaatgtgtgtctgctctgcagtagccttgatccagcctcgggatgactgtgccattgcttt

SEQ ID NO: 67968 - DNA, 1315 bp, Homo sapiens
tagctggcccctccacagaaggaaaccgtggtgccctcagcctcctacctctctttgccccatagtcctgaatagagtgaaataggatccatggaggcagctcttcccctgagtcctgtgagcggtggagggggtcactgctatagagggcagacacagcctgggtttggaggcctccgcagagcatgtgcactatgctgaccaggaagagcctggccccttccaagctgcagagacccttgtgatgacgcatggctgagtgccagctggagtgggaagggggaagtcccttctggacccctaagaacagatgcttggggacagggcagcccggatgtagatcctctgagcgtggcggccttttatggcttggttctgtctcctggagaggccagggaatgccctgagctcagtttggggtatctctcaaggggtgatgagtggatttgtgaaccatctctctccccctcctttcagtgggtgtataacattctcgacaagaaggctgaagcggaccggattgttttcgagaacccagatccctctgatggttttgtcctcatccctgacctcaagtggaaccaacagcaggtaaaggtttctggctggaatgtcctgatctctggccaccctgctgtaagtgctggtccttctgactgccctctttctcacgctggcctgtctctaagcagattataattaaccaacaagggttggcctgagctctctgtggggactgggtggatacctgtcatacataagtgcttttgctttaatgggtcagcttaaagccctttctggctgtcctcccacccaagaggtaaaatggggtgatgtttgtgcccatgactacataggccattccttaccagccaagtggtctgggcagccacctgtgcttccacccgcatctggagccctcgggtggggtgtttccattttctccattccccttgacaccagcagatccaggcaggcccgtgttctgaagcactggcaggcaggaaccatggtgaccaacccaaggcatctcctcctcagcccgagctgtggagtagcttagcccagacttctactcaggccccttggccccgtgccctgcctccaagcacctctgcttctcctactttcctaaggagcaggtttgggaggagccgtcctccctcacaggtatccctttccagttccctatggtcttctgtctctcccagaccagcccaccaccagagttatcacttaccaccacctcttttatacctgagagtatcagaagcttttataccctgacagggtcagaaacaggcagagccactgt

SEQ ID NO: 67969 - DNA, 1006 bp, Homo sapiens
gtttgaggggcaagagagatgggacagagttcacccaacaggacagacgaggctggcagtcacagcagagggcaggcactcaggtctggagaggcagggcatggagacagggacccacactctggaaggtttctcgactcccccgaggggctggccagttctgtcttccttctgcccactctgtggggaggagcctctctgggatagcgtcccctcactcctctcccagcctcgtttatcttcaccacagtacagaagggggcccctctccaggcctcaccacttaacttttcttgtacatggaaagacaagcctctgctagaggcctggcaagggttccccttcagagccagccagtgctctgctgctgtaatctccagggaccctgccggccacggcccccatgcagctccctccctcaatccaaccctctttgggcttatcaccctcaaggtctagagtgcaccagggttggctgctctgccaagtcctgttgagactccaaaagcatagtctgtctttattagggtgaccttcatatcagactcccaggtaactcaagatgatagctttgcaatatagtgcctccttttattcctatttgtgagtttctccgctttcctcactagactgagagggtcttgagggtaggagctttgttttagttatctctctatccctggcccctaagacactacctggctcagcaaaccaacctttgagacaaagcaacattataacactacattcatatagcagatcatttcatgacccacattctccttcctttttacgaagaaatgggctcaggatgtcttgtccagcattatggagtgaacgtcagctccaggaagcagagacttctggccctttgttcaccatttccccagaacctagggtggtgactcacctataagtgctcaaaaaacatgtggcgaatggaggaccagagctaggctctgaatgaggcctcctggatctcacgcaggggatggagagtaaggac

SEQ ID NO: 67970 - DNA, 1036 bp, Homo sapiens
ggaacaggaccctgccccagtttccccagtgagggaaggacaccgttccccgtgggatagagcactgcaccctttcttgattctcattgttcccgggagcgagcgccttggctgcgctgggcatacccaccctggcgccattcacaggcagtgcctgccctggccctgtgctcaccccatcaggcctcctcttccgcctctctggcacccacggcgcccctgcttgcctctgtccgggtctcggaggcgcgaacaccatcccaagcctgcgaccgcgcggcatcacccccgcccttccccctcctccaccccgccctttctacccctcccgggagctcctgggagtcgggccgccgtgtgcgcaagcgtgtccagccccttccccgcccccaacccgggcccgggtccccgcctcccctgcaggcggactcgcccgctcccaggccggacccgcgcccgggacagggacccggccgagtcgagccgtcgcgccagcgctgcgccgccggtcggtgcgcctagcggatcggagctgcgcgcggaaccgtgctgccccgccccgctccacccgtgagggtgagtacgcggcggcggtgcgcgggggcccgcggggcggggcggggcggggagccgcggggtcctcggccgcctgaccccagccggcgccgcgcctcccggagggggtcgggccctgcacgtgggcgcagcgcgggtcggggtggggctgccacagccctgcggagctgctttccggggtccctttccctggaccagattttcgcgggaagccggatcctctccgttcccttggagtgagcaagcgggacagttctgcggaaagtttccgcccccaatcccccagccctgcgcccggactgaagcggcggcccccacctccagcatcctcgagcgatggtttctcccacaactaccccggtcaggtccagcacttgggagctgactgtgctggaggtgacaggctttgcggggtccgcctgtgtgcaggagtcgcaaggtcgctgagcaggacccaaag

SEQ ID NO: 67971 - DNA, 1752 bp, Homo sapiens
ggccactttatgtgttcccctaggggctgatgttcttgccataaaggtcggtgataattcttttggccaaggtaattcagttgactctgttaatttagctaattttagttttgtgataccatttctgcattcagcctttccagaagagagagtgatgagggcaatgatagtgccgtcaggtctgtaaactcttatttggtggataacctgtcaaataaagcgaattgccctagcactagagacctcctcggcaggtaggtgggatttcatctttctggagcctgagcatctccaaagaagagctgccgcatggagcttccctgactggtgacctccaccctcttctctccagagctctttgacccagaggaatctgcaggaatggagggagttggccaaagtagggagatttttactcagaccatatccaggtgagcacacaacagccttttgggcttgggctgatgcgtgcatttctgtctgtacatgcgtgcctggaagtgtgcagatgagtgtgtgagagagggtaatggccatgcatccttgcatagacaagaacatggggtgcacttctgcatgtgcacagcccctccccaacccgggcctgtggtgctgtcctgcccctagcccagagctggcctctgttggctttgagaccctagctttgcactgtggctttgctcggccttagagaccagctgctcccctgctgtggtctctcatagtggagactgatccctggccacccattcagctgcctgagggccctgggaccagtgttcatccccccacctcccaaaacagaggtgtgtaggggttccctgcctggagtcccaaccctgcaggatggagaaaatgggcaccagttactgtgacccattccggctccatatggatttggtttgacaacaaagctccctctgtgtgttcccaagccccttacataaccaggggctgtgggcagaggaggaaaggaggaggaggtggagatggggaccaggagacaccaggatgggatggctggaaaggacacagggaccgggaggagagggcaggagacgagggccagagaggaggagagggtgggagcaggagggggaagtgctggtcttgacctcccagttctgcctcctgcttcctggggaggggagggtggagtccagccaccgacttctgcttgtggatgctttgtcttcttttctttggacctttcccaccagtcctggataggctgaggaggggccgtgggacctgtctggggtgaggtgaggtcaggtattgggctggacttgggaggctgttccttggccgcagcctgtaactgaataaatgccattaaaaggggaatccatttcctccctcactcctggcttccattgccttcccccaggccccagccctggttccagaatccctctgaccactcctcttgtgctcaggagggcagaataactgcagcctttccctgtgccctgccaggctggtcccgggccccctcccagcccactcatccagggatgcagctctggccttggcccacccccatcagagggcctgtggccctgatcaccgcactccccactctgtgaccagacgttctctcctgagcatcgctgaccctgcagctgtccaaatagagcaagaagcgaatgttctctttggggcacagctggactggcagccctgcagggtcaggtgagctgccagtcctgggtgtgttctcgggggtgggggtgggaggatcacgtcctg

SEQ ID NO: 67972 - DNA, 1002 bp, Homo sapiens
ccaaatggccacaggctgccctgggacactctccaggcctgctggggacacacctgtggggctcataggcgtggctgggtctcctctcaggtgccagaatctttctgggagctgagcctggctgggcagagggcgaggagcccaggattcccctttccgtgactttggaggaacgaggttcctgagggctggcacagccactccctgccccttagaggctctgggctgcctggtgacagcttcggggacctgcaagctgacagagtctccaggagccagagctggggtgggaggaacccactgggcctgagggaggtagagcagcagcagcagcagctgagcccagcccccggccagccctgaggaatgggggaaaagagtgccctggcttgggggggccctcaagccccggaagctgtatgtgggcatggggggcgggggcagagaggaggaggactgagaagtgggtgtatttgggcaggtgtgtgtgtgtgaccaagcttgcgggcgcctgagtatggactagtgtgtttgtgctggaggagcctgtgtaggttactgacatgggagggccggtgtgagctgcagggaccggagagctgctggaaggggctgtctatgccttcaggctctgagtgtggatgcagctgggcctgttcaggcagattcaccagaggggctactgcgcagagcctgggccctggacacctagaagggcccctcctcccctcgtcttccctccctcatggcccacctttactctgagggggtgggcttcctgcgggggacaaactggagagggactctcttgccgccttctctgttcctggggacaggctgctgcagggtggagggcttgcttttcctgcccaccctcatctttgccgagtcctcgtctgggggccctgccccactctcccttcccaatgcagggccctctcctctggcgagcctgccttgatactccccggctcaacccctttaaccctgctggctcctaat

SEQ ID NO: 67973 - DNA, 1046 bp, Homo sapiens
ttttacagatgaccggtctgttcttggcacttgcaattagcggaccgtctgtatccgagtgttgatcgggtggattctaaccctgtgggagaactccccagcccgtagcctgcgctcactgtacctggcagttgtattaatgacgtcaaatgcacagtccagcttgagtcccctctagaacgtgggcagcggacactaagccgagaggaatcgctgtgggttggcagacactgtggagactgactcctggacaggctgtggaatgtgtggaagcaggtacagcccaggcccgcgctgaggttcggcagggaagccagaggagtccgcagcccgggagacctggcctacagcggagagagtcagtccatgccagtggtgggatgtggctgcaaaaaatggtcggattcatggaagtctggtgtccagctggcaggcattagtggtcccatgaatacagctgtgtgccttgaacacgtactgcagagcttccagagagcaccagggctgtgggggctagagactgtgtctcgtgcggaagcgtggctgagaaggggctcgacaggctcttcgtcactgtgcggagccttcgaaggacttggatgtgcttgagaccccttcccctaattgctgtgtagggcaggggtggacatcccggggatcgtggagtctagggagccagtctgcacgggatggttttagaagccgtaggatgtggaggttctggctgaaggagccagaattccagtgccagctccactcctcacgagctgtacaacctgggccggttactgacccctttcccaccttagttccctggctctacaatggaggtaattatcgtgttgaactcacagggtcgagatcatatttaacactttcacagcccttagaagtgtctagcacagtggtcctcagcatttggaaatgtctggaaacactttgtcacacctgagaagagggatttcctactggtgtctagtaggtagaggccagagatggctgctaaacaccccataatacacaagacagaccccgcaacagtgaac

SEQ ID NO: 67974 - DNA, 1029 bp, Homo sapiens
ggacagtgggtacaatcagggtcaagccctcagccagggccaggagagggccagagactgcttctgttgagttaggggtcggagggactcagaagggggcaggtgggaaggtggacgggggttgtacctgcctgttgctgcctctagctcctctctgcatgtgtcctgcaggctggaagctcctggccatgttggctctggtcctggtcgtcatggtgtggtattccatctcccgggaagacaggtacatcgagctgtgagttcaccttccatgtccttccagtggctcttgtcagggacagggcttagggatggagcatcatggagcgggggacctagtagggcaggaaggttccaagagccggcacatgacctcatcccttcagctgctggtacggagtgtttccatgagggtgggtgggggtagggcctgggatgtctcactgggccctcacccagggagtgcaggggcaggaagacctggatcctcaaggacttgggttccaagtggaacttaacttgagatgattcctccccggcaccttgggaccttcatgccgtgggagaaggcttaggctgcctggaacatgggtccctgggtctgactggggcttctgcctcctgtccttttttctctccagtttttattttcccatcccagagaagaaggagccgtgcctccagggtgaggcagagagcaaggcctctaagctctttggcaagtaagtacttaaggatgaggagggtagagcagggcatggagcgagctgggattgagggtttcacagtgtggggagtagatggaaagagcagctgtgttggtggacatgggttaggtgaagccagggagggaagagaaggccttataatattagtcatgggcctaaccctacttctggcatcaagattaattctgttctcatccccacccggctttcacctctgtgcagctactcccgggatcagcccatcttcctgcggcttgaggattatttctgggtcaagacgccatctgcttacgagctgccc

SEQ ID NO: 67975 - DNA, 1085 bp, Homo sapiens
cctcatctgggatgtcaatcctaaacagattcggattctcaaccccttcttcatggagattgcagctgacaaactgctgagcctgccaatgcaacagccacggaagattaagcaggtgatgatgggaagtcaggcctgagggctaggatcctgggcgggaagtaggagggatgatcctatgggcttaggaagccctggaaggatcccataacagaggcggcggtttgcattttccctccaggaacacacctgtcattaaagttgctgctgcaaaggggagtgcacactttagagaaccaaggggcatttactaagtggggagggatggggatggcctggatcaggtttaggggctggtgtgagaggatggttttggcaggcgctggtcagaatttgtcaactggggagctgctggaacagtcagtggtctgatctgtggaacaacttgagccatgcagagttactgttagatacttcatctgtgatcttatcttgaaacactagtctgaacgagttataagagttggagctaaacagtttgtcttgcatgtcatgatttggtatggtgtgtcaattcagggagtcaatgtagttttgcaagttatgggtttttgttttgttttaaagatagcgtctcactctgccacccaggattgggtgcagtggtgcaatcatagcccactgtaacctcaaacttccaggctcaggtgatccttctgcctcagcctcctgagtagctgtgagactacaggtatgcaccatcacgcctggctaatttttaaatttttttgtagagatgggggtctcactgtgttgcccaggctggtcctgaactcctggcctcaagtgatcctcgtgtctcagcctcccaaaatgccgggattacaggtgtaaggcactgtgtctgaccacaagttatgtgttatgtgtttcttctttttaacctgatgtccttgagccatagcaagttatggttttgagtgcagtgccctggtggtcttcagctggtgggctttaacccactttgtagcttcccaagtacttccacccatatcttggagcccctcggggaggccgtgtgggat

SEQ ID NO: 67976 - DNA, 1028 bp, Homo sapiens
gggattacaggtgtgagccactgcgcctggcctgtattagctttctgttgctccctaactaataccacaagtttagccggctaaaacaatacccatgtactggctcatggtcctgtagatcagaacagcagggtgtggctggttctctgtttagggtgtcacaaggctggactcggtgtgtcaaccagacagttctcatctggaagcttgggggaaaattttgcttccaggctcattcttgtggttgaaataattcggttcctgcgattgtagaactgaggtccccatttccttgctggctgtcagctggaggctgggggccacgctcagctcttggaggtggcccacatttcttgaccgtacagcctccatcttcaagccagcgacggcacaatagatcctttctgtgcttcaaatctctgacctccgtttctgatcttgacacccggatttaaaggttcaggtaattaggtcaagctcagcaggacagcctctccttttgtgttcaactgtgccatataaagtaacgtcacgtaatcgcatcatattcacgggctccccacacgcgcaagggaggagattacatgagggttagcgtcactggggttctcttacgattctgccttatatattttacaggtggaattgagagatttctgaccaattctgggtttctagcttggacagccggtagggggcggggggtggtaacatatttaactaatagagagagagtgcaaggaagaggaggaatttggtgagtgtaaggagactgtgtccaggcagagctggctagaaggccatggaagtgtggctcagcccagctggatgagataacacactggtggtgaaagcaacaagggtggaaaagaaggtccagccagggagtggaagatgagaagacaggagagctcagagagggagaaagctggcatgtcgacaggcctgatgaggtccaggaaaggctcccaaatgggtatgggcagctgaaattgtgtgcaaagcaggttgctgaagcggaggaaggc

SEQ ID NO: 67977 - DNA, 1093 bp, Homo sapiens
cttggggaatggaactggcagctgtattcctggctttctcggaaagagttgcggccttgaggttttgagacaagccaggctgggacaggacagataaagaggggcagcagtttgggaggaacagaggaagatgacatggttctccacagagcgttggaatggccttgtggacacccacttcatcccccagaatggccccaaggaccctcccagggaacagaagggctgctctctcagcagcctggctgctttgccaggggagaggggggttctgagagcgagtagagccccagcatctgcagccccaagcccactcccctccacacgggcaaactttgtcttgaaggctgtgtcctggggagcgagcttgcagacagcaggggttgtgagcgtgtggggatctcaactctgctcaccccgatgcgtccccagctgccgctcatgtggagatgcaagggagtgtccgttttcccatccggggccattgagaatggctgtctgcatacatgatccagctggcctggactgaggccactgcctgttactgaacgtgcctaaactcaagctagaatccggcacacaggggtgggtcagacccgtctaaactccacacacgcacacatgtagatatgggagcattttacattcttggtgggttgtttgtgattctgtgtgcggacagtccttcctgctcacatactgagaagactgtgaatgcggggtgtgtgtatacccaaatagaccattgtttgcttgggggggtggggatagctttctccagggtgcccaacatcctacgcagattgaggcaatactggccaagggtcggagctgagaatggggctttgatgtggggctgttggatggggttctttggttttctgggaaagggactttcagtcttcaattagcccaaccaacgggaatgaactgcctgccagcctgcctgggactgattaaaccataccctggaaatgaggaggggaaagagcacagtagggcacgtgcttgagggcaagtcaggagatctgggttctccaccagcctctgtcgcctttttctgtaagaacgtgggccagtcatttctctgcaa

SEQ ID NO: 67978 - DNA, 1042 bp, Homo sapiens
actgaggagccctgatggcacaccaggaagttgggctttgtccagcagatgtggggagccaccgagggattttaagtgggcaagtaacaggaccagatttgcattttagaaaggctgctttctcaaggctctcgagggtggattgagaaaagagacaaaagactacaaggctgagaccaactgggaggctgctgtaatcatccaggggagcaatgatgaggcctgaagtaaagaagtgatggtggaggacaggtggggcacacatttgagacactttttgaagtggaattgacaggacctgaaaatcaattggagagagaaagcgtagccgagggaaaagtcagtttgattcagtaaacgtctgtgagcctctaccagggcctgtgtaaggctccgaagaccccgggatgaacacagcagcagctgctcaccctctagcaacataaaccgctaatatttcttgagcacttattgtgttccatgggcttcaagcccttctgagttttgtccacttcaccctcaccacagccctgtatactgtggctttcagacccatctcatggatgaggacatggaggcaccagaaagcccatctactatattccttgctctgctgcctccactccaacatgttacgaccgaggcaaccagaaacttctagcatggttgtccaggtttctgcttggacaactaggtagatgatggcccataaatggggattcggaagaggaggagcaggcttgatgtgcctggagaagtgatgagttgactggcaatccagtccccaaggaggaacctgtgtttcttgcagactgttttggtggggtgcgggggatgagggagagggacatgtattgaatatctataatagctatgtgtgtgtgtgcgggggaggggaggggattatatgttatataacaacatattgtggcaatttatgcatatgtcttttctccttactgaagagccaggctctctgaagggtagactgcatttttgttgttgttgttgttttgagatggagtctcgctctcacccaggc

SEQ ID NO: 67979 - DNA, 1022 bp, Homo sapiens
aaggaggagaccactctccctgaggcttcgcctctcttgggcccatggaggtggtcggcagcgtggggcctgggaagaaggtgctggggaccaggttctgcctggatttacccccacggctctcatccccttccctctgtctggatcacgcccggtgctagaaagctgcggaagcccctccatcccagtggcgggcaggggccctcctcctgccctggaaatctgggctcttgggatcttcatgcctctgccttcaagctagctgccatctcctccagcctcagccttcatgacctggaatcgagtgactggtgcacctctggggtgggatgggggctctgagatgcagggtgatggaggcagggctctcgtgacccacgcctcctcccccagggtttcccacccggtgctctcaggccaccctcctattacagccgttccagcctctgtgtcacgcccattgcagtggagcagccctgggttccacttccgacccctctcctaagcattaaagagctgaatgcaggctcctctccaccttccctagcatgtctggagccttctgtagaccaagcttggtctacacagtgggggccgtgtggggattccaggctcagggtccgaccgtggccaggcaggcctcagagtgctccttccagggagcagacagagcctgaagcctggtgccaggagactgcgattagtcccctgatgtaaaaagggagtaacagcactttcttcggaggcttcaagggcaagggggagggccagattttttcaagtttgtaaaagcaagtttaaaactgtaaggggcggtgcatgagctaaggatgcttgttttgaacacatccagccagctagtccatggcagtgcgctgccttgctgcgggtccctgctggacctccagtgaataagaggggatgggcaggtgcggtggctcatgcctgtaatcccagcactttgggaggcagaggtgggtagatcacgaggtcaggagattgagaccatcctggccaacatg

SEQ ID NO: 67980 - DNA, 1006 bp, Homo sapiens
tgaattcagttccaggcacagctagggaagtgtgtccagccccgcagttcctttcaccctgctgaggcgagggggccaggtggtggatgcagcgtgaggccaagcgggcagctggctgggctgggaaggcagggagccctggctgctcacagctgtgggtgccgggctggggctggagggtttgggcccaggtgatagggccaagcatgcgtcttcctcagggcttcctggagaagctctcgcctctcctctccttccagggcccctcaccaggagcatcacggagggtggaagccccacctgcttggccccaagtaatcagcagaactgctgctggctccgggagccaaggttccctgccctccctgtcctctcctctcatggtgagggagccagagacggaagaggaccggagccgctgtcggggctgggtccgcaggagcccaagccaggtcttttggggaggtgcctcaggacccgacagagcccgcagctcacatctcgcccagccggtctttcttcccctcctgcactgaaaaaccctctgagaggtccctgccaaaagcacagacactcaaaccactgcatccacgcagctggccaaggatccaggccaagagctaaagagtgagtctcgccccaccctcttcgtgcctctcctgattttggtgcagtttcttccctgtccttcctctttgtctcctcccctctccccacccacctcccccaactcactgttgcttccccacctcccccagcccctctgaaagtggagtcagcttaagcctctcccaatcaatgtctaatttggtctgaacaaatgtaagaggattaattatttatatcacagaatcaggggggctggcgtgtcacagccgccaggttgtcctcaaatagaccaaggtttcatctcgtgtgggggggccacatcccgctatctgctggggaacactgagagactctcagaggaaagggccccaaagcactttgggctcctggtccctag

SEQ ID NO: 67981 - DNA, 1050 bp, Homo sapiens
ccctgaggtccaccctgtgggttcaatgccataatgccacgctgagtagttgctgttgggggccagatgagatagaaggtctccctggaggtcttgcagccattgagttgaggtgtgcgggtcgccccagccctgccctcctgctgcactccaaggtcgccccccacaatctccctgcccccataatctgcatgttaccatgggcaggcatggcctctgtctctttacccactccatctcccatcctcatcacagcctggctggatgtcaaaactctcccccagcctggggtcgtccctcatgttgggaaatgaggtgggggcaggacactcaagcattaaacgacttccaaggcccggaggaagagaggatccctcagggatggaggcaaactcagcgcatcttttcccttccctgcctgagtgtggagaagggcaggcaggagcctctccaagaaggagaagacctgatgcaaggaatgcacagccccaccctaccccagccagtgccaccatgagcgatttctggaggggcccagaagctcgacactgcctatccaagtgcccactcgccactgaaatctgggggtagcttcccaaatgaccatgcccagggccagcccccataccccccagcatcttttgctcccaacaccaggacaagggaagctggggaggttcttaggagcccactcatggtctactgcttatggtaggggttcagcctcctgctgttgcctggccccagtggctgcacccccatcaccaagagacaggctcttcagggcagccctgggaagttctggagtgtgtcaccaccatccccagggcattggaaactctccagacccaagcaggacaaacggccctcactggggagctgggacgcattcactcctgccccagtcctgccaccatccagctgtgagacaggggctgatgatgcttaatctctcagggcccgccctctccatggtggagccagtagcaggagagatgaagtgttaaacccacttcacgggttgactgtgattctctctcatttgctcat

SEQ ID NO: 67982 - DNA, 1048 bp, Homo sapiens
aaaaggaaagttcatagcaaggaagtccagggtcacctgcagatggggcagtggagggcactgtcccaggaacaaggaaggtttaggaataccacctgtgcaaggaaaaatggattggagtagggtatgtttcttagggagaagataagtttgcacccttgggaactcctggcctctggactctgagcaactgaagtgtcaggactgtgccttctcctgctctgagcccgtaggaccaagcacagtgcctgacacatggtaagtgctcaggaacagtctgctgacttaatgaaagggctggctacaaaatatgggactgtgaagggttccttctgactcgggtcagaatgaaaataagtgggcttcactgtagcacaatgggtttaggttagcagaggttggttgtagagtgaatgaaacttgtagctcattggaagagaagcctagataacatagtgggatttcctcctgggagaaataaaaggggatggctttttaaatgggatgggttttcttccatttcagagggtgcagatgggatgttttctagccttagaattccttcattcttactagtaatgtagtgatacggtggtattatttcatatttgtgggatacttattttttaatgacgctgtcatattccctttctctttagatgctcacagtaagtagctctgtgacacaggcaagtcagaaattatctatttcattttggtttcacaaactgaggctcagaagtaaagtgacaatttaaggccaacacactagctggtgatagtgcccatgctggaacccatggctgatttttggcttggttcttagggtaaagtacggggtcgcagagctgcagatgctgcaaatcaagacagaccagagactagagcacagatcagcggtgtgggctgggacagtgctataggtcgaattcctcaccaattctgtgttcccctcctgcaccaaattcgtacattgaagtcctaatcccagtccctcagagtgtgaccttgtttggagataggaaatttgtagaggtgatcatgttat

SEQ ID NO: 67983 - DNA, 1088 bp, Homo sapiens
tgctaaccaaccaccaattgcatcccaggacagttgctgaaagtctcagggctctgcaagctggagatgagatcggctaatcctgactctattctttcgtctgctctgctagctggccctacttgtacaattaatattctccctggtgttgattttgttcaaatatattgggcccatcaatcacccactttccaactcatctgtctggatcagtcatttacaaagttatttttgagccactaggattcttgtgaaatagacacaagaaggagctaaactcatttcaggtttgacctctgtggctgggatctgagaaggcttagtttgattacgcttcatggccatccaatccaatctggcttgtagaatagaaaggccacttgcttaattgggaacactttaatatagatatccattaacttatgctaaattacagtaaagcatctatggaggaacttgatgtgacatctgcatgaatactaaataacttcattacgatcagtactgtgacaatgaatatgaaatgaacgtgcccagagaagacaattaatctcccaccttcccaagccagtactgttttattttaccctgcattgtactaaaaaaataaggcatagaagctctatgattttctgtctatctcactcacccttcagctggtgagtggtccccgagagcttctgtcatttgtagagtggaaactgacccaccctgaggaatagccatgggcagtgggtatgtggggctcctggggacccactttggtttgggaaaggaggttgtcaagactaactgaacacaacacacacacagacgcgcgtgtgcgcgcgcacacacacgcacacgcgcacacacagaattaaaaggcatcctcatccggaactagcaaacagactgtcagttcagattagcaacatcaaaagcattccaatctgttccctgcatacattacatgcatagatctgagagaagaatttggcctctgaattaagtcagctttttccttctgggctgcttgtacctgaaatgtgtggcgaagagggtccagcagtcagattaatacacctcatagcatttagtctgaacct

SEQ ID NO: 67984 - DNA, 1080 bp, Homo sapiens
ttcattctcttccacgtcatttggtggtagtggcatgggcaacttcaaatagatatcaacttcaactaaaatggttaatggcagaaaaatcactacaaagagaattgtcgagaacggtcaagaaagagtagaagttgaagaagatggccagttaaagtccttaacaataaatggtaaggagcaggtgctgcgcttggataacaagtaattcaacgcacgcacttaacagaaatgttaaactataacaagcaccatttgaggattaacaggaacatttttttgaagatttcaaacgaactcgactttcagtataattgtacctaaagtatttataaacagctcatcggagcctctatttgtcatagacttttgagttgattgttgggaccacataataggaccattttttttttgtctttaaaattgttgtaaatctctgtatgcactttgcttttttattaaacgtactccaaggtgagtcttgactctttagtgtaggacaagattgtacactaacaccagcatggacctgcttttcattgtgtctgaaatgtgagccacgtagtgtcggcctgctgtgaagttaacattgccaggacgattcttctacagaaataatttcaaattttttcagcatttagtagtgaaagatattaatacattaatggtaatacatttctggtttaatataaattaaggatgttttctagttgtgcatgaatgctggcaacttagtaagttttgacaattgtttaaatatgtaatgttaagcttaggtttaaaaaagtaaagctggtaaactgggtctttgtcatttgctttaaaaaaaaaaaaaagaaaataaatgcgaatgtgttggtgcattcaaaaaaaaaaaaaaaaaaaaacagaaaaaggtcctaggagaaaaggaattagtttcagagactgagttaccaagcataaagcatctttcttgctagtgtgtcagagcaaaatccttctgaaaatgaagttctgcaccctagctgaatctgcatcttcccctccaccaaactgggtcgtctcccagaccagcagtatcagcaataactgagaact

SEQ ID NO: 67985 - DNA, 1041 bp, Homo sapiens
atctctcttctagtcatgctgtgcatgccgcttactctgttggggtctatataaatttgttgaactcttacctacattccaaagaagtttcaaggaaccataaatatatgtatacatatacatatataaaatatatatattaaaataaaattatcaggaatactgcctcagttattgaacttttttttttaagaatactttttttttaagctgagaagtatagggatgaaaaagatgttatattgtgtttgactattttccaacttgtattttcatataatttatattttttaaaagctgaaaatttagaagcaagatgaaaaaaaggaaaagcaggtgctttttaaaaatcagaactgaggtagcttagagatgtagcgatgtaagtgtcgatgtttttttaaaaaaaaatgcaaaaaaattcttatggcggagttttttgtttgtttattttagtagctgatgctggcacatcattttgctggagagttttttatatactgtagcctgatttcatattgtattttaaactgtgtgaaattaaaaacaaagaatttcattcataatgctgtggctttggcttgattctttcttgtctggatcatgtattaaagcaggacaaatcaaccaaccagaggcaagcacagagggatgcagtttagtctttctgatctcactagctcaggaccattggagataaagatttcctaataaggtgagaaatataacaggaatatagggaagtcatcgaacatcccaatctttgaatatattgtgtcatcctttgtggaatgtccctggccttgtcagacctcacttcttcatgtccgaaggactaagagccatgtgaaggaaacgtttaatgactcaacagataaacatttgatttcagctacgtaccgttcctgatatgaatacagaaagttgaacatctttagtggatcctgtgggaaatgaacagtattcttgtgtccaccactgatactaattttgctctatggcaatttgggcccttcacatccatctccttggccccaactc

SEQ ID NO: 67986 - DNA, 1181 bp, Homo sapiens
agaagcttgaaggctctggcttaacagagaaagagactaatgtgtccaatcatttttaaaaatcatccatgaaaaagtgtcttgagttgtggacccattagcaagtgacattgtcacatcagaactcatgaaactgatgtaaggcaattaatttgcttctgtttttaggtctgggagggcaaaaaagaggtgggtgggatgaaacatgttttggggggggatgcactgaaaatctgagaactatttacctatcactctagttttgaagcaaagatggacttcagtggggaggggccaaaaccgttgttgtgttaaaatttattttattaaattttgtgccagtattttttttcttaaaaatcgtcttaagctctaaggtggtctcagtattgcaatatcatgtaagtttgtttttatttgccggctgaggattctgtcacaatgaaagaaaactgtttatatagaccccattggaaaagcaaaacgctctcactgagatcagggatcccaaattcatgggacttatataagaaggacaattaatgctgatttgggtacaggggaattatgtgtgtgaatgtcatctacaattaaaaaaaattagcacatccctttacttacttgttatcagtggattctcggggtttggacttaatgttgagctaagaagcattaagtctttgaactgaatgtattttgcatccctggttttggacgacagtaaacgtaggagcactgttgaagtcctggaagggagatcgaaggaggaagattgacttggttctttcttagtcctatatctgtagcatagatgacttggaataaaagctgtatgcatgggcattacccctcaggtcctaagaaataagtcctgaatgcatgtcgttccaaactaacactctgtaatttttcttttatgtcttattttccaagagtcctccattttttgcaccccctcaccgccaactctgttattcagtagagagaagtgtacggctttctgattggtgagtgaaaaagtaacttgagacacgacctaagttgaagagtttagacttgctgagttttagaagtgatggaaattaagagagcatttcaataaaatgtgacttggctgtctttggaagagaagtgcaaggctttcctttgaagaatttaaattagtccggtaggatgtcagg

SEQ ID NO: 67987 - DNA, 1048 bp, Homo sapiens
ttgtaagagggccggaggatagtgatccttcttactcacaaatcaggggccacaggctccctactacagagcagtgcttatgagccataacttgtgtttggaactggcaaagacattcattccttcgttaatatgtttcttacttctgaaggcaaaaataatgacttagtttttgcaggtgtaaaagattatgctgccttagaatatcccagaggataggcacagtgttctctttctagaatttgtttagcaataaaaatgaaccgatccttaagttaatcaaaataaagcacttgacacattttcttccatgcttttgttttatagggaggcctttgtcttttctatctgttcgagctcataacacttcctccgacatgtgcactgtctgttgccttcattttctcctggctggatgggctgagagaagagggatgtgggagtgccgtgtgtggggattagctgcgtagagtgctgaatatctggtgtaatgattcacaatggcttgtgtttctaggcagtggaccaatccagctatggcagtttcttctggaattactcactgataaatcctgtcagtcttttatcagctggacaggagatggctgggaattcaaactttctgacccagatgaggtaaggaaggaggggcttgcgagtactgtgttgaggaaggatgagagaaaactcctggaaggggtggcgtgggcctgaatgacgtgttccaggattgggattcccagctctgccacttgccacccggagcaagctaggtagcctgtctgagctccaggttcattatttggaaaatagagaaaagatctatgttaccccatttgtcttacaggattagctgatagaaggcattaacgtgcctggcagtaggtcagttatcacccatagagctgcctcctgtgacttagcctcttcctagcccggtggctctgtgagtgtgaaaggggccagacagttcaagaggccttgggagattggctcattagtttcttatttcattacacacatgtttatggagtagtggttccgtgcc

SEQ ID NO: 67988 - DNA, 1048 bp, Homo sapiens
cttcccctttctggctcttttttatttttgggtgcatgtctatttaaatacatacacacaagtgtgtgtacatgtgtttcttttttatcaggcgagtcaaagcattaaaacgactttcttccttgtgggactttctgtacatctacacagtgaggccaagcctgtgggtttgggctcagccatgttgtaactttgggtcgatctcctgtcacattgttttgaaattgcatctggctttgcatttgtgtaattgtctctttccctctccttttcttcattcttggttttggtccctaccacccctccaaccccaaactaatgactgtggaccaaaagtgacccttacaaggagacatgaggtatttctttctggctccactcttcttccctccctccaagttcaggccacagaaacttgaggggaagaccattttgtgcagggctgttttctgcatgttagaagtgctgcaaacagggcctatgcaaagggccaattgattctgagatgctgtgattggtctagaccgaaagcattactgttagctgattgttatttatactaaccatagtacagtattcacgggctgcattacagcgtacagagtgcttctatgccccacttatttgggccctaaggactgtctttgtacgagtctactcagtgggtggctgggtgctgccgcatcttctgttttgagtgctctgaggtctgtttggtggactcagatagctttggaaggagctcgccgaggcccttctcagaaaggctggctagtggacagtttagagaacacaggtttccctacatgagcgcagcagcataactgagtatctaatccagttggattctacccatttttggagaaaatacccgtaaatgaaggttcccagcaccagggttgtgaaatcgagctaaaatgaaagctgcctaccgctgtaaaccacaactctcaacagggttgcatttgcctcatgtttggggggttgccagagactggttctggcttggtttagtccccttgcttagtgggactccttggaaactcta

SEQ ID NO: 67989 - DNA, 1035 bp, Homo sapiens
aagtattcttttggttgctggtgtttccttgggagtggatgtaaaccttaagtagccagtagtgaccttgagtacctctggattactagggaaggggaggtagggatgggaagttgggcggtacacctgattatagcaagcatgaagataatagttttaagtttgctgttttgaatctgggcactaacttcaatgcttgccaggaaaatcttatcttgtaaagcaaatcctagtgaggtcacgaagtgtgtctcctcctccaattggggttcagcactatggcttggtgccctccatgtaccaatagttttgggtcaggcctaaggggtccttggtcttagctttgcccggtttgaatattttctctgctgttaactgggcagggtggcataggtggtcatcttattaccttctgttgcctgatgtgagaatcaggatacccaagtctggctttaccttaagccaccagatatggacacatgtctgcattatctttgtattcttctccaagaaggatgctcctagtgagtgagctgcctttctttgagagagagtgggaaagttaatgagttcacatttagaaagtactctggagtctttggtgattcaaggagtgttattaaattagtgggagatatgatacggagtggggatgctaaatacatatgagctccccaagggtgagtcatgtgtatgtgtacaggaaatgcatccttatttcatataagatcaagagttcaatcttacacctcccttgcctcctaatggaaaccaaacattcttcaaaactgctggatgcttgcttttctttacataactgcagttcagttggaggagtgagagaagtgaagctaatatttacagagagtacctactatgtgtcagatactttgcaatgtgctttacagaaatacataatcacattctttaaacaaccctttgaggttgatgccttaattcccattttgtagataagaaattgagtccagaattaagttcagataatttgcccaaagccatagagttttcaagtca

SEQ ID NO: 67990 - DNA, 1024 bp, Homo sapiens
tcttaactttgagaaacgtccgaccctattcatgtaggttacttactttacccatgtttctaatctgccataaatttttcttctggtaccaaaggtccgttggaaggaaagcatcaaacacccaaatgtgactttgtgtctttggtacatggtgttgtccaactctttcatttatatgcatttgaagaagagaaggataggaagtaattttttttttttttgtctttgacacaaatattggtgctaagcaacttaagagagtctggccttacagaatttctgaaacaaatgtagtttgagagggaaagatgctttcttttaggataaggcactgccagctatccttagagatgagtgattttggaggtgaaagtatatagaaagatctagggagaaggcagtgcaccctggaaaataattaatttcaagaacaggctcctctgttgtatctgattatcaataagtttagttgctgccccctgtggttaacacttctttgcctctgccataatttattgcttactttaaccctttcttacgctgcttaaactttcagcacaaccatactgatgttttgtcattctgaggtccttcagaaatattaataaagacatgtaggtcacgtcccctccctctgggtcccctgacattcagctccagggctgctgtgcacagaaggctgagattttgtctcctcgcaaggatgatggtggtgggagcaatgctgagagcgcagctggaaccatggagacatttaaggcacttaggcctacaattcagaaatgctgtttctatgatggttgtgtttgggggttcgaggaagctagaatgagttctgtttgtcagttgattgaaaccatatatagaagtgaaaagatagttcacatcaaagatataaactcaactaataggtcctttccttaagaacagcttgtttatatgtgttgttatgggtgtttatgggggaagagacagatttggtcatctgggaaatatcgtgtcgatatgtcagtccacataccta

SEQ ID NO: 67991 - DNA, 1051 bp, Homo sapiens
cacgtgttaggcaggtttggggaaatgtttctttcagcttttcacatttattttcctccaaccctggcacctgggaccagccctgccacctgtgcctaccgtacatggccataaccataaaggctcactccatttcagtgagtcctgaggtgctgacttctctgcacagcaagaggtcagtttttaactcagaaatccccaggggcccggctgatgtggaaaagaatttttccaaatatcgtatccccaccgtccacaaacgggaggagcccggggagtgtgccctcctgtcccaccatcctgccccctgctgtagttctcctttccgagagacccctgcccataccctatgccctcttgctctgggggtcctccaagggaagagcgtgcagtgtggagcccacctctcccacagaggccgcctgccaatgaaaaccttgctcacttggttgcaggccaacttaatccttcaaacttctgcagcacttggactgtttcacaactgacaaggatgcagggaaaggctgccagaccatgtgcgtgagtgtgtgtgtatgcacgcgtgtgtgtaatgtgtatgcgtgtgtgtgcactgtgtttgcatgtgtgtgcatgtgttgaatgtgtgtgcagatgaagtgtacgtgcatgtgtgtgcatgttctctgtgttgaaatgtgtgcttccatgtgggtgaagtatgtgtgttccatgttggaatgtgtacagtgcatgtctgtgcatgtgtgttgaagtgtgtccatgcatgggagtaagcatatgtgtgcacgtgttctctgttgaagtatgtgcatgcatgtgggtaaagtattgtgcacatgtgttctgtgttggagtgtgtgtgcacatgtgcatgcatgtgtgtgagtgtgtgcctgcagttagccccagggcgggtgaggggacccagtgcactcgggccagagctcagctcagatgcaggcaccagggtctgactgggactgcttcatctcaggccaggtccttccgcagcagaagccaaagggccaaacgctggtgaaaagtcctg

SEQ ID NO: 67992 - DNA, 1794 bp, Homo sapiens
cacacggctttaagtaactgagagcctaaagaaagtaacccagggagtccggtccagttttaatatttgtggatttgttgtcacacacattgtttagtcctgaaactaaaacctattttataaatagtagggttaattcctcgaaacaatttctttattaataaatgtcctgtgggtttagaaatatcaggtaaatatttgaatacagaatgatgattgcaattactgttacaagcgtgaaacacaaacttcagatcaaatctagagttgcttcatttaatgcatgctagcaacagccttaactttggattcagttatttgaaacacttttccggcatctttccctttctaatgttgtggggtggaaaccggatggcaaatcactgtgagccggatacctcagcacagtccaccttgtgtgtgacttcacaaatgggggacttcacaaatggggtaactgaatgttattactttcaaattttgacatggagcattatgatcaaggaaatggagctgccttatacattaaacccgtgatttaatcctattgacattttcatagccatgcctccagattttatctttttggcaaaattctgattccacagtttggtctgattgaaataaatattccctggacgtctggctaaaaattttgctaacaatcccagaggtgccattttcttattaataaatttcattggagccttatttcttactatattcaatttcgtttcaaacctgcaagtccctgggatggtcccacgactagggcctgcacatttcttacaatggcaaagcattttttaaaatttagggtcaggttgaaaaattctaggactaattctgtagagaggagggactgttaactaacgtgagtggggacggaggagtaggttaccacatttggagcagtaatagatgcaaacgatgtaaatttgaaatttgcccctttagttaaagaaggagcctgcaaagtccatttctctgttttcagccctgtcagtcacccatttaggatgttggcaaagtactgcttgagcagaatgtgtaagaaagtaataatgaaagcaaaagtatgtcagacagttacttcttccacatggttagaggcatgtgattttcagcactgtgtgttacagaaatgtcaggaatggtgtattataacgtgtgcaagataatgtcagtgtgcacagagggtcttttttccttatctgattagtactgttaatgttcaaagaataaaaatggttttacagtttagattctgagatagcaaaacctgatttttcaaccatgacctgcatgagagaagcatcctaggaagtcttagatcatacttttgagtttttaattttaatttatatagtgtttttttatgtcttaatatttttgtgaactggtgtaaattgttaatgcatataagcttgtgtatttttgtaaatagttttgtgatttatttcttgccccatatgtaaatatttagagtctcatttcttgcaaacttatttgaagctgagttgtgggtttgggttttgtttgtttctttggttgcagggtggggtggggggtggcaggggagggaggaagggatttttgtacctggagatggagatatcttgtggtttaaagcaaatgtcccactgaaagtgattcaaatatcaacagaattatttcaggttaaaacagactgctttgtgtatgtgtttcctttttgacctaatatgaattataatgagatagtgggggtgattgatttggggaattaggaccaaaggacacatgttttcatga

SEQ ID NO: 67993 - DNA, 1052 bp, Homo sapiens
ttaagtagctacgcattatctattattagactgcaagttcctgcaataactgcttagttcacagccccgtttcaccagtggagttctgggcagttattgctgtcctaaggcattactgtcgtttgcttactctatacttgtgtggtcacagtcttcttgtaattaccatctacaccagcatttcaggtatagctctttataactctggagacatgtaaaacatgtttaacacccacgagttttgaaagttgcattccttattagagtaggaactctctagcccaactccattctatgttctcagctccctccaccccccaaaatacatcagactagcaaggcagtcctatgtttacaaaacgagtttagattgtcatttcattccataactcttaataatactcaagttttatacattcacgtattttaaatgctcggtctgtagaagacactaggagaattgcattccaattactggatggttgctgctctggctttttagaacttgaaattaatttttatttagagcaaaggaggaaatcttttaagaggctaaaatcatgctgctattattgctgtgaaattgtataaagattaggattcatgccagtttttattttaaaaaataatgtgcattttaagggtttatatttagaaaaaaataaaatgtttcaagaacaacacattgatatgtggaaatattctataaggttttcttttgttcccttagaattcattggagggatgcagtaaaaactgtagtagaaaccttgaaacacccatatgtgaaaaggtctgtggaaattgaggcctctacattaaaagtgcagaaccaactgttttacagtcaaagtgctaggaaacctgataggatacttccctttggcacaaaaacaccctgggtgctacatacaggagtatgacctttggtgaatatgtggcactaattttttttaccttaatcatattcttgtcaagtaggcaacccattgccccttggagaccacaccagccctgtaagttctcaccagcagcatggagattaggaagag

SEQ ID NO: 67994 - DNA, 1050 bp, Homo sapiens
gtgccccctggctttccccatccacagagcaggacctatgctacagcgttgggtcaaggggccttcctgcccgcagagttgtccttgcagcatcctgaaacacagatccatgcagaatgagccctgcgagcaatagagttgaagcagcctctgctggacagtggactgttctatttttttcaataaccaaaaagattaaacaaaaaatactataaaacccctgaccacatttaaaaaatgataataaaagtaaacaaatcagcatctttttccccttccctgcttcattaccccctcttccatctatagactttgtcatttttgtctttagaaaagatctgaaggatggtaaagccccgtgctgaaacccagtagagaaacctgtctcaggacacacttgccatctagggctagcttgaaagagcctgaggactgcctttaactgaatttgaattcagcattgtcctttcttcttagtatttgctgcataattgagagcagttcacatcgatttcctggtaggcgtctgcattccctgttgtgttcctgcttctccttcagtagctgcacaacttgcgcagatcgacacactgttgtcacttcattctccccgtctgagaaggatcttgtgttcagttagagtcgtggaaaaatccctgatccttcaaggtcagtcagacagttggcaacattataattaaaaataagaaattaagactttaaattaaacatttggtagagtcatcataaaacaccagaccacttagactcaggctgaaccatactctttctattcttatttttcatccttgttcctcacggttcagtgaacaggctcatatcatgacagaatggacttttaaaagttagtacttaaggaaacttctttaggtggaagaaagtaaagttcttattgtcagtgaactttattagcaccagaaatctctattgatgcttttaatgcattgcctgccttcaggttttcttcttaccccacccctcaataagatttggtgaattgtaattctagtaaaacatgtcataccattg

SEQ ID NO: 67995 - DNA, 1105 bp, Homo sapiens
tgtatggtgccaggtcagagccaccagcctccatgggtcttcgttataacacatatgtggccccaggaagaaacgcatctggacaccactccaagccatgcagccgggtcgagtatgtgtcttctttgagctcctctgtcaggaatacctgttaccccgaagacattccaccgtaccctaccatccggagagtgcagtctctccatgctccgccgtcttccatgattcgctctgttcccatttcacggacagaagttcccccagatgatgagccagcctactgcccaagacctctgtaccaatataagccatatcagtcctcccaggcccgctcagattatcatgtcactcagcttcagccttactttgagaatggccgggtccactacaggtatagcccatattccagttcttctagttcctattacagtccagatggggccctgtgtgatgtggatgcctatggcacagtccagttgagaccccttcaccgccttcccaatcgagactttgctttctacaatcctaggctgcaaggaaagagcttgtacagttatgctggtttggctccacgtccccgggccaacgtgactggctatttctctcccaacgaccataatgtagtcagcatgcctccggctgctgatgtgaagcacacctacacctcatgggatcttgaggacatggaaaaataccgcatgcagtccatccggagagagagccgtgctcggcagaaggtgaaagggcctgtcatgtcccaatatgataacatgaccccggcggtgcaggacgacttgggtgggatctatgtcatccatctgcgtagtaaatcagatcctgggaaaactggacttctctcagtggcagaaggaaaggagagccgccatgcagccaaggccatcagtcccgagggagaggaccgcttctataggaggcatcccgaggcagagatggacagagcccaccatcacggaggccatggtagcacgcagccggagaagccatccctgcctcagaagcagagcagcctgaggagcaggaagcttcctgacatgggctgcagtcttcctgagcacagggcacaccaagaagcaagccataggca

SEQ ID NO: 67996 - DNA, 1008 bp, Homo sapiens
aatgggaactatctcatggaaaccagccacagggcttaaaagtaattgttgtgtctgactcaaagataacaacacaccctgctgaaaagtgacatacctttggtaatagtatatttcatctcactgatatcttccccttcttaccttgtgggaattatttaatcctatattggttgctgcttgtacctgccccacaactggtggctgctctgcagatctctgggaaggcggagggggaaggggacgattagttctgtgcgtgcgctgaagtgtggcagcagcaaaatcagcagtggtgggttgttcagccacatcccagctggcttccttggtgctcatttgggctgttgctggagtagttgtcatgtaagtcatggtggctgtgctggtattctcttcgggggacccagaaggagggtagattttatcgctaggtaaattaggaggtgtgggagatttgtctgcaaattctaaagggtgatggagtttatccacacttgcaccaagataagaaggaggctgatctccactgtagaaacggggtggagactggtcctgatccaagaaggagacagttggcatactgttcttcccagactggtcttcagggaaacttacatgatcatcagacttctctgagtctaagggaactgaagtaattctggccttttctgggtccccagataaatatgcttgatgtggctgattccctgttaagtctacttggtgatgttgctccccagattcagttgtgttggaatgggtaggatccccagtagctgttgtctctggtagaggatggtcacagtttcctggtgcattattctggaggtggaactgctctgctggtcgatcggtttggaaataggccttatctagagcaactgcagagtaagaactggacagattatcttcagttgtagccaccgctatgtctccataatttgtatacccagcctgagaggtccctggtctcttcaatgactgagttgaggcttgctgtgcgga

SEQ ID NO: 67997 - DNA, 1012 bp, Homo sapiens
atcatctaagccatcctcctttactgaaaaggtcgtctatgctttctctccgaagataggacggaaattaagcaaatcaccttctatgagcatatctgagccaatttcagtgaccctaccaccacgggtgtcagaagtcattggtacagtctcaaataccacagctcagaatgcatcatcttcaacctgggacaaatgcgttgaagaaagggatgccacaaatagatcccccacccagatagtaaagatgaaaacaaatgagacagttgcccaagaagcatatgaatctgaagtccagcccctggaccaggtggctgctgaagaagtagaattgccagggaaagaggatcagtctgtctcaagcagtcagagtaaggctgtagcttctggacagactcagacaggtaccgtttgttttcctccattctttctttaagttaagagggatcttcaatcctgtgtgccatctgtgccttttaagagagaaatttgtccacagctagcctttaatcaaagagaatgcttttctgggtggtgctgatggctcagagccctaaattaaaagcagtccaacaaaactccccaaaagggccaatggtcctgcttcaaatcttcacaaaagtccccttatctctttggacggtgagaattcgtggataatttttgcacaactgcgtagctcttgattctgtttttctcttctaataaaatatctttattgtagccttccaagttaacaagccagctacaccatcaaatgtaaaaactgttcataataacagtctacaagcacttgaagcttgttttctaagcaatcttttctgagccaggtgagggacatgctttttttcccccccatctctgtaacaattcaagaagagattgcagtctttatacactgtttgttttagttttccttctgaaccagatgtgttttcaacagcatttgcatgtgggatagaagatcatggattgccattttgaaatatggaaggcacctattttttaatga

SEQ ID NO: 67998 - DNA, 1080 bp, Homo sapiens
tgaatatatatatatatatatatatatgttagacagagtctcgctttgttgcccagtttggagtacagtggcgcaatcttggatcactgcaacctctaactcccggtttaagtgattatcttgcctcagcctcccaaatagctgggactacaggcatgcgccaccatgcccgggagcataattttataaagtgtataattaagcagtttttatatttttagtagatacggggttttgccacttaggccaggctagtctcgaactcctgacctcaggtgatctgcccacctcagcttcccaaagtgctgggatcacaggcatgaaccgctgtgaccggccaatatatttatatttattaagatagtttctgcctctttaaattactttttaactatggcaattaaaataatcctaatagaatagagagtttcttttttaccagttggatatttagcaacatcgtaaaattatgtaatactctctgccactcttgaagactgcttgggaaacttaaaacctattcttaaagaaaaaaatgaagttcttgtttagtatctgaaaggaattttttactaaatatatgtaaatactttatgggattatgaagattttttaattgagaagttcaatttatttagaaatttgaatattgtaaggatgtttccccacaaaaaaaacatccattttgctattatagattcaaaatgccactcaaagtgattaattccacctcataagtcatatgaggccagtgataaaataagacacaaagaaatgaaaaacttgcccaaagtcacaccaagaatcagtgttggattagtaatagaatccaagcattctgagttcttttcctctccagaccatgaaatactgcattcgccctctgattctatcacatgtttgctatttagcatttggttttggagttctgttatctcaagtgtaaatgatctgtgtgcactgaaagaattttcagaaagaaaatgagaagtaacacttccttcacctagatagtaagttactgctgtgctgagtaggtgacttaccacagcattctgtatctacgatgttcttactttg

SEQ ID NO: 67999 - DNA, 2469 bp, Homo sapiens
gacacttaatatttcctattcccagatacgtcttattttcacttatttttcagtttgtgaggttggatccaaatatgaagatatatataaaaatgatctttgtgaaaatatttactagtactaaaatctgcatgtttactatccattttctgctttggctgcactgtgtagagtgtgctgtctggaaggtggatgtttgcttactgtttcacttatgcttctccagcctgtttggttctttctgtcatgtgttcatttcttttctgtaagaaaagacagacccatggctatcttaatgttgattattttttctctttcatagaaagaggcctcaaaataagatgaaaaagtctcctgtgggtagctggcgttcctttttcaacttggggaaatcatcatctgtttctaaacgaaagctgcagcggaatgagagtgagccttcagagatgaaagccatggctctgaaaggtgagtgcctgggagattctcacttctgctgctgtcatgatggtcttcggttgttctgggcacgttcttcacatattgttatgatctgcttccataacgtgttcacagttgtgtcacacatacagagtgtcttctctcaccgattctttattcctaaattgaagagtaacataaattatatataaatatgtagaagtatgcaatttcttttcttaaggaaactatatagattatatatagtgtaaatgtgattaaattcacatataccttgtatattgttgtaaataaatactgctatggtatctaaatttattgatctgtatttttacagatctaaaaaatttcaaaactgtttcaacataactttcaagtttataactcttttaactaaagaaggtattttttattagatgtctcattaatagagtatcttattagatcaaataaatctattactgtcgaaaaagtactcttttaaaaatagtttaaaagccatattctattgatattaacaacttctgaatctaggaaggatagtagtacttcttagataatgttagaagtataatgttcaattcatttaattcgtcattcagtttgcaatcatgtagagcatgtgctagctattttgatagcaggctctgcagatagaaaattagggtagtacctctgccttccaagtcaaattgggaagtcatacgtgtgagaaagtaaattttagtgcagaatcatagttattgaaatagtggtttaggctaggtacagtggcttacacctgtaatcccaacactttgggaggccaagtcaggaagatcgcttgaagccaggagttcaagaccagcctgggcaacaaagtgaggccctgcatctacaaaataataataataataataataataataataataataataataaattgcaaataagcgaggcttggtggcacatacctctaggcttagctactccggaggctgaagcaggaggattacttgagcccaggaggttgaggctgcagtgagctatggttgtgccactgcactccagcctggatgacaaagcaagacatagtctcttaaaaaataaaagaaatagttacatgagacagttgtggtaggaattgtcaactcttgtagaggagggactagtggttaggaaataacaacctttgatatgggttttcaaggagaagtagggattcacctaactgacaggagactaagaatggtatttcaggagatgggagcagagtgaaaagaagccagctgagggctgaatgctggagagaagcaatgtttaaaggtgggaaaggaagaattgtcatgagaggagagtaagaagaaatgattacaaaggtaggcagagaaaaaaagagatgcatgctatcctcagcaggggaggagggggttaaaaagaaagtgttcgtagtgctgccaaggggttaaagaggatgaagatatttagcgaataagattcacatatgtacgtaaagttacctgtgttagtatcccagagttcccataacaaattaccacaagtcaagtggtaaaaaacaacagaatttttttccctcatggttctagaagctcaaagtctgaagtcaaggtaccagcagggctgtgcttgctccagaggctccagggaaaaatccttccttgcctttccaagctcctggtggctgctggcattccttgatgtgtggcagcatccctccaatctttgcctccatctccacatggccatctctgtgttttcttacgaggacaccagtcattgggtgtagggcccactctaaatccagtatgatgtcattcaagatatcatattggtctttaggaaatgtaaaagaaagaagcatcttagttaatctctctgctcaaattcataatcctttagaaaagagatttttcacacgggaaaccatttgagaacagtataacacattatataatagagtactaaattgctgtcaaaatgtgcagtataacacattatgtaata

SEQ ID NO: 68000 - DNA, 1050 bp, Homo sapiens
tggcatgatcacagctcactgcagcctcaaccttcctgggctgaagcaatcctcctgcctcagcctcccgagtagctggcactacaggcatgcaccaccacacccagctaattgtttttacactttttgtagagatggggtttcactgtgttgcccaggctggtcttgaactctcgagttcaagtgatctgcctgcctcagcctcccagactgctgagattacaggcaatagccatcacacccagcccgttgtctttagtagttttactctgggcactattaggtaggacgctttgagacatgctaggtgatagataatacctctgtgtgtgcatgcgcacagacacacacacacacacacacacacacacacacacggcacttacctggtttaacttacatttaaggtgatcatgtcttgttttcaaaagtactcttccctattgtttaatcacaatatatgtggaattgtttaagtaaagcaaattttaagtagtcaagataaaccagaatatgaggatttgaattaggctctttatttcaaaagcatatcctttgctcaaatattctccccttgatgcctattggaatttttcttgtaactgttttaaggcttttgagacattactgttttctttcatagaagtgttgaaatcctttcctgttagtatgtctgctgcaagtagaatggcataacttcaaaatattatttgttccagaaactagctttggtggaagattcacttctaatagtaatatttcaacctgttaagcaggaaaaaaaagttctcttgggtttgtatggtccctttcttcattttgctattgcaaacttaggaattaattagcaggcttttatgttctatactgctgcatcatgtttctttctgttaatatgttgtattttatttccagaacactggagttcctgatgagacacttgtctcttctagctgactattgttccatcacaaatatgcatgcaaaaaatctagcaattgtttgggctccaaacctgttaaggtaatttgcatttcacttattaatttt

SEQ ID NO: 68001 - DNA, 1209 bp, Homo sapiens
ctttatgttgtttctgacttttttatcctgcttcgggaaagcatttctgtgttgtacaatctgtatctgaggaatttctgctcataattgttcatagatcaattgccattcaacactagtctctggaattgccaaaatattggatattcaagtcattagcaattaggagtcctgttttcagactgttgtactataagagctgttcattcatatgtatctcagaggctattgtccattttaatattaaagctgtgcccttaatttccacatagaaagacatctatcttgtactaagacatccagttgttgctgaagtccaaacacaacttaaatgaaatataattaatggaagataatagcaactcactgagatagagctgaacacttttggagcttatgctttctgtttttaagacacatatttgctctcctcaatcaaatgatttgcttgtcctcttctgtctacgtcagccatgaatttgactctgagcacgtccccgacctgacgaaagaaccgtatgttcaggacatccattctgtgggttccctatgtaagctgtacttccgggaactcccaaaccctctgcttacctaccagctgtatgagaaattttctgtgagtacaggctacttttgaatctaattctttgtggaactttgctgtgcttttgttcaaaacacatgaactttggtttggtcacatgtaagaaatagttctgtgactgaaatgactccttaaaaaaacaaatattgccagctagtcggtggtctttgctgttttcacattgtcattcttgtgctttctgactttgagctgctagtcttgtcacacttaatactgatgaccatcaagcctttttaaaattagtttcgtagatctcagtgttcacactgtgtggaaacagtttacttcctgaatacaatgttgtgtttcctcgccatttcacatccaagagcaaagcaagttgatctcagagtgaaaactgaattgtaagtgaactttcatttttactaacagagctcactagtttattttgtactgtgactcttctaggatgcagtttcagcagcaacagatgaagaaaggctgataaaaatccacgatgtcatccagcagctccccccaccacactacaggtcagccacagtgggtaaataccaggcagaggtagaagtcggttgacctgtaaacgtttttttttcctttgg

SEQ ID NO: 68002 - DNA, 1050 bp, Homo sapiens
actatgaaaatatagaagatccttttctagaagcaaaactttgtagcacttacaagtaattatgttgttgggacaagcatttaactttatatattcatttgctatatatgaaagtcagctgaacagctgtatttcttaaaaatctggcatggtgttaggactaaacagttcactttgctgtaatgtgtaactgtaacatgatctaaatgagtctactgcagaagaaagactgtcctaataatgtatgaactctcttactcacttaaatatcatgacatagaaccagtcttgattattcaggaattagttatctaatttaggtgggcaattaaataaatataccctcatcattttttgtagtggattaatttttgctccttttaactttaatttacaaattttattttacttttgtaaactaagacaatcttattttttggcaactttggttccagtgaatactacaatttcatctgtttctttacaaattctctttagtgccgcaggttcttcaaagctgcacagcattcattgagagatatggcatcgtggatggaatctatcgcctttctggtgttgcctccaatatccagagactacggtaaaatcttatatggcactttttcactccttcttaactaattaaaatgcaaatattttaaaacagattcacttactttgataacctattttcattaaagataatttagataaaataggaaataatatacatgttattgtctctgtatacttttctaaatggcatttttttcatctgtagtatcagagaaccatgcaccttaatctcttcagtacttgtattttgcctctttatagtgtttgaagattttaacaaattgagtttgaaccgatgacagccatgagagaggaaatttgcattataataaaattattctttaggtgttaattaaaatggatgggaatggaacattttctaatctcctttgaccctgattctgtgtttatgttcaagtatgcatctctacatatttcacatcctccccaaatcttctctgagacaaaaacagt

SEQ ID NO: 68003 - DNA, 1058 bp, Homo sapiens
ctccaggttcaaatgattctcctgcctgctgagtagctgcgattacaggtgcccgccaccacacccggctaatttttgtatttttagtagagacaggttttcgccatgttggccaggctggtctcgaactcctgaccttgtgatctgcccgccttggcctcccaaagtgctgggattacaggcatgagccaccatgcctggcctaaactttttcatagatgaggaaaatgaaatactgagaatttaaatatttctccataatcataccgttaggagctgcagaggcaagattggaaccccagaggtctgactcctgagtctaccctttgcaaccatgctaattgcatttctgtacaccaataataaatgattagaaaatgtaatttagaaaacaccattttataacatcaagaaagtcataaagttcctaagactatctacaacaaaagttcgtaagacttttatgaaaggaaatttgaacaatttattgaaggacataagcaaattgtaaataagtggagagatctattatgttcatggaaaagaaagctcagtatcataaagaagtctgtcctccaaaataatctataattcagtgcagcttcaatgagattccaaaaagttttttttctccttctaatttgacaagctgattctaaaatttatgtgaaatgggaaatggctaaaaataaggcagttttagaaaataatagtgaatgaagggactcatctttccagttaagacttacaaattaagaaagtgaggtattgatagagagaaatgagacaactcagaaacagacgtcttacatgctatatgcatttttcacgtaagatagaatcagtcttacaattcagtgataaaaaggttattcgattaaagatggcagaatagttgattatacatatggaaaaaagtatatatctctccctaaaaaacatgaaaaagcaaaagtttttagaagaaatagggcaatatgtttatgacttataaggaaaatctcttgaagtacagaatgatttctgtacctaaagacatttaaaaatttgtgcaataa

SEQ ID NO: 68004 - DNA, 1015 bp, Homo sapiens
aacttcatagcttaataaagtgcagaggactgtgacattaaagtacatgtgattacaatttaatctgacaaaaatttatctcaaaagagagtttttacaccattaaaattaaggttctaagttttccaatttctagaactaatgtatattttggtagtcctgttacctttgatgtacctgaattcctaagaatttgtgtgtgttatatttaatttttgtaagaatacacaagcatgtcttcctgagatagtactagcttttaagcttcttatcaagtagtactagttcatcctggaaaaataagagcccagacaatttaaaatttcttagcaggttttaaaatctatattctgtatataatatcccattccaattttaaaatactttaagtgtcaggaatttatatctacttcatgttttttcctcctgcttctggtaaaatgcaaatcttccttttctgtttttagaaatgaaattagtcatagtctcttatataataaccgaggtggtaaagtcagcaagttaaaaatacttcttactttgattttgtaccaagtcgagaaacagaaccaatcgtatttattattttaaatttgtaatttaaatttcgaaataaaaattagtatcacttttagcaggaaaaaggtgtaacttatttatatcaacctaaaataacataatctaaatttgaaccttctttgatatttataactgaaatctgtagcttctagaaaagtaagtgtgtaatgtagataataatagtcttatcttaaccgtatgaccattttcccaagggaactatgatttttaaaggtctagcatgagcaggttctgtgttgtaacagtttgtgtactcctctaggaagggcagcagcatagtgatgttgctttggtttcatctttaaccctggagaagagatacagttttattcaaatatcccaatattttagttaaccattggtatgccattcaacatgagttgtgctggatattctgaagaagcagtttgtggcc

SEQ ID NO: 68005 - DNA, 1223 bp, Homo sapiens
ttattttaaaggagcctaaagtgctatcatttttattggatacactgtctcccacctacttagcaaacaactgaaaagcaattaacttttaaaaagagaaaagacataatttaatatcaatttcatactggtgttttctgagcaggaagtgctcacctgtgtggggttgatgggtggagctcttctggtgaagcctgttctgcaagtgtgagtttaggctggggcgtttctgtggtgttgcaaagcagtatgtgctgagagaggaggattaagctcctggaggcagagctctcccacacacttgctggcttgctgggctccactgactggactgaaaacagggccaagaaaactgctgctgcagggggtcctgaaaacagctggaacccggcagtgatgtgggacctaacttgaagttaacctgtggtggtgaggttggaaccagttggattatgatttattttctacactcttgtacggaatgcagagctgttgtatcctgatgaatctactgctaaatatagtcatttggaataattttaagtattgatcttaaaacttgtaccacaacaagaggtaaggagatctcaatcagtcatttaaatatttgactcaagcaacattcagaatttttcactgaaactatgtttagattatatttgggcacatgttaccttggttgctctcttaggtaaatggttaattatttaattatctagaaattcagcacttgaacattagtatttgtcatgtttgtcaaaaagtttatactttttgaagtaggctttgctgattgtacaacacagatgttcccagtcggtttcaagaaatatctttttttctcctatttccaatcagcttatttcttgttttctatacattagtttaatataataaaagtttttatgattaaaagaacctgcctttatttcttaagcagccagcttatatcatctttttaatttttttcctggtgggttaataatatttcaattattgattaatggaaatgggcagtgctaatgcacttaaaataatttggtagactgtgtaaagaggctcctcaagtttgcacgaagaagtaacctttctggccttttcccttcaagtatggttcttccccgcctctttggtattggcattggtaaggataaccatctccatccataaaatattttgtattaaatctcagagattttaccactaaggtggtgttccgtatg

SEQ ID NO: 68006 - DNA, 1258 bp, Homo sapiens
gtttcctaaacccatatgccctttagtcagtgctgggagtagccccctaatcagtctttttcttgccctgagtaaagaggcttttccgcttttggccatttccgatattcattcattaattgatcaagaatttatcgagtgcatactaagtgctatggctaaaacagtgaacacaccagacagaaattccaccattttggtgtttgtattcacgtgtgactagaaggagagcagtaaataaataaataaacaatatagtatgatagataagggcaatgaagagaaataaacctgagagacggatgccaagactaggaaatgctgagaagtggcttatgtggggttataattttcaagggagggtagggtggtccgggaatggctcattagaaacctacttttgaacaaagacctgaaggagatgaggaggggagatctgcatgtaatctggaggaagagctttccaaagacggaacagcaggtgtaatgataccgagttgaatgtgtgtcagacttggtaaagggtcaggaggaaggccaggttggctagagcagtgggtgaagacataagatgaggtcaagaggggagagggatcagatcttctctggggcctgggtgtcaccataggggttttggcttttattcagaattagttgggtaggcagtggaagactttgagcagtttttgtttggttcttgttaagaggatcactttgcttgctgtgttaagaggaaaggcagagataggtagaagaagaggggctggcagtggctgttgaaatgagccaggtgagagatgatggtgacttagaccagtatggtagctgtgtaagtgatgagaagtgatctgcttctggatatattttggccatggagctggcagaatttgcagacatgctgtgaagggattgaatcatccaggtaattttttttttttttttttgagacagagtcttgcgctgttgcccaggctggagtgcagtggcgtgatctcggctcactgcaagctccgcctcccgggttcaagagattctcctgcctcagcctcccgagtagctgggactacaggcacccgccactatgcccagctaattttttgtatttttagtagagatggggtttcactgtgttagccaggatggtctcgatctcctgactttgtgatctgccctcctcagcctcccaaagtgctggtgttacaggtgtgagccactgcacctggccttttttttttttttttccaagatggagtctcac

SEQ ID NO: 68007 - DNA, 1163 bp, Homo sapiens
ctgaaagatacagctatagtttgagactgaaaatttcaagttcctatactattacacaacaagggtaacataggaaaaatattctctttgaatctgttcttaaatgttattaatatgttcaattatttgtgtgtacagaaaattaatcaccatatcctgaccaagatagaaagtacccatggtaccttaggaaaaagaaggtaagagtttgatagagagagagagagagagagaggagaggaaacaaaagagggggaagcttgtctataagaaattgtcattttattcagtcaccctagggcatgatatagtggaagatgaggtctaggtggggaaaggtggaaggggaagcacatgtttttctttgtgtttgttttgcttgcaagtcactgaggagctatttactgacacttttcttgaaggctttatgttcatagctattctcttttcagatatttctttttccgaattctctttctcctctcctttacatatcagttacattatttgatattgtctcacagatctcagactctgttttttctttttttttttttactctgttttctttttcttctttttcttttttttgagacagtttcgctctgtctcccaggccagagtgcagtggcacgatctcctgttttctttttttctctctctcttttttttttttttttgttttcagtttggatactttctgttgtcctatcatcaagttcagtgattcctcactctgctatgtgtggtcagtcttctcttaaggccacctaacacattcttcaattctcgtatttttcttttctcgcataaagctaaatggtctttttacaataattgctatgctggaattccccatctttttgcatcatccaccttttccaccagaaagaaagaaagaggaggggtgggggatagaagagagaagagggaaagagtgggagaaatggagaacagagaagaaaagcaagcagagcttattttgaggcattaacttctggaaataaaagactagtgatttaggcaaccttccctctgaggacagttaaaaaattttgacagaagtataaaaacatatctttgaagcattagagagttaataaaactgtaagcaattattgtgataaggtgatgaaacagaaggaaatctgaagagtgacccc

SEQ ID NO: 68008 - DNA, 1059 bp, Homo sapiens
ttgaatttctttataaatatattcaattctttttaatgctattgtaccgggaattttaacatttcattttcttattgttcatggcaagtccataggaatataatttttgtatgttgatgttatatcttgaagccttgctgaactgtttattagttctaatagtttcatagtggattccttgggattttctatatacaagattatggtatctacagtagccactttttacttcttcccttccaatctggatgtctttttattgttcttgcccagtggtccttgtgagaacctctaatacaatattgaatataaatctcaagtacaagcatccgtgtcttgttcctgattttaggggaaatcatctagtcttttaccattaagtagctgtgggggtttcatagatgtcctttatcagggttgagaaagttcccttctgtttcttgtgtgtcaagtgtttaaaagagtgcaggaatttttccaaaggcttttattcatctgttgagattataatgggtttttatggtcattattttgaagttactaaaattcaacatcaaacatttaatttcctgcacatatttttatccatctttctgtggtgtaagcttaacttatattagttattatgtctcatctttgatagtattgactcagatgtactataaattgggtttttaaaacttagcctaatattggcattaaaataaactgtgttagtatcaatcaagtgctttctctcttttttttttttttttttttttttttgagacggagtttcgctcttgttgcccaggctggagtgcaatggcgcgatctcagctcactgcaacctccgcctcctaggttcaagcgattctcctgccttagcctcccgagtagctgggattacaggcatatgccaccatgcccggctaactttttgtatttttcatagaaacgggttttctccatgttggtcaggctggtctcaaactcctgacctcaggtgatccgcccacctcagcctcccaaagtgctgggattacaggtgtgagccaccgtgcctggcccattctcatg

SEQ ID NO: 68009 - DNA, 2651 bp, Homo sapiens
atgtcccatatcccctctcataactgacttgtgtaagaaaaaaaaatgaagatttttttaagttgactcttacctggttctaatcagtcttggaagcatttctacttgttccgtaaaataggaagttgagtagaatatattaaagaatttcaccagtaaaacaaatacctaaagcatcattttggaaggcagtgcataggaatcccaaattcacatcttgtgaacaaaactgatagtctgataatgatacctcatctctacacaaaataaacaaaattagccaggtgaggtggtgcatgcccagagtcgcagctactcaggaggctgaggtgcgagaattgtttgagcctgggggatcgaggctgcagtgagcctagattgtgccactgcactccagcctgggtgacagaatgagaccctgtctcaaaaacaaaaaacaaaaaaactgataatctgttaataccccttttcagctcatgataactggtttatatcttcacaattttaacaactaccatagaatatggatctagaaattgaaataagaatgtagcaaatgagtatgtgaaaataatttcacacagatggaaattatacagctcagaacttggtgatgaatcatacccttggaaaactattccattcttccccagagtctgtcaacagagggatacacaaagtgatggagctttcatatttcagctttaacatctgctgcatggcagcccatttatatttttatctaaggaaacatctataaatattgataaagatttcctctttgcttttgtttccaggctgtttatctcggtatttatccttttggctatacagtatctctggatgatctggaactcagcattttcctaatacggcttgttacaatgccaaaagcaatgcctgcggttctgctactaggtcactgtggtgtgttcctcaaagccagagtctgttgacactgctgagattggctgttttcttctctcttactttccctcttttccatgcgctactagtttttaaaagcagtgaataccaggattttaaatgagagattattttacacatttattttagtcatgtctttttttttttttttttatgaaacctgggagagagtgaagagaaaattcacaaaaagtttgagttgtggcttagtgttgatttaaaaaacccatagagaagtcaataaacataagttggcaacagaggtatcaacataactggattgagatttcagtaaagcgcattattaaattataaaattttacctacttgcatgcatagctcattgtcagactaaatattttaattcatgtaaaaaaagattgggaaattaaaaactaaaaggaaaaaagcagacttagatatttggacaaataaaacagataactttatgtactcatagcaacagattgttttattatttgtttgtgtaattggcatcatctgttatttagagtcttggaataatagaatcatttgggagggactgtagaatacattactggaattcagttggcagtgttcacataattggtctgtttgctggtttagaatcctttctttgttgcttttcatcaggtgggactcttccctggacactgtgttgagttaattaaccaaaaagttccccagtcagtgaccaactcagtgccaaaaccaggtgagtacacttttttcactagtgtagttattttatcaactgcttgaagacacagattttctgtcagtcaagtatttagcttgttttgctagttttgcatttataggcataataattaacattcttaattttatatggttttgatttttaaatgtattcttatatctctgttgatcattttgaaaaggtttacatgcactcaaatttttaggcaattgctccattaagctttgtcattatttacttttatagttgcataatagcattgtaacttaatgaataaaatgatttaaaaaataggtttaaagaactaacatagaaattgtaggattaactgaaaattaataaatgaaaagtaagtatattttaacagggcatatgaacatcaaaactattttaaacagcatttcttattacttatacagtatacttacagtgctgcataaatatctagaatatattacaaataaagcattgttgaaggggataaaaatcaagaaaatgtgaatttcggtgtttattgaggtgatttagttttgggaagattcaacagaatgcctcatctgaaactttttgatgatgtcgattaaaaaaaaattcaaacaaagtctaaaaagctttggagagaagagggagtcatccaacttatttttcctagctatattacatttcttctgtcctttcccacctcccaataaaaggagaagaaaaaatttctgggcctcagaattaatttgaactgtttaccttatgatagtattttctagttttaggacctgtatgtaagagttaagaaaaaaaaaacagttattctttactcttttggtattttcccacttctgctcccaaagcttacatccaacaatctttgctaatagtatttaagtaaaggttaataatacctttcaaagcttatttcttcacaggagactagggaatcattgttcccatttctctcattggaatttgtttattttagactaac

SEQ ID NO: 68010 - DNA, 1025 bp, Homo sapiens
gcagagctgtgtttacatgtgttgcggctttgcctgaatatagggagtctgggaaactgtctagtttagctagtagttagtgatattacacttatgataaagtaaaacaagagggcagggattggagttaggtattaggtgagcctactgtagatctacctctgtatagtatgcagtggcatttccccatatacctaaacctaattcattgtgatgaatttaaaaggtgaaaatgtaactaatgtatgtgatatagttccctgagaagtgcattaagctctctttgttcagtctttgtgggaagtgatggaaaacttttttttttttttgccaaaagatactcgaacttagaaactaggcagttactttcacataaactctttgaggtataggtagtgttatccctaacgttacaaattaggaaactaagacagagatgttaagcagtttgccatagatcacagaacctagtaaatgggtgagccaagtttagaatctggacttttctctcaggcagttgcagattttatatattgaaatgaattagaatgttttagaaagaatgatatttgagagtcaggaaacttcagcagatatatccaaaaggtggcattttgtgtaatatccatttgatggaggagctagagccctctagcagttctggtagccaaatactgggataataatagcatttacttatgcattaacccatttatgcttagtgttccattattggaacgctaagcttgtgggagttatttatatcttactgctcaaggtcatcgccaagttctgatttttcacaaaaaaattttgcaacctctgccataaatgggttaaagctttagaaattgccacggctgcagaaagaataatgtacgaaacaggctgccgtagttaatagatcatgttgttactagaccatttagttaacaaatcaatgcattttactctatgcattttatttatactagcccatttaattctcataacatcccttatgagataggcattattattaccat

SEQ ID NO: 68011 - DNA, 1817 bp, Homo sapiens
acatgcacatgtatgtttattgcagcattgttcacaatagcaaagacttggaaccaacccaaatgcccatcaatgatagactgaataaagaaaatgtggcacatatataccatggaatactatgcagccataaaaaaaggatgggttcatgtcctttgcagggacatggatgacgctggaaaccatcattctcagcaaactaacacaggaacagaaaaccaaacaccacgtgttctcactcataagcaggagttgaacagtgagaacacatggacacagggatgggagcatcacacatgggcctgttgtggggtgggggactagggaacggatagcattaggagaaatacctaatgtagatgacaagttgatgggtgcagcagaccaccatggcacatgtatacctatgtaacaaacctgcctgttctgcacatgtatcccagaacttaaagtataataaagaaataattaatttttttaaaaaaactttcggctctttggaagtcatatttactagtacagaaagacaaaccacagactgggagaaaatatttgcagtgattatatctgataaaggatttgtatcagaacatacaaagaactctcactgggcaagctcagtagcatgtgcctgtagtcccggctacttgggaggctgaggcaggaggattgcttgagcccatgaatttgaggccagcctgggcaacatactgagatgctattttttaaaaaacaaaaactctcaaaattaaagaagaaagcaattcaatttaaaaaataggcaaagattggaagagatatcatcaaaaggatatgtgaatggcaaattaatacatagatatccaacatcaatagtcattcgagaaatgtaggttaaaacaacaatgaggtattgattcatacttattaaaattgcaaggatgtggaagaattggaattctcatacagtgctggtgggaatttaagatgtcacaactcatttgaaaacagtttagcagtttctcaagttaaacactcagtaagtcatcacttaatgttgttggttggttcttggaaactgcaactttaagcaaaatgacatactgtctaatgaaaccaattttatcattggctagttgatataaataagaattaagttcccacagcacagagtaagtcagttcacagtttccaatgtgaacatcaatgacgttaagggaggaattactgtacacttaccacacgatctaactgtttacagaaaaagcatgtgtccatatagaaactcatacatgaatgttcatagcatctttatatgtaatagtttaaaactggaaacgaccctaatatctgtcaacagcagattaatagacaaatggtggtgtccatacaatagaatattacttagcaatgaaaggaatacacagttgataaatacagcaacatgagtgatcctcaaagatatgctgcatgaaagaaggcagacaaaaaagagtatattacataagacttcatttatgtaaaattatagaaaatggaaagtaatatatcgtgataaaaagtagatgagtaattgcccgaggagcagtgatgggaggatagggggaaggaaggattacaaagagatataaggaaacttttggggttgatggatatattataatcttgattgtggtaatagtttcatgggtgttttatcaaaatgtacattttaaatatgtgcagtttactttgggttaactatacctcagttaaggtggaagcaaaaactgcaggagcattcttgacttcatgttgttcatgcatccaatccagttgatcatatctgtctcttctac

SEQ ID NO: 68012 - DNA, 1052 bp, Homo sapiens
gcagtgaatgagagtttctgctgttccacatcctcaccaacatttgataattgccagtttaaaaaaaatagccattctaataggtccaacacataaagttagtttgaggaatagtgtttaccaaatgtattgaagggtgctgttctgctctcttcattttgttaccagtaattctttttattctccctttgccactgactcttaaacttgaatgtttaaaggaggctatgtttaaatatcaaatcccagggcctaagccctacagttcgtttcagtcgttgtggggtaggatctaagactattttggtccatgtgtgctgcaggtcaattctgctactcacctgcattttgccaagttctattctaagtattgcactagcccagaccataatttagccgtgggaacagaaggataagttcatccatgtgtttaaattatactgtgactctctttcttttcttaaacttctgggagtaggaagtgtgaaattatattaactacagtaatttgaaattttgaaatctgtgttttttatttgtcacctaaggagtatattgaatctctcatctttgttgtctgaggtatttcatcatataatatacttcagaaagtaaaagtaaaaactcttcccttttttttatttttaaactaactggcattattaatagatttgtgttcttgtctgtaaatgattgttagaaatatgaggtgatacctcagaaaacccttttttctaggtaaaggcattacacaaatacaacatgttaatatattttaggattgtttgttatgtgcagtgtctctcagagttttagctaggagccattggtatctgaatgagagaaacgtgataaaaatgggtattgatcatcagaatctcaggggatggggtcaggagtctgaattttaacaggtttttcagatgattattatgcacagaacatgagaactgctgatgtaggctcgcactgtttatcttgtgtgcaggtaaagggagcaatcagacacagtttagaaattgtgttttgtttctccctcccctcagaaaatc

SEQ ID NO: 68013 - DNA, 1014 bp, Homo sapiens
ggccaggcggggaacagcatgcacctcggtcagccagctcgcctggctctggttacatgtgaaccctgtcaactgggctccggctgcagaacacggaggaggctgtgcgtcacagaggtggcagtgtcttccctagcagtgtaaaggaaacgagggcctcgtcttggtgttggctgtcaccggtggttttcctagggattgagatgacttagtgcaggcctctctcaggagagaagggaagaggagcaaggatgtgggctactgcttcccatgatggaggctgagtgagctgaggtgtcaccctcttgagcgctgctgcaacactttctgaagctcgttgttgacacccaggcccgatatgtctgcatttgcagctctgctcagctcgatgtgttcatggcatgtgatctggactccagttttcttttgtcaaggtcacactatgtgtgtgtgatctcctttctggccagctgtcagggcatgagaaggcacaagtctctgtgcagtggtccttccttaatattgctgtgaactcatgctatatagtggtggtattgtgattttaatattttaaaaatagagctggatgtggttcctcatacctgtaatcctagcactttgggaggccaaagtgggaagattgcttggaccccggaatttgagaccagcctggccaacatggtgaaacctcatctctactaaaattataaaactgacccaggcgaagtggtacatgtctatagtctaagctgcttgggaggctgaggcaggaggaccacgtgagcctggcaggtggaggttgcagtgagccaagagccagaccttgtcaaaaataaaaataataatcaatagacttgatttttgtatagttacagatttacagaataattgagcagatagttcagagtttcatgtaatacccctgcccactcccctcacctataccttcccgtcattcacatttgctttacagtacattgaatagaatcagcaaaatgctgatctttaccaacc

SEQ ID NO: 68014 - DNA, 1301 bp, Homo sapiens
taactgtacatcagacatctttccacatcctgattttcaagtttaactgaaataatagcttagttcggtggtttttatactttttcttttaatccagtggaattactaatcaaacagaatcatgcgcagaacctcagtgcaagaaaaagtaaccatggagctgccctgattggtttaagtgggaaacgctgggccttatccccatgcagcccacctggctggcctccttcaggccttctgcagcagccctgaggggcctcagtaggggtgaaaaccatgagtttagcttactagtggacctcactttgtgtagtagatacatcaaaagctattttaaaattttaattttgaaaagccagccaacagtctaaagttaatagggaaacatgttctttataagaagatttttcatgactcctgttagaaggataatatctagagttataaaatttctctaatgtaaattatgtctgaattcctggtacttcatatattctgatatggatgggggatatcatatattcatatattctgatatggatgggggcaaataatcacatatatatgattgtatatgagatatatatatatatagagagagagagagagagtgtgtgtgtgtgtgtgtgtgtgtgtgtgtgtgtatatttttttttctgttattgggcataacagatgacccactgatacttctgccagtgggagctgtttctaggatttattcatcccttaattggtctgttaggtactgtgttcatttgctagggctactgtagtaaaataccacaaactgggtggcttaaaaattaatagcaaatatattttcctacagttctggaagctagaagttaaggtaccagaaggtttagtttttttcaaaaggcttctctccttggctcacagatggtcactttcttgcgtgtccttacatggcctttcctctctgtgtttgtctgtgtcctaatcccttcttcttgtaaggacatcagtcagattaggttaggggccacctcatttaacctaattacctctttaaaagttcccatctctaaatacgcagttaatccatgaacaacgtgtgtttgacctttgcgagtccactaatacacagatttttttttttttttttttatcaaacgctattgaaaatacagtatttgtgggatgtgaaaccctcatatatggagggcaggcttttggaatatgacgtgggatttgagtatgtgtggatttggctatatgagggggttctggaaccaatcccccagctatgttgagaaatgactgtagtcgcatcctga

SEQ ID NO: 68015 - DNA, 1085 bp, Homo sapiens
ttatgggactattgtttacctcacatgattatcttgaagattaaatatgtgagaataaaaatagaacatgcttattagaccaggtctgatgtataatttttttttaatcaataagtgttgatttttaaatttaaagaattctggtttttattttacaagtttaattttatctatccctttccctattatgaaagcatctatagtaatttaatttggttgttaagaccagaaaaaccctatcacattaccccagaactcttcttgtttgtgctattgggatccccctccatctgtgctctgatttcttaccagctatgaataagtgcttttgattaaatataaaactaaatagaagactacagttatctttttcctattaaggagtcagttcttcatgttagtggaaatgaacaatagacttaagggtctcaaagatgatcaaaagattaatttggctttaaaataatagttatgttgtggtcttgatgttactactaactttcttctgtctgtctgtctgtctgtctatcttatctatctatctatctatctatctatctatctatctatctatctatgtgtaacaccttagggaagtcatttgctttttttggatttgagtttcttcttaaaatcagagggtttcacttaaaatctctctattccttctcaacatttaaattctatgattgtcttccctttgtttatgtaacagatatttattcagtactgattgtgtgctaagtgtatagctttataccccaaagttttgttgagacgcacacaattagttcattgcctaaacaaactaattcttttcaaagtgagtataaattaactagtctaaaactagttaaacatcagtttattgccaaaacaaattattgaaaacaaaaacgaaatttctaacttcaaagattgatttgtaaccgataatgaaaaatctttcctataggaatgctatttttcatcttgattggtcttagaaaggcaatcgtatctccatggatcatgttggagtgtgcctgtgagaagaggtattgatgtggggggtgcccgtgtaaccaggaacaagtctttaaatg

SEQ ID NO: 68016 - DNA, 1056 bp, Homo sapiens
ggtaagcactcactaaatgtaatattaagggaatctgttactgtttctaaacatgaatatttaaaattatcttttataagtgaatctgatcactctcagtgacagcagtaacagtattttaacagaagtgatgataatggtgtgatgcctagcattaaaaatcttatgctatgaatctggctttctgaagttactgcacctgtgttagttgaatcacagtctttgtgctgcttaactttttgtagacctctctttaacaaatcataagataattaaatgatttttaaaaagaaatggtactttttttggaaattactggccagagcatgaatagtactttaccttttcatacagttcggatttaaattctaggtataacaattggtttaaaatttaactaaaaccattttgcttaaaattttgattctcctaggtgggagacattgtttctgttattgacatgcccccgaaagtgttaagcacatggtggagaggcaagcacggattccaggtaggcagcagcaaattaggtgtgggaaaattcaaaggaaagtttttttatgattcagtaatacttttgtttacatgtgctggtaatggactttgtcatcagaaattttgtctgcaacgatagaaaatgcagatagtaatgataatagatttagatttccttttctaattactattttggttgtttcttatctcctttttcatctttaaatggtggtgaagccaaaatgtgaatagcatctcagacctcatggccacttttaggttacaaggcctgtggagtgaccttgcttttaatacaggttgttaatcgggattcacatatatttcctctctggaattaagtcagtttgattaatatttctctataaaaaggcattgtaactgttatgtaaacttacttttaattacagaacaacagaatctaaagcaatctcatttctttttctatattcagtagtcccttatctacggtttccctttccatggtttcagttacctgaggttaaccaaggttcgaaaacattaaatggataattccaaaaa

SEQ ID NO: 68017 - DNA, 1396 bp, Homo sapiens
attaagtgctaaaatataacggacactgcagcagggtctcaggagtgtcttaaaacacggatctctttgtaccatagaaaacctgaaagtccctttatctgcatttcccatttctgcttcatttcattttttttctgtttcatttttttctctcagattatcctaaaacatggccactaccaagaggtcccaggtttttatccccttttaagagagcagccagactgagctagaatctgtgtcacaattcctaattcctgggttagctcttgattggtccaactaatactggggcatattcctggaccaatcggctgaaccatggtataggatcacgtatgaacatggctgctcctgccacaggccatgtgcatggaagattacagtgggtcttggggaaaagggtttctgagtagtagggggaaatttaggcagaaaagccaaatatgtatctgctatagttatctttttgcatattcagtacaaaaatagaaagtgtcaaaattagaaaccatggaatagtatgatcgctgatgataaggggctagaaattgaagctctgcatgagacaggggctgacttgctatgtaagtgcccatagtgctactggtaagtttctgtgaagagtcctctgtaactattaaaatgcctaaagatctatagatttttttcttccagaaaccatccagttttccctgccagagagcatagtatctttactcagagttacactgatctttttcttttcagtcggtcactcagatgcttatggcttacctgtcacgcctttcagctatcgctggcaacaagatcaactgtgggcccgcccttacctggatggaggtatttcctaattcacttttcatgaaaaatgtatatttaaattatctacttaagaaatttgatattaacataattttgatgtctattgagcttcaggaatcaaagaaatgaagtatattctcagcatctgggaggatagatacgtgatacacgaaatattttttcatctcaaatctttctttgataatcttggaaactaatcttaatatattttatgaatctcgatgatacctgttattttggtgtttagtatactaatgtatatattcagcaaggtgtacatttttttagttgacttagtaattgaaaatatttttcagttattagcaagggacaactttttaaagggtcctttttaagagtaagtattgagtgaaacattattcagtaaatagattacatatttattcttaatgtgcatatgtagagttatattgttttctcctcccactggaaattgggaatgcaagatggaaagtggaaagaatatagaactatgggccaacctgcgttgagatcttggaaaaagtattgaatctcttgtaaattacat

SEQ ID NO: 68018 - DNA, 2351 bp, Homo sapiens
aactagttcatgtaggtttcttttcacccttaattattttatttcttttttaaactatgcttttatcattaacctggcttttttgggctaatgggaaaatgattgttatcttgtgaacaacttgtacttaatatctgaagtttaaaaaaatactttgtgataccactttcctcaatagagaatatatcttcatcaaccttgtacttcatatagtatgaattataatggtacattacatttattaagtattagttacctgggtggacactgtccatgcatcatctcatttaatacccacaaacttgagaatacataatattatatcatcctcattttccagttgagagcctaagcaggtaggtcaatattacattgcaaattataaacacatttgaactcagggttgtccatctctgggaccgcgtttgcaaattgacgtccaaagatggggcaggtgtgtaacataagtgagtaaagcaagtggggtataagaaaaataacaaagcaagtagcatgatgaatgacaattaatactcagcctagatactggcaaaaaaactacagggtagtcagttctgtgacaaactttcttggggaatatacacctcatttaaaggtgatggtcatttctcagctgtagctagttgttgcccgtgtgagaatgtaggtccaatcttcccaattttctgatttttcagtagaagccagaaatctgtatttttcacatgaaacctcttagcttctacatgtcggtagctggtttaaataaaactaaaatccagtatgcagacctacatggtgaatttttttttgaaattttaaatttcaaatctttgtggatacagagtaggtttatatatttataaggtatatgagatgttttcatacaggcatgcaatgtgtaataatagcatcatggaaaatggggtatccatccttcaagcatttatcctttgtgttacagacaatctagttatactattttagtcattttaaactgtacaattattattaactatagtcaccttgttgtgctatcaaatactaggtctttttcattctttctgtttattttgtacccattaaccatccccacctcctccccaccccactacatggtgattttgaaattaaacacgtccataggcccaacctgttatctgcagccagtttttaatctatgtaataaggtctgaactcttttaaactgttatgtcatactatctctcagtgcttagtttcatgtatgtactaaatagattaaggaagtgaagacccttatacgtaagctacacagatacagatatatattttatctgaaacaccaagtccttcattcatctgccttaagcaatgaagttctcatataagatatgtctcacattaagctgatgctcacccggagatgatgctccaggtattatgaatgcttagtttattctcgtttactaatcatgactttctttccccctcttcttttttttctgtgatgtagctttcactttcagaagaacagaatgaagtaatgaaaaatggctgtgaatctaaagagctggtctacctcgtgcagattgcttgtcaggtgattttgtgaatgtattctccatttcatatgaagttaagaattaggttgagtgatgattaaatttatttctataacgtgatttgcctaaaggatataatccacagaaaaatacttatataatactgaaatgagattgtgcaataatgactattgtaagaaaataaatggtattattttaaaacagaaataagtgtattcatacaatactacatggaatgtagagttgagcattgcaacttgcatgtctcctctttgcacttttagaaagttcctaaggcttttgacacttatgagtaaataacaatgactgtggtaatcaagattttttgtttcattctttaatctatacccttaagtgaaaatacttttattaagactaaaggaaagatatttattgatcactacattaaatgattcagctattgatcacatattatggcaaaagagtagattatgttatctctgcttcagatgcacactttttctaactgagacattaagtttctcttcggtgtaacaataggatatgtgcatgtttttgtagcttgttatttcttgacttttaatattggaactgttttgaaggtaatgaccatgacttgttcttaatgagacttaaaatatgtcatttgtagcattgattatttcccccatcatgtaagcacttagtatagttcttttattcacttattctacattctttgagctttttgcctactggtgaattagtcattgtaaagaaagcatttaggaggaaagctttctt

SEQ ID NO: 68019 - DNA, 1130 bp, Homo sapiens
tcctggtgagtctgccgtttttccagaatcttctctttctcgtgtgcttttgcgtgttgtttgcctgttgaactgtattttagaatctcaattatatttaatttacattctctttcttattatttttatatctggcccaattctgtgtctgctttattttacccttgcctctcatgaccatgtgtcacatttgcttgcttatctgtgtgttttgtaattctttaatgtgaaatatataagaaacagctgagactaaagtcagtaaacttacctccaggaaagggcttatctcttcttctttcagtctgttgaaatgaggtgctgcatcaggctgatctgtatttgataagatctggtcttttatgacagctttactttgattgagtttatcactactttaaatattttgaagttaaggttctgagatttctttcacaaggaaaactgaagagtggtgagatgctgaaggtatctttgtgctttgctatgaagcccagatcttctgaactgagggagaacatgttctctttctctgctttgcagcctggatgcttattctcttgtctgtccagttctttcccccagtattttgtgcctctggagagcactcttccccttgccctatgcaagagctttgagggtagctgtgaaggcctgcagtttctcccagcttttctgtgccacctccatccttcagttgttgagtgtcctgagtgccttcagaggggtatcttccagttctcctttcctctgtttcactgccctgctcccagtcaagggaggttagctgccttgtccttggggaggcttcccatacttcacaggttcattctctcagttctcttcctctcctgcagccttggtttactcacccgatatccctggtgagtacctgtgggaatcagttgatgggtgagtgtcaactctctgctacagagagttgtaattttagtttatcactttagtgattacactacagtgtaattttagtttatcactttagtttatatgcagttactcaaggtttggctggcttctccttaccctgtctaacatagattcttttttctcttgtatctctgccaggcgtccaagcacatctttgagtcacttctgtctcatgaaagtgt

SEQ ID NO: 68020 - DNA, 2273 bp, Homo sapiens
cttgtttacttgaaaagtaacttatgttggttccctaggccctggttctccataaagtgatatggtgacaaccagagatatcctgtgtttacaagtgggatttggtaccacaagagaactctgcacttatgaaacttgaagcttatacaggatagctggcattcctgcccattctcctttctcgagatggagagagagagagacctttgctctgaaatgtaaacaaaatctctgggaaaaagaagcaaggatctgtatttcacaaacactctggaatgtaaacatggcttgggggagagagaaaacttttatctctagagggctccatctttagggttactgggttaagttcagtcccttagcccaggtgccagtgctctttgcttagaaagccctgaccatgctgaaatgtgaaaatatgtatgaagcagtttcctgacaagtatatgttcttgagtgagcatcagtaagatgagggctgtgattctgctgtcgtgttatttggtctcattttccatgtattcttcatatgatgggcatcacagtgaactgatggtgattctagtgtttaaagatgagcacatcggttactttatcagatactcagctgagaaaacagtgctctattcccattctgggaagaaaaactcttaggtctgttaagatgcttgtaggtctctagctttttcctggtaaatctgaagggtaattttgccttttattgattttcgccttatgtgctggaattagaacttatttcacttattaaccatgtaagatgtaattctgctgtagaattattcttcctcttggcgtcctgaactcagtagttttaaagtagtattttcagtgtcaaatattaggaggttgaaggtagggtgggtggaccacataatattatacaacagaaatcatttttttgtgtctccacgtctgctacacaggctgtgaggtgaaagaaaacttgtttacaaaccccataggtatgacacatgaaattgcagccattatagaactacaaaagatgaataaaagaaaagaactctttccgtgttccatttgcaatccgttgattaggctttggtgaatggtttcttctgtgggtgggtggtatatttttaccctgctctatgctactgatttccattctccatatggagaaagaacttttctgaacatttgaagacttgctgaatagagttgtatttttaaagatcctaacaacactaattgtaattggtttccatggtgatagaaaagtgaactcaatacaggaaaaataactccaaagatagatttggaagaaatttagaaatgtgggatttggaaatcctgtttgccatttctaatagatgaaggactgaaatattattaaattgagaagtgaaaattatttaaatcactgagttgctgtcataaatttctacaggcaaatatagttcagtccttcatagtgtatagtctttgtacatgtagttcaggtactgcataaaatacattaatattcagacatgtatagggtgtattaaaacccacagttctcttaggatagttttattgaatatcttgtatgtgctagccacctatgtgagtaccactgatgaagcagataatctttcctcagagaaaacaagtaatataccaataagtttaagagaaaaacaatgttataaatgttataaaagtgcttgtaggtattcagtggtgagagagattatgtcctgtggcattcaaaagtcttcatctttattgaagattgaatagaatttggatatgcagagatagaagtgaagaaccctcagccaaggaaaaatagtacagacaaaggtgcttgtgttttcattgttcagctccctcttataagtgagaccatcaattgctttcttagtaagaactgagaaagtattgcaggattttgagaagggagtaccatgatcaatgtgtgatggagatggagagagaccatttgaaatactgttgtaattatccagatgtaagggggcctagaaccagggaattagcagtggggagtaggaaaaaaggggatgactgtaagagataagtgttagcagacatgagagactaaagaatcaaaggtgaaaaatgagaccttgagcctggaaatgtaaaaagagagcatgtgtggaaaggaggagaagtagcagaatctagggcgattaggttggtcagctgggtgaatagtagtacagtttgttttgtgaattcaggaggaggaggagaatatgtgaggaaagatgacgaattcagttttg

SEQ ID NO: 68021 - DNA, 1327 bp, Homo sapiens
taaacaagtgagatgaatttgatctataggatttatgaaagtgaaggacatttctatttcaaataaattgacagtttaaaatagcactagagatttataatgctgtgacatcaaacaaaggatattttgttccattagtgtgtatatccttgagattgcagttaacatgataaatttcttaggtcaggaagaactgattaagaaaacagtaatgagtacatttttcattttgtgactgttaagcatttgatatatctgtttgagtgatttagtttactcagcttgcaatttaggtaaattattttctacttaatttattttgcttttttttttaatctttacaaggttgaatgaactcttttgggggcagtaaacattgtgaggagttttagcaaattgaaaagaaataggaggctagagatctaaaaacagtccaaagaatatttaaatgttaacattatatgaaaggttaggaaatctctaaagcatctgatttaaaataaaaacaaaactgttaatggtaaacattgtataatgaaatagaaaaagcactggccttagttcacaaacatagattctaattttctttttgcttcttaggaaatttatgaccttgggcaagtagcttagcctctttggttttatttcctttatgaggtgaatgaggttgtgctaaatagtatcatagttctaaacttttattattttatatttaaagagtttataatggctgcattgaagatgtgggtagggaatagacagttgttattcagctgcgtttggctctcctgagattttgttaaatgctggttattagagtccagtcctcttaattggaggactgtgtctaatttttatgggagaacacatttggtagacttttaccaatgaacagacctgtaatcttcattttagattacacaccatgtttcactttccccattgcacttacttcaaccctgtagaattccattactcaggcagaagaaggaaaaaaagatgtgatactaactcagtttgtgaccctgcttgtatgaggtgtatgagtgagatgtttcaggattgtattgattgaccaggaggcctggagtatggaagataggggtggttcaaaggaaaccagcccagctgcaccttgccagtccacaccagaatcttctttctgtgtttatggtcctctacttggcacagctctcctgcccagttttgtcctgcctctgttctgtgtctttggagactggcctctacatatcacatctaccagttttgcttgccttctgcttctggttgaattcaacccatgttagataccatcaggaggaaaaca

SEQ ID NO: 68022 - DNA, 1081 bp, Homo sapiens
tacacagaattcaagtgtagaaagagatcagtatcattttctagcagcgctgaagactgacaataacttaccataataaagtacctgtaaaggtaaagttcttagagtttcataggaacctttgtataaaatgtctggtaaaattatatacattgttggaaccctgtatttttagcgagccttctgaatttaggagtatctttaatgataagggactgagatgaaggaaaggatgaatctcagttatagaaaagtataacatttaaaagctttgctaatatgtaaatgtgttaattttaggttgattaaccagctgttgcctagcagaggagttgtgattattatgctaatggtgctttctaatagttttttccaaattattttaaatatcgcctccgaataatttttccctgtggttaattggctctctgaggagatattttctagaagtgaagtttaaggcaacacccttgctgcagaagagctagttttataatcactttcagaaatcatgttttttccttcagtcttctcatcctgttgttcccactcaaaatagagaattgaataagaatagtgatacaatttacccttggggcttatttgatggctatttctgtgtttgtgaattaccagctactgaaatttacctgtcaccttctttgattcctgtttctggtttttggcacttccacattggtggtgctagataacacatgggaggatgtgttcctgagcctggtctgtggtgcccagatattaagacattaggaaatattccccatttagcactatttttagttcagagctcttgagttttcttatatgtgaagtgtttttttagtaaaattgctaggctgttatcaagtctgatggaggtgcataacgctgaaaagaattttgagagaaaccactaaacagcattcacagattcgatttagaaagtgtctgtgtattttaaataattattgccatattctgtggagactcatacctgaactcacaatatataaacatgtaaaagcctaattatttttttccttagtactgtacagtgatgatttttctaaggacctgcaac

SEQ ID NO: 68023 - DNA, 1104 bp, Homo sapiens
ttccctgggcttgagctggagactgggagtacatgcaagtcacttcctctcactgctgtttccacttttatgtttttcatgagtccttaaatttgtttaagctctaggtaagtttaaatcattttcctgtaatctggatttatggattctccagtggggttgtgtgttcagaggcaggttttctccctctcatactttgggaactcagttttttgcctgtcctgtgcaatttgcagtggcatgctgcttcattcaaagatctttgaattcttttgattttcctgatacatttctttggtggttcttggagcaaaagatcatggtaaagatcatggtgttctccacacactgttctgtctgtccaagtgggagctacacgttagcattgtctgctatccaccatctatcttgtccctaagtctattcatgtaagtaacttaagatgtaaggctttcctaaaagtttcagatgggaaatagttttatttcacttcttatagtatgctgttcctatctgtatcatgatgctttccttattgtattaatctagttgaatagtaatgtctttgtctccctactaggttgtgagctctttgaggaagggtaggggtcatcttgttttcattttattgaaggataaagtttaaaagaggatataatcatgactctcatagaaatatagaatgagcacaagccaaagatatttaactcattattaatgaaagaacaagtcagttgttaaaagtggttcaaaggagaattcaaaaattaccatactcttatagagcaaccattctaaaatgcatgcatatggatgtaaatctggcaaaactgttctgtttcactgggtacagtttgcatttctgtggataggaatgatctgtattactctcatttttctataaggcaagttccatctctgcagagttgtaaaatagctgaatcaaaagacaaacaaaatcccatacgcctatggaatcaggcaatcctcagaggtgccagcattccagggaaagaacattcagtaactttttttgcctctttttcaatcccctacttttcctacaatttttaaatcttcagtaaatctgtattgaatttactg

SEQ ID NO: 68024 - DNA, 1026 bp, Homo sapiens
gctaatagagagtagatatcaaatggtctgaccataaaatggacttccagccattgttgccaccagtggatagtaactggcgacaactgttgcagagccagaaccaaatttggcgaagaataagaaataaacaaaaaccgatcggaagaatagaaagagaaagatatcctgcttggaatttattccagggatgaagaaaagatattcctgggagtgaacagtccctgaggtgcagttcctgggtaatatgctatatttgtcttgagaaggaaatccgcttggacttctctgtggaacttcaacattgtcaagtgtaatttttcataagttatgagcaagaatctcatacaaataaagtgaatatgtgacagatatttacataatttcttagtgagggaaacagcaagatgataaggctggttcccataatctttcaatttgggggaagtagttttctctcctatttttcattttcattgaatgcattcaggtttaagtctgaagatgttttacagaaaactctggtaaaaaatacagcagtaggttacttaggtattatggttggcagcccttaactacagcttttttgttagatatgaaactacaatcaaacactttaagcataaaatttgtccataattttaaaagcatagaacaagagagtcaaataaatggatactaaatttcttattgagttggttcatcattgcatggcccataatgtatatataaatataatttttatacctcttaaactgtgtaacatttaccaataaacttttacactttgaggtataacacatataataaagtctacaaatcataaatgtacagcttgataaatttatacaaaatatatacccagataatcacaacccaatcaaggtatagattatttctagcacacacaaaacctttgtcccttctagtcagtacttctcccaaaggtaacttattctgactttgtcacaatagattaatttagcctgttcttgaacttaatgccaatagaattatatagcatgt

SEQ ID NO: 68025 - DNA, 1251 bp, Homo sapiens
taagggttcttcacgtatagatacatacacacaaggtatttttataataaatttaggttattttctttctttttgagctttggagctttattcattcagtgtacatgttctgttttattctgactgttcagaacctatcttttagctgctaagcaaagtatctgcgcttctttgccctttcccctgctgtgttttcttcagtagcccccatgatgcatatggctctgccttgcttgtcttaggtgcacacacccacattaggagccctagtccttctggtcagttgttaaattactttacagggtaattttccagtttttgttagtaccctgggggcaagcatctctcttgttgtggaaaggggtggggtatagcctttgaacttctgtttttctctttaggtcagtatgataccacttgcttttaagtttttcagtcttttagtctttcagaagtgtatcaaagtctgatctctggccttctggtgccattcataccattctgttaaggatttattttttcctatttaacttaatgatttttgagacacttggagaaggagagatttgcttcctcacatatatgcagtctaggattggaagtccactgggaagtttttttcataggttttgagaggaaacttttctgcagggaacattcactgaggcagaatcgtggtgcctttcatgcaatttggtgggtcttaggagtgtgaatggctgcttcagtgtcttcttcagctggcaggtggggtcttccagaaaaaaatagtttaccacatcaggaatgatgaagatatggtcaagcattccacttttcctatctgcaaaacagggcttaaaatagtatatcaaacaataactagttagaagatacaatggaagaaaaagtgccactttcaggagcaacaaagatgagataccagaaataaacttaacaacaaactctaaaacctacatgataaaaatgtaaaacatcattgaagaacataaaagaagtttggaacaattgaagaatatgtcttcttcataactggaaatacacagcaccataaagatgttagtttaaggtaatttataaatttaatgtgatgataagaatcctttttaaaaaactaaataaattgatcttggctaaataatttaaccaagaaactttgtaggaaaaagaaaaagaacaagggtagtggatatagaggacttttgcaactagatgttgtattgtgaagtcttagtctcagtaattaaaacc

SEQ ID NO: 68026 - DNA, 1065 bp, Homo sapiens
taatgtttgtccagtagcttttgaaatagcatttatttttggactcagttggaggaaaggatcctttttattaacactctttcactatgggaagttgccggtctccttcatggtggtagtttaaatttgtctgccattgactcacagatctttcattttctgatttcttatttgtagtcggtattattacctaccttgtcactgtggtaaaatagttattagactagaatatttagtccttagaataaaatagttcctagagatgattagaaaaatccatccctggataagaaggaggaatataaggcagaaaaggaaaaacataaatgttttaattctatcaagaaagaaaaactttacttagaaattgttatatgtaatgtactaggccatatatatgctttatacagtgtatcagttaactgcttatcactcctataaagcaggtatcatttttcctatttcctcggtgaggaatttatggctcagagagtcacacagcccacatttgtcatggtggagcaaaattttgcaagtggtagcacaaaaatttgaacccagatgtaactgactttgaaagtgaagactttaatgaaagatttttggggctatcttctgctaaatgctattttctgctaagtgataacttataagaggctacagctgatatctcaagttttgaaattccttttttttgaggaggttatgagcatcaatgacatatagattatgtgaccatcataaaaatgaagtaatgaacacaataatgtgacttttaaaaaatgtgacctctaggacacctaggaatcatgaaaggttctagttctttggcatttgaaggtagaaatgtttatcatatgattttgtttagacttccctaataccacgttatgggctgatagacagcctggcaaatatgacatataatttgaagcagctacagagatgatatagtgcttaattgaaccatatttttgatcacgatctgtagatgcccagatcgctgatcttcacgtatatctccattattaaggcaattcattttaagtgacgagaaagttctga

SEQ ID NO: 68027 - DNA, 2405 bp, Homo sapiens
gttttttttgttttttaagtacaagatggagactgaaagtgagagtagcactttaggggatgacagtgtcttctggttggagtctgaagttataatccaggtgactgactgtgaagaggaagaaagggaagagaagttcaggtgattatggaattcacagttcctttgtcctgtccactccctacccccacccgcacccctttttcttctctgcatttcggtcttttttccaataagactttctgttttctgggggaaggtttggagctcaagggagcaggttttgagttgtatatagcactcctcattccacaacttgccctgaacttgtaaaatgcattttaaaggacttgttagaacgccaggaggagaaggtgttagacaggttttgtagtagcctttcaggaatttcaagtagacactcataatgaactactaccccttcctgtatctgatttgtatcaaatagatttgatctgaatttgtatctaatagatttttcttcctctttttcttggaatgtggtgtgtgtgtgtgtgtgtgtgtgtgtgtgcgtgcctgcctgcctgcctgctttgtttgccttatgcatgggtatgaaaaattccgattaagtacagattggttattttgtggctttgatctttacccttgtctctgatcttgtatctcatgccccctttcccccaaatctctcttggtttttgaatctctggtagtattagtaacttcataattgaagtttttagaggatgcctcctgatgaagcagctctcagtttagtgtctgtggtgaagaaagatgtcttaaccagtttgtgaaaacagaaccaatgtttcattcattctgttgtactgttgcaaattttagggggctttattctggcttttctttttctttcagagttagcgatgtaatacctttgagtatcacaaaaatctcttgatgaagtttgaagtttgttgctgcatattatcactgccactcacatgtgcaattaaacatcttttataagtttacctatgagaacttggataggtgaatatactgttttcatcagatactgtctttgtgtttaatgctgaaaaagagtttctccttttctcgagtcaaaggatttctttatccacaaattttattttttaaagtctaggttaaatgatggaagggattgaatattgggaactcttgataaccctcactaaattttttactctggggttcaaataaatgagaagtatatttaaaattttaaaagaataattttcagagtataaaaatgaattattagcatatgattattttttgtctgaacttttgtctcattttcccataattttatctagcctttcaaatttgagtaagtcccttcccttccaaggtatgctaattgttagtcacatgttctgctttttaatatggtttgtgtcttgctaacaatgagtaggactgaagtatttgttttgcttgtaataaaactttttgacctggtattcaaattatggaagttatttgggtatttgtcaaaggaagaaacaacttggaacttatttcattgttgtttttataacagatttggtactgtaatcctagatttacttgtaaggcagtgggcgtctctctgggattttcttttgacagttaaaagcaaatttgtgtaaggatgagctcttcttttccttgggagtatgtgacagcattttcactctgagaaactgagctagtgatgtgttgtttaaggaaactatgataccatagggcatttctcttctgtttatatttcctatctgaatagcaccatggctctcctaaatcaattatatctttgtgatttgatctgattttatttacaaatgtaacaaagaggtctgggcaaggcccaatttcatgtagtgtctctcacgcattcagcagtgaggcatgaggaaatgtggcagcagagtggtttcacaacctcgtggtggtgttcctgccgagatgccctacaggaaaatggaggcatgggtgtggaaggggaagggtcggataggagttgcagctgtaaccttgggaggaccaaatagtagactcagtgtggtatgacagttgtttttgtaaaatcaatgtaataattttaaaaatgtcttactgtgtttttataaaaatctctgcaaatacatgtgacatcaagctgtcgtattggttacatttccattcacatacacacacatagctgagatgagggcaaaagattgtgcacttttctttttccctgaatagcttgtaaactacattttaaatgcactcttaaaagcctgctcttgtgtaacttaaggcaccatggctaagagagtaaagtcataccacacctagaatgtaggcttctggtgcttccaggtgccatctgctttaggaggaagtagtct

SEQ ID NO: 68028 - DNA, 2219 bp, Homo sapiens
ttttttttttgcaaaatttgtaaaccaggaatagaaccagtgtttcagttttgagaaaaatgatggctttgcctagtgggtgttttccgtttgcagtcttccaagccatttctgacataagaattcagctcctgtcaaggcatgtgcagtaaaggtacccttccaggtgcctagacaaatccttagtgctgtctatttgtatttagaatcctacttttttttatatttacttttttttatatatcttactttttttttgtatttagaatcctactttttttcttctttgtccgtcttcttgttattgcccttagctgaccagagactccgtgccatccagcccctttcctctcttgcctctctctaacttcttttgtgctgcagatttcaactaaattaagttctaattaaaataattttcaccttaaggtttgaatgctcaaccagcttgacactttcaaagataatttgcttttaaaattgtttatcaaaataaatctctaaataggttatgagtcattgttattaatgagattgtgtgtatcctcgaactgttttggggcagagaaaaaatgttgagaatctctcttctaaagccatgcttttgaagaaacagtcttaagagtttttccttggaaaacaatgctgtttaaattaccattctttcttgtggcatactcatatcttggaatgtgttacaactgtttttgttattaagctcttgaatgttagactatatagttattgaaggattatagtgaattcaattctgaatactttctgttctttggaaagtttagaactctaaagtttctattttagatggaaaatttccactcttttttgtcacttgttttctttgcagtatgtcaaattgctttgaaaatagtaaactgcgatattagtttaaggtggtatttttattatgctggtatgtattttgtaatttatgttccactgcattccagcctgggcaacaagagcaagactctgtctcaaaaaaaaaaaaaagaaaagaaaatgacagaatggatggtcatccactgtccggttgtttgaaggtggccaaacaagcaatgcatgattaattgtcttttccatttgtttacttaagaactcctccttaatttgtggatatatttgatcctttcagaatctcttattgtcttaactgttgtttgatctgaaggttctggtacactggccaaatagtatgttttcttgttgggtagtcggtgggaggagatctagttctccttgacaaaactacattacttggaactaacatgctggacgcccaggctcagcaaggtttattaatgtctgtttctctgcattaatatcatctcatgaatctgtgttttctgaggtgtgcagcctgttacagttaaatcttttcttgatctctagagttggagaatgaagtttaatagactagaatgggatgttcctgcattttatgaaactgatgaattcattctaagataagttgtttcctctttcctgaccaaataggagtgcttgtaatgtttctgtcctctactttaaggatatttcgaagttcacatagcttttatattattcttttaaaacggtaggaatgaatcagagtggcaaacatactaggtggaatcttagtaatagtcatagattgttcagttgtgtgcaggtaatgcccttcttcttagtggattgtgtgggaggacgtagaaatgttgtagatggtgggagaggacaaaagagcccattttggttacaagagaaacattcaaaacctctaaatgtgccatgccttggatagctgccccatgtatacattcttaatatgttgcaagaacagattatttctggcccattggttgtttttttctttgtactttctattattttatcatttttgttattcttttgattaatatttattttagaaggcttgtagaaatggcagaaaacatcagggtaagccattcagtaaagctagagtgaagaggcaacctacagaatgggagaaaattttttgcaacctatccatctgacaaagggctactaacatccagaatctacaaagaaattaaacaaatttatataaaaaaaaacccataaaaaagtggccaaaggatatgaacagacacttttcaaaagaagacatttatgcagccaacaaacatatgaaaaaaagcttatcatcactgttcattagagaaatgcaaatcaaaacc

SEQ ID NO: 68029 - DNA, 1127 bp, Homo sapiens
aatggagttgcacaaatcactcaaaatctatacagcattatatccagatcactaataaaagcaatagcagtctagtaaaacagttagttaaaaacagttagttaaaaaacatgtcagagtcctaataagtaaagaaatattacagtaaatataggattttatctttaaaggtggtggttgctgatggaaagggatgcattgaaggtttgaggctgatagactgccgaagattaggacaaagtacacaaaaaatgaggaagtgctatgcaaaaagccctaccaggacatagtaagtgaccaaattgaagtagcaacagagtggcatgaatgagcgccatgaacagtgcagcagtcccgtgcagttcactgcattggcttgtgtcagtgaacttcgtgttaagctggacatacacggccaaaaagtgtgggaaaaatagttatatataatctgagttatattaacatcataccccatttactaagcttatatgaactaattcactttatgcaaaggagttatagcagaaaagatcatacttggttagtgatcatttcgggaaatagttgagtggttaattgcataatctctgaagtcagactcaaagctccaccagtacgtccttgtgcagatcgcttaatgtctcattgtctgttttgtgtttttggaagtatttgagagtggtatttttgcaagtattgtgggaaagcagaaaggagaatgctttggactgggtaataatttgaaaatttctcagaggaggagacatttaaaatgtttgttcaaagataaactaaaaggcaactaccacttgtaaattgtgtgaccttgggcatgcttcagttttctcagctgtaatacagggacagtgttgtttattttatcacatcactaggttcttctggttatcagaattaaagtgaaatacagtgtgaaaatttcccatacagttgtaaggtagaagaaacaaatatgaatttctagagtttagtttcctagctgacttcagaatagactgttttcaaggtttcttctccctttggaaatagtcaaatgtatgaaatcccggtaaatgctaatagtagtttaaagtgtttgtcttctgacatgaatgcttctctggcttctc

SEQ ID NO: 68030 - DNA, 1079 bp, Homo sapiens
agtaaatgtgagatgaaattctagagcaggtaaagtcaacgtggggtgaaattctagaccaggtagagctcgtggcaggtgctgtgttaggtagctagttgaattggtagggaaatgtttcagaaggtaagataacaggtgaccacaaacttggtagcttacagaagtttatttaagttccgaagggctaaagtccgaaatcaagatgtcagcagggccacactcccttcacgtggccttctcttttgtatttgtgcctcttctgtctcttataaggataattattgttggatttagagcccacctgaaatgcaagatgagttcatctcaagatccttaacttaaatttgtaaagttgttttctaaatagtgcagtctttacagggtccaggtattaggatgtggatatatattttttgggggccactggtcaaaaccagtgaagtcctacttaaaagcctggtaaactaagggaatggtgaaatagggattgaaatagaagaacaactacctgtgtttttttgtttgtttgttttttctgttgctaggtttttgttgctaaaaacctagttgtcctgacagagacgcccctttaaataaatagttcctgtgctgagtatccccaccctactctggaggggtggttttgtttctctaaaaattgccagattcattcaggtggcagattaaaaataagtaaatgattttctttttgagtaagtagtagggagatctttgggaaaaataacctagaaaacagtatatgtatttttgccattcttcttgcagatatatagattatattgatatattttaactttgtcagtgttttcaacatacacagaaaagtacaagataataggtcttagcactcatgtgctcgtcacctaaacttaataaaattttacatttttcatatttccttaggatatatattttaaggaaaaatatatagtagactattttacatatatatttttatagtttcaaaatatttggcacaatgcttagactacatttttgagagttagtcattttttatagtatatacattattggtgttgtcaggaggacttctt

SEQ ID NO: 68031 - DNA, 1030 bp, Homo sapiens
gagggatcagcccattgcatgcctctccctgtaatacttggagaattctaagttatttgtagttaatgctttgaaaacatatattttattcctgttttgctattacaagagttttttttatcctgaaaacatttctactagaatgcaaaggttgtgcttataaattctgcagtgttttaatgttttaaaaatgtgcttcaaaagatggatggaaaattgctgtatcatacctttcatatgatgtaaaagaaagtctttttttcctttaatataaactggaagatgaaataaacatatttttaagataaatttctttgaaggcagattaatataatttggtacatttttattttggaggaagtattgtcagaatagttgtatatttctcctcctttgatgtatgttgtttgtgaggtgtctttaaaatccttaaaaaagtagttactggttactttgaagtcatgaaacaggaagtatgaatacatgagaagacagacataggaatgaacttaatcagtttaagatcttatcactgctggcaacttgcctcatatccagctttgaatgatgaacaaaactgggtctgcacatcatttatacttttagcatgtaaacagacttgatctttaaccaagagttgtttatatgggggcgtaataattttctactcctgagaattgtggaataagcattttattgtttttaatcatttaatatacattattaacaatttactagatgcaaaggatggctgggcctgtggccagatgatgaatgagacttgctactatgtcagtgtatttactatagagcgtggaaggtagacctagtgaggaaaaaagaggtactctgtgggaaatgctgcctttaagctgaaatgaatgtgaaggtgaaatcagctaccatcaggttccaaactgaaacactgatattatgatacacatcttctcttaaaagacctattttaacagcatggttcatggtagagacacgtttgagaggaggaaaacaggcagaggataggcccttt

SEQ ID NO: 68032 - DNA, 1051 bp, Homo sapiens
atcattagacagatttctgtcaaatatgtcatgttaaaatttagttgcacttaaacattgagcttaagcaacttagatgtcattttctgttttcctaaatacattttcatatatttatatagactgcttatttttagaagtttactgttttctaccatatgttttttatagtcagaggcacaatttctacttaggctgttctaaggttctgtgatgtagggtgatggaaatgactcatttagttagaatcgtatttcatagcctaggtttttggagcacatcgtatttcattgaaagagagaagagatgcttgagaaaaaggagagtctgtaaactagataaaagtaatggcatttttgccaacttcattacctcatcatcagcacctttggagttacttagtggtgcctcatcaagataggatccgtttactttcttgtctattgttttagaattctcttaaccagtatctgagaaattgcaacttgctgatttaaattcttagatattttcttgatttaagccaaatttgaggttggattttagcatgcagtgtaactttttagtatttgttacttggataaataactatttaaaaggcaaaaatagtagaattcatacactgcttatgggtgtgctgaatggtgtgatttctacgaagattaagtgtgaggtatgacatatgtaagctagttaattttcttccttcttgcttttctttttaatgtcataatagttaaaactctttcaattgaatgaaaaataccatggagctattaacagaaatacaaatgtgttaaaaaatgagactgttgaaaagcttatgatagtttcagaaataattctgctacaggatagaaagtgagaattttcattagagccaaacaaagaggtataaggtttcactttggatggtaggaggaggctggaatgaagcctcagtgttctgtaggaaccagttgttagtcagcaatagcatggttttcaaagtatggtttattaaaaatttcccacaaattcaacctgattaattttttaaaagttgtgttgt

SEQ ID NO: 68033 - DNA, 1750 bp, Homo sapiens
ctgttccaattattataactttatgacacgtttggttacctgttagttttaatgtatccagctttattcttccttaagatggccttagctaacactgaggattgtcaactggttaggtggagttaatatttattttgtatgtcttctaactttgaccatacagcatccctcaaccagctgactgaaatactggcattaatccagttagccatcaagagaacctagctagacttctagcctcttaatggattttcagatttattgagtgaacagaaaataatttattggtgtacacacaatacatcacatttaaaatcattgctcatttttagcataaatcactgcagtgttcagtagtaaaatatctagttcaaatgtgtgcatttcagtgtgctgatacttaattttctcatttgtaagtaaccagttgtttcctttatcattatgaccagctccgtagatgccatgtttggaaattagtttgcttaaaaaggtgaaacaggaatagtgaaataaaaataagactgaatctatttggaagaattaattatctgtgtgtgacatttaaaggcaatgatctttgttagtaccaacttgatattgacagtttaaagaagtttgttctcagtgccctgccttctttccccttccatttcacattgcttctgttggaggaaatgctaaggtttttatgtaaaatagttactatttatcttcaaaagtgaccattttaaaatcatgtttacttattttctttgtggggtggagaatgggaaggaggaagggaagcagtgagcctttgggatgcagtgactgtattccagattcccatatgacatgtcatcaaatatgatacattctttaaaattgggactatcttaggaaattgaaaatatatgatccctatactaactttggggaaccttttttctacttttaaaaataggttactaatgatcacagatctatgtgcacatgggctgtataaatatttccccccctttcaattaataaatggtgagttacaagggcgtaggggtcatgcttgtcaaatatttgaactgaatgtgagttaggcatctaaagctatgatcacacttatttacttctaattacaaataaagatgcaccatttcatttataatgtaattttaatggaattaaacttgaacagttaacaccacataattatatcctatttcagttagaataactaaccaacccgacttttctatgatatcggtcacagtgtatttatataactgtattatgggcagaaattttcctctgttagtggatcaggtacatatggtgacccagtgatctcagtgacagcatttgttgaacagacctttatggagtgcatattaattttcaaacactttgtaagcactagaatataaagataattaaaatagatatgattcctgttaccacagaactttccaaccagagttggatacctcaggtttataaacatattgtacttgtactacttgaatttgcatactaataataataagtaatttttgattgccctatgaggattcaggctttctattccaattaagtataaggttcttagtacaatgtgttagtatcagattttcacatattgtgggctacttttcctcaacatgtaatttagttaatagtgtataaactagttagatttagacttttgcactccatgcaaagcgtattctttctgaaaatattgtggctctgtttatgagtgcttgtggaaaca

SEQ ID NO: 68034 - DNA, 1536 bp, Homo sapiens
cccttttcctttctaatagaatttaaattttgttagaagcaaaacacaaagctttttgtgcctagcttaaaaactatcaatgtcttagcttcccttcctactgaggtagccatgtgatctagtcctggtcagtgagatgtatgcagaaatttctagacgaagcttttgggaaagcccttttagccatttctctttcctcctgcctagaaattagacatgatgacaagctgtagcagtattctagagacttttagggaaaggctaagagattcgcggaagtcttagcccttatgttcttgaactgccaaaccaatgtcagcaagcgcttctctctgaacttacatttcgtgaggaaaataaagccctatcttaagccactatagtttggacttctttttacatgcatctaaacattatccctaactgatatgataatttacatgcccgttatgatattctttcaggagatttggattcttcttacagtttaacaagggatgttatccgacttcaaatccagaagtctctgagatttttggaattatttcctttagacttgattggaccagctggatatccaattggatggatgttggttacttctggagggtttcttgcctttcaaaaatagcctgtagcatttctcactgtcatttcatcctctctcagtttaagtccccggcttcatcttgctacataatctatattgaaaccatagagctccctctgattggagagaatgtccatgtagttatagcacaattagggtcatttggattggtcaaggacaggaatttgactgctgaccttatctccctccataccagaattaattgcggtcttttttttcctttttaaaaattttaaactttttcatgtatcatacacatgttgagtacgtgcatagaacatacatattcaactctatgacttctcacagcctgaacatatatgtgactagcatctgatcaagaagtgaagcttgattgtccttgtgggttgtcagcatgcaggcttctaacagcatggatttgtttttgcctgtcttattttatatgctggaattgcgcagaacatattcttttgtctctggtgtcttttgctcagcattgtctataaaatttatccatattattatatgtaattatatacattctcattgctgtatagcattccattatgtgactgcatctcaacttatctactgttggtgggcatttggattgttttcagttttgacttacgaatattactcctgagaacatcctacaacatatcttttggtaaacatacgtaagcattctgttgaatgtatactttggagtagaatccctggatcatagggtatcagtaacaaatgagagtttaagctcctctgcattctcatcagcacttgatgtcattgtttttaacgtagtccttctggtgggtgtatcttttgtgaagtgcctgtttatgccttttgcccatttttctgttgggtcatttgtcttgtttgtgagagtcttttttatattctgactactagttttttgt

SEQ ID NO: 68035 - DNA, 1735 bp, Homo sapiens
atttattcactttttatctttcatgatttaagatagagacagggtgagaaaaaccctgaagaacagtcaacaaaagctttcaaaacaatgttatcagaggtatgataattatgataagaaatcataagaccattgccgccagtgatgttatttgtgtttgactagaattatcagttttttatgcccacgtaaacaaattgttttatttcacaaaggaggtttaataatttatggttgaagtgtaaatgaaatactatggctcttcagttgtgtaatgctcatgccggtctcagatgtaaaagttcaatcagtgagttgttgcagcccatttcattgaaggaatggagacaaaagtttgtttgtaactaccatggaactgagcacaaagatgccagtgacctttgaacttctgtggctgtgcatctgaacaagggattgtttgagaatgggaaaagctgccagtagacttgggatatgctttctccttgttttctacagaattgttgaatgaccctactccagaaaaacaaaaaaacaaaaaacaaaacaaacaaaaagcttaattggaagaaattcttactggtctcagaagaatctcatgtctgcatagcaaaatctaattagatattcatatcccaaagtgatagtcattaaaaatactgtctccacttacaaaaatggcaacgttaattactgccattttatgcattgacaaggctggtaggtgcttgtggtttcttcctctgcagttcttattatgttcttattaaaagctatcttccagttctatggttggaaaatgcttctatatctgggtcacactaattccttagcttatttttttttttttttacattgcttaaatgttgggcattattctgagagtgaaacctgtatttgtcaaatgaatgagtgaagtaataaatgtacaggaaaagtatttttttgtgtgtgtgtgagagaggaataatggcatttgcagtactcttttttttcttccaaagtgcttaacaaaaaactagtaacatctctcagtatgaaaatatcataaataacagtatctcttttgcagccattgtatatagttctcttatttgccctagccagtgttcaaactgggcccaaacacgactttatttcagttttgttgtctttagaaagagctgagtattcaatactaatctttccattttggagaaaaagctggttctagtttatattgttgcatatcctgtcttacacatgattaataaattatgaagatgtttatatttgaagttaatgtaccaatttgccattacatagtgcatgtgttttgaagtggttcctttttcccatcagtaatgcatttgtgcgtattatttcatatacttttaggtagttctctttatgactagtggctagcaccataatttagctcataggttatgatagagtgcagaaatctgtcatcatattgcttaactggagtcactgggattgagtttatgatttcattagctgtattgtcttggtacctgataggggtaagatgggaaaaattagtacagtagttataataagaaaagtggttgactattaactttccagtatgtgttaaaatactgatttatcaaaaatttaaaataaaatcttaactggttgatagttggagaatttgttcatcatagtcctgtgaaaaattatttaggaagtttagctttgagtctcgatttatcagctactcttaagaaat

SEQ ID NO: 68036 - DNA, 1304 bp, Homo sapiens
gtttgcaagatctattttaattctattttattagtctggcatgccaggtttattctttcataagtaaatattgttcgtgaacattttgtcaggtttccgtattttctcttaatttgtgtgttttaaaaggcagacattatttccctgtgtatataaaactccaccttcatgtgtcatttggtgttatggtaatcgctaaacataaacatctctaagtttagctgtaaaaatcatcagaacttgaagatttttttcttgttacagcaacaaagggatttctatatactattgcattttattgccaaataagattctaatatgttttggtttccttttttaacagttgcaccattaatatagggatcatttactgagatgtttaagtcaaaattacctttgattaacagaacaaattgccttttcagctgtttgctcccaataagaagcagttttcatccatttatttacttaagagtatttcctgaaaactctggtgaattcctcagcaccaagttgtttaacacagaagagaggtggaaacaaaaaatgcttggtttttactggctttcttttagcatttctgtctagtcgaaatgggggccaggcttgcacacatagacaactgaattaatgtaaccggacctattccatctaggctgacctcttgaaagataggaggggaagtctaaaacaggagaaaagttttagaaatcctttggattaggcttacccagattagtggtatgtaaaatattatgatattcttagtgtttcaggattatggattttagtaaaagcagaaaaaaataaattcttgtttaactgaatctataatggcaccagtggtttggaaacatttctgagttacttgattttatgtgaaaaaatctggaataacttttccttttttcctttagaccatttttcttttatttaacctaatccgagccactttataccaatttcaacaatatttctgaattcctgtgatcttttatttcctttttgctgctttcagctgtgtttctctccactctaagctcattaaagttaaaaaaaaaataggagattggacccatttttttttctgaggagtgtggcgtttagcaccctgtggtggctcaggatattttaagtagtattttcagctttctagaagtgtttgccttatttagaaatagttatggaaagttttctgtttggaggaaactgtttcttatctttgttctggcaaagttgtttgatcctttcagcatcatgattcagttggtttgtgttcatgtaggagtttgcagcctagctgc

SEQ ID NO: 68037 - DNA, 3548 bp, Homo sapiens
gagcggagtgcagtggcatgatcttggcttactgaaacctccgcctcccaggttcaagtgattttcctgcctcaacctcctgagtagctgagggaccacaggtatgtgccatcatgccccgttaatttttacatttttgttagagagacggggtttcaccatgttggccaggttggtctcgaactcctgatctcaagtcatctaccctccttggcctcccaactctgagtttgtttttagaacaagctgaggtgcagagagtcagcctctgacctgaggtcttcttctcttccccaggctccttgaactatgaagtttgcatgtgcgtgtctgtggaactccagcctgtacaccctccaaacagcagctctttggccattctttggcctagggttgtaaatactgttggttgggtcatctgtccttaggagaactgactcaggggagaggcctgagcagaccctggaagaggtgggagattttggggtcccggtcaagatgagggctggggcacgtaggctgcagatgggcacatcctttaggcccttagcatagctggccccatggtcaggggtatggttagaggaaggccagtgcaaggccctctaaagcttgaggcccaggatgggtgccattgtttaggtctaagcagtactgttctatgcaagtaaaactctggttttggtcctattgctagagttggttattgtggaaaatggtacaatctctcttatggtgcctcaaattagatgtgatgttttagttagagcttcctaaccagtgtgccagcagttctctgaatgtgttacagatgggccagaaatactgattcccttagttcccaggattgtcaggggtagagtggcaagagcttctaggctgatcacttttccagcaggatgacctatttaccccagggtgcctgtaccagtgctactatgctaccagtatcaggtgctttatgggcaggtttaggagcatatatatatatattttaatgaacattatcacttggtccacctgaaagagtaagaggtgtcacagtaggttttgtgcccttcttattagtagggaaatagatccaggttaagtcacttatctagtgacattttcttactcaagtaggccagttgaaactagaactccgtttttatgacttattttggtatttctctctactaacccaaattgtgttccgtgtacctttttttgggataacttgtcactcttattcatctagggcttgtaggaaattacattttttagagcttttctctcccaaattttgttacattgttttccttttattgttattttttaatctaaatattcagttttatgtttaatccctactaaacagaattatttttatgagattcaaccaattgatggagcatcttgaaactggattttatgtgttactcattttttatagctctcttctttagattagtattatatttagttactacagtaatgtttgtgtgaaatgtgtgaaatggtcacctcaaactcatttatataaggttagattacataagacaggaaagtgtgcagtacattttagaaatattcctgttgtaaaacagttaaagttctggtgcttacatgtaaattcacttgtttttttatctaatgcctactttgtactgatcttaaggagtgttattttattgaaacctcccagtaactctagtagtagtactatcatagaagggaactgggcctcagaaattgtggtcacttgatcaggtttactcaactatgtgggggattgattcatactttaaatccaggtctttttgcccttcaagtgcctgtgttttcctcagtactactttgtaaataatgtgaagtgatttctgaacacttaactcgggttgagaaggggatgttttccacatttatattcttaacatttagagtaacagattctttgctattactcctgcacaggacaacctctctctcttctctcccaacagagaattaccatctggtcaagaatgtcagtagcgccaaggttgagaaaccctgctgtaagagttctgagtagtcaaggttttactttgagtgcgtttgtgtttgcagttttagctctttaccgtgatgataggtactagaatgcacgagagacatgaactacttgtgcctccatagtttatattcttaatttgtccacttccctcccagtttggaaacaggttgacagtgagtgtagagcaagatgtttatccatttgtattctgtgttgtttctagagaatcagggattttatgttagagactttctgaatggtgaaggttaggctttttaggttttcatgctgatttttatgataactttcaataggaaaaggttgtgagacatgggcagttaagctggctttcatgtactggcttgctaacccacctactcttatgaagagttgtgttgattgattagagcacagatttgaaggaatggttgctcagtattctcatacaggttctttgtgttttcacctgtttttgagttccaaggcatgatcagaacctcattatagcagttttcccaatttcttttcagtaccttcccagacctgattttatgtccctttgatctagattaccgtgcccacctccttaaacttgtttcagtgtgtcattctaaactatcaagaaccatcaaaagttctctgtctcctatggttctattcaactctcttgcttgagcttcaaggagagcctttttagaatccttcttaactcaggattctgtttcaccaaatgataaacatctgtcctattaatattaccaacagctactgttattgctaactgtttaattgttatggacatgctacgaactcttctaagccccttacatgtattatctgatttaatcatcacaagtgcccccatgaggtagttacttatagtgatatttttattgcagtaaaatatacataaaataaaattcgctatcttagccattttttaggtgtgcagtttagtagtgtgaatatattcacattattgtgcaatagatctccagaatgttttcatcttgcaaaactaaaactctatgactgtgaaacaacttgccattttccccttctcccaggcccagtaaccacattctactttctgtttccatgattttggctactttagataccccatatacatgggattatactgtacaatatttgtctttatgtgactggcttatttcacttagcataatgtcctcaaggttcatctatgttgtagcatgcggaaggatttccttcttttttaagggtgaatactattccattgtgtgtccataccacatattgcttatccattaattgtcagtggatgcttgagttgcttccacctcttgactattttgaatagtgctgctatgaacatgagtatgcaaatacctctttgagttcctgttttcagttttttggagtatacatccagaagtggaattgctggatcacatggtaattatatttttacactttctgagaaacagccataccctttttccattgcagctgtaccattttatat

SEQ ID NO: 68038 - DNA, 1129 bp, Homo sapiens
aaaaaaaaagactgactcttggtgttgtaccttctatggatttggacaaattaataatgacatgtatccacatcatagtatcttatagagtagtttgactctgctgaaaatcatctgtgatttggctattcatccctccctctccccagcccctgtcaaccaccagcctttttactgtttccatacttttgccttttccagaatgtcatatagttagaatcatagagtatgtagcctcttcagactagcttctttcacttaggataaacatttaagtttcttccctgtcttttcgtggcttgattgttcatttcttttttattgctgagtaatattccattgtctggatatactacagtttatttattcattcacctgctgaaggacatcctagttgctcctaagttttggcagctctggataaagttgctacaagcatctgggtgtggttttttttttttaataagtaagttttcatcttgtgtaaatacctaagcatgcgattgcgggatcatatgttaagaataagtttagttttgcaagaaactgcaacactgtcttcccaagtggctgtgccattttacaacctcaccaatagtgaatgagagttcctgttgtcccacatccttgtccacatttggtgttgtcagtgttttaaattttggccatacttatgggtgtgtggtatatgacattgtttcttccctttgaataaaagcacgttctgtcttagggatttgtgtttgctgttccttttacttaaaatgacttatttttaattttttttagagacagggttttactctgtcacccaggatggagtgatcatagctcgttgtaacctcgaactcctgggctcaggtgatcctcctacgtcagccttccaaggagctaagactataggtgcgtgccactgtgccgggctaatttttgtaatttttgtagagacgaagtctctctatgttgtccaggctggtgtcaaactcttgggttcaaaggatccacctgcctcagcctctcaaagtgttgggattataggcgtgagttatggcgcctggccatgtacttcttttaagtctcgtcatggctgccttcgtcctctcccagagagaccatcatgattacctgt

SEQ ID NO: 68039 - DNA, 1058 bp, Homo sapiens
ttgtgaccagggaatatcagtagtatctaccttggaaggttgtagtgaggattaaatgaaatggtacatattaaggcttaacacaatctctgacatacagtaagcactcagtaagtgatagatgatgatgattagaaactctaacctgaaagtatgcctaaaatattttatattaccatcacctccagattatagagttattttcctgagtgttatgctgtttgctatagaattttctcctttgctgaaacttagttaacagctgataagcggaataacttgagaaatttcctgtatgctgtagtgtatttttattaatcacttgctgacttcagatcattaagaatgggtggaaagatacttctgttttttatagatcctgattcttgataatttcccgataatgttcttaagtttataaattggatttaaataccacttctattttggtactggtactggcttttttttttttttagaaagatgaatgagaaaagtcggttttgattaggccagggttggataattttccccatatgtatatgtactctaaagtcttccttatgatttgcattaacatctttatggcatgcttctcagagttgaaataataaaagctaattttttttttctaaatagatctagtttactatccagagacttttatattacactgctttttgaagtatttgatttaaattatcttacagttgagaaatttggtgtgcctctcaacttcaaatgctggtttattaacattaatctcaaactaagagtgagcaaataaaaaaggccattgttctgagttaaacaaaatagaattggggtcattgtggctcttgcagttctacaaactgtacagtttcttggccttagctgatgcttcagtgaagtgagatgatccagaggagacaggggagggcactgatgttcccacgctgtcctcggtggaacagtgagatggaggcagaagggctcttccacaaaaccagggaacagcacctggaaaggtgttctgattatagcacctcaaaaaaagtagacctaaagaagatgag

SEQ ID NO: 68040 - DNA, 1031 bp, Homo sapiens
aaaatttcataggagaataacacaaagttctgaattactatgatagaggttcatgatgaaaatgtgatagggaaaggagagaagatggaaagtttatcatttcaatgaatgcatcagggattaataacatctcagtgaacagcagtactggtgttccttaaaatgttgcccatggtagtgggcatggattccatgtttacaggggctgtttcacgagcgtcaatattagcaaggagtatgctacagacagacaacacatctttttttgacatctctttttaatagggacacaatatgcagctggcgctttggccaggaaagaataaataagcaagacaatgtcaattgtcgctttgggaaaattctgtgttaaaattctctatgaaacctggcctactttcagcaacttttctcaatacagctgttgagcattctcaatttggggatgcaaataagcttcttctctctcccttgctcaattcccaggccatctttcaaactcaaggttaggtacgtattgcagtcctctgtgtggctgccctcgtcactggccctacttgtctgcaccgtgacgctgcttcagcgtctagaggggactgcaatgcaacagatctgagatgccaggagtgaacccagatgctacctcctggcagacagcagtgccaagactgagaaaggaggccagcctgaggtctccaatagcttcggcaagagggggaatttgttttttcccctcccctcctacccctcaccttgtacatattgaatcaaaccatacataagctacacattcagttatttaacattggacagactttttcttgtataaggaatgttgcaattttttgtgatttatgtatttaatcattaagggtgttattaggacagaggtaattgattacaaacatctgaaacgccaagggcagatggctgcagagttacccagcaatcacaacttccagttcatatgcaggtttggcaataataactaggacacaggacatttggacagtgtggcccaaggagaggga

SEQ ID NO: 68041 - DNA, 1029 bp, Homo sapiens
aagaaaaatgggcaaaggctacaatcaggcaattcatagaaaggaagatctcaatggccagtaaacatgaaaggatgctcaacctcgctgataagtgggaacacccgaattaatatgagataccatttcacactcactgggtagcccaaaatgaaaggacaaaatcggttgatgacaaggagatggagcaacaggcattctccacactccggcgggagtgctgtatggtacgattattttggagagcaatttggcaacaaatggcaaagctgcagacgcacataccctagggctcagcagttccactcctgggtatgtgcctggagaaaccagtgtatgagtgtaaaaggatacctgtaaaaatgttcacctgtgtgttatgttagtaaaaaataaaaaacaatttagctgtcctttcagaaggaaaaaggttaaaataatatatgctatatccatgcaatgaaattctatgcagcaattaaaataaatgaaccagatacacttgtattaatatggatacattttaggaatacaatgttgagaaaaaaagttgtagattgatacttactgtctgataccatttatttaaatggttgaaaaggcacaaactaatactacatattgtttagagaggcaggggcatgggagtggggagtgctaaccacaggtttttattttcctatgtaatttatttatttattaagacaaaaaggcctaatgtaaatatggctaagtattacgatgtgaagaaacttgggtcatggctacatagaagttaatgacattattctttgtacttttccatatatctgaaatttttcataacatgaagattgaaaagtgatagcacaagagaccgcacatgtccacagaactcttaatcttgtggaacttttgatctttttcttaatagcttttctatcctgaaacagtagcatttaaatacagagcttgttgtacatagtctcacagtgggaaactgagaacactttataactaaacatatgtacaactcacactgaaacaacc

SEQ ID NO: 68042 - DNA, 1024 bp, Homo sapiens
attagcttgggggttggacttttcacttgattgagtttattgttagtgtcccctagctaacctctcttatctccgggagaaatggaaagcaccggagagcatggcctctccctaatctagcatgccctgctgtttgttcctcaccagtggccctgcactccaatgagtagttgtgcgctttaggtattaactcttgagctcctctgtccttcctcaaatttatttcaccaaatagtgattgtgtgcccagcactgtgccatgtactgagggatacagagataagcctctgtcctccaaggaactcagaatcttggactgtgctaaagtgaggacacacctgcctttgtgatttagatacaggttttatcctgttgaaagcagatagatgggttgctgctgcttctggtggcatgaaagaggatgataaaagatcagatttcacctgactatggtatataagtagttcgttagggttttctgggcccaaacctcaggagccttgagaccctggtgggtactggggactgacagcatctgtagtgcttgcttctcagttcctgatgccctggaggtgacacttgctggttttccttacctcctgtcttacaaaacctgactgctttttttttctaggggaagttgcctacacggatcacagttcccctctctgtgatcagccagccaatgaagggcaagagcgtggtcacagcccccatcatcaaaggcaaccttggagccaagtaagtactatgtcatggtaaaggaaccaattcgggggtggaggtggcaggcagggcttaccagtccttgtcaccgagtggcaaagtggctggtctttctggggcccttctttgacacctctgctttattgtgctcatcaacagtatttattgagcatccagtattgttttaggtgcagtgattaaaacagatgaaaatccctgctgttctccaagcatacattgtaaagtagagaaataataaaaaagcaacatgcgtggtgatacatactggagagaaaag

SEQ ID NO: 68043 - DNA, 1020 bp, Homo sapiens
aaaaaaaaaatacaaaacatctacccatgaaacggaagtttgtctagttgtattttgtaaccggtttactattgtgaatccctcatcagtgctgcttctccccattcaggtggcaatcactgggcagcttggtgtgaagccccaaacaggcaacagcattccactcacagccactaacttccgcatccagggtaaggatgtattgcgtctgccgccctcttccatcaccacagatgccaagggccagacggttctgcgaatcactccggacatgatggccacattggccaagtcccaggttaccacagtcaaattgacccaggacctcttcgggacaggaggcaacactacaggcaaaggcatctctgccaccttacacgtcacttccaatccagtacatgcagctgatagccctgccaaggccagttcagccagtgccccttcatccactccaacaggtaccactgtggtcaaagtgactcctgacctcaagccaacagaagcctcaagttcggcttttcgcttgatgccagctcttggcgtgagtgtggctgaccagaagggaaaaagcacagtggcctcttcagaagcaaaaccagctgccacgatccgcatcgtgcagggactgggagtgatgcctcccaaagcaggccagaccatcaccgttgcaacccacgccaagcaaggggcctcggtggccagtgggtctggaactgtccatacttcagcggtgtccttacccagtatgaatgctgctgtgtccaagactgtagctgtggcttctggggctgcaagcacccccatcagcatcagcacaggagcccccaccgtgcggcaggtccctgtcagcaccacggttgtgtccacgtcccaggctgtgagtaactagtggtaaagcttaggccttcttttttagaaaacttaatcaaggctcaactgcccattacccgagaaactccctaaaaactaggaaacttctttttaggagtggaaattagaggccctaaaagcacctcgttt

SEQ ID NO: 68044 - DNA, 1118 bp, Homo sapiens
ttcttctggtgtcttcaccaacaatgccacatctgggaacaatgctttccccagcttccagccagactgcacccagttctcaggctgccgcccgggtcgtgagccactctggctctgctggactgtctcaggtgcgagtggtggcccagcctagccttcctgctgttccccagcagtcgggagggccggcacagacattgccacagatgccagcaggaccgcagatccgggttccagccactgccacacagaccaaagtagtgccccaggtaaacagggaagccgtggtcattgggaagcagagatgcagacccagaggtgggctgatgagtcagatgggcagtgtctgggtaaggactggggagccatagattattgctactggtgatgacattcatcggaataagccactgaatgttcagagctgtgtaagcgtttttagatagtgtgtttatgtgttgggaatcagatcttcagagcagtctggtggtttccccgggaccctaacatcaggatcttcgtagaggcgggttgtaaatgcggaccttgtgagtctgcctctcaggctccttctgctgtgcctctagtcttagctacgccatgaactagttgtgtgagtttacagaacatttgtatcctctttgtctcagtttcctttgctataaaaggggtaagatagtatttgtcctcagtgtgtaggaataaaatgagatgttaaatgtaaaattctgaaaattaagatatacacaaatgagacatttacagtgtccattttagagagtggtgtgccttaagtactgtgggattagaagctctttgagagcaatgcttccggggtgctgagggagactcttgcttagagtgctggtctgcatcttagagtctaattaagctcttggcctcatgccctcaactagacagtaatggccactgtgcccgtcaaagcgcagactacggcagccactgtgcagcggcctggacccgggcagacagggctcacggtgacaagtctccctgccacagccagccctgtgagtaagccagccacgagttctcctgggacctctgctcccagtgcctccacggctgccgtcattcaaaatgtcacaggacagaac

SEQ ID NO: 68045 - DNA, 1055 bp, Homo sapiens
agttttaaaatacacagaggaaaatattgtggaaggacctctttgttgctttcccttctaagttgtcttcttcttcttcttcttcttcttcttctttggtccttaagtgaaataaagactctaaaactaatttgtatattatcagccagagatgcggatggcagtcgagccaaatcgcatggctttcagatcaggtattctgcacattcattccaaggtcatagatttttaaaaggacctggatttgaagagatggcaaatgatgagccatcagaaaacttaatttggaaaacatgtatgtagccagtgtggatattgtggcctctctcaagacacattgacactgtagacttcattcagtccagtgtgagtattttggagtaggttggatgtagattttgtttttatcattgatttgtaccgacagaaatagacatttcatcatgtaaaattcctgttattctggaaaaacctattgttttgatcttcttgttttctgacttggaagtatcctttcaaaaaaactcttaagatatctaggtctaaaaagcacttcatgagatgctaaagctgacccactggttgaaaatgttgaccctatcctgttatttaaatgtgaacatttattgtacattcagtgagttatagtgttaatagtcttgtgctatgcagcaggtgtaaaaattaataaatatattttttaataaacatgtttgtatgtgtgaagctacaagagctatttttttttctttgaagaattgcaacttttggtttccagcgtggcatacaggaagcttggaagttgtccctccatcctagcaataagtaagaagctgagcaaatggaaagatcaacatctctccttagatccatcagaaagttgagcccacaggacaaactgctgtccccaaaattggaaagacaaacaggcaaatacagagaatcatagcttattgaacagaaacccgtgagaaaaaaatccacgatcaataacctctatgagaaccagcgccagggtaggaaaacttgaactatatttgatgaattgctgcagg

SEQ ID NO: 68046 - DNA, 1034 bp, Homo sapiens
agcagggtatgtgcatccaggttagctgaagcatcagacagccagtgctctgctctcaactcattttgaccttgttacgggtgcagaatatatttctgccaggtgctggaaagtcatagagcaatatttaaaattcagaaccttagtctgtatctcattccatgttcttagtaagactagggcattaaataatgaaagacaggtttgcatgaggagaactcaccaaagaaattcataccagtgtaattttcctttttccaatagtagttctttcagccaaagactgttgatggctgaattcaccacagtgagtcaccttcaattgtttggtgaattattgttaactcctgttaaccatgactgtgagtgctttggcatcagatggggtctggtgatcctggttctggccaaatgccttattatttgggggcattgcttcagagaattccagcttctggcggtcattatcagaggcattcgtgtagcttctgtttggttaatggggtctctttttctcattggttctttcttttccctttaggtaaatcacttatcgaagagacacccagacatgaagatagaagaggtgccagagttaactctacccatcataaaacccaatcgtgattacttttgtcagtattgcgataaggtaaaagggaaatattcatattggtatgccactggggttccctgcttagagctgacttgtccgtatttataaatatatactacgatttttttgttactcttaccagatggttacctgtctctcagtagtctccattcagacaagaaaggactagaaatacagccttattttaagccaaatttttttcttaagaaatagttgacttcatttttcttactgtcccttctctctgtgatttttgttacacaagaagaggtttattactagtgcttagtgtatgaattaatttcaaattcctaggctctaaaatgagagcatttatcatgacctataacatatatggtagttttggggtttctataaggtggagggggttgggaaa

SEQ ID NO: 68047 - DNA, 1019 bp, Homo sapiens
agcttcaaattctttttctcatggatttcaacaagtaacatttgactgacttgctccagcctgattcctgcatgtgtgacttaacctaagtcttttcctccaaatcttccatttttatcctgttccactgtgggatttgttttattatacaagtcttctattgggaacactttttttgttacttaaaccctttcaaaagaaaacccacatacatagatgtaaaacaaaacacaaaaaaatttcatctctttaagatgagcttctttgaggatggcttcattttcagtgtcttcaccagaaaaatctcctttcaactgtgtgtgtcctagagttgaacttctatgggaagtctgtgattgcagagatcatcctctctttctctgtaaaagtgtgatccagttgcactcttaatttcatcactaaatgatcacatttgtgtatgtctttcagaatgcagctcttcagcatctgtttattcggaagtccttccggccttttaaatgcttgcagtgtgggaaggccttccgggaaaaggacaaactggaccagcacttacgcttccatgggcgggaggggaactgcccactgacctgtgatctctgtaacaagggcttcatcagcagcacatccttggagagccacatgaagctccactcagaccagaagacttactcttgcattttttgcccagaatcctttgaccgccttgatttgttgaaagatcatgtggccattcatatcaatgatggctacttcacctgcccaacttgtaagaaacggttcccagattttatccaggtgagtgtctactactgagattcctgtctgcttccttcttttggtaaaagaaacttcgatttttggaaaaccgagactgcctagcacctgcatttccatcccttctttgaaacaactttacaattgagaacaatatttcttcaatcaaactacttttatacacaagattattatgacccttaattgtccagatcagacattgacattgaagtgtttaagtt

SEQ ID NO: 68048 - DNA, 1057 bp, Homo sapiens
tgctaaaggcatatagaagcaagcggaggaatcaaaggcacctttcaggtttcaagtctgagcaactgggtggaaggtattcatcaagatggggaagatgggtggaggtgtgagttggaaagcattgagaattccattctggacatgctgagtttgatctgtttgtgagacatctaaaacatccagtcaaacacactcagagggaacagagagagtctgggatggagatattaatttgggattcattagcatagagttggttggaaatgaatgtggccacctgaggtcaaaataagaagtccctacactctgactaagctttgagccacaccaatatttagaagttagggagaaaaaaaaaagaggccaacagagtgagcagaagtagccagtgggtgggcgggagaaggtggttgccttggaaggtgtcattggtgaccccagtaagggctgtttggtggcaaccactatgactacaaccctgtaaaaaccagtgtttaaatatagataagaaatcaggggaggctgttttatttagttgaagagactatgattataattcttgtgaagttattctagtaacagaaaccattttctgaaaaagaaaacaggcagtgcgtcttggcaaatgaacttcctgactgatctgctggaaaggtattgcaaggggagctcacagcatgatctttttttccattgttaatgggctgtggaaaagcctgaattgtttcctgtaagcaggagaaataatttaagcatgcaaagaacatctggtgatgtccccagttcttgatgatatacttgcttcttgcaggtgtggtatgccgcatcctatgctgagttcgtgaaccagaaaattcatgacatttctgaggaagaaaggaaaggtggttagacgtttatgttttacattttctatatgaattctaaattgtatatatcacatctttatgaaacctctaattttttttttgtctcagtatatttcagaagttattccagtaggttttttagagacacacatctccatctaattcagtgtcaaactacaatgaca

SEQ ID NO: 68049 - DNA, 1042 bp, Homo sapiens
gcgagactggtctcgaactcctgacctcaagtgatccgcccacctcagcctcccaaagtgctgggattacaggctgagccactgcacctgggaaaaattcttacatttttgaggcaactcctaagtcaaatgcacagaaaatcactttatctttaaaatattaatacaaagtagctctgttatttgagaattgtagaaattaaaaataactatttcctaaaccaggtcaccatgcagctggagtaaggtaaagcatgttaagtgtgttaagggttgtgggcatggcctgtgtggtccatttgctctcctccgttttggggctgtacctgtctcgttctggcggttagcttacaggtgggtgctcctggcaaagaggcagggcgtgtggccggactggtgcaaaccgagtgctcttggaatgggcggaaaatgttgtgtcatcccagtgaatgaaggaagggattctaaatttgttcattttagcattatctaatcagacagtatgcactgaactctcagaccgcacaaccctttttccgtttgagttaggctgagatataagacttctgtaactccctttgagaaaattgattcaatagtattgtcagggttcctccccggccccggaatagttttattgagataatgggcatactataaaattcacctattttgtctcatcagatagtgcaacatttagcctgatacgctctttttactcttcagacatgttgtaattgatttgtaaatttagtggccactattcaaaggactctccagcaaagaagtcagtcatggcctgctagttgtttttggcaggcataagcaaattctgtctgattttagaggagaattacaggatttttactggtctcccagagagaatgtattaccgttgaatgggtagcgccattaggagttcattgaattttggcttgaaaatgcagacggggatttttcgggtcagaattttttacctcacatcaagtcacactgaggaattggacttttcttcaagactgtctctcttttgcagggtgtg

SEQ ID NO: 68050 - DNA, 1051 bp, Homo sapiens
ggggtcaggacgcaggtggtcagggccttgccagtgttgactctcccactgctgccaaaggagggagcacctgagccttcttagcagccctcccaggtgtgggacagaaggggcagagggagggcagaggcttaaaggctgtgagcagtcagatcaaaaatgaagccagctcttcctcacagccggtagatggaagtcatttttccagggcctggaaggagttggtaggaagactagatttcagccagcccttgcgccctgtttgtgccagcaggcaccagcgaaccaaaagcaggtgtccatgtctgcttactctgtgccttcaacttttgcccaggcctcattgccagttcataaccaggtgctgccttccatcgagagtgtagatgggtccgaccctttggcaactctgcagacccctctaggcagactggaggccaaagaggaagaggatgaggatgaggacgaggacactgaggaagatgaggaagaagacggtgaggacacggatctggatgactgggagccagacccgccccggcccttcgacccacacgacttgtgtaagtgtgggcacgggtctcccccagggaagctgtgtccatcttgtgtgtctgtgtacgtgtgcgtgtgtgtgaacatagctcccgtgcgtcaggtccttccgtgtgcagccaactgtgctacattctctgcttgcttcatcccacctggccttcactgcagccctttgagggacactctccttcgttttctgatttactgatgagtaaacaagctcagaagattgggaagctcgctgggggtcacacagggacgaaggggcatcaggcagccaagcccaggtctctcacaccagagcttcagctaccaaaccaccatggtagatttgcccgatcctgcgctcttcagccacttcagctttaacaagtttgccttgctgctttgcctcttccatgatagccttttaagaatgctgttctatcccaggcgtgagtgccctgagtctactacctcctttatgccctccatggccctaccatgaggtggg

SEQ ID NO: 68051 - DNA, 1140 bp, Homo sapiens
tgttgtagaaagcacctgaaggtagattcttcttctgtaacttgaaatagtttagggaatggggagcgggtgaggaagtggagtggaaagagggaaggtatgggtaaccctaagtatagttacagcaagactagttaaaatgtggtgaaaacaattataaaatcaatagtgcacaatagtttagaaccttatatggattgctaaaaggttactgtctgctaacataggctgtagtttgctattcattttttagttaaactctcgtttattgcaaacaggagaatattggagtcaaatgctcctcctcctccccccctttttttttaacccatgtccttcactttcactgatggtaaagttgtactccacagcttctttcctgctgtgatttctagaaatcagatcccttagacctgtgctgtcctgtctagtagccacctgtggttttgagcacttgaaatatggccagtgctgtgaagtgtgaaatacatacactcagattttgagatttagtagaaaaaaataatatctttcaatttataaaatattgattaaatgttgaaatgacaatatgttgaatagactgggtaaaatgcaatatactattataattaatttcacctgtttctacttttaaactatgtatactagaacattttaaattatgtatgtggcttgcatatttctttgaaaagtgcagccttagtcagctaggggtagggtgttcccaggtggcattaagatgtaatattttttggtttctataatttgaatgaaaagatactgctaatatgtagatgtctgtttttttagtgcttatgatagctctcacaaaagcatgattattattttgaagaatatcttaatctcaaaaccacttccagataattgagttaactgttactgaattaatgtattcaatggatcatttgaacttaaaagaataaaatgacattggtaagcacataatccattaaaaaaagttgagctaagcataatcagctaaattttcccaaacttggtctgttattcaatacattgatttttagaatttaccatttttcaaatgtttaagagaaacctgaaattgagaacattgaacttacatttttttctcctgtgatttagaaaaagaccaca

SEQ ID NO: 68052 - DNA, 1287 bp, Homo sapiens
gcttgaacccaggaggcagaagttgcagtgagctgggatcacgccactgcactccaacctgggctgcagagtgagactccgtctctacaaaaaaaaaaaaaaaaaaaaaaaaaactataaagaaatgcatgggctgaataatcaccaaatttcagaaagtcgttacatatgttagagatggaggatgctgcaaatgaggattacacagagggtatcagctgcactgataatgttttatttcttaagctctgtgggatacatggatgttcattccattattctttttatcttttagtatgtcttaaatctttcatggtaaccttacaatattatgtagctataaaatagttccatagaaagccaatacaataacatggaaaaacgagtcttctctgggggaggcggggccgcgcggggcatgccgggcggcgcgcgggctgcagggaacggggcggagcgcggccgcgccggcgcagcgaggggagaggcagcaaccgctatggacgtgttcctcgtgatccggcgccacaagaccaccatcttcactgacgccaaggagtccagcacggtgttcgagctgaagcgcgtcgtggagggaatcctcaagcggccgcccgacgagcagcggctgtacaaggactaccaactcttggatgatggcaagacactgggcgagtgtggcttcaccagccaaacggcacggccgcaggccccagccacagtggggctggccttccgggcacacgacgcctttgaggccctgtgcatcgagccgttctccagcccgcccgagctgctcgacgtgatgaagccccaggagtcgggaagcagtgccaatgaacaagctgtgcagtgaagacccccgagaggcccattacccccaataaaagagatttgggagtctgaaaaaaaaaaaaccatggaaaaagtttgtactatgacattaagttaaacaaattacctattcaaaatgattacaactacttgaaagccatccaaaaatcttgcaaagaaatatccccgaaagttactgtttttcacattggatggtgatgttgttacctccttatttctttaaaacatttcctctattttctcttatgattgacactacaaatataattgaaaaacaataaacctattttaaaaataagcatgatatatttattactaagccatttgtactattatgtcacatttgatttctaaattaatgttctgcttggctttgagtctagcatcatgtgtaagatgtgaaagcatggagaagactggagagagaggagg

SEQ ID NO: 68053 - DNA, 1074 bp, Homo sapiens
cctgcgagcggcgggcttcgcctttgttgccaggtggacgcggccccggccttcgcgcgcggcagggatgctgcgagccccgggggagctcccgcgccaggccgcccgctgctccctctgccgcctggggccgggtcgcggacgcgcattttttaagtggcgctgtttgcctgcgtccgtagaccgaggaaacccgctctgggtgcgttgaccgctttcgtgagggtttcagtgagtagggaaggtgcccgcgaaggcgtgtaaactgttggaaaaatcgtcctcttcgggtgtcagaattccatcagtggttgtgcttcgaggtcgcaccctgagcatccccgctgcgagaaaggcgaagcggcagggccgggggttggggaggccgcgggagggggcgggggcggcggggtccgcggtgcgggccggagcgggcagccttggaggagccctgctgtggccgagggagacggcgagcttgatctttacttcccttctcgaagtggtgcttgaactgctggtctggaatgtgtagttctggtgtcgtttatttcttctccctcttcgctcttttaaaaattacaactggtttctgcatacttagctaatttcagagagacctgaagactggatttgattgggcattaattgagagctttcttttaaagacctcaggtttagaatatatttacttctacagaatgttcaagtatttccacgggtaaaaataaatctaataaaaagcctctctgatggaacggcttaacacctttgtattcatccagtttaaagctttgtgactgtgagggtaagaaaggagttcagctttaaagagaaatagttaacgtttatctacagaggattttggattgcgattgtttcagtgtgtccacacaatggtcagagttgtatctgtgatccctgatatgtcgcatgaaaacagctaggtgagtgagatgggaagaaaaaataaaggctttcgtatggaagatgggacttcactagtgggtcgggtgtcagaaaccatcgttcacactcgcactccacttcccactgctatgactaatttgaggc

SEQ ID NO: 68054 - DNA, 1054 bp, Homo sapiens
gtccagaggaggaagagatagtctcttcctgtatatctccttttaagagtgaagaaacctttctcaaagcccaccagcataagacccctcaggtgtcactggatagaagtgtatcagatgcttctagccaaagcaagccttggcaaggggaatggtactgcctccacaggctttgacttctcagggcctgcttttggaagcatgtggccaggaggaggagggtgcagcctctaatcaggttgggcttatcagatggtgatacctcttactaaaaagaaaaagttgggcttggttggaaaagaaagctgtggatgttggtgagaacccagtgtctgctacaggggcattccctgtctgggaagttatgtagctgggatggctgaaagagaaagaagtaatttcttctgaagaaattatctgtgggttaaaagttagctggcaaaatggagacatctgagacatcacaatgcgtttgttagatctgggataatgctatcattttaaagggataatgctatccagaagagaatggctggaatggtgaagaatgtgaaaaatttgacatgacaggtgagtggactgtgagggagatatttcgcctagataagaaaatgtgacattagtggtggtagtaaggatcgttagtattttcacatattttatgctttgtctctggaaggctaagcatgtaacttgcttaggctgaagcaggctttttacccggagaggtgaactattagagcttttattttactctctttaattatgagcattccccacataggatagttaaacatgtaaaacagacccttatgtccagcccccagttttgttgaatcttaacatttctcatgtatgttttagccttaaaaaaaaaaacaaaaaaccactggatacggaaatataacattaccaataaaagcctcatttgaactttccagaagtaactcttgagttaggaatttacatttccattcatattttcattacatttgcttaggctgttattagagttgtaacacatatttatcaacacatagtgttaattatttgt

SEQ ID NO: 68055 - DNA, 1713 bp, Homo sapiens
caaattctgagggaaattatttccagcctttaatttagcgttcatccaaattattgacaagacgtgtacataaaataaaaacctttttgggatctgtcatgtttgaattttccattcacacaccctttcttaggaagctatggagcactgtgagccactaaaacaggaagttgagaaagagggaagtactgagtcaaaaccaaagaaaggggaaggaattttcaggactcatgagagctgtgccgaggcagagagagtaactggtccagatgaagcagggaaatggagggccagaggagggatgcattctagaaaggagggactgaaaccagtgggtcagctagtgtgtctgactacactgaagggaattttactgatcttttctgacaatttcagggagaattggtagtcaatgcaatgcgtgtgaaaccaagcaagtaaaagaagatgcagttgcttactctaatggggaaatagatgcctagaaaggaattgtaatcacagtacgcttttatgttataatgagatagaccagatgcgtggttcacacctgtagtcccagctctttgggaggctgaggcggaaggattgcctaacaccagtaagattctgtctctacaaaaaagtaatgaaaattagctggatgtggtgtggcatgtctgtagttacaactactcgggaggctgaggccggaggattgcttgagtgcaggagtttgagactgcagtgacctatcattgcaccactgcactccagtttgggtgacagagagagacctttctttaaaagtaataattacaatggaaatgaagtattgatttgaccatgggacaagtgggtggatgggtgtagggtttggcagtttaagaattaaaaacattggaggataatatctggactgaaaagatacagaaataaaacatgttgtgtagaaatgtggagataaagagcaggtggaaggcctgatagctgtggaagcacagtctctgcagagcaggctccacttgggtggaagctgtccttctcgtgtgagctctagccttgtactgtgtggcttctcaaactgtgtgcttggagtcacttgacaaaaattaaaattaagagaatggaaacttgccatcttgcataagtttttttgtcatttaatttgtcaacttttagtaggtctccttgtatggagactagtacactgttgatttagaaatacctgcaggttgatactagtttagtgcagtatcttgaagaaaccaagagcatagactttagagtcagttgtttacttgggtataaatgatgagctactgcatgctaggggctgttcccagataacagtggttaggaaaatacatgaggcctctccccttgacgaagtcacattctagtgatgggagatggacactgcagatgaatgagcaaggtcgtttcagattgcttgagagagataaaacctggaatgggttggaggagaaggccttccacggaatgcccctttgagcagagtcctgagggtgagaccaccacacttgcttgggaacagcaggggaaggcttcgagttctgggagttcattagaattcaggacagtcatcctcaacaagagaggacagttggccttgaggtgagacagaccctggcttgtgacatcaagggtggtgctggactggagggatgctggagtgtggcaggggctgcatcatggtgggccttgcaagcc

SEQ ID NO: 68056 - DNA, 1072 bp, Homo sapiens
agaccaaacaccgcatgttctcactcataggtgggaattgaacaatgagaacacttggacacagggtggggaacatcacacactggggcctgtcgtggggtggggagaggggggagggatagcattaggagatatacctaatgtaaatgacaagttaatgggtgcagcacaccaacatggcacatgtctacctgtgtaacaaacctgcacgttgtgcacatgttccctagaacttaaaatataataaataaaataaataaaaaagttttttcctttgcctttcactttgatcatacacatccagaagtcactttttattctgttctagctcctgggaaaaggatttgtttgtgaagatacaaatagtaaataattaaggtttttaaaagatgcattctgtcacatagacctgaatgactgttgcctctgtgctagccttcttggagtaaacctgcaatttttttccctttggtaggctcttgcagccaatgccggaacaggatttgctgttgctgagcctcaaatcgcaatgttttgtgggaagttaaatatgcatgtgaacattcagactgggaaatgggaacctgatccaacaggcaccaagagctgctttgaaacaaaagaagaagttcttcagtactgtcaggaggtaagagtgttgccagtaagttgaaagtgttatttttctggggcagggttgaatctgtttaccttagaaatagatattctgtcattctcttttgacctaagaccaagatgctaatgactggagccccaagccttttgtttctaaatgtgtggcatgactgagacctctcaaaggctttgcctgcgtgttctgtgagctctcagttctttaaggaagggatactgcagaagcctggcaagtgccatgggagtgcagcctgcttctcatcctcccacttgtcttggaagatggaaaacaaaacatgtctccttactgacagaaagccaccagtattgtaaaggatcatctcaggtctgattcaactctgtgttaaagagaaaatgataggagatgttataacttgtatttattttttctgataga

SEQ ID NO: 68057 - DNA, 3488 bp, Homo sapiens
gaggtggctgagcgagaatactgtatgctgctggtgaggctcccaggaaaccatcctaaccctaaggccggcatggaaatcgccagtgatagaaaatataggtctggacatatgcacaggcaggactgcatgccatctcacttttctggtggcaagaagtaccctttcttgtcttctgtaattaggctggctctgctctttggtcagtaatcttcctttggtcaaatactgaagtagtgcttgcaccagtggtgagtatctattaacattgaccaccttatctggctttagtcattattagaaaaaaatgctctcttcctgacttttttccacatttgggatttcagtatttttggaccagatcatgtttccccattgtaaattaaaatttataaatcttacaataatattattacaatttttttttgacagaaaatgtatgtgttcataagagaaagcattgctaagtgatttgataagggtttattttggagggtagagatcggagtgtatttgaccacgtttactctggagtatgttctgatgtggcctgtgggtttcttttaggcatgtctgactcagggaatgaccttatatagctacggcatgctgctcccatgtggggtagaccagttccatggcactgaatatgtgtgctgccctcagacaaagattattggatctgtgtcaaaagaagaggaagaggaagatgaagaggaagaggaagaggaagatgaagaggaagactatgatgtttataaaaggtaactcttctactttgaactgtgaagtcgttttgcctttttgttagcccttctgtaaagacggctgttggctgctagtccctcacttctggataaactgggcattcctttgttctgctagagttgattaagcttgcatttcattctagccattgccaatcacaggagtacctgtgatttttgtgtttacatcattctgagctgttattttctgcaggttactatgatattttttaagagtccgtgtcatttgtttaacataatatccctgaatttggatttgtcttattgttgtatcatgattagattcaaatgttcacaaatacttcccgtttgctgatgtagctgggccccagggcttagtggcacggtgaaatgtgcgttgagcttatttcctgcctctgtttttgtgtttcagaatagagaagggacccattgttgtgctttgcacataggagctattaaccttcctttttttctattttggccttcagtgaatttcctactgaagcagatctggaagacttcacagaagcagctgtggatgaggatgatgaggatgaggaagaaggggaggaagtggtggaggaccgagattactactatgacaccttcaaaggagatgactacaatgaggagaatcctactgaacccggcagcgacggcaccatgtcagacaaggaaattactcatgatgtcaaaggtaaccccatgtagagccatggctttgaaatccatgtggtaattattcacttagacttttgcattgcgtctgtcacaggtaagtcagtcacagaaggaaaggtgtggtacctctgcactgaaggtgagttcagctctccagtgcagtgatgggatggtgccgtcttaacaaagtgggcaggcaggcacatccagggagagatgtaggattgaattagagaacggggactagagagtaagagagacaacgtagtccgcccttcagcaggattcttccacattcatcctaaaatgttccctccccaaggggagctcccctcttcgataccactcaagttctggcctcctagaatagaaatggttttcttggtttttcttttcctgcttgtcttctaatctgtaggctgccctatttgtccagatgttttagttgggagggtgaaatttattgacctgctggtaacagattggggcctgcagttttttttttttctcatcttgccaattaaaacacgaaaaggttgcagtagttccagagccattaacatgcagcctcctgctgatcgtatatttgaaaccaattaagatgcgaagaattatttaggacccaagttgggggaaattacttaaccagttgagaagtttgtgatttgccttagagaacataaaagtgggaaacaattgtccgttctaggtgcttgtctttactacgggtatcaccacttaaagcagcctttccactcacactgtctcctgaatagacaaactaggcagatacctccactgaacagatcagaaatgtgaggctctcgcagctgtgagacaaaggaattgctctacgtcaatctaaactcagatctagactccagagggtgccaaaaaaatatttatcccagttcctaaatgtctctactctgtggggaagcaacttgtcctcagcaaggctggcctgagctggagctttcggccaccgggcctccaggctccgtccagtctcaggcctcccccagcccatcccccagctcgccagcctgtagcattttgaagcatttgacgtcactgcctctgtcctgctgacactctgaccattttcacacagctgtctgctcccaggaggcgatgacggggccctgccgggccgtgatgcctcgttggtacttcgacctctccaagggaaagtgcgtgcgctttatatatggtggctgcggcggcaacaggaacaattttgagtctgaggattattgtatggctgtgtgtaaagcgatgagtaagtcctgcctcgcgctggtcccgtgcggcagcaccgtcctgtctggcgtccgtctccctgccgtcttcgtggctgcatctgtgtggtgtccctgcccactcgggtgtttgctgtcggtcgtcttcccctcatctttgtgctttctagatctaggctttgctctcctgccggcagtggtaagctcagttctcgtgtcctgtgctcaccgtgtgtctggtggtgcttggtggtgatggtgcgtacccaccttggtatagcgggcagcacagccaggggcttgttctttcttgtctggctttggagtctgcaggtccccaggccactgtagtattggtggggaaggcagctgtcccctgggctggctctagcttagaggcactgaacattcctgtctttgaactgccctgtcactgacccctgtgatgcatgccagctcatggggcgcctcctctcgaaaggagtgacagtgaagtactttgggcagtctagaatattgaaatatcttgcataatgcactctagagagagctagcagccaagtggtagtgactcactctgtttcttcaatattttgcaaccgggtcacacagctttaggaagtgagaggatttcagttggtgtgtgctttggtgtgacaggaaggtcagtggttcagttgagttgggtttatgctggacgttggtagaaagagtttctaccaagagttttcccttttctccatggctactcctttttctcgttaagaccttcagt

SEQ ID NO: 68058 - DNA, 1552 bp, Homo sapiens
tgtggaggtggtgatctctacccgaagggtcagctgggtggtgctgtgagacatgatggagtggcaggtctgtaaaactcccgtttgctgtggcttggatgagatttgcctcggagaagctttgtgttcatgttcttgtggggcctctgcctggagggctttgcaggttgagaagcatcaagtttacttccagtgggagcgtttttgttcttctttgaaggggctgaggctggcggatgtgccggcttcatgagtgggtgattccacagggaccgagggtgtcttcagaaaaaagcatttcggcccgctgtcctctccactctggtcccagggaggctggaagcagcctgtgtttgctgttccctttttccagtccagcaatgtgaaccaaaggctccgtctccagcgctcaggcctttatagcacaggcatgtgtcactgatccgcatgatggactgcagtgcttgaaattctcctccactgaacttgcgagtgtcttggggaatggcatttaccaagttatcgattctaatttagttaatctgaaagtgggatattgacacccttttaaaacttatgtagggctcatattcttcatgactttagttgtcgtttttaggtctgttaaatgggcaaataaaagatgcttccgacagaaaaaagttgaactggctggctaatttgtagctgtattcatcaattatatggttgttttaatgtattaaaatgatacaattctagaaattaggtgaatttgcttctgaattaaaaatcagttgaaccttggcattcactctccacttagctctgaaattgtgtcataatctatcaagcaagtccacaccagcttgggaaatcttgcatgaattaggctagtaagtgttaccttaggtatgtcttgagaggctgactgagtaaacttgtcatctcagtcctttcccttatcaggctaaattccatcgtgcagagacttgcttgggccccatgagagattatgcccatccagcagtcgggggtgctccaatgggcctgtgctctggggaacgcttgggaagccctattggtcagtgtcatggatcaaaaagccctatcttcatatcggtgaaaggtgtccttgtcaaatagagcaactcagttttatccttgttggttctgtcactgatggtggggctaagagtccttcactgatactgaaaactcaaaattatagctggagtgatggggactttctctacccagcgtatatgcaaagaacattcacttgagcctgttttctgttgtaaattaagactcaaagatagccagaagagcagaggtacctgagtaataaatttctttaaaaataaggaattgcataaaagtgcctctacagggtctgattcctgcccttgtctctgttcagatgctcagttacgagcaataaggtagctattgtttaggtttccagggttcgagcactgaagggaaggtatagaagaaaccacctctttttcagccctgaggtcttaagtagatgcctcactggtgctgaagctgccaataaattgctgta

SEQ ID NO: 68059 - DNA, 1052 bp, Homo sapiens
ataccattatctgccctttttttttttttttttgccattaacttgctttaaaatttctttattttaaagaaggaaactttatatcactgttatcaataaaaagctagtaccatttgccgtgagaagaaagtgaccaaccatacaaatatattagatgaaagcaaacatgtactaatacatgctagctagatactgctgtctctggaaggttctgagtctcagagatgtttcttttcctttaaaagggttataagagagcagcaggaacaccaaagtgcaacttttcttctggatttactcaggattgaagagaattgaaaagggaatgccttgctaggcctaagctccaccccaaatcccacacagtcccatgttgggcttacagtttgcaaaatgcttattgttttatccacatcagctctgaaaagtaggtattaacctcaatttttttggtgaggagactaaggcacagagacttttaaataacttactcaaggttatgtaacaaagaggtcatggaattgaggctccatctggggatagttgaggcctggaaccttctgaggcagtaacaatgctaagctcctaagagattgtgtgattggtttccttttgcagtttcctgtgagatttagcatctgacagtgtttttagcaaatggaggagttgtttcggggtattaatcactgctgacggcgtttttgacctttgttctaggtaaagaaggaatgggaagaggcagagcttcaagctaagaacctccccaaagcagagaggcagactctgattcaggtaagatgccttctctggggacatagctttcagcctgaccattggaaaatacggtcagagccccattcccaacgaaattaggattggacaccacctccttttaggtgagggcttacaaggaagttgtaactggcctgtttttctttttcacctcaagtattgctaacctatggtagaaggaaaccaaacccccaccagagcacacctaattcatgccagaaggtaaccttagctcagctgcctttcgttaattctgcttt

SEQ ID NO: 68060 - DNA, 1978 bp, Homo sapiens
tcaacagaacttaccacataactcccattggtcagtggtctcagagtttggaagttagtgccttgctgcaatgtgggaaggacagtgttctttttttatagtgcatattgagaaaccaggccttgggcttgcaggcactagcacttgtagttacacagatactaaggaggccctttgacactgaggtttaacttgctctctttaaagaaggaagtaattctcctgatagaagtagaatgaaggtaggatgaagtagactttggatcttacccttgctccactctccgaacctgttactgtctcgcatgggcactgacaggagaagcactggggtctcagggtgcttgcttaggcttcctctgggtgccacaaatcatgtgtggttcctgctttcttggtttagcacttccaagccatggttaaagctttagagaaggaagcagccagtgagaagcagcagctggtggagacccacctggcccgagtggaagctatgctgaatgaccgccgtcggatggctctggagaactacctggctgccttgcagtctgacccgccacgggtgagtcctgcccctagcactgcctgccctgaggtggtatatgtaggggaccaatgtatgacactcaggtcagtaaaagtgacatttgtatgacaagttctggcaaagctgaagctaaggaaagatgatgagggaggaaaaggtattacattctaatatctgtgtatataagctaagcatgacatcgctttatgcctgcgtataccacctgtgatgtgaaagtgttttacgctggaaaagtataacctcgcgaaattgatgggtaattatccagttattgaacttcctttcaaagaatgaaaacatgctattcatgaagacttttgaacaagttacattataaataagattatgaagaaaggggtaaagtaatttcttctgaaactcttgtgtgagtggtctcaaatgattttgtcccttaacactaacctgccttgctttgggggatggaaagtattgggaggatatttgtgtccttaagtaagccggttaaagtcttctctctttgggtgacacaggagactatctagcttataggtgtcagaggctgagccaggaaaaaggacagatcagaagagaacgggagtgggcaggagattctggaaaatactgtatgttaaggagccagtataactttggaacttagttttgctattttacctagacagtttttttgttacttggtaagctaaaaaagccttccagttacagctttcattcttgtgcctagctgagctttacattcttaagtgaactttttaagcttttgttttcctgcctattttcaattctctagtctctggatattaaaacaactgttctctcttgcagcctcatcgcattctccaggccttacggcgttatgtccgtgctgagaacaaagatcgcttacataccatccgtcattaccagcatgtgttggctgttgacccagaaaaggcggcccagatgaaatcccaggtacagtagatgtagtagaaattgctgccgtgagggcatttccagtggggaacataatgccttgactaatggttgaccagcactgctagttgcatttgctactagtccttagaaaatgagttttgatttccgaagacattcggtacgtgaactggtttttgcaaggtcactgtttttaaaacatctttttaaatacttttttatattaactgctttatacttaaacaatttctgaattttttatatcatttatttctgatttagggtattgccagaaccaatattcaagatccttttctaggtatatttatcaagcagatcttaaaaattggtctcttgttttgtgcagtatagtttttgtttagacagacacttttacattcctaggttttgtccagctttactttcatctacagaggtttgtttctggttcctacttctaatattggtgttgtt

SEQ ID NO: 68061 - DNA, 1022 bp, Homo sapiens
agtgcagtagcacagtcatagctcactgtagcctaaacctcctgggctccagtgatcctccagccttagcctcccaggtagccgtgactgcaggcacacagtactatgcctggctaatttttgtatttttggtggagacagggtttcatcatgttgaccaggctggtctcaaactccttcgctcaagtgatcctgctgtctcaccctcccaaagtgctggaattacaggtgtgagccaccacgcccaggctgaacacgttcttatactttagcagtcagtaaatatggcgtgaggattaatacatttcccctgaccagttgctttgctagactctgtagagaatatgctttgtaaagtggtttttccagaagttgtgtcgatgttccagctgcaagttccctcctggcctagttgttttcagtcacaacacctctccaccataactctgcttccaggtgatgacacatctccacgtgattgaagaaaggaggaaccaaagcctctctctgctctacaaagtaccttatgtagcccaagaaattcaagaggaaattggtgggtaccagctctttgtgtcaaggtcatacgggacttcttgcagaggctcaggagtgaaagctgggcaagagtagagagagatgagcaagcaaggccggtgaagtggggcattagcacatcctggcttcagaagcctggagtccactggagctttcatggcaaggtgaaggaggaaccaaggacaggtgcactggctgtgagccatggagcctcgggcttcactgaccttcactctgttagcggaagaatatctggggtgtgaaattgcaagagactacgagtttcctgttcccgttttcctccttcgttctgattatttcaagcacctgattttatataaattctcacctcctcctctcccggtctttatcttcttcatttattcaacaagttttattatggctgctgcgtgcgtgtcacagagtaaaatggtccacgagcagatggtacctgctggagttga

SEQ ID NO: 68062 - DNA, 1292 bp, Homo sapiens
ggacagcatgaggactgtagttagtaatatcgtactatatactaaaaatttgccgagagtagatttgaggtattcttatttttaaaaaaaagtaattctggaaggtgatgtgtgtgtttgcttgactatggaaatcatttcatggtgtatatgtatatcaaagcattatattttagaccttaaatatgtacaattttttaaacccccaaaatctgtggagttgtggataccacttaactggagtgtggaggtggatgcaggggtgcctgggacggcgccctggggtccctggtgttggggctctgtggtgccacagaatcaaggaaggtgtttcaggcaggaactgggagccacagtggggtcttggagctctagagcatcctgtgcctggacaccaggcccttctgaagcctgctttctgtcccctgccctgtcttcatcagatgagctccttcaggagcagcgtgcagatatggaccagttcactgcctcaatctcagagacccctgtggacgtccgggtgagctctgaggagagtgaggagatcccaccgttccaccccttccaccccttcccagccctacctgagaacgaaggtgtgtatgggcgacggtgccacttctgggcagcagggggaggacaaaatgagagaattgaagtcagtttttcgaaaaccaaattgagttgggagatggtgttcctgcgagagtcaggggaagggagactggattcattgagcgcctactgtgtgcaaggaccctgctagatgctttcaaatcattggtgtcaatgtcaccatgaagttaagactaattctcccatttcaagatgggtggcttcaaacccccacttcttccaacttgtgcacttccttacatgggggaggcacttggcagttgaaacagcgccttcctgttatggtgttacctttgcccagccgtcttgggaggtaggtgctggagaggctgaggaggtgacagggctggcgtgggtcatatctctgacatgaggtggggataagaagctgttcctctgggtcctaggcagacgttctttcctctattcccctgctggttctcagtgtctaagaggatctctaaaagctgtgagtctgctccagaaataaacaagttgctgagaccagtgccctgagagccgtccccctcatcagttctgtttgttgctgttgctgctgacagggtaatgataagaatggcccacagctatgccgtagtccttgttatatgccagctttagctaagcatctcagcggatgctctccatcctcacag

SEQ ID NO: 68063 - DNA, 1414 bp, Homo sapiens
cctgggcctgtgctgcgtcgtcgtgctgcgtatttggatactatccttcggagcgccacactcgagtgatgttgctcaggcagtgtctgaccttggtgagaggagagttgctgttcttgctgctctgtttagagaaaggtgccttccatgctgatattagaatgcttcctataggtggaatgcacgcttcctgtttatcttctaatagccacttaggatatgagcatctaggatctcggcacagagggattcagcgtggtgggagatgcgggaagaaatccgtaatgacagactgttgtcattactgttggaacctccccaggaccaactgaaacttgaagggaaaataagagtttaggttggggagggtatttgaggcagaatgaattccctgtgggctaacctactatgtccaaggcaaacgtgcaggttattgtgaggatgggtgctgtggcagccgggtgtgggtagtaggtgctcagtaatttctcctacgatggtgtgtatttcccatgctaggatgcccctcggctccgcttctatgtgtcttacaataaacattttctctgaaggcttgcatttcattttcccaagttggagacaagtaagcactccctcctcctccattatacccattggtctctgcaaatgcctgtctcattcatctttagagagcacagggcaccctcagacttgtgaacatggtggcagatgagtcgcgtggggaggtgcgtgttgaggggctcactggccctcaggagggagtttgctgcttctgtgcaatgggtgtgagatgggccatccttgggaactcagccatgatctctctccacacaggatctggagtgggagagcaggatgggggactgatcggtgccgaagagaaagtgattaacagtaagaataaagtggatgaaaacatggtgagcctgttctttcttctgcccaacacgctttacttttgagactcattagagcgagtgacctgatgtcagatgcttccaggtgcacgtctctgtgttcgttttccgcacagtagaaggttggagggctccaacggctcccacagactggctgtggtgtttagcatctgggtatgaaaaggattaaaaagcccttttcagcagtagctcatctcttgctatagagtaggaaaatatatttacaactaaagatatgaataacctgttagaggccattttcaagtgagtagagagttaataacttggattagagttgggttttgttcttatactgccttaggtttatacccccttttattcacctagtattttctgtcatttatagttctggattatcttcaactgagtttgatatttcaatgtggctttttttttttttttgaaatggagtcttgctttgtcaccgaggctggagtgcagtggcatgatct

SEQ ID NO: 68064 - DNA, 2210 bp, Homo sapiens
gaaatccagttgactgtcatcttccgtgagggctaagctttcagggctctcgtttcgaaagcattgcctctttgatccccttattttctttctcctgtgtttcaccaccggttctcatttggcctgtccggtgggaacgggctgctggctgcatttggtcctcaggggattgtgcagcaaatggctcaggtctcccagcaccctgtgcaggtctcttcccagacaccacaatgaccctcaggttttgttcttccaggttgatccaatgctcaccccagaagagcgtcacctgaacaagatgcagaaccatggctatgagaaccccacctacaaatacctggagcagatgcagatttaggtggcagggagcgcggcagccctggcggagggatgcaggtgggccggaagatcccacgattccgatcgactgccaagcagcagccgctgccaggggctgcgtctgacatcctgacctcctggactgtaggactatataaagtactactgtagaactgcaatttccattcttttaaatgggtgaaaaatggtaatataacaatatatgatatataaaccttaaatgaaaaaaatgatctattgcagatatttgatgtagttttcttttttaaattaatcagaaaccccacttccattgtattgtctgacacatgctctcaatatataataaatgggaaatgtcgattttcaataatagacttatatgcaggctgtcgttccggttatgttgtgtaagtcaactcttcagcctcattcactgtcctggcttttatttaaagaaaaaaaaggcagtattccctttttaaatgagctttcaggaagttgctgagaaatggggtggaatagggaactgtaatggccactgaagcacgtgagagaccctcgcaaaatgatgtgaaaggaccagtttcttgaagtccagtgtttccacggctggatacctgtgtgtctccataaaagtcctgtcaccaaggacgttaaaggcattttattccagcgtcttctagagagcttagtgtatacagatgagggtgtccgctgctgctttccttcggaatccagtgcttccacagagattagcctgtagcttatatttgacattcttcactgtctgttgtttacctaccgtagctttttaccgttcacttccccttccaactatgtccagatgtgcaggctcctcctctctggactttctccaaaggcactgaccctcggcctctactttgtcccctcacctccaccccctcctgtcaccggccttgtgacattcactcagagaagaccacaccaaggaggcggccgctggcccaggagagaacacggggaggtttgtttgtgtgaaaggaaagtagtccaggctgtccctgaaactgagtctgtggacactgtggaaagctttgaacaattgtgttttcgtcacaggagtctttgtaatgcttgtacagttgatgtcgatgctcactgcttctgctttttctttctttttattttaaatctgaaggttctggtaacctgtggtgtatttttattttcctgtgactgtttttgttttgtttttttcctttttcctcccctttgaccctattcatgtctctacccactatgcacagattaaacttcacctacaaactccttaatatgatctgtggagaatgtacacagtttaaacacatcaataaatactttaacttccaccgagactgctcgtttcactgactgcggcattgatctgcgtgatggtcctacccccttcctccaggagggtgataacttcgttccacgaaggaccccagctgcacctcacaggcggaaatacgtctgctcaagctgtgactcaaggcttccagcgccgtttcgcatttagaaagcaaagtaagagggaacatctgcacagagcatttgtctggcaaaatttaggctactgatatttattaatatgagacttcttaatgctactgggaacaatgagtagggcttgtggctgaattttcagaggaatgcttgcagcttccatttgcttaaataacctgacactgggaggccctgtcacctcactgatgggggtgtttggtttgttgccttggcaactgcttagagggctttctgcctgggcccagttttatctactgagctaagatctttttaatgcccagctacagggaagagggtcaattcaggggtaaatctca

SEQ ID NO: 68065 - DNA, 1079 bp, Homo sapiens
tcctgtagcaaagtgagcaaggtgaaggggagagaccggaggcgcatgagggaggagggaaaagatggttggcatcaaggaggtggataaagggctgccctcccggggcagggcccctggagggccggaggggtggtgaacgccgtcgtggtgatggtgagggccttagcgaccaccacccgagtgaggccccctcaccttcaggcccagagccgaggggaggagcctcccccagggccggcgggggcgggcaggtgagccgggcaggtgcgcaggcgagcgcggcgggctgggcgggccgaggccacaccctgaaactacctgcgtgggccgggccggagtgtgagagcggagctgcagccggagaaagaggaagagggagagagagcgcgccagggcgagggcaccgccgccggtcgggcgcgctgggcctgcccggaatcccgccgcctgcgccccgcgccccgcgccctgcgggccatgggagccggccgccggcagggacgacgcctgtgagacccgcgagcggcctcggggaccatggggagcgatcgggcccgcaagggcggagggggcccgaaggacttcggcgcgggactcaagtacaactcccggcacgaggtgagcgcgggccggggacccggggcgctgggaagctcctgcccgcccgaccctgcagcgcggcgctgggctcggccggctcccctggcgtgtccgtcggtggccgagctctgggcgcacaggtggaatttcctgttcagcgggtgccgggccgcgggcgggcggggctggccggacctttggtaccggaccggctgcgccccgccagggggaggcgggaagcccctgggccttcctgcgccctcggtcctttctttccctgagttgaaaaaaggggctccgtctcggcccctccatgactctcgcgctgttagtgaacatctggaagaaaccaggggcttggagtggggttatttgggaggaagtgaaatttcaggagggtttggagtctcagccatccttggcctctgcagaaagtttctttcgtctctctccttccccgtcaaaaggcgctttgg

SEQ ID NO: 68066 - DNA, 1007 bp, Homo sapiens
ctgtttggaatttgttatttcagggcagtccggtgcccccaccccaagtttgttctccctgacttccctttctaggactctcctgcccacacggggaaagcagggtcttcctggtcgtgtggtccagcctcctctctgagccatctcaccacctgacaagcagccaggctggggctcaccttccactcacccccaggatcccacattcagcggacttgtcttgtcacctgcaagccctggctttagtttcccccatccctgctcatttcctcctcctctgcgaagctcatttgctctctgcgcccttgggctgttccttccccctctgccattttcattctcttggcttgctctttgtcttttctcctgccgagctttattgaactaactcagtacctagtcccatgggtgaagggaaggctctcagagaccagtaagatgtggttgtttcctttaaagaacatccagtcttgagagcgaaactaagagacgaatgccaaagttagctgtgaggcggagtgtccagaggaaattggccaaagctcatttccatgtcttgcagattcctcccatccctggcctcaccagaaatcccagtccctgggatcaccctgtagtgtgtgtttgcagctaggatgtccatccccggccgggaggtgtggctgctgcccctgggtttattatctgggtcagcagagcctggcccacagggtgctgttgtttctgggttccttgtccccagttgcatccatccgtgcacccttgtttggtggtatttgtatctggctgtccccttcccaaggctggtggtgtggcccctgccccacccctgctgttcccatcaagtgttctgcgtggccttcagagtcctgatgcacgttactgcatctggggatggtgtgagccctgcctgcaagcaagcagggaaacagatgccacttcttatggccattaatgagagccagggagcctgcctccctgagggtcttgattcctgttgagtattt

SEQ ID NO: 68067 - DNA, 1108 bp, Homo sapiens
atgccattataaaattgtgttcctgagatgatggtgaaggttgcatatccccagcaaactgctagaacatgttattcaccagagagctgtgagcacataagaaggaagtggtgatcacccggtgccagtgctggtgtgctacaaacatcatagaccagcttgtctggtttccccttttgatgaggttccttagctggtggaccaggagcacagctggagttgtgatttcaacatgctttacatagacacagctttatgtattatacatatgattaaaaattatggcggaagttttaaaatgaaaaccaattcacccacctctgccaacaaatcacttttcacgcctctttcccctccttgctgtctatggttcaatgtgtctagttggttgttgtgcacacaccacttgtatcctggacaaggtgttttattggcctcctgtctgctgggtgtggagccctgggtgttggaggatcgaagttctggtaggcttgtgtctgattgaaaggctgtgcctaagggggggtctgttcttgaatccacgtcactttgggtggtgacctcaggctgctcgtcaccccttcctgggttctgtgccatttcttatttagtaacagctcagatgaggacttggggcatttgcctaccagctccacagatgacaccagctgggagggaaaggctgataccttgtatgacttgattatgagtcagagcatctggacagactgtctgataggctgcgctgagcagaatgcatccgtctgggtcaggagtcagtgctttgctcactgaaccacctccctcaaccatggagcagaaaccacgagacccagagttctgagttgacagtgagcccaggagagatcaggcatggaagtgtgactgcccaaagtcgaagtgtgctttcttccccctatgtttttatttggttataccttttaaagttattattaaaagtctaatatatacatatttaaagaaaacttagccaactcagataagtagtaagaatttaaaaatgaggccgggtgcggtggttcatgcctgtaatcccagcactttgagaggccagggccgatggatcacttgaggtcaggagttcaag

SEQ ID NO: 68068 - DNA, 1076 bp, Homo sapiens
ttattagatatcatacctcatgctagatttgtggagcaagacagacccccttccctcccctatcacaggagtctgggagggaggtgttggagagggatctcccagaattactccaaggagatgcctgagctgaatttcgaagggcaggagtgactattttttttttttctgagatagggtcttgctctgtcgcctaggctggagtgcagtggcgcgatctcggctcactgcaacctctgcctcccgggtttgagcaattctcctgcctcagccttccaagcagctggaattacaggtgtgcgccactgcgccaggctaatttttgtatttttagtagagatggcggtttcaccatatgggccaggctggtcttgaatcctggcctcgagtggtctacctgccttgaactcccaaagtgctgggattgcaggcatgagccaccgtgcccagcctatttttttcatttaacattctatcttagatagcttttccatgtcattatctactttttgaaaaacgatttttgattgccttataagctttcatcgagggaacatatcattctttccatcttcttattttaatcgttttattgtttgggtgtgttacttgaatgcatcattggacaattaatagaaaaagagcaaacagaatgaggaaggtaattggcaagcagaccctgtggaggccacgctagtcagacctcttgtgggttatgctggtgaattctggaaacggtgtcttcaagggaagatgactaagggtgagatggaaccagatggccagggtttagaaaacattttgtttgaatgatcagaggagttgagcatgtttagccagaggaggtgcagactgagagagcacacgagcaccgatgtagagcttccactggagcgtctcctgagtggggaaactaggctggttctgttgcagtgctaattagtgcagaggtgattgcagtgctgatcacacttggtggaaggaagagcttcctaatactcgtactaaggaaaatgctatttcttccaaaaggatggtctcgcgaggatgagaggtgggtgacatgccctgcagaa

SEQ ID NO: 68069 - DNA, 1374 bp, Homo sapiens
ctccatgccatgaaatatgactcagcactgaaaaggaacaagctgatggatgcaacaacttgaaagacctccagggaattttgtgcagttaaaaaaaaagccaacagtcccatacataccatattatttatttatataatataatgggttttttttttttttttttttttgagacagagtcctgctctgtcccaggctggagtacagcggtgtgatctgggctcactgcaacctccgcctccctggttcaagcgattctcctgcctcagcctcccgagtagctgggactacaggtgtgtgccaccacacccagctaatttttgtatttttagtagagacagggtttcgccatgttggccagactggtcttgaaatcctgacctcaggtgatccacccgccttggccttccaaagtgctgggattacaggcatgagccaccacgcctggcctatataacataatttttgaaatgacaccatgttagtagtagaggacagattagcgattgtggagctgaaggggtgggggacaggagggaggtggctgtggttacagaaggccatgggcatcctcgtgttggagctgttcagaatgttgactgtgatgccagagacaggggactacgctagcgatgacatagatggaacttaatacttaacgtgagtagcggtgaaacgggaagtctgaataagatccgcggatgatactgctgttgtggtattatgatacagttttatgaggtgtgactattgggagaaactgggcaaggatctcagtatgatttcctacaactgtatgggaatctacaagtatctccataaaaatgtcagtaatgaaaggcacactagctcgtgaaatcagaatgtggatttaataaaaagtcaagaaaacgaatgaaaagaagttactaggtgctggctgcacctcttgtttctcttgtcgggttttgggggatctgcctgtttgtgctgctgcaggcagatgcttctgctctgagtccggtgacttggggcaggaggaaggtggggcagctgggccgggaagtaggtctttggcacataaggagagggctggtgcaaactaaatgggatcgaagaggcagagatggaattttccggctagaattggcaaaagaggttatgtcctggtgtgtgtgttttgggggcgacacactgaactgaggaccaggagagatccggcaaagtcgaactttaaatggggcctgaggacagtgggtggccaggccaggtctgaccccagagagcctgggggactgtcagcagagccctgaggtgtggactgagtattttttccccttcttggttgagggcacttggcaactggcagattattccagcctgccctggggaggc

SEQ ID NO: 68070 - DNA, 1049 bp, Homo sapiens
catcccaggtggttgctcaaaatagaccagctgagactctaagccagcttctcctcctggtgacaggaaggggtgagcctcctggaaatggtgggtggagtttctccaactttcaggttcccaagaatgacctggagcacttgaataaaaacttccacatccgaggccctgctcctgatgcatgacatcagcacctccagggagaggggcttgggaatctggatgtggaacaaacactgcatttgtttcagttgattgttattgttctttttcatgaccagacaagtccaggaaatgctgggggttgcgatcaatgggaaccataggcttttgcaggtttcgtgaaaattggcttctagagagatcgattacccctggttggggagtgggtgggaggattccagtgtggcctttcttttcctttctcatttgcccatcggtcatccccagataagcactcaagtgtcctcttttatgaggccccgtgctgggccctggactgccatggtggcaggtggggtgaagtcccgccctcaggagcctgctgaccgcctgctctgtgcacagctgctggagcttccccggggctgctgatttaactggggagggcctgtctatgtggggtccctcctagccggagacaggtcccttttatgaacagcagcctgatgaagaggccttcctgcaacatgcctctggtatcattctcagctcagcattgcccaggggacaaacacagagtttgttcttggcagtcattccctgctgtcatctcaggtgggcttgagccgtgctgggtttccgggaaatctggccaggatccagcacaacctttagccagtccggcagggagcggccacgaggttgtgctggctcggtctttcccttgcaaaggaaggcatcttcgacctgccacagaatgctttcttccccggggaaacccttgcaggtgctcgggctctactttcctttctcgcttgaacaattacagggatagtttatggttctcatgaccctggtgggggtgatgacatcatgggattgaaatc

SEQ ID NO: 68071 - DNA, 1049 bp, Homo sapiens
tgtctgagtggcctggagccgagctgtgtttctgggtcctttggccaggatctaactacagtgggccagcaggaagaggctgtgatatttacatggcctctatctgtgtttatggtaagcagacacacctggcttcatagcaccgttttatgtgtgcacctgcaaagatgtttacttttaagaaagagagacaggagaagtgaaagcaggcgcaggcataggatctctcctgtcggctgtggcccagtagagaggtgttatgcctacagttgtctaagtgtctaagtggatgggagttccctgagacctccccctcccacctcccccacccaggagttaaaagagctttgctgcttcactgactttattaactttgtgaccttggacaggccactccctctctttcatcctcagtgttcttatcaataaaacgatgggattatgcaacagtatctctgttacacctgaaaatggagccaagagctaaggttataaaaggaagcagcccagttactgattagacagcacttttaggctgggtggagccacagaactcacactgcagggaggacagaggacccaccattgagctagcgccactgctgacagcctcgctccgtggcagagtctggggtgacccctgagtcaatgccctcagccaccttaccccttctcatgggagtctctgtcttctgtttccctgaatccttgctcccagaattctggaacctaaccacactgggaggcagtaaaccaggaccagattctggatctgccaccaagtactgggtgaccttgcaaaatcagcattcttccctgccttctttatataacacgggtgatagcaccagccagtcttgaatgagtcacaggactgtcatgaagatccagtaagaaaatggttgtgaaattaccctgtgaattggatatacatctaaacatgataaattattatttcattacatttctttttttctttgtttctttctttcctttttttttttgagatgaggttttgctgtctctgtctcgcccaggcaggagggcag

SEQ ID NO: 68072 - DNA, 1023 bp, Homo sapiens
tgaaagcaggctggctgtgagcgctggcacacactgtgtccttctgggttgcagtcccagcatgaggtacctgcggctggagacgcccctcatctgagcttccccggccatctgtccctcaggcccaccttcaccgtgactttgatcatctgtgcttgcctctgtggcctgttagcaccgttaggattcacagtgtaattctgagacacatgaggaagtgccattggctgtatgagcagtggtttttccacatatgcaatgtgtttttatttcaaccctgcgtcatagaataaccttgggaagacatttaactatgcttaggaatccaactttaaggtaaaattcaagggcctggctcaccaccaaaagtacacttggatgaaccaacgcctttgatctaaacacttacctgtgaccgaagtgtccctgtgccgaggcggtgacaatggtctccttacagctttgtcatctgcaaagtggtcagatgcctccggatttcagaaacattgaaatatggaaaatgtttagggtgaaggaagtgcgcgatgccgcactacatttggataggacacatcacatgcatcggggaccagctgagcgtcacaggcggggcctggccctcaggggcaccaggcagcccagcacacagggcagggcagggcagggcctgcgaccagctggcctctctgcagggcacctggggcttcctgggcttcgatcctcagtggtggggagggaccctgccagcccaggttggggtctgtggccagccctcttcccacactagctgcgggtgcaggaacccctttgtcacagcttggtgggcctgggtaacccctgccctgggccacagcacctgccctgctcctgtgtgtttgtggctgggaggttggcccgagggagggagccgggagccagcggagggaggtgggtgggtgctgggggcctcaggcctgcctgtgcccgcagcatgcccggggcagttcacgtgccgcacggggcggtgtatccggaaggagctgc

SEQ ID NO: 68073 - DNA, 1004 bp, Homo sapiens
ggcccagaccttcaggtgttccaatgggaagtgcctctcgaaaagccagcagtgcaatgggaaggacgactgtggggacgggtccgacgaggcctcctgccccaagggtgaggcccgccccacccatcttcctgttgggggcctcgcccctggaggaggctgccctgagcacacgcacatgcaggacgccccgagtttaatgaacacaaaccacctgtgtgttaagtgtgatgagaaagggctctggttgggggagaattttccagaaggtggagaacctgtagcagggcagggaggccagtgggcgtgggtggggcaggcctgggtgagggggtaatgtgcaggggccatgaggcgccattggtggtttctggcttctggtcggatgctgcagaggaattgagcccctcccttgtcctcctccttgaacagtgaacgtcgtcacttgtaccaaacacacctaccgctgcctcaatgggctctgcttgagcaagggcaaccctgagtgtgacgggaaggaggactgtagcgacggctcagatgagaaggactgcggtgagcagggcatccgagtacggttgtgcaggttgttcactgtgtgaagtgcccaccagagggtgcacctggaggtgcaatcccgccagcacctcacttagcagctctgtgcttgggtgagagggtgtgtctcctggaggaaaggatagccttgccagttggcatgaaggcaccaccccacgggctggctctggtcttggagaaaggcccgtacggccagcatctcagcgcctctgtagcatggcggggtcgtggctgcagtgcgttgctggcccctgctgtgtagacacagctgtggagcagtagcctggagaagagcggcccagctcacccaagcccaaggcagggtgtcacccctgcctgcccatactttaatctgcagcctctgtgtttcagaagcgttggctggccacaggttagatttgagcacagctccagcgttctgtgac

SEQ ID NO: 68074 - DNA, 1075 bp, Homo sapiens
atgacacccaaatcaaagtgaagctgaccagccagcctccggaggccctcgctgcatttgtgagggagggggaggtgggaagatgagggtttgaatttgggagcggggagaaggaggggcatggtggaagggagtctgtgaagctcaaagatagttttgggggtccctcacgccctggccacgccagcagtgctgtgcacgccaaaagctggcttccccacacagggtctcctggcacacactgcatgtccccttgtggtttgatgtccccaccttgacttgctgtcctctggttctctgctccctctgcagactgtgggctgcggtcattcacgagacaggctcgtgttgttgggggcacggatgcggatgagggcgagtggccctggcaggtaagcctgcatgctctgggccagggccacatctgcggtgcttccctcatctctcccaactggctggtctctgccgcacactgctacatcgatgacagaggattcaggtgggtctctgggtgggcagcagggagcctccttgctggccctttgcatctgggagtaatgccaggataggttggcaccgaggcagggcactggaggggtggccacatgtgttagtccattcttgagttgctctaaagaaatacctgagactgggtcatttataaagaaaagagtttatttggcccatggttctgcaggctgtataggaagcgtggtgccagcctctgcttctggtgagggcctcagggagcttccatccatggcagaaggtgaagggggagaaggcacatcacatggcgagaacaggagcaagagagagcaggaggaggtcctagactcttaagcagccagcctcgtgtgaactcagaactcacccatcaccatgggaagggcaccaaaacattcatgagggaaccgtgaccaaaacacctcctaccacgccccacctccaacactggggatcccatttcaacatgagatttggaggggacaagcatccaaaccaaatgagcagatatcccaggacggggctcaataacagtaataataaaaactcactgtattcggtgcccact

SEQ ID NO: 68075 - DNA, 2158 bp, Homo sapiens
ccgcgaggccgtgtgcacagacccgagtgaccgcgcagtctcatagcggctctccctaccaggtactcagaccccacgcagtggacggccttcctgggcttgcacgaccagagccagcgcagcgcccctggggtgcaggagcgcaggctcaagcgcatcatctcccaccccttcttcaatgacttcaccttcgactatgacatcgcgctgctggagctggagaaaccggcagagtacagctccatggtgcggcccatctgcctgccggacgcctcccatgtcttccctgccggcaaggccatctgggtcacgggctggggacacacccagtatggaggtaagcttcgggctgacctagggctccgcagagggcctggggcctttctccaaggccgtgtttcctctgcgtgtccggtctcggggcggggggctgctccagtctccctctgcctggcagaatgaggctgtccagggcggaatggaggcctttagtaaaaggggcatgggatttgcagcctgggctcaggattgaaggttggctttgcccctaactagctgagtgaccttgagcgagttgcttaagctctgatcctgtttgtgcatgcgcgtaatgaagatagcaacaccttaagcccagtggtgcttaaggcacgtgagggggtgggtatgaagggaagcaggccgttagttggcaaatgctagattgaaagaatccactgtacagcatatgctgaacatttgtcgtctttggagaggaaagaaaacgaacaggacttacagctccaatgccctcacagaaccccgcgggcatttgcggcgccttccctccgcctctctgcttcttgttccctcacccctgcttgccacggcgtctgttccctctcaactcgcctggcagatctcagcatgcccctgcttcctctaggtggctgctattgccagagcccactgagtagacgcggattacccgtttgtcagccccgggcatctgggctgttccagagttttctagtccaatgacccgtggggagcgtctcgaatgacgctgccctcgaagcagcccggctctcagccccgtcctgccctctccccaggcactggcgcgctgatcctgcaaaagggtgagatccgcgtcatcaaccagaccacctgcgagaacctcctgccgcagcagatcacgccgcgcatgatgtgcgtgggcttcctcagcggcggcgtggactcctgccaggtggcccccggggcaggagggcggcaggtgggccccgggagaggcgggactggggactcacggcagggcttgtctccgcccagggtgattccgggggacccctgtccagcgtggaggcggatgggcggatcttccaggccggtgtggtgagctggggagacggctgcgctcagaggaacaagccaggcgtgtacacaaggctccctctgtttcgggactggatcaaagagaacactggggtataggggccggggccacccaaatgtgtacacctgcggggccacccatcgtccaccccagtgtgcacgcctgcaggctggagactggaccgctgactgcaccagcgcccccagaacatacactgtgaactcaatctccagggctccaaatctgcctagaaaacctctcgcttcctcagcctccaaagtggagctgggaggtagaaggggaggacactggtggttctactgacccaactgggggcaaaggtttgaagacacagcctcccccgccagccccaagctgggccgaggcgcgtttgtgcatatctgcctcccctgtctctaaggagcagcgggaacggagcttcggggcctcctcagtgaaggtggtggggctgccggatctgggctgtggggcccttgggccacgctcttgaggaagcccaggctcggaggaccctggaaaacagacgggtctgagactgaaattgttttaccagctcccagggtggacttcagtgtgtgtatttgtgtaaatgagtaaaacattttatttctttttaggtaagtttcttttcctactggagttgcgccctccttcctcctttttcctactcgatttgcaagaaattggatgtacattcccctcagcacagaccctggagtcaggctgggtggggcccacagtgccgttgccttctctagg

SEQ ID NO: 68076 - DNA, 1089 bp, Homo sapiens
ctcatccattaagttcatattaagtatcccttcttaaggaagctctcccagagcctttcctgctaggttgagactttgtattatgttcacataacatcctgcgcttctattactaatgtaactgactaaacagctggactaaaccccattacatcaagttccactaggacagtgaccgtatctgtttcttgtaccagggggtccccaggcccaaggttgtttgaatgaatgaagtctctgcccttaaggaacttatggaagtaagcagaagtaaagaagaattacagaaatacaactgatagaaataactgattgccctgagagaaacaccaaaaagtatactttggaaatttgaagaagtgggagacctggctggaggggtgagggaaggtagcatggcagaggcaccacttgagctgggtcttccttgggaagagatgtaggatttgtacagacaagtgacggagaaggagatgactccgggaagcaatacgcagcctcagaggttgagggaacagaaggagtgtagcttgctgagccttgcaggatccctgaagggaaagagtggaagaaaaccttgtaaactagactagcaccaggtcagagaaggcctgaagaactgcagctatatttggtaggaaatcgagaatcgtctcacattttcgagcacagaaacatcagagccctctctagaaatattaaaagcagattaaagggatgcatacggacttaactgagacccctgagttacaacagaacttcgggtaagaacccagaagaaggggatgggagtagggctggagaggaagggatgtgtgttcgtgacatcggggctgacggagacgtggtaggtggggagagtggggagaggcggacctgatcttcagtccaggtgtcctctgtgcaccgtagagaatagctgctgcattctaagctgtagcaacaccaagtgtgtggccttaaacgcttaggcaacctcccttttctgttgttggtttctttgagagggaactgtctgagagaaaatggagcaagaattaggccaagttcaagagttgggcttcagaattaggctaaaggagagattcc

SEQ ID NO: 68077 - DNA, 9991 bp, Homo sapiens
aataaagcctctaagataagacttatttcacatacttagtttcaattaccaaaagatgcttataagtaggaaatttaggaaatacagaaaagtatgaagaagaaatttaaaatattttctatttcatcacttaaggaaagtagccactgtttttagtatattttactgtccatgttgcctgtggggaccaataattgaacacgttttgaggattatcacataaccaatctcaaggcattcatttccaaattctttattagtattttcatataccaaatgtaatagcaggatacacataaattactttctacatttcccaactttatagtagattatgtatcaggtcatttatgcataaggacttagtttcttaactaacctatgtcaagtttagtaatacaaagctaggtttatatatctcttactcaatgtataatcaagaaaagtttagcattaaagttactcagatgatctttgtttaagtgagcatgctacatttgttttgtatatagaaactcctctacatagaacaagaaaggctgttaaggtgtccagagttataatgaaagtgataattaacctgatgtattggtggtggggaagattgatacattttggttttaatggatgttttggttcatatttaggaaagtttataagttgaaagttcctgagttttaatcttcactgaacaattagtgaaatgaagagtcccaattttgttgtataaatcagagctttttactgttgcttatctattactggtttgaaaattaattccatatttcatcctttgcctcttatctagtgatttcctagtaccggactacttaaaccaggaacaagaagagacccttgttcaatatgatcttggagaacacggttttgaaagcaactcctctgttcaaatgcctgtcatttcacaggtctcctcaacccagaattgtgaaagcacttttcccttggggtctcttggtgggctggcagaaaaagaggaagaagtgccagagcagccaaagagcagtgcttgtgctgaggcaaccagagatgaccccccaaaatcagagctgtcttctataactattgagtagttttgtgatttggcttcagttttgttttttggaaagtgcctgtgcttggtcttgtacatttaaatttaatttaattttttaaacaaaaaaagccgggtgggagggagggggagattgggaaagaatttccctttttactttctgagccctgaaactgattttatttttcctaactgagagattgcttctgtaagtacacaataacatgatgttgaaacagaaactatgagacttaaggagaactggttgacttaaaacatataccagttccttcttccattgttaaaagtaggctaacaacagatcattagctagagaggaaatcagatgattattgaccttcttgagacaagagggtacatgagaaactaattactaaacagcttgacaaatggcctgagtagatacttactgctgtacacaggatgttgtataatattttgtaaagcctgttgtttttggaagtatttatggtaagctttcttaaaaattattatggtaaatacttctgaaatccggcgtacttttctttaagctttgtcatttctgttatgatttttcatggtgaaattttggtactgagatgggcattctctgtacctttatagtaccactccaaaggcaaggaaccatgattgacaacagtcaagctgtggatgaaatgaccaggaacggagaatgaagtatgtaaatcccagcttcataggaactcttctcatactgcttttcagattaaaattgctgtttacctggtctccgaatgtaatgcctgactgtgtcattgcccggatcagttttccccctgccccatcaatatgttctcttgcatatattggcgtgctgccatataaagtaaaaatactggagatattctatattttatatataggtttatgtgttgttggggatgttttcattgtgctcttttggacataataaataattctctattgaggctacattctttttttttttctttttttttaaaagaatggcatctcactctgttgcccaggctggagtatagtggctaagtcatagctcactgcagcttcgaactcctgggctcaggccattctcctgcctcagcctcttgagtatctaggattataggcatgctccaccacacctggttaacttcatttttattttttgtagagatgaggtctcactatggtgcccaggctggtcttgaactcctagaccaagtgatcctcctcctttggcctcccagactgctgggatcactgcaccggccaaggctgcattcttaacccaactagattgtttactgaatcccatatgacagcgatacattgtccttacatatttatttttagacattgcaaagttattaaaaacagttaactatagtttttacacaacgtaggcaacaatgaagagtatagactgtaagattttcatctatgactcataaatctgggagaaaaaaattattaagactaatgagaaactgaaaaccttaaactaatgaatattatttctgctgctaaaaatatgaaactttctggtctgtagttgaaatttgtatgatcctctagacttgggtatacttttcatctggtgccattaaagcatctctaatattgatcctaaatatttgtaagtccatgagcagtgaactttggaataagtttctgtgtagatacccaaagtttaataattatgagagcacctgatttgatagacagaaaatacagttctttagtcaaaacacaagatctgaattttgttcaggtgctagaccatactaaatgtatatatttttaattatagtgatttgtttcatttttttagattggctaattctgtaattttttccccaaaaacatgtgaagaaaggaaaagtaaattaaattccttagaactgttttaggttaagattctctgtgtctgcccatattctgcagtccttaacttgttttcaactctttacctcactcatgaacttgtttttacccatttgctgccaaacataggtgtgttcccttcaggagaatcagcatatacaggttatgataggctcccaccatttatgcttcttcactgatagggttgcattactttctgcagcagactataatacttcatatagtactgctgtgtctcaactggaaaggtcaggaattttaatgttacgttgtggtctttgaaaactgttaggcctagcaatagataaatctcaaaattaattttaaaatctgtattgacaagaataggtaaaattatgaccaggaatcattgttacccttagttccaagaggtggtttttgaaagagcaagaggaaagaaaaaagaaaagaaggaaagaagaataaagaagagaaacgtgtaagaatggtttgcagattgattggttaaaagtgtttttagcacatccccaaccctgaaaacttcgcattaagagccaagcacaatgttggtagctccaagatattctgactgtgttctcagaatgagggattacccatcactgggtattccttcccaagtagaaactttagattttcactggtaatacacattgccaagttttatgggaaatctgaatatactgtgaaaatgcatatctggttagttgtctgctgcccagatcttatcaataccagtaactaaccagtatttaacataaaatgatacaaataaaggcctttttctatttcagtgagggtacatttttcttgatatatatgtactttaaggatattggatctgtttatggatctgttttaggaaacagatttgcaagggataattgtatatatagtagtatttaggtttatttcaaattcatcttagggatgcctagatgcataatttttaccaggacatattgaaaatattgcaaagagatagccagttatattatcccattcattagaaattaccagtgtaactaaacataaatattccagtttagagtgcttaaacgtagctatctttcttaaggccaggagggtaactttgtggtatctaaagggcttaaatttcagaatgcagaataaattgcctttttaaaaccaagcattttgtacaagcttttattttcagttttttaactaccaaataggtgtgatgtactttagaagtaaacaaagatgttcacccatgataatggatgttaaagctcctgcagttgttcttttcgtgtttaaagggtatattctaatagtggaagcatcaaacatgtcagtgatttcatctcattcagaaataaagagattaatattggtctttattttttggcattttaagttttatataaatggatgcagatggagattatcacccacaaatatatttaaatggatttttcttaatttgaatttcaagtaatctttttatttcaagtaattagttacgcatttagttacattgccagttttttttttttatcaatttcagtaagacaaaatatactaaaatgtttaaatagcctcattcaatcttacattttgacatttcagcaatcattctggcttacagtaattagatcccctgttacgacacatgccctttgttcttaataactagcaaaaaaaaaaaaaaaaaaaaactttcatcttgttaaaatactttgccaaatgaaatagactagtcaatacatctgatgtccataattattggtaactcagttaccttctaactaataggctggttcaggagactctcccagtttataaatggttctcttgggagcctttggaagctgtattaaatctttcagtcttttatttctaattttttctcttaatctaaatagaggccagttatctattttatcagcttttattcttgaagattctcagattatgttttagtcccttttagctttaatagtccttgaaaaatacattactgtataatgtggcaattctgtaacagagacttattacttgaatgaataatcctaaaattttaatattttagctgaagtttgagatttgtggaatgaacaaaagaattagaaactttcatatgttactttgtttcagtcatctgcaaagtatgaagctgtaattctgaaatacacatccaagtgaatgagaattaaaaattttctaaatattaatactaactgggaaaaaaaaactagtgtgaagtttacagttagaagaaacagacccaaagttgccagaaggtaataaataaatgtagttttcactgtaagtaagttattgacgtaagatgctttatttgtaatatatttagattttgaaagttattgagagatgaatgtataaaagctaaattttcttttctgaagcagtgaaacaaaattggggtaacaaggaagctctgttgtggcaaacatgtctatgaggaatattaaaactaagcatactcccacaggctttaaactcaaactatgaacatttaaattaagttgttccttattttgcctatacccatttttatctttcattgtcgtttttgcttgacagtatggtgacagagtatttttatttggaaagtcctcagcaagatgaattagccaaaagcaataatggttcagattaaacaataaagtggaattgattcaatcccaggctcaactaagaacagtcgctctctggatgtttcattttagacgatagataagttgagatgttgtaatatttatggggggttaagcctgtgtcagttatgggatgaagacttgtagtaccagtaccatcagtggtcatacttttttttaactttttactaaactaatacagttagacatttccactctatcgtgattatatttttatgatgggaaaataaaaacacttccatgtttttataaatagtctctgcaaagatttcagatgttattggtatctcggtttggcagtatctgaaaaattgagattgtctttgaaatgtttgtgctacttttacttaagtaaacccccactgtgcaagacccaggccggcttcagctaataccaaggtttctgtgtgcataatagtttacagagaacttaagagtaaggactgcggattaaaaacaaaactttttttaactttaaaatttttagtttttgttcaaagtacctggtttataaagtcaaattcttttattagttcctttctcgtttaaattgactgatgttgctgatgaagcttaaagtcccaggcacggttgtggcgatatactgataaaattggtgcctagtggtgggaggagctccagtgtcaggacttttattaaaaggcccttgttttcccaaatgccaatctagccacatttagatttcattattcaataaaacagatgaaaaatcatcccataaatgaatgttgaggttaccaaagtacatcacctgctgaggaaggataaatcttcctgctttaagggagccctgtcatctctcctcttaatgcacgtttcccttggtattagtggaagctgtgttcaagatgggaagcctttcctgcagttcttagaaacacctgctttctaaggagagccttttctaggattagcttatgtgtgttttctctaggcgattttttatttcagttaccaatttaattttcaagttgacagatgctgtgtaaagtctctcataatgagagtagtccattaaattgttgaaagttgcactgcttttcatctttcaggtacctgaaatgagtgacatcaggtatttggaaggagtaagatcataaactgtattcattttcttccttgtacaaagtgatgacttctaatgcttatatctcaaggtattttttaaaaaagcaacggtccctaatagagtaaaatttggttttggtccaagttcccaataatgtatttaatgtttctgttgtttactggtgcctcccgttgcatcaggtagagattgcctgcctctttgtagggcagccttgtggcaccttatgtccaacttggaggatagtatatggcttctttgtgcctctactatcttttcaaaagccattttataaaaatcctaggtagcctattttaatatttaaatatatatatttgtgaaagaacttttagaacagaccttttctttttactttaaaattcctgtatttccatttttaagagtaaatttaatctccaggatttagaagtgtctttccagagaagcataatgagaaagtcagactgaggtaataagaccagaattaagtgatagaagaaactgttgtttggttaaaggacacagatttgaaggaaaaaaattttgatgtaacaattttttaaataaaattttgtttttctgtaatgtcatatttgctgctacagtagctcaatattttacagggctaacataaagctggctccatttaaaaactggagtacttcctagtgcagccagcctaggcggaaactgtacaccatggtcttccagatgggtgactgatggctttgggtagctgatgcatgctttaatatttgcctatagcccggcagcaaggaagtcggggcggggggacttttttaccctgccagttatagcattgtgattctttctgggcactggcattttgtgaaactctcaagggaaggtgatgcaggggagaaaatgtgaattaaattacatagatgggtgtttttatgtcttctacccctttcctagaattagtacaactcttaactgtgccagtccccagttcaccagctttgtatccagtcgtcatctcattcaagtatggctttacttggtgacactggccatagctaagttaacttggcatgtttgacttttgacaataacaaaaatggttttggattttgttttatttccaaaaaatgtatacaatatcagaacttcacattttatatactagtatctggctattagtattttacaggaaccatagttcttggtgactacatatatatatatatttttgtgaccttttttgtaaactaagtgccgtttcaacgttacaatcatttttagggttattgtaatcaatgtgaatatcatgttttttcaaatctgttctgagcctatagtgtttgctttgtgaacatgtgtattgtatatattctgtatagttatattgtactgaaattagcttgtttgatataaggaaaatatgtattgagtacctttttgctagcctgattgtttaatctttttaaaaaaggtttaaactttttttaaaaaaaaaatctttaaactggcctttattacatggtcacacataaagttgcagttaggaaagggatgggcagggaaaaactagttttgagtgtctttagatagaaacatgagactaaggtttgattttgttttcgttttctcattaaaatatcttatgctttatggaataaaacttcctgctgttgttatttattgtttgctgggcggcagtgttgcctgcggtcatgtgagtgagaaaaggcatcagagtaattcattacttaaataattatctacttagagtgcacagagtagagagggttatattagacagcacatgtcaatttttggtgaagtagagcttaagtgcaaagatctcacaaacaccataccccaacttggaaggagagtataaaggcagctagttagaggacatcatccaatcctagagctattgaatcaggttcttgtgtaaagctgggtactaatgggtgggttgcatctttcaaagttgctctgattctttataaagtcacattttattgactagagaccaattggtgccatttcaatgatatcttacaaccaaggagtaaaaagtgggtacctagcaggggaaaacagctcattacataggtatgaatctatgagatcctgaggaaggaaaagttttctaactttagattcactgatgtggattttgacaataccggtctttagaatgacagtaacaggcaaataaaattattttattgacctcaagctacctggatcattttagaattaagttcagagaggaagagggtaaattttaagaagcacactctttcattccagtgtgtcgagcatttttaacaatttaccaaatcattcaaagtcagaaaatgttgggttcttcagtagccttgaccacagatgatgtatataagtgcagaatgaagaattcaaaacagatatatccttgccagccatggtggcccacacctgtaatcccagcactttggaaggctgagggaggaggatcacttgagcccaggagttcaagaccagcctggacaacatagggagacgtctctacccaaaaaaaaaaaaaaaaaaaaaaaaagctgggcctggtgacacgcacctgtagtcccagctactcaagaggctgaggtgggagaattgcttgaacctggaaggtcaagacctgcagtgagctgagattgcaccaccgcactccagcctgggtgacagagtgagaacctgtcagttggctttgcatacttgcatataaattacgtaccagaaagattcctttcagagaatgatactaaaagtaatgaccaaagatgtgtatctcaactgatagagcaaaaaaaaagtttgggctttttctcttttgaacaggaattttggttctaagaactaaactgagaaagttaaaatctacaaacataccaaaggtttaaaggggcagaacttgcatgtaacaacatcaaacccccaaatttaatgtaattcttttttggggagttaacttctatacagatagaaaaactaacacagggcatattcaatctagaaagtcagtcctcttgagcaaatagatttataactagggtttgaacacctttatggacaaagggaaagctgttttgttgttttcttaaattccaattcatttacttgaatttttctgcaaaattaaaatttttacacctatctgttttgtagatgagaaagtggagctagctttagcatcgttttgcaaggcttcctcacttcatcccatgccct

SEQ ID NO: 68078 - DNA, 1843 bp, Homo sapiens
gcattcaaaaatcagcttcagtagacgttacctagtttgcctcccctactgcctttttttcttttcctttttaagcacttgtgacttttcacatattctgcacattttctgagatactcaattagaatatgtttttgctggtaattcttgccttttcagatgatctgttgctacagaaatatagttcagaaatttgtagggtttatgacttttcagtttatttttgtttttagatattttgttttgctttatttacaggaattaaaccatttcagtgtgaccgctgtgggaaaaagttcaccagggcttactcgctaaagatgcatcgcctaaagcatgaaggtaaacgctgtttccggtgccagatatgtagtgccactttcacttccttcggggaatataaacaccacatgagggtttcccggcacattatccgcaagcctcggatttacgagtgcaaaacatgtggcgccatgttcaccaactctggaaatttaatcgtgcacctgaggagtctgaaccatgaagcatcagagctagcaaactacttccagagcaggtgaggtgcacaacgaaaacccaaccaggaaaactgctttctaaactctcttttcctgcttttagggcagccttctgtgtttttacatcaggttgccagctagtcagtcacatttgttacggattcccactgttcatactctaatctcctgatctgataaaattttgctgagtcttctacgtatataaaattataaacattttatagttggtattaaaaatattttcctgcagaagtagactacttgtcctcttgagatattttttaaataatacaaggtttaagtaattctgtaatggaccttaaatagatcttactggaaattttaccatgtcagatgatgcttagtgatactggattactccagactctagatgttaataaaattctttaccacttctctctatttaaaaatattctatataaaggaatagccattggccagtaagaaaaatttcaaaggcaactatagtgggtgtgatggtttagatcatgaagtcattgctattttcattcagtttagagctctattcttgtaatattaatttataatagaattacctttctgatttatagggcatcccaggaaatcagcttctagatctagctctgccactaactgctgttgattaaacctgtcactttacacatgaaaaagcttgaaacttagagaaagataaaatgtaagctttaaacgatggtttctaaggccttctctagatataaaactgttgttttaaattgtttataagaattgtacttctgtaggaatccttagtttctcataaaatgaaatttttacaaatctttcttttttttttttttgagatggagtctcactgtcacccaggctggaatgcagtggcacgatttcggcttactgcaacctcagcctcctgagtagctgggattacaggtgcccaccactacacccagctaatatttgtatttttagtagagatggggtttcaccatgttggccagtctgatctcgaacccctgacctcaagtgatccgcctgcttcagcctcccaaagtgctgtgggattacaggcgtgagccaccatgcccagcccaaatctttacattttaaatcacccttatttttaaaaccttttttttttttaattgaatagatagggtcttgcagtgttgcccaggctgaagtgcagtggctgttcatagacacaatcatagtgcactgcagcctcgaactcctgaggtcaagcagttctcctgctggggctacaagtgtgggcaccacccctgacttaaaaccttatt

SEQ ID NO: 68079 - DNA, 1746 bp, Homo sapiens
attggttcacagacttcactgattggacagtttggaaggcagataaggagaatatatttctatacagtccctaccttgaagtttctctgtcactaccatctttcagctttttaatttagtacagtggccacatgaaaatgatctaaatcacattttaaaccactaaaatatcaattaatgctttattttatgtattttttaggacatttctgatttatttgcatccttgaagagcatctgtagaagaggaagtaaaagatgggtgtgaaaacatttactcatagctcctcttcccacagccaggaaatgcttggaaagctaaatatgctgcgaaatgatggacatttttgtgatatcactattcgtgtccaggacaaaatcttccgggcacataaggtggtactagcagcttgcagtgatttctttcgcaccaaacttgtaggccaagccgaggatgagaacaagaatgtgttggatctgcatcatgttacagtgactggctttatacctcttttagaatatgcttacacagccactctatcaattaacacagaaaatattattgatgttctagcagcagccagctatatgcaaatgttcagtgttgccagcacctgctcagagttcatgaaatcaagcattttatggaatacacccaacagccaacctgaaaagggtctagatgctggacaagaaaataattctaactgcaattttacttctcgagatgggagcatttctcccgtgtcctcagagtgcagtgtggtagaaagaaccattcctgtctgccgagaatcccggagaaagcgcaaaagctacattgttatgtctcctgaaagtcctgtaaagtgtggcacacaaacaagctcaccccaggtattgaattcttcagcttcctactcagaaaatagaaaccaaccagttgactcttccttagcttttccttggacttttccttttggaattgatcgaaggattcagcctgagaaagttaagcaagcagaaaatacccggactttagaattacctggcccatctgagaccggtagaagaatggctgattatgtgacttgtgagagcacaaaaactaccttgcctttaggtaccgaagaagatgtccgggtcaaagtagaaagattaagtgatgaggaggtccatgaggaagtgtcccagcctgtcagtgcatctcagagttcgctgagtgatcagcagacagttccaggaagtgaacaagtccaagaggaccttctgattagtccacagtcttcctctataggtataatgccttctgtgtttttcttggtgctataaagtcaattcaaacatttttaagttcctgttagataaaaagttttgtgctcggtcatataggaaatataaagaagagtaaaacatggtaactggatttgcttgagatgctattagcactatcgtttattttttacaagttgcacattggggaagataaaaataattgaatggtatctgctgggacaaaggcagatacacatacacaaaaaagcagttaaatccagtttgtgttttattcttcattaaaatatgtattgaaaacttaccatgtgccaagcaaacatttatgatacataaagaaaaacacatagtccctgcaatgacaattaggttaatcatctaattggggaagcagatatgaaagtaaatgattacagtgaactatcaaaagtgctcatctggaggtgtgaacaaagtagtatggttgcaacaaag

SEQ ID NO: 68080 - DNA, 1039 bp, Homo sapiens
tacatccatgcaatgaaatagtattcagcaataaaaagaacaaaaatccttacgctcaacagcatggatgaatctcagaataattatgtccatgaaagaagccagaaaaaaagagtacatactatataatcccatttatataaaattctagaaaatggagctactaaagtgtaaagcacattgataattcctggcaaggacaggaaggtgagactgcaaagaaacttacagaaattgtggcagtattccttatcttgattgtggtggtgatatatatgttataactcatcaaattgtccactatgcagtttattgtacatgaattatatcaggaaagcattcataaagtgatttttaaagaacctatgctggaagtacagatgtgattgattccataaatatattggaataatccttggagagattagagtgtataccctggtaaacctaaattgatatgctatcaaacacaggatcagtgagtcccaacagaactaccaccagagttcagtgtagagaaagacagcttggtttaatgataaaatgaggataggatttaattaaagtcagaggctctgaatttgaatccctgttaggccatattttctctaatctttatttttctcatctttagtttcattaagattttaagatccaaagaatatatttgaaagtacatctgaaagtgacataaaaatggaaggctggccgggcgcggtggctcacacctgtaatcccagcactttgggaggccgaggtgggcggatcccaaggtcaggagctcgagaccagcctggccaacatagtgaaaccctgtctctactaaaaatacaaaaattagctgggtatggtggcacgcgcctataatcccagctactcaggaagctgaggcacgagaattgcttgaatccgggaggcagaggttcaagcaattcaagagccaagattgcaccactgcactccagcctgggcaacagaatgagactccgtctcaaaaaaaaaaacaacaaaggctttcctgacatttagcttagaaggg

SEQ ID NO: 68081 - DNA, 1733 bp, Homo sapiens
aataacagagtgaacatctagttccattagggagtggagtgggaagatggagaatgcttgcacttggacccattcaccctcattctgtctttaatctcagtaaaatacatacactacccaaggttcttagaacatataaggtgatgaagaagaatactataaacagttgcatgggtatgtgtagccatgtagcagctagaacctgttgtgtaggctgaatgaactaatacagtgttgataataatgctaacatttgttatgccctttctgtatgccagctgtgctaaacattttatacattatcttatttaaatctcacattaacactttgacattgctactagtatcttattttgcagtaaggaaactggtatctaaaagcattaaatgacttgcctagagtatcacaataagtggccgacccaggtttcaaattcaaggctgtttagagttagcacttagctgctttgctccacctcacaactaaatgtaacaagtcataaaaattgaataaattttcagtcaccatgaatacggaactacatgactgatgctgtaacaacctcagagattgcaacggggatatgttctgagaaatgcgtcgttaggcgattgtgtcattgtatgaacatcataaagtgtacttagacaaaacttgatggtatggcctactctacatctaggttatatggtatagcctgttgctcctaggccacgtatctgtacagcatgttactgtactgaatgctgtaggcttttgtaatgcagtggaaagtatatgtatatctaagcatatctaaacctagaaaaggtgcagtaaaaatatggtattacagggttgcgcacggtggctcatgcctgtaatcccagtactttgggaggcggaggcgggtggctcacctaaggtcaggagctcgagaccagcctgaccaatatagtgaaaccctgtctctactaaaaatacaaaaattagccaagtgtggtggcatgcacctgtagtcacagctacttgggaggctgagacaggagaattgcttgaacctggaaggttacaccagtaccatgctgttttggtaactatagccttgtagtatagtttgaagtcaggtaatgtgattcctccagcagtgagcccagattgcaccactgccctccagcctgagcgacagaatgagactcttgtctcaaaaataatatggtattataatatgggacggttgtggtatttgtggtctatcattgagggacacatgccacgcatgattgtatatcattttcctttctcataggtgcgggagtttctgaccccttgcttcagaaactgcatttagatactactttaaaaggcattttaaaagtagagtaaaaatcaagatggattgatggatggataggtatgtgataaaacaataacagtagacttttttttttttttttgagacagagtcttgctgtgttgcccaggctggagtgcagtggcacgatctcagctcactgcaagcttcatcccctgggttcacgccattctcctgcctcagcctcccaagcagctgggactacaggtgcctgccaccatgcctggctaatttttttgtatttttagtagagacggggtttcaccgtgttagccaggatggtcttggtctccttaccttgtgatctgcccaccttggcctcccaaagtgctgggattacaagcgttagccaccacacccgggctacagtagaatgtt

SEQ ID NO: 68082 - DNA, 1049 bp, Homo sapiens
agattacacatgtaagcctgtagccgtaggcctagataccatatttttaaataaaaattccataaaaatagaactgtagcttttacttaaatcatgtctttaaagaggcaggtagttggtagaggttttatgactccatctacttttttaactttttttttttttttttgagatgcagtcgccctctgttgcccaggctggaatgcagtggctcgatctcagctcactgcaatccacctctgccccctgggttcaagcgattctcctgcctcagcctccctagtagctgggattacaggcatgtaccaccacgcccagctaatttttgtattagtagagatggggtttcaccatgttgtccaggctggtctcgagctcctgacctcaagtgattcacctgcctcggcctcctgaagtgtaatcctggcctcctaaagtgctggaattacagacgtgagccactgcgcccaggtgactccatctacaacaaaactggcataaatatgctatgtacagataaaaaggcatttggatatgtgatcagtggagataacacattttgtttgggttggaccaaatttgatataaattcataattatgtgatctcaaatgaagttttaagagggagcagtgttcatctaaagtaagcagagcacaattaggcagtttatcagcctcctgtcaaccaagtgctgaaaagcaaaactgtgcctgtagtgtgttttcctgtgttcatcctcactgtcataggtcacactagctgaggctggcgttgcaggtggtaaaggaattaccaaggcaattgtaggtaaagaagggcagatttattagagaaagtatgaaagtaggttggttgcaagggtgcaacgggcagatcagcaagagagaagctgactgccaggagacaatggcttgctgggcatgttacaggatgatgcttctgctgtgtgctgcagagagggctatgtgcagtactgataaggccaaggttgcagtgagctaacttgcatttttctgtcagctgagagtctggtgataagttgagtgc

SEQ ID NO: 68083 - DNA, 1623 bp, Homo sapiens
ggcatttttgcatttgtaattatttaattctcagaacaacctaatgatgcagatattattacttgaattttatagaagtgacaaacttagtgatacgaagaattacaacttgccttagggcacacaactagtaagatagtttagatttcaacccaaatataattccagtatagatgtactttcgtgtactttctaccgtacttctcaatagaagtacaattttattaactttgttatgaaaaattttagtcgtatagaggttcgttctatacaattgtgatcggttattcatgcaatgaataaaaatgctaatcaatgcaatgaataaccaactcagtgattagcatttttgccatattgtttcctgtctttctctgtatgtgtgtaattatttgaaagtaagctgcaaacactgtaatcctcaaatatttcggcatgtgtttcctaaaaatagggacattctcctactaaccccagtatcattattaatgcctatcaaaattaacaactccatcttcaaaattcctcagttgttccaaagtgtctttgagggttctgcccccagttgtagtcagtcaagattcatgcattgattgcatttggtgattaagtctttagtcattttgtaaaatgaagagtatccatcccctcttctttttgcaggggaaattaaataggatgaatattccctcccttctttttttctgacacgtaattgaccaaaccagttgtcttgtaaaatatacccacattctggatttgtgccctcctaatgtcatttcgtttattcctctttctccctgaatttcctattaactggaagttaggtgtaaaggaaggcttaattagcttaaagtaaaacttcctttggcaagaatatttaataggtgatgctgtgtacctcctgttgcataatataggaggcacacaatgtcagattcccacactattaatgatgctaaatgtaaccatttgattaaagtgctgactactgatctgttgtaaaggtgtggtttgccagtttgtgattaatatgtaatcttggggtaaaacttggacactaagcaaatacccagtttctgacaatcttttgcttagtggtttttagcacccatgatgacttttgcttaaatcagttattggaggttctctgtaaggaagagatttccttcattaagtgcaggtaaactattgttcttccccaaaatgcaaattaaatgttaaatttaatctctttacttttcaatattcatagtaaagagctggagaaatagccacccccaatgatgttttttggggcaggggtgaatgataccacttcagactctcatgggttttaatttattccttgttttataaccagttacagtcgtctttctttttaatgaccaaattgtcccagatttggtcagtaggaaccatttcaagctgactattgtgtgtcttgacacccctgctccccattaatcttggagtgctttctgacacgagttactccagggtttatcttatactttctttgctcacctctggaaagagctgtttatccagggagtcttggttctttttaatgagaaatcgtatatagaaaccaagttctggatgtttggcatattcgttgct

SEQ ID NO: 68084 - DNA, 1215 bp, Homo sapiens
atttgaaattctttgacttgtagaaatgttatcctaatctctgatttcatcttcttatgtcattctgtctgtctccaaattttccctctttataaggacaccaatgatattggattaggggtcaccccactttattattacctcatcttaactaattgtatctgcaatggctttatttccaaataaggtcacattctggggtactgagggttaggatttcaacatacgaattttgaagggacataaatcaactcacagcattgtttaatgatacagctttataataatttttaaatgtattttctcttttaaatcctttagcagagctctttacttcttcataaagctttaagttacatctaacactctttaattttgacccaaaaggacttcccttttcatttcttgtgggggcaagtctaaatggtaataaattctgttggcttttgtttatctgaaaatgtcttaactgcttcctcattttgaaggaacattttgccagatatataattcttggttgacagttctttgtctttcaccattttaaatgtcatcccacatccttcctatctccagtgtttctgatgaaaaattcagtgatactctttttttttctttttgtgttagtaaaaatctcacaattgtggcattttcactgaagattccttactgagttgcatctctcttgctgttttcaagactctttctttgtcttttgatggattgattataatgtgtcttggtgtggatctttttgagcttatcatacttgaagttttttggcttcttggagttgttgatgtgtgtcttttatgaaatttggggtgttttggccaagatttcttcaatacctttcttcccctttttctctctcttctctttctgagatctccataatacatatattaggctgcttcatggtgagccatagttccctcagactctattcattttccttcattcttttttctttctgttcttcagactttataattctaattgtccttgtctcaagtttgctaattctttcttctacttgttcaaattagctgttgaatctctggtgaatatttatttcaatttttagttttcaactacagaatttcttttttttttttttgagatggagtcttgctctgttacccaggctggagagcagtggtgcaatctcggctcactgcaacctctgcctcctgggttcaagcaattctcctg

SEQ ID NO: 68085 - DNA, 2134 bp, Homo sapiens
caaaatcccacctactacttcaccaagactagctttccacactctgaaatggatttctgtttgtggtctgttaggccactgtgtggtttcccctatgggattcctttttgtggttggaggtcaaattctttcttgcctgctgcttccaggaatgtgtgctgtgtgtctcagtgtgctgcacaggagggtcttatttcacctcccttgaatggaatggcagttatccagcaggtctgggtgcatgtataaatagagggatgcgtaagcctgcgtttaatatctagcacataaaccggccaccactgcgtgctacacagtcatgttttcattaaaggctgctgacagcaccgcagaccatgctgtggggcccagcaaaccacctaatcccactgcttgatcccaggcatagatggggcagatttcactgccaggaacaatttctttccagccaccgcagctctgagtttctgctgcttttcctgcttcagctgctcattgctgatgactctgggtcagacaggccagagtgcacatggaaggctgaagtggacagctaatccccaagttgtagtctttttttttttttgccagaagatttagattcactcccctgtgaatacttttgactacagagctgatgtcagaagagctggttgatctttttttctttttctttgttctcggccatgaaccaagaagggccattaaaagttcagcatttcagccaggcgcggtggctcacgcctgtactcccagcattttgggaggccaaggcaggcggattgcttgagcccaggactttgagaccagcctgtgcaacatggcaaaactccacctctacaaaaaatacaaaaattacctgggcatggtggcatttgcctgcagtcccagctacactggaggctgaggcggtaggatcacttgagcctgggaagttgaagctgccatgagctatgatcggaccactgcactccagccagggcaacagagcaagactctctctcgattaaaaacaaataaacaaacaaaaaacaaccagttgttcagcatttctgtatctttgcccaactttctacaatgtgccatgtgagagcatcacttcctagtctatacaggatacagtatgaattcctgcttctgccattcagattcctcacaatgtagtcccaaactacctttctttttctttcttttttttttttttttgagatagggtcttgctctgttgctcaggctggagtgcagtggtgcaatcatggcttactgcagcctccacctccccaggctcaggtgatcctcccatctcagccttccaagtacctgggactacaggtgcacgccatcacacccagctaattttgtatttttttgtagcaatggggtttcaccatgttgcccagggtggtctcaaactcctaggctcaaggcatccacccaccttggcctcccaaagttttggggttacagatgagagccaccatgcccagcctccaaactgtctttttgatcttataaccactgcacccttactttaacttctatgtaagtggattggtctactttccattttccaatgcgccttgtaccatttgtcattattgtagtggtctctttgcctagattggctcccattctctctgcctagtgaaagcttttctgtctactggggctgagtttgattctagggcctccataacgactctcatccacaggtgtctttctatagcacgcattatttctactattttgtcaacaagtaattgtatcataatccatactttattgttgtatatactgactacaattgaaagattttagattggaattctagattctagtctcccctagattggaaaccccgtgaggtcaggggtcatgcatgtgctatgtgcttggtaactcgtacagtgtcaagtgttctgttctacacatgagaggggttggaaagtgcttgctgattgaattaatcataatccacccttgaaaaagcagagttggcagtatttattagtgaatcaagtgacccttcaaggacattctctggctaagcactggaacactggaatatgaagtagtaattaaagttattctcaggtccagaagggaacccagagaatgttactctcctgacatc

SEQ ID NO: 68086 - DNA, 1050 bp, Homo sapiens
tgaaacatatagtcagtggctgcaaaccttttttttaaaacaacaaatttgacttttataaacatctaaatatcattttagctatatctgattaataaaatggagactcagatacaataatatcattttagcaaaagcaataaaccaggcacagtggctcatgcctgtaatcccagcactttgggaggctgaggcgggcagataacttgaggtcaggagtttgagaccagcctgaccaacgtggtgaaaccccatctctactaaaaatacaaaattagccagatgtggtggtgtatgcctgtaatcccagctactctgaaggctgagaagggagaatcgcttggacccgggaggctgagtttgcagtgagccgagatggcgccactgcactccagcctgggcgacaaagtgacactctgtcttaaaaaaagcaagaaacacacacacacacacacacacacacacagaaaacccatgatttttgcatgtggcttataaaagggctttgacggtaatttggaaagatgcctttcagaaatgtattgaattttaggagcattgctgtaataatagtggctttcactgactgaacatttgttgtgagtccttaagcactcgatatttaaaatcttgtgtaatcctaaaagtaaccctgtgaagaggttttttgatgagctacattttagaggcctggaagctaatggttaggatggttatccaagatgttaactcagatttctcacactccaaggtccgtgcaccacggtggtgcccaccttgaaggacaaacactgactggttgtgttcaacttagtattcttaaggccacttagggctgttcattgtacaaccccaggaggtgtcactcatctcctgctcctagcatatttggatagtgtttatgacaaatttctagcagaccacactaaagtgtcttgaggaaggggaggtctttaattcacagttgctcaaaagttgaaagttggtctcagtgcgccatggtcacctgtagaaggcagggccctgaaacggggagggattcaaaacctt

SEQ ID NO: 68087 - DNA, 1061 bp, Homo sapiens
ctcccaaagtgctggggttacaggcatgagccacctcactcggccttttctgtttttttaagacagggtatcgcactgttacctaggctggagtgcagtgccaccatcatggctcactgcagcctcaatctcctggggctcaagcaatcctcctacctcagcctcctgagtagctggaaccatgggtgcttaccatcacacctggctaggttttaaaaaaatgtttttattttgtagagatgggatctccctatgttgcccatgctggagactttgtattacttaggatctgacacaatatctcacttaccttttttctgtctttggagtgaactatattttcccctaatcttaggtgttaatttagtttcatggaacaggcaatgtacaatattaagaattgattgtatgggagatgctatggtaggtccctggcagaaagaatgaggatgcggaatgaggagagaaggatcagtggtgggcatggagtgacatggtcggggtgggaactcaagagagatgcaaacgtgagtaagatgtgggcttgaccacaatgtataaacgtagaggagacccaactatgaaggctgtccgtaagtgttatggtggtgggggcggaaggcataaacaaaatcctctgggtacacaggagatagagaaatacattctgcctgggagagctggagaaagcttcatgcagagggtgacatctgagctgactcttgaaggatgggtaggccccacacacacagagaagaaaggaacagtagcaggaaagccatgaggtgacagtggtctacgggctaacatgagagtgagctacacgtgttgggggtgggtaggaactgtggcaggaaaagcaaagaaccttgaatgtcctcttaaagactgtagattttctacgggcaacgggagtcactgaaggtttttgagcagaggagtggtgtcttttgatcttttgattttccagggctggctcctttggcgtgtgcggttacctggtagcgtcggttatatgatgtggtgcgagactgtgctttcacttttcctttccaggggag

SEQ ID NO: 68088 - DNA, 1024 bp, Homo sapiens
gtatctcgtgagagtattccgattttccactctgaagacaaagtggtctaggatccaagagcatgtattagtcggaattggagtgttctctccctcgaaatgtgctaggtaaccactgtcccggttttggattgaactcttttccttatgagctctagtcggccaagcacgctccattattataacatcatctgagacatgtcacaatgaataaggccaccacttgcttggctttgggtatgtgtccctgaggaaactgcaggagcacaccccaaattccttaactacatttgggaggtatcttgggcttttaattgggggttgtaaggacatatctgggcagtgggtgaggcttcctgatgttctcaaattctggagaaaaggagacaccatacaatgtgaccaaaatctacctctgacccgtctgctatcaaaatgtatcaaacacagcaacaaagccaaagaatcacctgcagactggggggcggaagggcttggggactggagagaaagcggagttcgtgaggtcagggtctgtcattgtgaactgtataggtttccaagaagtagcatgagtcttcttcatgatagaaaggtaaatgcgcacaactagaagtcttggggaagccactccagcccactgcagtgggaaacttagtgatttctgtttgtcctggcttcctccattcagatgtttctcatcagctacgttcagattgattccatttgcaaagctctcctggcagtctcggcggagcaggcttggtggcaaaatctctggcattttctgatcctgtccaggctctgctcttcttgtgtagtttcttggcgctttggctcccaagcagaaactggctaaacagaggctgctgctgaacaaagccaaatgtaaaacagaacattggaacgccaagcggagtggttttgctaaatgtgggggctgggaatgggcagaggacagtgagggatcaggagagggagggacctccttagaatcgggctgaattacgccctggtgaaagtc

SEQ ID NO: 68089 - DNA, 1036 bp, Homo sapiens
agctgtgaaatgcgggagtgaaaagacacagcacctgcgaacaccgatggggagctgtcagcagagagggaggggctgggtctttgggaagggaggggatggtggaggggctgagcgccttgagagggtggagggctgcagtattgagaagggattagttttgacagtgggaaaatacctctcatgtaacagaaacagaaggagaaaggatagattttaaaaaggatggatatacaatggttttcaatttatgatggttcagcttacaatcaattgtttgactgttcgatgggtttatcccaatgtaacccgattgtaagtggaggagcgtctgggcttaggacgattcaacttacacatttttgactttacaatggatttattgggatattaaacgcattttagtcttacgatattaccatgggtttattggggatgtaactctgtgtaaattgaggcgcatccgtagctaccagcaagatttcaggattcgtggtaagaaacgaacagggtttttaaaattacgatttcattttcttgtgttttttttttttttcctcaccctgtcctgcttcctgagatctgacacatttgtaggctaggctttcggtaatgtaactccagatggagaagagggagacattttttcacatcctaatgcaccagggataggctagcaggaggccacagttagtactgtgcaaagcctactctcttaggtatgctgtccttggtcctgtccctgtgagagattttcccccttcccctcacccacctttgggatctgaagaaccatctccatctaacagtgaaactagaaagaaccgagggactgacagaccatgtcagggccacacccaggactccaaacagtggtggaaactgaggggccaacaaggaggatgaggtagagaagctgggccatgagggagcctgggtgtgtatttatttatttacttttgagaaggggtctggctctgtcacccaggctgaagtgcagtggtaggatcacagctcactgcagcctcgacctccc

SEQ ID NO: 68090 - DNA, 1045 bp, Homo sapiens
tcccccgcagctacccttttcctattttctggtccagcaagaggaactcacagcatcttttcttacttccggagaaattcattccacatgtgtctgattcattcgcgtttacagaaacttgaaatttccagtgtccaaaaaccctttcaactattttttttcttccctttcttagaaacaggaagttgtgtttggctgcggacaaactctctcagtgcccctgggacttacaagatgtttggaatgaggaacggtgaggtctggggaaggcttctttcctctctcctttcctggggcgattcgcatctgccagggctgggctgggcagctctgggggctggaaggccagccggaaccttcctgtctctttctactgagccccaggcctgagggaaagtatgttctaaagagacaggtggctttcttgctctctgcttgtcattacggttcagaatgcacttgtgcactggtgtcatgtctcttcccagtacttgagcagtggctgtgatgagtcccttgatctatttcagggggtgtgggctggccggcactcagttttaagcaagtcctgctctttccaaagtggaaggtcagaaaaactccccacctgaagaagaacgagccagggaagtgtggtaccagctgtttaggaccacacctattggttacgtctggccaggtcattctgcagtgttgacctggaaagcacacaggtgcttaggaggggctggccaggggcagggaaagtgtgggagtcacagcccacccactccgttcgcgggaccctccagtttttactgttgctcgttgtgttctcctgtgttgtttagaatgttgtcatatgtacggtcaatacaaccacagtatttgtcgcattagtgatcaccaacattgagccaatgaagacgctggcttagatgggtgacttcttctttcccacattccacatgcagctctcccaatgcgagctcagcggaggcccccagaaaaacgtggggaggagagttttccccataagacagactgtccttcagccccggccacc

SEQ ID NO: 68091 - DNA, 1017 bp, Homo sapiens
agtttgctagtcctttgcaaacagactgacgctgagtgtcctgtctgagtcaataagtgcacttttaccttttaacctatgccctctacttgaacccgagcaaggtccagtccactggacagttgatgatagggtctgccgccccataccctctcctcttcccccttaggaatttgtgcagtactggaggggttgcggcaatgggaggcctgggtgggccgtgctgccttgatatggccaagggacccagtcaccacagtggagacccttgtctgcacctcagtaccgcatgtccaggagcacaagactggcccctgcccccctgaatcacagggggcacagctggctttcgcagggcttggcatcctcgggtttcagagccttgttgcaggtggcagaggcctggccggaggggtccctgcactctacagttcgcctctgccagccggccccgcaggtgctagagcactcagaccagtcccccagcacccactgtgcgtggagcagcggctggatgatgttggtggttgctctctctttgctgctctgcatgctaaagtccacgtcattaggaacaaagaaggtgtatttgacttttggggggaagacctcgccagggactgtcaggagctgcactgtcagaggctctggcaagggccggaagctctgcaggcgctccagggtggcgatggagccgctgtacttcaggatggtccccttcaccaagatgtcctgctctatggcagagatggccaggttgccgttgagcaggtactgcccatcagccgtcttcagcgccaggtagttcccatcgttctgcacacccgggtggctccgctgcttcacgtcaatattagtggcaccagctgggatggtgacaatgtcattgtagccataactgtgatagaaacagaaggacacccttagaccagtggctgcccagcccaggtcacgatgatgccttggagactgaagtgggcaccccaggtggcagacacgaaaaaaacaaagcaagta

SEQ ID NO: 68092 - DNA, 1083 bp, Homo sapiens
tattcaggacaatctgtgatttaaaacgatggcatcccactctcaccaccacaagcccaggcctgctggcttcatggggacctgtgcctgcctcctctccatcctgccacgtgctgctgccagaccaacccatctgaagttagatgtgggttgctttccacccccaaatcctaaaattaaagctgttcttcctgccaaggttccctgcccaaactgtgcatctgaatgcctggggagactttgccaaggcagatgccatactccacgcctgagactctgagtcagtgcagctgagggggtctgggctgtgtctgcaggagcttccaggtgacttaatgggacaggtggcacagataactcccagatactgtgtcagccttcaaggacctctgtggtctggccttgacatagtggtgtgctttgcttgattccacctaagtgaatgagggcccttctcacacctttccaccaccctggcaggtcccctcacacctcacccatctcagtcctccagactctgctcagtcctaactcctttcaaagcttccgctcacccagcctttcctttctccgagcgcctcaccaacctagggtctgtgactcatccattgaaatgtaatggctgtgttaaagggatttgggtctctaattggactacaagctccttagggacagagaccatgccttttacattttcatacatttttatagttctagacacacaaaaaatactaaaaaatactcgacagtaatggcagactttggtgcatctgacatcatggcatcacttttcgtccacacctaccttgcaccctatattcattctcatcctccccctttcccagcaacgtctcaccctgtatgccaggcaaactctcatacaattccagggcaaagtttctagagcctcaaaccattgtggatccttcttgtcttgtgaaaccgcaaagcctacagattctcctgagacatcaacccaatgccagtgtcttttcccgtggttgaatctctcctaaggctctgcctgatttttcttgcctgccaatccttcctggagctgcacactgggcagttggatgggat

SEQ ID NO: 68093 - DNA, 1027 bp, Homo sapiens
ctggtcgggtgaaggtcccctcccaagtgttttttttttttttttttttttttttgagacagagtcttgctctgtcacccaggctggaatgcagtggcgtgatcacgggtcactgtagattaccctcccaggctcaagtgatcctcctacctcagcctcctcctaccagcctggccaacatggcgaaaccccatctctactacaaatacaaaaattagctgagcatggtggcaggtgcctgtaataccagctactagggaggctgaggcaggagaatcgcttgaacctgggaggcagagctgggattacaggtgtgcaccatcatgcctggctaattttgtttatgttttgtagagacagggtctcaccatgtttcccaggttggtcttgaactcctagacttaagcgatctgcctgccttggcctcccaaagtgctgggattacaggcatgagccactgcgcccaggcccctcccaagttttgacagtggttgttttctaggtttcagagctcttgggaaggaaaactttctgggagagtgggtctttgaagacgaaagaatatgggaagagaagggcatttgaagtcctccatggggctcctagaagtggaggtagtgcttccagcaagcacaggtggcagacctggctgggtgtgcagggcacacatcactgcctctggtgcacccgggttcaggctggtcaccctcggaataactgttcactcattaggaggtgtgactatcatctgaccgtgggaagccaagtttgactgctcaggtggtaaacctctgagtgctttggattaaattttgctgattttctgtactctgaccgcttttcctcccatgccccctggctcctggctccctgcgctgtgctgctgcccaccttcgccccttgccagcatgtacacagatgcacatgtggccttgcatatacgtgcacatgcatgcagacacatgcttctttgcctgtggaaggtggtagtaatagtcgttatttcagtgggatgttgtgaggatta

SEQ ID NO: 68094 - DNA, 1050 bp, Homo sapiens
ctattgctcaactgatgtgtgttcagaggatccaaactcatttcactgtcattctaaggaaaacatcatggacaatgtaaattttattctctttctaccctgtttaaaaaaactaaaaaaaaaacctaaaaaaaaaaaaaagtcctccaaaacactgcacaattcaccccaaagccaaaccgagttttaggattgcttaataatgtcttatctttatctcttcttaaaagaaacttcagaatggttcacggtgaaactttctcaaatacagcccctgatcgaggttaagatcagtttggtctggcatcaagtctgaattatagaacactaaggaagaaaaacattcacgtctatggtgacattttttatccgcagggctgggggtggccatgccttagggatgcctgtgaatgcactaacaacaaataaagggaatcttttctgttttttccttttattcccggcaagctgtgagataagagcactctctgaacttttgccggggccagcgtggtgctgggaattttcgtgcctgttacgccacttctgtcatccatctgacatcaggcccgagtattagtattatcaaacccatttttgcaagtgaagcaccggaaagctaaggagggtttgcccgttgctcaagcccactagggtgctgtggtgtgggcagagtccgttgaaaacatgtctggccaggcgcggtagctcacgcctgtaatcccagcactttgggaggctgagaagggcggatcacttgaggtcgggagtttgagaccagcctggccaacatggtgaaacctcgtctctattaaaaatacaaaataaggccgggcgcggtggctcaagcctgtaatcccagcactttgggaggccgaggcgggcggatcacgaggtcaggagatcgagaccttcctggctaacacggtgaaaccccatctctactaaaaatacaaaaaattagccgggcgtggtggcgggcgcctgtaatcccagctactcgggaggctgaggcaggagaatggcgtgaacccaggaggcggagcttgc

SEQ ID NO: 68095 - DNA, 1052 bp, Homo sapiens
agatggaaatgaacacttggaaagttaatatctttgatttttaatacttcttcctagagcgtagtccgatgtaacagttcatctggcgagattctgagttaccaattttttatgggttttgcgttagaataattttataataatcaaaagtaaatgagaacaaggccaatagcataaaatttcactccttcacactcctaagtgtttttcgaggcactgcggaaaaggaagcatctatcgtggttggtccagcatcccttcagtagcttagatctgcagaaatactgttggaacatcgtttctttattcttcccatcctttgtgtgttaggccaaaccctgaggactgtctgccttggaatagagaggaaatccaagcatatgtgcaaagttgagctgcactttcagccccaggtcttcaatgggccttctccacaggcacctgtgaaatgccagcagggtcgttgcatgtagagggatcccactcagtgcacccctgggaatggctcagccgcactgtgggtgtaagcattaatcacacaacagccattctacatattccttttttattctccagagagtgccaggaaaagtcctgcccagtcaaaagtcttctcttgcagctgggtgttgagggtgattgcccctctctctccttgtaagattatgtttgacagcagtgaaaaccaacagtttaacagcagtaatctcttggcaggacagattgatatgagccttgtcccaaaacaaagtaatcctttcagggaagtgtatttcaagttgagctcacgttcccaagatgctgagattcttatgtagctgacaccggagctgaggctgagccccagccagggatatccaacgattgccagtaacaccacggaactgagtgaagattcaggggctgagtgtgttcctgagtgcttcaaaccgggggacctggaaaccagaggactcctggggaaaggctgtcaactccagcctgctcttcctaaatggccttgttagtagtgacttcagccctggcggtgaggcatgtgggtcagaataaca

SEQ ID NO: 68096 - DNA, 1332 bp, Homo sapiens
agagtccccacctctactccacgtaccccaaaaagataagctgtcctcagatcctccttctacccaggagggaaataatggatattgccaagggaacaatcagaactcatctggctttgaaaacgacctgccaagtttggctagcaggttcagacaacaagagagtaacaattggtagagagccacaggtagaaaagatactcccagctgacagggtgataaaaggcagggaagaattgggcctgtgctgatccaggaaggttttattgtttgcttgttttttgtatttactcgtgactaaattttattcatttaagtcagaattttgatatttgaaataagactactttcccttttcttactatctataaaaaagacgaggcagggatgctgtgttctttctgtcaaattctaaatgtgatctttgccattgcttatttgaattcaagaaagctatactttttcatcacatataactcacagtttcatttttgcattgttggattagacttaataaaacctaaatggaaaataaattcctaaatctgagcctaggagcatgtataaattttatttttattattattatacattaagttctagggaacatgtgcacaacatgcaggtttgttgcatatgtatacatgtgccgtgttggtgtgctgcacccgttaactcgtcatttacattaggtatatctcctgatgctatcccttccccctcccccgacctcacaacaggccccagtgtgtgatgttcaccttcctgtgtccaagtgttctcattgttcaattcccacctatgagtgagagcatgtataaattttaaaatcaatacaagctactccaatttccattttggaaatttccagtttacaaggtgattttcttattgttgtaaagaaacacataatgtgagatctaccctcttaagtgtacagtacattatttatttattttgagacggtacattattaactagaagcagcacagtgctttgtagcagactgctacaagtttttcatcttgcataaccaaaagtttatacccattgaacagccactcctcgtttcccctcccaccagcctctggcaatcactgttctactttctgcttctgtgagtttgactactttgaacgcctcatataagtggaatcatgcagtgtttgtcctttgactggcttatttcacttagcataatgtcctccaggttcatccacgttacagcatgtgacagaattttctttttaaggctgaaaacattccattgtatggctatgccacattttctttgttcattcattgagggacatttaggttggctccgcgcct

SEQ ID NO: 68097 - DNA, 1076 bp, Homo sapiens
aagttagtatgattgattaggaatatatgatatgcaagaataatggctgatgataacagtgaagagtttaaagggagtctgctcattcagactcctgtgagtcattccaagaacaaaacatttgtcactcatttgataggaaacaattttacaaaacataaacagatgatgacatgagcaaatttgcaattgagaaaaatcatttaaatagtgctgtggaggattaattaattgaaggggccaaagttagaaacaggaagacaaattagggaggagtttcattgatagaaaaggtgatgaggcattcagctgagatcattgctatagagatggtaaaggggtaatagattcatgagatattgaggaggtaggatcacctatatttagtgactatttaaatgattatgtggtgttggattagggttgagaaaaagacaaatcaagaatgactcacacagttttccaccttgcagattgagaagcataactaaaaagatggggtaatatctttctgaacagcatattggggttgtggttaaaatcctgttgcttactaaagtaatagattagtatctactctgatttatataaaaatcaatgatgcacccagagaagcctgtactgtatctctaataattttgagattctttttagtagaaaacttaaggcccagattatattttcaactttttttctatctgtaagtttctttagaagaaaaatgaaaacagagaatgaatagctaaccttgtagctggtaccaaggcaaggtttttaaattttctgtgccatgacgtatgattattcacatggtgaacttctgaccacagacagaatacaactcaaaaatagtagaaagaatgtgtttgtcagcagaccatcaacccagtgaagagtaagacattgacaaaaaaattcagataaagttaaaactggatattgagaaaaacagctgacacagaaaggaaagcagagatagatgagagtactggaattcacaggagcgtaacagaatgagataaaaactgttttacatgctgtaagaacagattaacttaaaattcacgcctgaaggt

SEQ ID NO: 68098 - DNA, 1036 bp, Homo sapiens
tcccatcctcctttcctgtggtgggagttctatgtgcagagcagaacagggagatctccctgtgaggtaaagcccccatgaacaatagggactctggtcgtcaagacaaccactaaattactgccttcttccctcttttgtgtcttgcctttcttcctggtgcttcagcactaagggttttgctccctctccctgccctttcccctccacggactcaattttcttctgaatgggtggccattttaattaccttcccccttccccaccccacctctctgcccttgcccttgctgctgagaaaggcaggctcaggataactacctggggactgagaatgagccaggcttgctgttcacacggggacaaggaaagaagagacagagacatttggatcctatagtctctgcagtgaaagttttattggttggtacatggaggtctggttttaggaaggattcggaaatagagttttcatattatccaaaaccccctgaggcctcgtcccaattttcttaactgctcagtaccaaatgctttactggtttcagtatttacttccctgagcctgccaggaagagtaagctttacaagtgagaaaactgaggcatgaaatgcaaagcttactccagatcctgccatcattagttcgctgaacctggttgaatttttacagaaggtctgaagtagtctttttctcttttacatgtgcaaacacacaagcacttttagaaatactttttatttttcttatttcatcttgatgataactttgtgaaaaaggcaaggcaagaatttgcccattttataatgaaggaagccagagctcagagagtttgttcaacttttatgtggttaagccaggttcaaacctgtctgtcgcttttcagtgtcatttttaaagtctgtcagtcctgattttctcagaactggattatagtatgtcggtagcaacatagtatggggccaaaaaaaggttgacttgaaagacttcagaggcacactagatttgtgcatagaaaactttcagattggccgg

SEQ ID NO: 68099 - DNA, 1008 bp, Homo sapiens
atatcagctcccaatccttgcaatacaaacagaaaagaaaatatgtattatatagggttaagagggaagtatgattcagttctagtagatctgtccaaatcggaagtcattcatgttcaaggagagcttgggcaaggtgatccagagagtatccgtttgtcctacactaacaaagtcattgttgatattacttataatattaatcacagcagtggcaccagatatctcagatccattctgtaacatcacatacttggaggcaaatcagacgtgacattggaaccccaggacaggtttaaacagcacgtgcttccttccacaaaatacatttgttcaggaaaccttagtttagcatgggtataagctcatttgtggcccttacagtctttgaaacaggaaagaacgtagtaattgttatggcattttaccagaggtgtggtgttcttcctagaaccacatgttatctcaaaatcagactgaagcctcctgaatcctaaccccacagctctgtgtaatggaggtttttcaggaaagtgaatgccaactctttccccacttctgccacggtgtttccataatgctttgtgggggcgagtggaatgcaaggttggaaagagaggaggccttgccagttacacttagtcactagttgtgattttctttggaacagaaagtattcagcatcctggggaaatacagaagaaatagaaactaagtaggcaaaataagtgcgtgtgtgtgtgtgtgtgtgtgtgtgtgtgtgtgtatgtgtatatatatatatatgtatatatacacacatatatatatttagcagatatatatataattagaagatatatatcttttaaaaacatagaaacatttattaggttacaatatcaggaacattaataaaaattgtaaagaaatgctgagcctgtcactgaaccttctagatatgagttaaacctcttttgatttgagtgtagagggattgcaaaaataccagatgattggcatgaaggt

SEQ ID NO: 68100 - DNA, 1089 bp, Homo sapiens
gtggtttggaattcctaccagttctgggttggcaggttggcttctcaaccatggtgggtttcggataatggatgacaagataagaaagaaagctagttcctggaaaaaaaaatggatgaccaaaaatgggtgcagaaatgataatcccagggcaggcctgttttacttgcaacttcggtaaaaaataaaatctttcctaaaggagtcatagcatcagttgggttttatacccaaggtacttatgcaggggagaggcagggaaacctagagtgctgcatttgctcccctactgtcagcattccatatgtgatatgccactgactatttcttaggagtctgagactctatccatgtctgcgatggaatcttttattgaaaaacagacaaagttactggaaatgcagccaacaaaagccccagaaaaagatcctgaacaacctcccaaaggacgtgtggacagttgcgtgtcagatgcagccgtgccagcccaagaccccagcaacagcgatccaggtgagtggcgaggtctctgctcccatggagaagggagccagggtggcatccacttggtacttggggtagttggagtttgtaactttgatttctgttccattcagctgagcatgccatgtgttgaactccagtgttggaggtgctgtgttggggcacagagatgagtagtacatagttgccacagcggaatcaagcagcagaacagggcacaaacacaggaagttctaatccagcaggatgagatcatgctgataatattgataactcattaaacttatttttggcatgctttggcatatcagactcttgcatttcttagaaactttcttcccttagtgtctcagtttcctggtttccttcatgcctttttcgtggcttcttagtccactctgttggctccatgatccacctgccagagcttgatttttggctcgctgtccttattctacacactcttccagggtgactccagctgtagtgttggcttcagctctaacatgtgtgtggtgatgccttaaacattgaatattgtatatcttcacttggatataccacagggcaactgaaatgtaacgt

SEQ ID NO: 68101 - DNA, 1019 bp, Homo sapiens
aggcaagaaggctagcaagtgagaagccctcagttacccagggacctttccccagttctcaaattgatccccaatcctcagccaacactcaccctattctcaagccctagaggaaaggaggtgggtcagacataccagtttttaggcaaagctagaccccaggctcctcagttttccacccggaggagcctgcggtgctgcagaggcagcactgctgaatgtttggttttgccatgggaacctggggcccaactgaccagggatgtttgactaggaagaatattctcttttgactaggatattctctttcctcttttcctggaaaattgagatgtttctttcctactaagaattaaggcttataactgatctctgtttgccatcatttctggaaatcttggctcagaagttgcatatattagcaataaagaggaaagggttagaatggaaacctgcagggcctattttagtaactggttgactactgctactctttcctgcactagggccctagctgttccctggcagcattcaaagccaacatgtggcaagcaagggcaccacatgtacccttactggaaatttcatctatatctgggtccttatgaaaaaagagagagcatgtgtgtatgtgtgtgtgtctctgtctctgtgcttatgtttcatgggccagcaataacagactcacagtacctaaccttttcttaactgggcccatatattgagggatgaccatgatacctctgcttatgagtctctgtcccttgaaacattgatgttatcacttgcagttccttttctggttttatttggaacacaaggggaaaaaatggatgtccaaaaaggatacaccatgaatagcaataatgaaaacttgctctatgccacctgtctgtttaatcttcagcaaatttttaatgagtgcctattatgtgttagctaatctatcctgtgggaatataaccataatacacactgatgccagttttacttagcagaaaccatttcacaagtgcact

SEQ ID NO: 68102 - DNA, 2867 bp, Homo sapiens
gtgacccagtcttcgccggccgctgcccgctgcgtgtgtaagtgtccgtgggccccagggccttgcagcgcccgccccgaggccccgaagaggccttccgcctggggcagtgtgaaggccacagagttttcctccaaagccacacctcagctggaaggggcgagttggagggctctgttagtggtagccatggggagacgcggagctgcagctgtcgctttgcagtgcctgtaggactttgagggcctggagccccggttccctgaacagcacccagatcgccccatatctgagacacagttcatgccccccttccctaactctgaagtaaaatcttgagggctgtcatctggggaagccaccttgtccgttcagccatgaagacagaaacagtgccaccgttccaggaaactccagctggatcgagctgtcacctcaataacctgttgagtagccggaagctgatggctgtgggggtcttgcttggctggctcctggtcatacaccttctggtcaacgtgtggctgctgtgccttctgtcggcattgctagtggtgctgggaggatggctgggctccagcctcgctggagtggcttcaggtcgactgcatctggaacgcttcatcccgttggccacctgtcctccatgccctgaggcagaaaggcagctggaacgggagatcaaccgcaccatccagatgattattcgagattttgtgttatcttggtaccgttccgtgagccaggagccagcctttgaggaagaaatggaggcagccatgaaagggttggtccaggagcttcggagaaggatgagcgtgatggacagtcatgctgttgcccagagtgttctgactctctgcggttgtcacctgcagagctacattcaggcaaaggaggccactgcagggaagaatggtccagttgagccttcccacctctgggaggcttactgccgggcgactgccccacatcctgctgtgcacagccccagtgctgaagtcacctatacgcgtggcgttgtgaatttgttgcttcaagggctggtgcccaagccccacttggagactcgtaccggacgccatgtagtggtcgaactcatcacatgcaatgtaatcttaccactgatcagcaggctgtcagatcctgactggatccaccttgtactcgtgggtatcttttccaaggccagagatccagcaccctgcccagccagtgcccccgaacagccctcagtgccgacatctctgccactgattgctgaggtagagcagcttccagaagggagagcttctccagtagcagccccagtattcctaagttacagtgagccagagggttctgcaggcccctctccagaggttgaagaaggccacgaagctgtagagggagatttgggtgggatgtgtgaagaaagaaaagtaggaaacaactcatctcatttcctacagccaaatgttcgaggtcccctgttcttatgtgaagactcagagctggagtctccgctgtctgaactgggcaaagaaaccatcatgctcatgactccaggcagctttctctctgacaggattcaggatgccctgtgtgccctagagagttcccaggctctggaacccaaagatggtgaggcatctgaaggagcagaggctgaggagggtccagggacagaaacagagacaggcctgccggtctccacactgaattcctgcccagagatccatattgacacagcagacaaggagatagaacaaggagatgttaccgcctctgttacagctttgctggaggggccagaaaagacctgcccctcacggccgtcatgcttagagaaggatctcaccaatgatgtgagctcccttgatcctactctgccaccagttctgctttcctcctctccacctggtcctctcagctcagccaccttcagctttgagcccctaagcagtcccgatggtccagttatcatccagaaccttcgtatcactggcaccattacagcccgagagcacagtggcactggattccacccatacacactctatactgtgaaggtaacaggattaaagctgtgggtgctcacccgggctaggagtgggtttggaaagcagtcatgaagcaaatgttcttgggggagagatgctgttagtttgaagtggttctttcaataggcatctatctctgtgaatggtctgaagctaatatgtaaggcagagtagcgtttatcctgtactcacacaagcaatcctggaacctcagggctgctagaatgctgagggttatattttcagtggttcccaaacttggctgcacctcaaaatcacttgagctgcctttcagatatacagattctgacagactctgttggattctgtatgagaatttctaaggagggggtccctggattctgtattttatttattttcaaatagaactctccagataacatagagtcagcctgtcctaaggccatcttggggaattgcctctctaatccaaccaaccctcttcatgttatctcttgtcaagttgttcccaagtctgcttacacacctccaagagtcaaaaacttgctatcttctgagatagacataggtaaataacctaccttcctaaaacaaagtacaaaatgtaccagtattttgaaaaagaaatcagcagggaagaagttgagaaagaaaattcttggacaagatcctacccattggattttacttgccttccacacttgaatttctctcatttgagtccacaagctaccaccagggacagcctgcttgctacactcctccgaactcccaatccaactaagagggaaaagaccttccttgatctgctcaacacagctgcatcatgacatagcattttag

SEQ ID NO: 68103 - DNA, 1076 bp, Homo sapiens
ttttttttttttttttttttaacagggtctcgctctgtcacccaggctggagtgcagagatgcagtctcagctcactgcagcctcaacctccctgggctcaggttaccttcccacctcagcctcccaaatagctgggaccacaggtacatgccaccatgcccagctgatttttgtatttttttgagagacagggtttcaccatgttgccgaggaggtctcagactcctgggatcaagtgatctgcctgccttggcctgccaaagtgctgggattacagatagatgtaagccaccacacccagccagagttccaagccttgaagagaaaccaggtggtggagaaatcgtgtatggatttgggtaaaggagaaaggaagctgtggaaaggggaagaggctgagccagagttgtgggtaggagacgtacaaggaatggaggcaatgcagagacacggggcaagattcaggtgcctcgattccaccttttgtaattcaggggtcagggatcttgtcttacttttgttgttgctttggtatgctgcacagtgcctggcacataataggagctgaatgtatccttggagaatagatgcatgtgttttgctgtgttgcttcagtagtgcctactgtacatctcctatgagccaggagctgttctaggtgctaagttcctctcttgcagagtgatgtttagtgaaggagatgagggttgcaacttgtatggattagaaaaaaaaggcatcttctcctagcatgcaacttgcacagaccaagtaggagtaggcattcctcgctgacgatgttgttcactagagtccctggctgagtaaacagagtgccagctgcattattttgttaccttcttcagcccttgagcagcgcacaagctgcacaactgtacttagcaggaaccagctgtcggaaaacaaataagtaaacaaacaaacaacgcatcacatggtggaaagtattggggcaggaagtaaactgtaggttaggggacagagtaacctggtgtgcagggaggggtaggggcttgcacgatggtcaaggtggtgaactgtggggagagccatg

SEQ ID NO: 68104 - DNA, 1034 bp, Homo sapiens
ggagggaaattattccctgtctgtattgtgtatcaaaaacgtctactcttttatttctgcagaaacagaagttctgcgttttcactcaggagtagagtcagcagtttatgtgtgttttcttaataccctcttagcagttaattattccttttaataaatgcaatgaaaaagaactgttattggagtcatactttagttgaattagtaatttattctagctcttaatgtttgttaatattctgtgtattgcttcttgttctattagacagatatgacagggaggtaaaacgtgagctcacacaggagttgtgtgggtggaagtctctgggcgatgcatgggccactgacaggtattggtgggtgggggtacatgttgtagagagaggcctggagatgcagcgatgccttctcattactgcaaaagtgactgaagtcgtatggacaatttcttggtcagaggtgaatgaaatagcaaagtctttcatataccacataaaaattttcatctgaaagtgacttctggaatcattaagcctcttcccatttctctagttacagactgatctaagcacaggtgtattctacacttaatgcctcggtaatctggttctgggtctaactctagcgataaattataattttttacttctagtagaaatttacatagttttccatttagaaagctggccccatgttagaattataataaagggcaggaggtatggattaatgttattttgtagggcatgttcagcaaagtgtctcaaagggcgggtaaaaaatgagattctttctttaggttgcacgtagcaagtcctctgaacttgagtgcctttttggtgagattactgagccaagcctgaaaataatgtcgtttgctatgtctggatcctaataggcatgctcttaattaatttaactattacccatcatttgttcattccttcagtcatttctctaacacgtatcgggtgcttactacgcactggacaggattgtaagtggtcagggtacacaggtcacccagaaaaggt

SEQ ID NO: 68105 - DNA, 1086 bp, Homo sapiens
aactagtttagtttagtttctctgctcttctaggctttttccaataaaagattcttcatagggttattataagtattgaatgacttagtgcaccctaaacagctagacataactatgaaggattatcatcacccaaatccttgagcaaagggagaactggtagtattcgaagtatccagccatcctgggcatgcaaggtacctctaggttataactgagatcgtatttgaagtggttctgtgctcaagtggtttgagaagctccgagcaacattctgaggctgtaatcccataagacctttgctgtgttccagaaaagtccacccctgacaaatcaaaggaaatgtatgtgttgggggaagggagaaagacaagatattctagccttgccatgaggacctccctctgatggctgctgtcgtctctcagtcccttgacgtacctgtctggtcttcccttcaggtgcactattgacaaccgggtcacccgggtggcctggctaaaccgcagcaccatcctctatgctgggaatgacaagtggtgcctggatcctcgcgtggtccttctgagcaacacccaaacgcagtacagcatcgagatccagaacgtggatgtgtatgacgagggcccttacacctgctcggtgcagacagacaaccacccaaagacctctagggtccacctcattgtgcaaggtaggtgggcggggcttggcggggagatctggctggccagcctggaaagccttcaggtaaaggtttgttctctgatcctcaacagagatgagttatccttattctacgcatctggggtccagggcacatttctggttgtcattttgcagttagaagctaaattttccagtcattttcattgagtggaactaggaattgtttttttcatttttgttccaataatatattttctcaggaaattatcttgtaattattgctcttcttggcttttttctcccctaagttttagttatttttgtttgtttgttttttgttttgttttgttttgttttttagatttcatccaattccaagactgtgttatgtttaaaaccagacttttaatgcacttt

SEQ ID NO: 68106 - DNA, 3602 bp, Homo sapiens
ctcgggcatgtcctagggcttgccctcccaccagggccagcccaagattaggtcctcagcagcatcaaggtctgggagagccactggcccacatgtcaccattctattcctcagcctccaacaggactcttcattttggggagggaaagggaagatggggccatagcccctaccttgaaattgtacagtgtggaggggatgttagtgcctacctgtgacctttctgctccactgctcagcaagatgaggtaaggttgggtgtcagaggggacctccagcttctctgaagagccagcccttaaggcacttggagcaaaggtcattgagatcagctttatgtggagtaaggaggaggcctgggaaccgcttgtggcatcagttggggcgacaggtggatgagtgtgctctgatggagcttttacggcccacagccactgccaggagcctgagctcttccccatgcttgggacacgttccttggtccccacagcagaatggacattgaattttggtgcttttccctttggtagaaggtggaggtatctgaggagttgtttctgtcttgctacctctgtctactatatagagcaagagtcgggaatagggagatgtgtgagaatcactctcccatggatcagtgtgggccctgtccctcttccccactgtcaccaaccagcagcttggggaaaaggctctgtcgtggatttttgctgcctgcttcccgcttccactcttcttggcggtagatgttcatggtgatccactttgggcggtctgaaagtaggaggtgggggaagaggcaagcctgcacacacacttcctgtccacagggggttgcctgtggcattggagggtggagtctcagagtccagggactgggaggaaggtacttgatgggatggtcttgattctggaactttagactgaggtgttagaaaggggaattgttggctaggggagaagagcagtttaacgctccacttgctaagtcgtctgtatcagtgtcagaaggtcttgacctcccattcagatttaatttcctaactgccaggtgtggggctggggatagagggcccagaagggggcgcagtcactgacgtgaagggaccacatcccgcttcatgtcagtgactcctgccccttggtcttcagtgtttttctcttccccaggagggactttgatcatgcaggatagaattctcccatcgcacacctgggggcaagttttagatgagcttctttcctccatttcacctggtggtctgaggacacacagagggtgggggtgagcaggcagtgtgggtggggaggggctacctcccccagaccccttacaaactctgtacctctcggtgcgcggcagcctcttgctgtagttcttcttttctggatatgactgtcagtttcgtcatgagatttcttgctctcatttcgaactctttctttcttccactttctttgggggcgacccccgatccatgccaggtcttcctgtgaagaccgttccaacctcgtttccatttcttgaatgttgagtattacaacatcactgcgctagggtgcttcatggtgctgttctcgaagaggccagttgggctgaatctccttcctcccactggctcctgatatcttgctgtattttgtcttctttctgatttttccctaggggtttggggtgggtgacttaggggcggcttttgtgttctccctctctctctctttcttttctgtatgtatgtatggactggttaaagtgagtttgggcagctgactttatggtatgggttggctgacttttgttcaacattaaagacaaaccaacaaattgtacagctgcacacagaacacctttgagtgtgaacttgaatggcaactagaggcttactttttgaacttcaggtatgtaactcaaaagtaaataaaaccactattttttcagtaagcttttttttcttctaaaagatgacttagaaatcaaactataagaacatgaaatcggtgctgtaccaaagccttatatgaacatattctacactctgtataacctgtctgtgaggagctccctgctctatcaccctcttctcaaaagcctgggaatgccagcgcgtgccaagcctggggctgggtcttggggacctgtgggccaagggcaccctgggaagtaaaagatgacggtgaggatgggacacccttctgctgcctgagcagactgcaaggaaaccagatgtgtgtgtgtgcgcgcacctgcatatatatgtgtgcatacctgtgcgtgtgtgtgcgtgtgcgtgtgtgcacgcaagagagtgagagcgggagagagctcacaggtgcacagtgtcatggtgaatgtactaagtacgagcttgaagggaggcccaggttggctctgggagtggggcggtgtgggaatgaaggggggatgctctctcccctgttttctgcctccttcccttctccgtcagggaagggaggtgtattggaaacagctacactctcaatcaggtgctttttttccctcaaaatctccaaactcaaagcatttataaggggcccttccaatgggcaggcacccccagccaccaaatcacagacttccaagagtaggaggaactgtctcctcccgaacccttccttgctttcctggggaagagggttcttcctgcagggaccctgggcatcctgctgctgggcctgggcctatagactgccctgccccttcttcccaaacactgagaagaccccgctggagatgaccccaaagccacgcctgctctacggccctaagcaatagacgcctgccctggctgctgatgatggtgatccctttgtcctttgacttggcagtcaaaaatggagtgacaccccagactcagtcaggaagagaacctgcagcctgcctcagctcaggctaccacgccaggctccactcgctggtatttccaggcttgctaagtactaaccaactcatccccagtaacactgcatgttcatatcctgaattacaaatcaaaatgagcaaacacgtgcataagcaaatgagaaaaaagaaggcacacatcaaatgatgagatgtgcagccagtgcaggtaccccgggagtgttgcaagttaaactgatgaaaagacgtttagtatttaattgctcctcatgtaacattactctgcttcagaaatgttttgtattttgatataaataaacatttgctaaaaaagttcattttctaatttttttgtgtacctagggagtgcttcctgatgttgtctcacccctggccctaggtctccctaatcaacccactttaaactcacgactcaacatgattctgaaatggtttgcggctgggagatgaagaggttgcctttcgttcattgaacacacatgtactgagggtatactgtgtgtgagtcactgtttagttcacttggggtgcacaagtgaataggccagacaaggctcctgctcctggagggctttcattctagtgatagggacagagaatgagtcattattgcactaagaaaatgacatcgaatggcataaggcaaaaaaaaggagcagggtaaggggcagctgacgtacagaaggaaggagggggctgc

SEQ ID NO: 68107 - DNA, 2893 bp, Homo sapiens
gggaatctcggagggcagggggttgggctggggaggtgacttgcattttcggccttagaaatgctgcgggcatgcacgtgtggggttttcatataagccatgggaggggcgagtgcccagccctcctcacgctggtggtagaacccagggctttggcctccttttggcatagtggtctatgaagctgtatttctggtggagggatgagcctcctcacggtcatcttgcagttcttgaaagggtagttgtcagccactctatcaatgaggttttatatggcctcccatgaacaacgagaggtgtgccatggccgacggtgtcctggcagggctggagaagggattgtctcatgtgtccttctgcaggcaccaggttgtccccctggtctctaacccccagccagctgtctagtccagtgtttcttttctggattcaggaagtaagtggggtgtgtgtgtgtgtgtgtggggtgtgtgtgtgtatgtggtgtgtgtggtatatgtgtgtggtgtgcatgtctgtgtgtggtgtgcatgtctggtgtgtgtgtgtgttgtgtgtggtgtgtgtatctgtgtgtggtgtgtctgggtggtgtgtgtggtgtggtgtgtgtattgtgtgtggtatgtgttgtgcgtattgtgtggtgtgttgtgtgtggtgtgtctattgtgtggttgtgtatgtgtgtggggtgtgtgtggtatggtgtgtgtgtatctgtggtgtgcgtgtatgtgtgatgtgtctggtgtgtgtgtgtgtgatgcagtgtgtgtggtgtgttgagtgtggtttggtgtgtgtatgttgcgtgtggtgtatgcttgtggtgtgtctggtgtgtttggtgtgtgtgtgtttggtgtgtgtggtgtgtctggtgtgtttggtgtggtacatggactgtgtgtggtgtgtgtgtgtgctatgtgttttgtgtattgtatgtggtgtgttattgtgtgtggtatgtgtgtattgtgtgtgggtgtggtgtgtggtatggtgtgtgtatgtctggtgtgtgtgtgtgtgtgatgtgtctggtgtgcatgtgtgtgatgcggtgtgcatgtgtgtgatgtgtgtgtgtgttgtgtggtttggtgtgtgttgtgtgtggtgtgttgtgtgtgtgttgtgtgtgtgtgtggtgcgtgtgtggtgcgtgtgtggtgcgtgtgtggtgtgtgtgtgtttgtgtgtgtggtgtggtgtgtctgttgtgtgtggtgtgtgtgagagagatttgtacagacatgctgatttgcctgcgtagtgtcaggcccaggagaccctcctttgtttggctcttttgctagacaacttctgtttgggtaggagggtcaaattagtaatgcaccatctttaatgtattttttatggagactgtacataaaattatataaatctacagaattggttctattttaaggagagaggggaatgtatgtgggaggcaaggatcagatgcaatcgtggagactgggagcttcgggcgagtggcactcgggtgtggggagcgggagggcaagagatgagtgccgggcaagatgggcaggggcccgtgccctctgcacacatatataaatataaagaacacctagataaagtctatatatctctatatctatatgaagtcatagtttgctttatttttgtacctgtgcttagagatgttttgagcagtgctaccttcccaggcagtctgggatactagctcatgccttgacgccacctccttccctgctcttcctttggtattctctctgttcagagttgcttgggtctttctgatggaaatgtgtatatatgaaaagtttgtaaaataacaaaacaaataacccacctgcaggaaggacaagtgagctgaaggttgtgtggagctgcaggatctgatagccctaaagaaccaggaccaatgtgtctcttgccacttgggagggatgttgacttgaacttctttgcagaggggcttaacagggcaaggctgaggagatgaaaactgtgactccatccccacgtggctgtggaaaggtaaccagttcctcagagaaaacctggcttcacagcattagaaagggggtggttgagactacctagggacctacggtgacacctgtcttggtttgtagcactgtagctcagacagctcagaccgctcatagagggcatggcaatgggagagtttgtgaggctggctgcctgggcttggtcttggagaacacatggcctgtttagtgttgctgcagattcttagagccagtgtgaatgtggtatgtagtataaatatgtcatctatgtttttttcagttatttttaattggaaataaagtgccattgcaaataggatgctccaatcctgggacactgagtggaggatgaggagggagagatgaactgtgggccggcctgggagagggggtcttagtggaaccttccttctggcctccagccggggacttacaaaactgaacaatgtattggcagaactggacccacaatgggagattctggggagcaggagttcacttgtatctgagcaggaagcagtgtgccctgaagaatacctctctgagcaaattccagacctcacacatatgcaagggctctgccttgcagcctcagcaagcgtctcctggtgctagctccttcctgacttgcccggagctcggagtgatgtatttgaagctggtgctgggccagatggtgcaggcagtgaggagagactcaggactgcaacctttcggctccttattcctgctcatcactcagaaaagggcagtactaacccctttcctaaccaagacatggcactccctaagagctcttgtctatagagtttggtccttagaggaaagcagataccttcagcgtgagaagggct

SEQ ID NO: 68108 - DNA, 5583 bp, Homo sapiens
ccaccccactctaggtgtccccggggcgaggttgctgggctcaggcagggagggccactgtgtgggggtgtgtcctcctccgtctgccaagggcggcccagacctttgtcctgcatgccccctcttttgccagagcgggtgtctccctccagatcctggccgcctgtcttcaggacggagggtgggcacaccttccacctgtgggtcgaggtcaggaagtggattggagactgggcaacacctgtctcctcccctccgccccctgcttcactaggttgatttttctcatctcttccaatgtctttggaagtgaagaggaaagcaatggcttttactgctctctgcttctgtttcagtttttcaagtcctggaagaaggctggacttaatgtccatcttccacaccccacatatatatagatatagatacagatgcatatgtctgtagtgtgtgggtttctctatgtgtgtatatatatatatatatatgtacattgaggcaaagtgctgttgctctctgtggtcagtggaggcaggaggaggagggcagtggccagctggggtttgcgagcagggctggctgcacgttggccaggtgcctgacatctgtcttgggggattctttctcccaaaacaagatccgtgtctctcagctgaattctccgtgtgtctcctaccttctcccacccagagcagaaatggggccttgctgtgattaccggctgccttctatgggggttcagtaatgagttactgcagaactaaattcaagcctttgtttcttggttcctgggtgaagaaggggtggccaggctcctagacctgcatctttcttccttccagcgtggctcacgctgcaggagtagaggctaactcagccgcggggctaaagcaagcctctggtgcacatgtccagcgcatccgtcggcgcccttccgcccagccaggccgtgagctctgtggccaaagtctccccactgcggagccacctgtgctagcgccaagctgccggctctatttataccgtccccggctcagcactctgtgcagtgctgttccacagcggctgattggatcctcctttgcttttgtgggagctaattctccagattgattaattaccacttgtgcggagccgcctgtggctttcccgcactcaccacgtgctgcctgccgactcttctctgccccggggccttcgtcctccggtggacctgagctgcagggggatgagctcaggtgaagctagggcgcctctggctgctggggcctgggacgctctggatcctgccctctttgcccagttctattctgtggctgaggcgtaggaatgaaggcgggaggggtggtgagtagggtctgggcactgactcttcctctgccaaagtctggtcctggttcaaactcgtagcatccagaagcttcctgagatcatcttcccactaagatgtctctctgccggtaagatatggtgctgcccaagggcagggcagaaggccccgagggcggggtggaggggagatctgcccctcccccactcttgtgtaggagccccccttctggcttggcttagaatgaaggttccttgaagtatttccttcttggtgctgctgtcttggtgggtttgggggcacccacctctcccgagttccctgcttggacgtgagccacggcagcattggatggcttctgctggtctcatgcagctgccatgggcttggcccagtgacctcgcaggatgaggccttggatggctgctgtctcttcttggcgtttccatcttaggggatggacttcttctgtgccacaccggccctggtccttcctttcacccagggagctgaggaccagctccacccttgaggtttaccgtgcaagtaacaccaccgcagttcctttctgaacacatctgaaggggtcatggtgagagaggcacgcaggggcttctgagactgggccgtgcacccttggggtggaacctgggccttccagttgatgtgcttctctggggcgttggaatccacttgaccactgggcaccagctctgcgagatggaagagcacacaactctttgtgttcttttttccaggtagcacaccctctgcccccgcgtcgtgatgtgctgctcacttgggcgtctctcctgggggatgacgggagccggcttacctgaggtgttggggtgggaggtgggggcttaccgcaagctgacgtgcagcctttatgcactggcagtgtgagatttctaccccagaggagctcacggggctcagccaggccctgggatgcactgggatgtgggcatcaggctgtcagccttcaggatgaatttggcctacttttctgagcaccctcctgggaattccagccctcaggttagaaaagaagaggagatgatgaggtagaaggctttgcttctttcggatgtcatgagaggctgagatgctcaggccatggctgtgccttccagggcacccccgtgctaacccaggtgctgactcctcctccgcttcctctggcagtgcccatgacctcagcacgtagacccaacgcggggagccgtgcttttcgctggtcaccgagtggctgctgtgctgtggcttccctggctagggcaaggacgtcaggtctgcccatctctcagtggcctgccactcattcagctcccctgagggcttcctcctgtgacagtgtcctcggaggccagcagccctcctgcagcccgtggacggcgatgggattggtggaacgcagttccctccgtggatagagggtgaagatgtcacaggcacaagtttaggtgctgggtgtgggcatgtgtgacagcgtggttgtgagcatgtgggtgatgggggtgtaaccacctctagggaccagtgtccttcatagtctgcctttgaacaatggcagtgactactgatcagcttcttaggacttcggcactcactctgtaggagatcacgccttccaaacttccccttttacggtctggcggccttgcagtagacacgactcagatgtaaacctgcttctgtgtctcagatgtctgtctgcctcttcagcatcatggctgagaactgtggctgttgtagtgtcaggtgacccacagaccaggaagaggggaaaacggttcttagcggggcctggacaactgcatttgcgtggggagagaagatgtacgacgaggcagagaggcgaagcctgtcttgatttgctggtgggctgccgtgggctccctggtgctgagcggggtcctgtgctggattgttggggtggctctgggcccagcatctgggagtggccctgcctgctgccagtctgcctctaagcagcttccctggagagactgggggtaggacaggccttttgagatcctactttcttagcaggaaggacgcctttttcccagcaggctggcggggtctgtgccctcctttgaggtgcttagtcccacaaccatgcgcttgggggaagactgaagccgggtggattgagccgagtatttcttgttatttttccatgctctctgtctttatttttgatttgtgatctaaaatatttggggttgaactgatttaatttattcctctgccctttttgtgctgaggaaactggggtaaggttcaaatgtgaaattttctgattttatttggggtgggggacaaggttgacgaaacagtagcttctagggagaaacagatttcacggagcctccagcatctttggcactgcccacgatctgaatctccagggctgaagactgcgtggctggaatctgtttcttcctattttgttagcaaaagccttttccaggcttgggggtggggtgggggaagaattgtacataaagtacattttattaatctgtagagaaacctaggaaaagaaaagctaatggttaatcttgggcttgctttgcttgcatgtaaaggagctttgggggcactgcagggatggctggggagctgcaggaaggggcagagggtggagctgagcgggtcatggaaggctctgttgagtccagcctctgtggtactctaggagctgtgcacattcccaccggggcttctaacccagccctgcctgggtatcttcttcatataaagtggatctagtaggcagtgtgtagagccccatgtggctgtgtgtgttgctttagggagagggccaaagaggtgccttattggccagctctagattgactagggtaatggatggggcactggtgtttcaggagggggagttggagaactggagggtggaggggaggcctgtgtgctttgccaggtgttggtgaggctggaaggggcacagagggtgaggtcaggcatgggttaggatggtgagaccaccccaggggacaccaagcctcagcatctctttgagtcatgtgataacttagttacttgtaagggtgcagggtacacactgggggatcatcccaagatgacgaagaatgattgcctggtgggcatctggctggggagtggtagccatgcagggcatgtgggagggggatctgggcatcagggacggattgtggggtggggtcctgcatgtgaacgcagactggatcttgggagaggtcttgcttcttagctagatcttccttgcttcttctagaattagcctctaacactaagtgcccaaaccaaacatggacatcttctttatattgtatttcaacttcatttgttttgggggctcctcaggcccaaagctgagaaacttgtcttgagatgcccatcctatcaccagctcttcatcagtggagaaggaagtgccattctcattttcctaagctgcagcggtgggttgcctctccgtccacaatctgaaaatgttcatgggccttggtgatggtgatggtgatagagagggggagctggagcctgacgtgccttcatccccctttcctcttgaggtagagaggcttccttccggccatgaagttgcacagtggcttcgtgaggccttctctttactttctcttcttttgataggctaaagtcactagtctgtggtggaggtgggagggcaaaagagtttcacctgaaactcttggcttgaccagccattcttctctctttaatgtctccagctctgcttctttttagattaagaggcagaatgaaaaatctcttctttagaagaagtcagtaaaccaaggatcaaagcccagattggactttcgcactcttaccagcttgctgtttggctaggggtaccaatcaccacccttccctctgactgcgagtgaatccacactggttcagagccttatttctgggttcctgtctgtactctcaaaaccttctttcaggagcaagtataataaccccaccagatgttctgtgtgttgggttgccgagaaggtggaagtttttttcaacctcattttaagctgttagaaaaacactcagtagattgaatttggtccaaagacaccaccatcccctgagggatcccatgtaggataaggataaatgaagcatccatacaggggtcattaatggctgctcacatcttagagaaggaagagtctgggtatcttggttgccatatactctggtggaacagtggc

SEQ ID NO: 68109 - DNA, 1060 bp, Homo sapiens
ttagcacccccttttctggagatggaggatgattcactgggatgggagctgcttgccccctgctctaatatgcccttttactttccattcaaaggtcttgattgtggtgatttctaggaactccagacgttcagcctacttctgtctctgacactaaatgcatcccagcttgcgttacatgggaaggtgcttactattaaaatctctctgtctgcctttgctagggtcttctgattgctctgcaggttggtttccatccgaggtgggccatgctcctggagctttctactgggttttcttctttccaggagcaatagaaaggcgggtgtcatggagccatcgtgggcaccttgggctctgtaggactgaactctgtccttctgtgggtcagctacttggctttcttccagcccctcttccaaagcctcacacatccgggagctgaattgtggctctctggttgtcctttccagaacacttccacctgcacccgggaacgctgctgcgcctgagaggctggaggctctgaaataccaacggataaagaagcccaaaaagtcatccaagggctcttcgaagtcaaagaaacgatccggtaaatgatgggcagtggcccgccccgctcctcccaccttgccttgccgttgtcaggagggttattgggctgccgttgtcaggagggttattgggctcagggccccaaccttgggctttctctagaattgaatccacaagcttctcttgtcctttgtttcttttttttaacactatttttcaagcaatacacaaacataattttcatatacaaaacgagaaagataagggaaatctatctgattgcccttccaatttgtttccactcacctggagaactgtcgttttcagcatgtgtgcctttggaaacttttctgtgcctacagcttcagaaaatgtatcctattattttagtgtgttttcaaacaacacaaatagtacagatctatttttccactctgcatttcaccttgcacataactctatctccttccttacttcccctctatcatttcaggccttctag

SEQ ID NO: 68110 - DNA, 1377 bp, Homo sapiens
tacctggtcatgatttgggttttgtatggattttttgaaaagagagaaaaagagtgtgggctgggtgccgtggcccagagggcagatctcttgagtccaggagttcaaggccagcctgggcaacatagtgaagccccatctctgcaaaaaaatacaaaaaaatagctgggcatggtggcacatgcctatagtcccagctccttggggggctgaggtgggaagatcatctgagctggggaggtcgaggcagcagtgagccgagattgcgccacttcactccagcctgggtgacagagaccctgtctcaaaaaaaaaaaaaaaaaaaaaagagagagagagaagtaagttccaggcaattgttggtagttctgtactgcaaaaaacacctctgtgccaaggctttgaggccctcatcttggagtaatcccctgacttcctgggagaaggggagccccagggttcgtagcattcctgcatgctttagaacagtgtaggctggttgggaagagaactgtgaccttaaattcttggagagcccaggactggcttctggggtaatggcatcatctatggatcaagcttagatttacctgacagctgaattccagggataggatggagttgcttcactgaagcttcccacctgagacattggcaccaagagctccatgaccaaagggccccaggtggggctggcgttggcaacaaacatggtcaccttcctaaaacagggaggcaattcgattgcacagggctttacgtgctgttggtaaagtctgttaggtcacattctatgtgtcttttctgtaccatgtgccaaaaatagactcattttgcctgccctgcttcctccctcctgttctgccagacaccagcttttgttttttcctcccacattgggtgagggtcttggtgtgtccagagccttcttttgtcctgtggctatgcttcggtgctgagcccagagctaaacaggtggacagcaggtgtcccggaagggctggagcttggctgtttctcaagggaaaatcggctgcttctggtcactggatcattactgtctgggaatttttgctttgacgatacaacttaagcaggctcctctccagccctggtctgtctcaccggggctgttccaccaaagcacagaatgtcagtgctcgcctcaagtacgttgcaaggcagatctatttctcaggtgtggcggggatgccatgcttttcttctttgtagctgctatacctttgtggattgggaagacgctggaagggcagtggagaggtgagcctaatgttaagagtcttggctctttcccacgatgactggatgattcgacaggttgctcacctctctaaacttcagtgtctccatctgaaa

SEQ ID NO: 68111 - DNA, 1077 bp, Homo sapiens
gacagtggggtcctctgcagggtcaggtccctgcagtcctatggggctttgtagcgaaatgtcatcactcccctgtgctccttgccttctgcagcctgaccttggtagtcacaggactgaaatgtgacctagcccttgggtccacattgctttcaaggtccctgttgtagccttgtcgtcctccctgggtcatgctgtagggaaagggtcttaggaggacctccccgaggggagggggcaggcttcccctgggcagacaggcattgagctggcaggaagtgaaacccccagggaccagcactgtgtccctccccctgcccccgcagtcagcctctccttgagtgtccttccaggtggaagctaaaggaacttgggcattcagggagcctctgagtccctcacagagactcagggccacccgaagctcgctccctctcacagtagcctgacaaggtgctgccgctcgccacggaccctctgccctgtgcctgggcacacacaggcatcgggcacctgcatgggagacggcgagcctcccgtccaggtgcttctggctttccaggcgagaaggagacaggtgccttccccccctagagatgtcaagggaggttcactttcctaaccagggctataaatctcattcattcctaagagtggcctccataaagaggactgccctgacatttctttaccatctgtagctataaaattgtcagcagcccagaggccctggaattgtgggtgaggctgtctggcatagggtgagtgtgagggctgtcaggcagcgtttatgagctcacctgctctggggccctcctgcgcccagagacccactggtcttccaccttccccagctccctccctgtcccagctgtgactcctccacagcccccggaggtgtgggagccctagactagctctcaccccagctcctggaaattcctagactctgctctcatgtgttattcctcaccccttcactcaactccattgaccctctcctttcccagtgtccccactgtgccagatccaagagaagcccgctctcctttcactgctgtggcaaacccagaaacc

SEQ ID NO: 68112 - DNA, 1022 bp, Homo sapiens
tgccagtgagacttgatttgaaagtgggggtaagaagcaggggtggtggggagaggctgctggggcccaagctagcatgaaggcaggggccaaagatgcccactgtgagcagctccttccctgtgcggtggtgctccggctctgtcagcctctgcagatgcgcgtgctgcgtggttgctggcttggcctcagcagcctctccccttctctttccttccagaccctccactctccatcacccactgcaggaagagcctggagtctccgtaagtgtctcagatcctgggagaattgtgctgttcatggcagggggcgcataggtagaccgctcgccttacccagccccatgttagtgtttctaagccatttcttcttgattgacctgtgtgttaattgtacttgcccagccccatctcagtgtttctaagccatttcttcttgattgacctgtgtgttaattgtaagttgtccacgctggtagagggagtggcagtgcagatgatccaaattagccagtaatcagtttctcttcagccttggaatgtatttctttagtgttttcccaccctagcagatttgcctccttaatatgtgttgcttaagttgatattaaagtgagcttgcttgtcttgaaaagaggggaatgaagctggaggtgtgcttagagcacagcagagagggggcaggccagcacaaaagtgaagaggcgggtgttcactggaaagacggatgatggggggggccgggcgcggcggctcacacctgtaatcctggcactttgggaggctgaggcaggaggattgcttgaggccaggagttcaagaccagtctgggcaacatagcaagaccccgtctttaaaaaaaaaaggaggattcacgtccagacggtggagagttggccaaagcatttcacaccacgatacacagccagttttcttgagcgtgaggatcctgggtgctgggtggttgccgagagagggaaaggaagtcctggccagcacactgccccacctcatcccctc

SEQ ID NO: 68113 - DNA, 1051 bp, Homo sapiens
ccaacgctttcggtgacctcacgttcgtagcttgaagtcagccattgtaagagtgtttacaccacagcaattggccagtgctaccatcgcttagcattagacacttagcagtcctcctgtgctttgggtgccctgccctttgcaaggctgtgtgcaggatgagtgtgtgaggggacagtggtcatctcaggtccctcggctgactgggtattgtccctggggctgcaggacacgtggtatgagttccgggttctggccgtcatgcaggatctgatcagcgagcccagcaacatcgccggcgtctccagcacaggtattttgggttgagggtgctcttgcaactatagggacataagccccagagctgcatgggggtcattttgtgaaatggctactccacgaggagaagctggattggaaactaaggcagtgcctggttgcagctgcgtgagtcatagcctttcttaagcccaccagacccatatttccatgatgcatgctatttcgtgaagctcagaagctgagtttctgacacttgtataagacagccacagaaagaaattcaactaatcttctcattatagtagtcaaaaaggacttgattgaagtgctatttgctgtacattttcagtttcctcttgtcggggaggggctgtgaatcggaggaaacaacaggtcaaccatgtttatcaaatgcttgtgatagacttctttataattatgtgggttttatttggaaaattgttgtttggtgttttcctcccttccttcctctctctagatttttaaggctaaataaagccaattccctagcattttctccatttatctttctttctcttggccctggtcccatttctacacatcttctctccagctatagttcctgagacatagcaggttcctccgccagtgaaggggtgtccttggtatgggaaaaggctcttgcttataagcaagtgatggcatcatttccttgggcaccgctcacccagagtcccctgggaccaggtgacagtgacctcgtctgaggagctcatgcagcaggact

SEQ ID NO: 68114 - DNA, 1258 bp, Homo sapiens
cttagggagagctggagggctggaatgagggagacggggactgtgcagcatctcagatgagggcagagctgagacctgcaggccaggcctggcgtgcggaggctgggcaggaggaagtttctggggttctgtgtctgggcgttcccgtttccgattgcccgaagcgcgtgtcccaggaccttcgcctgggccctctcagcctgtccttctgggtcctgacggctataatcacagtcacagccaatgcttttggagcctttaccaccagttttaggttctgttccaagtggtctgcacagctcgtccttcacaactcgggaggtgcgagctggggtttctctagtgtaggttcctcgaagcagaggttgccgtggcccgaatgctttctccggcgtcacatcgctaagaagtagtgggtccgggaatcgaagccaggatggggctcctaactgctgtgctgtgctgcccacatgccagcattggggtgggacggagttgtcttctgaggccagagaaccttacgggaggggctctgtggctgtgcctgccgccttaggagagagtgtttctgtgctcaccagagaagcacaggatttgggccaggacgaggagggctctggtttctgttggacccattcctgatgctatgtgatctcctagttggactagaccgcacagtgggacaggcttcctgctccaaccccactaacaagcagggtcaggggagtcggcgcctgagagcatccccgtcgcccccatcccttcacttgcagtattgtgctccgctgccatgcgcttcagcctctcaggttccccacagccagacggtgggcacccagccacgtggctgagttcttttcagtctgagaggtctccacttgatctccaggcaccagcccccatgccccgggcagtgtccgggtccaggtctccatgacaactgccaacgtgtcctgggaaccaggctatgatggaggctacgagcagacattctcagtttggtacggacctctgtgagtcaccccggcatgctttgctctctgcttctcccctccccggtcttcctgcaggctaccccgggtggggggaggtaggaggaggctgcagttcctggcctgccagccctgcacagactgaggtgggttgagacagtgatgaggtccttgtgggtgacgggaggggtctgaagggactctgggcatggctgtgtccctgtggcctgaggggtctgggcctctctgtgccctctccctgctca

SEQ ID NO: 68115 - DNA, 1648 bp, Homo sapiens
tctgtctgtctgtctgctctcccacctggcttccctgtgtctgtctgtccctgtgtctgtctgtctgtccctgtgtctgtctgtctgtccctgtgtctgtctgtctgctctctcacctgcgcttcctctatgcagacccagcgcgtgtcctcaacatgccccctgtgatttacgtgcccgtggggatccatggctacatccgctgccctgtggacgcagaaccaccggccaccgtggtcaagtggaacaaggacggccgtcccctgcaggttgagaaggtgctagagagatgcatgttgagggttggagtgagggctccccccagtactgtgatgccacctctgggctctggatttctgccaggactcctggccccttccaaaagccctgggcaaacagagagctgcttctgtaggggtctgcgggtgccgcccgccccgggctggagctcctgtactatcctgcgtgctgcctggcccagctgggacccagcctgggatggagcgcggagtctctgaccagcgttccctgccctatcgtctgtgtctggcagaacctcggttggaccctgatggaggatggctccattcgaattgaggaggccacagaggaggctcttggcacttatacctgtgtgccttacaacactctggggaccatgggccagtctgcccctgcgaggcttgtcctgaaggtgaggtcccagggctgtgacggcctccatgagctgggcacctggatccccggcctcacgagggtgcctgtgctttcctccccaggaccccccctatttcacggtgctaccaggctgggagtacaggcaggaggccggccgggagctacttatcccctgtgctgccgcaggggacccctttcctgtcatcacttggagaaaggtacctgggccctggagccctgggtctgcagggaggtgtgagggcccagggagccctggggctgcggggaggtttgagggcccagcgagccccggggctgaggggaggtgtgagggcccagcgagcagttctattctggacctgccctgaccaggctagatgccgagcagtgagctgaccctgaagagcggcaggcactcgggaggagggcagcgtgggcgggccggggtctcaggcgcgtcctccccatctgcttcgggcttctctcctaacccccatttctgttcccaccctcttccctgccccttgttcaccaaggtagggaagcccagcagaagcaagcacagtgccctgcccagtgggagcctgcagttccgtgccctgagtaaggaggaccacggggagtgggaatgtgtcgccaccaacgtggtcacgagcatcactgccagcacccacctcaccgtcatcggtacgtggccggcaaggctgggccgggcggcggggacagagcaggctggctgggggcggggtgctggacgctgggagcgtcccctggtggccgctgcactctgcgggctcccttcctaagtcagtgcagccctgaactccgcgtccagcaccggcagcctttgcccccgtgggctctgtcggggaagggcagcgtggctcctgtcctcagggaggtctttctggggacaggcctgatgtccacagcagcccacctgagggaaagaggcggctgtgtggctggc

SEQ ID NO: 68116 - DNA, 1286 bp, Homo sapiens
cccaggaggcctgggtgctgctgccgtccctgatcaggcgaggtggggtttgttccctgctctccccagggccccctttcatcgtctcccctcctgagaacatcaccgtcaacatctcccaggatgctctgctcacctgccgggcagaggcgtatccgggcaacctcacctacacctggtactggcaggacgagaacgtctactttcagaagtgagcaccctgctctgacttttcaatgaggttgccaccccagcccccacgggcagggcccctgagcagaaattgcacgggcaggctgcccgtggctcttggagctgggggaggtgggcagtctggtccgtgtgtctcacatgccaaggccagggtctgcatggaggggccctggggatgccaggggcatgggctctccatgccacatctggggcagtgacggtgactgtgtgtctgcggcaagatccccttctgctcgcccaaccccctgtccccatgccgctttgcagcgacctgaagctgagggtgcgcatcctaatcgatgggaccctgatcatcttccgggtgaagccggaggactcggggaagtacacctgtgtgcccagcaacagcctggggcgctccccctccgcctcggcgtacctgaccgtgcagtgtgagtaggggtgcaggggagcctgggtggtggggctcccagaaggttttggtgttagccagactgtaggctggagggtagcaaagaccaagcatcatttgggggcatgtaggtggaggagcgaataagagaagaaggagggatggctggagaggaggccgaggccctggacagttggggtggagcagctcctacttcgctggccaggcgtcgctgttcagccagtacatctcatcagctccgtgcaggctgcactcaggaagacacctttgagcagttccttctgaacggtggtcctcgggctgaaggctggcctgcacctctgtgcccagaatcagttgctctctggtgctcttttctcaggtgtcttatggagcatagcccaggcccatgcagggttaggtttctcccagccttactccctgcctttccacaccgcgtctgtgtcgggggcgatgtgctccagctcctgcgcctgctccctctggcgtccgcggcctctccccttgggtggctggagatccagatgaatgagctgctcctcacccagacgttcgagggcttttgtgcaagcaccaccattcagcttgctgatctttaatactgagccgccagttgctttcccgccccctggcaagc

SEQ ID NO: 68117 - DNA, 1051 bp, Homo sapiens
ggaggacagaggtgcctacacctgccgagcgtacagcattcagggggaggctgtccacacgactcacctgcttgtccaaggtaggagccatttcctcagcctctttaaccctgggctcccgcggggatgtccagcccggctgagctacggagggcgttttcccagggctcagctggggctagtggaggtgcaggcggccatgaggacctgtgcggggctcctgtgtgctgcctgctgccctggtcagagctcctgcaccggctgcctgggagagggccaggcccacaggccgtggccaggcaccacatggcgtggcagagaggcccctgctgtgtgggtttctggtttctccttctgttcagatagcatctctcccatgtctccgcctccctgggagaggagacctccctggggtcatctatccattagtgacggcatcaataaataaagatagaaactcaatccaagccccagacatttaaataacacagtgggcatttggcagagctggggtctgtatggtcagcacagggagatgccagactgccctgcctggagccccagagtccccagagaggggccaggaactgtgcaggatggggcagcgtcccggtcggggggtctctaccctgtgctgaactcggcccccggcttagcctccccagccctgcctcctggaggaactcgggggttgtgggggttggtggcggctgcatgctcctcctgcctctgagtgccgagcagcagcctgggccagaggtccctcagcagcctggatggaagctgttccctctcaggggagacttggccgcagctgccccctttgtctgtgcagccagcaccaggactgctggactttcaccctctgcttactcctcggcccctgcacccccagctgccctcttgatttctggctggggagcagcccacggccctgactccttgagactggactattcctcgctctagatttgaaaagagttgcctttctccctgctgcatgtctggctcgggctctgctgggagaaggcaggcaggaagggggtgtgcg

SEQ ID NO: 68118 - DNA, 1524 bp, Homo sapiens
ctcctgcattcattcagtggccaccctccgtgcgcccctgctgcgcttgcactgagctgcaggctttggagatgagagatgaaagtggtctagctgtggccttgctcttaagaagtgttttggtatcggcctgcaggtctgtgtatgtgtgaacaccactcatttgtttgtttcattctttcgttcattcaacaaatgtttgctgagcccttggctactacatccaggaactatgctaaaagctgggcatgtggtgacctacgcaaaagggggctgctcttaaggagccaccatcctaataaaggggacaggtaagaaacaggtaaacacacagagagagacagacttgtaagtgatatgtgctttgaagaaaatgaaacagcaccagggaatagagaatgctggaagtgccatctgagatgggatgggctgcccaggtaaggcagcattttagcaaagacttgcataacccaaaggagtgagctccaggtatgtagtcctaagcaggtagagccacacatgcaaagggcctgaggtcagaagttcttggtgcatttgaggaagacaaaggcagccagtgtggttggagtgcgctgggagggagaggaggctggtgccacaggcaggacaagatcctatagcgctctgactagttctcagggcagggctgtgtggggaggagggaccctcccaaagcttcccgtgaatgcctcagtggctcctgaagagctgatagagatggcggtggtactggcaactggtgcattttacaagctcctttttacatgtttattcctcacatcatttctggagggtaggggagttaggtatttaggtaagacccagagaggctgagtaacttgtcaagcctaccagaagtggcaggctagtgcttgaacttgggttctgagcttcaggtaccttgagatgagctcagcttgacctgcgccagcctagtgccgtgggcctccgggctggagttcagaactgggggcctccttgccatttcagaagactctggaactgatagtccaaggggttaagattgaccggattgcttctacaagcagctcaggcaaatgggactgagtctgtgaaaagccgattacccaaacaggatggagttttaatcaaatctccaatgcaggggggaagatgacctgacatgatcagaggaaaatgaagaagggagtggccttcgggtgggctgtccaccttcatccatggaagccagagagggaggaagctggatgattttctcagcagaatctgggaaaatgaggttccgcgtagccttggcctgcatctgtgttaagtcttggtagggctccgacggcaagtgtcctggaaacgcgggggcctggctgagctgggtttcaagaagtaggagctcctgtgtgtcatggatcatcataaagggaaagactgaaggatggtagcaaagcctgaggagctgggagcaggcagtgtttgtaagggccaccctagagtagatgctcagttaacatcggtgacctgggaata

SEQ ID NO: 68119 - DNA, 1051 bp, Homo sapiens
aggaaggaatccaagcaccagcattacgttgctttcaaactagaatgtttaatgtcaggcattttctgacggggatcacctttggaaaatgaaaggccagtgaacaattagaattacaaattgtctcattttccttcggtgttttctttgaagaccagttgggtggaaacagacccaattatttctttatcacatataaaataccccaaaagcctgagccaagccttcctttaggttggtgaattacatggaggagagggcagcctatttctaacctgcactattaattacagggctcttgtaaaaaagaattaagcctggaaatgcagctggcaagctgacatctagttccgtaaataattgacagtcaagccattattttcctgaaaactagaaattgttcaacgtactttcctgattagcacctaaataataaagtaattatgtaattagtaagtaatttgtcacttcaggatgtaaatttaatttattatcttttcttttaagcttggcaccagaggtaatagaggcagtatctgtgttcactgtatttcaaggggcaggccgggcaggcaggggctgtgtcggagataagcacgctctcagtgagaagaggcctgcaagttaggatcccaggacccctttacaggacttcgaataactttttgccattatttttagtatattcttagacactggataagaattgattttttcgaggacatgcgaggtgtatgtttttgcatgtgatgacgcgtgtgaggacgtgcaaggtgtatgtttctgtatgtgatgacgcgtgcgaggacatgcgaggtgtgtttttgcatgtgatgacacgtgcgaggacgtgcgaggtgtatgtttttgcgtgtgatgacgcgtgcgaggacgtgcaaggtgtatgtttatgtgatgacgcgtgcgaggacatgcgaggtgtgtgtttttgcatgtgatgacgcgtgcgaggacatgcgaggtgtgtgtttttgcatgtgatgacgcgtgcgaggatgtgcaaggtgtatgtttctgtatgcgatgacgc

SEQ ID NO: 68120 - DNA, 1097 bp, Homo sapiens
aggctggtgtgggtccagcctgcctagcccagccctgcctgtgggaggtggctggctcctgtcaatcagtcccaagagactgattgaagcatatttgaaatcttggggggattgttctgaccacctggtaagcttttgagtcaccgccttttggtgccagctgttgcgtgagcagggaacaggagcccaagcaaagtgtaattaggaaggcaaatctgccgctaaaacctcgccttgatgaacaccaggctgagggtccccgcattgcttcccttctcgactgtgctctattctgaatgggagggtgaaaccatcttggggcactgcctccgttcttttgcatcatcctgattggcagtgttcatttcaggaatctgagacaccaggcattcagtggacgtgcgtatgactggaaagtagaatctcacttcaattttatgttctggagcgtatctgtgttagtttgcacgagtgggagttggttctttgggaattcctaattgctttgagtgggataagcatggagcgagacctttaaaagatgaggttcgtttcataaacccactgtgtactagctgtgtggctctgggcaaggttacttacctgtcggacttccggttcctcagttacaaaaagcagggactatgatttgcagggctgctgtgaggactaggtgaaatgctggatcttgcacagtgtctggagtgttaattacatgtgggtaattatgtgtgagatgctggccatcctccttctcgagaggaaaaaaaacaaagtcagatgaaaatctagtagcagggatatcaggccggaaggtgtagaggactttggtagttttgtgagtctaccagcagttatccattcgaaacatagttttggacatccactctgtggcaggctctgggaatacagcaggaggcatgaccctgtcctaggtcttaaggagacttcaagagactgtcacatccagagattactgccatatggctttgggagcacaaaggagggagaacttctctgaagaaatggcctctcttcagagacctggctagggaggggagttcgtcacgtgcaggtgggaagtggagtagggtcct

SEQ ID NO: 68121 - DNA, 1033 bp, Homo sapiens
ctgctgctggaggtgggtgccagctgttattctggagccctgccatagggaatggtatgaagattatgatgagtcccctgtctttagctggggcagggggcggggagctgctgtccttacctgatggcctgtggggcttttgtctgctctattcccccaggccgggccagtcttcatgataaggcatctctgcggctggaacaagttcgctctgaggaccagggctggtatgagtgcaaagtgctcatgctggaccagcagtatgacaccttccacaatggcagctgggtccacctcaccatcaacggtgagtgacggcttccagggtgggtccacctcaccatcaacggtgcctgagggctgtttccggggtgggcctgccccaggggaagcccttctcccaactgcatctcaccccctgcccccctccttgttgctgtggtcccatgagacatcagctcactcctgcagtgtccccgctgctgtcttctcgaagcctgtgcaggcagtgcaggtgcccaggagcggcagctccctgcatgtgtggtgctgtcagagtccttagagggacatgggaagctgctacttcaaaccaggagggctgaggctttaaggtggcaaaatgggtcaccgctgggattatttcccagccttgggaagaccctgctaccccaattctggtggagttcctggggtcccagagttagtctttctttttagatcgatgttttggttctctttaactgtattcgtttgattagtatgtaccaagggtgtagtgtgtatccagctctgcagctgatgatggataaacactggcaagcagacctgcacccagtccctgcctgtgcggggtttaccacatagtaaaatgcaggcatcctgggaagcgtcacagttttaatgggcgtcagttattacagctcaggttaaatgccttgtgctggataagatgcttttcaaggatctgggtaagggcaaggaagccccaagagcttgctgagctctgggagttggcctaggctgggggcct

SEQ ID NO: 68122 - DNA, 2046 bp, Homo sapiens
tgtagtggcaggcgtcctggagcagaaagaatgttccctgtgcacgagcggccacaactgggcagtgccgtgggcctccagagggggccgggcccctcacctccatgtcctggactccttgtaattcttggggcaggatgccagcagggggtggggctggatgacgcctgcggctctttgagactggggagggaagagctggcgtgtagggctgaagagaatggcttccctctcttttcctctcccttcctttcccccaagttgtggatgcctgggggccccaggacagagggaggtatgagcagcgagggggagagggatggagggtgtgcctgggaccctcctgggagggtacggtggcccatggagggcagctggtggggggcggggtgaccctgtgacacggacatggggctgctggggcaggatctctttgtcacctcctttctgtgtccaacctggccgtccccatcaggcgcccacggcctgcgagaggagcccgagtttgtgacggcaagagctggggagagcgtggtcctgcgatgcgacgtgatccacccagtgacgggacagcccccaccctatgtcgtagagtggttcaagttcggggtccccatccctatcttcatcaagtttggctactacccgccgcacgtggaccctgagtatgcaggtaaggtctgggcacccggtctcccgcaccttccccagctggagtcagctcctcggtggttcccctctggcccctgccttgtcctgaccactctttatctctgtttcccagtctctgcctggttcctcccatcctttgtcctctgttggttctaatcaagcggtgggaggagagggctgtggaggtggggcagggtaaagccttctgaacagcaccgcctgggctgtggagagggctgggagccaaaggggaagctggagaggcctgggtgggagagtgggatggagaggacagcagactgagtcaggcagccctgggccagcacggctctccctgcttggccgcacccacccctttcctcttggctctgaagtcggggcgccttcccgtcctgagtgtatggatgaatctttggcctcccaccgtttgcaggtgcctggtgtctgcctccttgtcatgctgtcctctccttctcctggccccgtctgtgtcctgtttggcagttactcctgccagcaaaggcctcgtgactcactgccgctgcctgccccccagcccgcgggagaggagggcgtgggtgtgtgtgtgcgtgcgtgtgcgtgtcattgagcgagcgttgttggggttgaaaggaagggaggaagcaggcagggcactgccttcactttcatctttgctggtggcttctgaggtctgccctgcctttctcagaatgcttccgtctctgtccctctttcgctcctgtgcccatgtctcatgctctctttttggccagggttggctttgagagtctagtttttaggcagattgccagcatcaggacgaggaggagagcagaggtgtggtgatattggctgcggtgaggggtgagctaagagcgggtgaggtgggccgacctcgagggctgctccaccctgctggcgtcatggaagaggcttctgcacctctggcctcctcattgccacatgtgagacacagatggcatcctactggggcaggggattagagctgaggaagggtgcctccaggatgtttgctctgatggccaacccattccttgttctcaggcttctgggccctgctgccctcatctcctggggtcactgggctttggtaggatacatagtctctctggcactgacagcaggactgggaggggaccctagcatcctggaccccagcctgccttccctctgccctagagagggaagctgggtgagccagtagtcctggaaatgctgctgggatagggatattgctcagcctgaatggaggtgctcccgggtgcgctggagaccccccacccatcctcttctgttggcactttttcattctctctttcatctcttcacagctctgtatccatcatgcct

SEQ ID NO: 68123 - DNA, 1012 bp, Homo sapiens
ctgacttccttcctgccagtggctcctggggaaaggactcttggaaatacaatctagccgagagcaaattaaggttgctaatagcatcccggcctcacagctgctgggggagcccagccgagaaggctcagggccggagcggcccccgcagaaggaaggagcctgctgagcttgcacctccccagtgcctctctctccttaaggagcggctggggctccctgacccgtggcttccgaacctgagaggtttggtggcgcgtgggggccgggagggctgtgagggcatgaaggggagatcactgaagggtggaaatgctctgaggtgctgtcgggttgggtgtgggggctttcccgcaggcagaaggctgtccagaacaacccgtacccgtctgccttcctgcagggagaacaggacaccgtcggcgttttggaccaggtctctcccccgccgcctcgtcctttctgggtgttcgctgtgctttgggtcccgccttcctcctgccttcctctgggcgtgtgcctcccactttgtgagagccccgggtctgccggcttcctggaatctcctggagcctcctggcttgtcagggaggaggggttgggggactattgggggctgtgccttttttggactcagcagggattatttttaggctggcagatggaggtggcggtggctgtcgctggtattattagacaacaggcctgtggtttggaagtctggtgcccagaggaggaggaggaggaggaggaggaggctgcaataaggacttgtactaatgagcaacggatgctggtgctcactccgttccccgcttccccagccaccagccagacccagctaggggtctcagagtctcaggcagaaggccaggctcctcagagctggtcagagcccacccggccgccttctgagacaggcccaccctatggtcctaggcttcagggtctgggctggcaaaacctgtccccagtgtggggttggagttgccgacctctggctcaggcccta

SEQ ID NO: 68124 - DNA, 1619 bp, Homo sapiens
atagcctccgaacctaagtcagggtgggcaatggacttctttgcaagtttcagcccagaataaaggaatgtgagtttatactgcagcaacacgcagaatcgcaagatagaaggaagggcttcccaaaattgaaggctgcctggcatgaaggttatgccctctttcagggtgcagaggggtccttctgtctggaatggctggacatgtacccctgtctggaagcagagggtgaccttgctggtcttggggtctttcttagcctcaattgctctgtgtgtggtagttaaggacctaggtctagagccatatgactgggattcagattctggctgtgtcacctgccgaccctgtgaccttggacaaattctcaacctctctaaatgtcacttgcttcaatagaaaatgtgccaatagcatgtacttttagggtttttaggtggacatgagtgttataaggaaacaaaacaactacctgttatatagtacgtgctcagtaaacattaacattattttctcagtgtccctgggattccaagatcctcctcaatttctttcccttgggccattcagggcactaggagctgagaatgtgttgcggggaagttcagaaggctgcctgtgtcaggaagtaagacccctttctgggctgaccttgtctgggcagaacctcttgtccctggcatcccagggacacgtgtgcaggatgtgcgggcctcaaagctgctcggaagtcctttgcaaggtctccaaagctggagtgttgttggtggccagaggtttatggaaggacacagcccgggaagtgagggcttgcaacacacagcctctggagagagcgggtgggcgcccgctcgtgtgagcagcaccagccagtgtccacatgctgctgagtctccctgtgagagctcagctgttccctgactggcagaggtgacttctggggcagtccctcagcaggagggactttgagatgccacccttaggatttggccatagcaggggctgctctggcagagggggaaagggatgatgttgtgttgggacccgactccatcagccctcgggtgcgggacagaggttggaatgggctcctccttttgactttgagtgtgtgtgcctgggaggtgattaaggtcagtggacaggttggggaagtgtggagaagagaggggctggagtggtacccagaacctggaagacagtgattggtgtgcactcagtatctcagacggctgctgagccagcccgggggagttcctactctgtgggaggaccctgggccgtgcttagctgattgtggaccttggataggggaggaaagtcccagactttactcccacggctgcctcctctgtctgccacagattctgtcgttacattatccctgactacagtgtccccaaatacagtgaggttctgactcagatcctgctggtagttgggccattgccctctactttctacctggccttgacctatgcttccttttggtaatgaagatgggagggtggaggtttggactcagaggttgctatcaagaccccgtggtgagcctatcggctgagaaggacttcactcaggaagtggtcagtggctggatggatgtgtgtgtgtatcct

SEQ ID NO: 68125 - DNA, 1022 bp, Homo sapiens
cccacacatcttggcagctggaggtcggatccccctagcaggggcgcccggtgagaggaggattgatgaggccagcttcgaggtgtgtccgcttttggctggaccccgccggcccccgcgcctctcagccgcacctgggccccggccaggcaaaagttccccgggagcgcgccgcagccgcgcgggccccacgccgccctccccaggctgcgaggcagagctggctgggggcggcggcgggggaggggaggggcggggaagggggggtccccacgctgtgaatccgagcggaggggggattttctctttccgctttcctgggtctgagctgggggagacgcaaggggggagccaccgagttgggtgatgcgtgcgtgagcgcgcgggcttttgctttggagatgggcagagcgacctacaagcctctgggtggcacccccggctctcggcccttgtatggaagtgggagcggagcctggagggtgccaggactgtgagctcagggctgtcagcgcgcagacacgacccggctgcgggcaagttcaccaagccggaggagatggcggcgggagagaacccgctgtgggtgggagtcagcaggcaggactcgccgacagagaaccctctcccagcggcatggggcgccgggtgggctggaggcgcctctcacggggtcccctcgtcactcgtctgtgcaggggggcgtgcttcaggaaactttccggaatggaatgaatatgtcgcctctgcttctgaggggggtggtggtgtctgaaaacagaacgagcagagggcgaagcgaagggtgattttgttaactgacatgttggtccggacggttttaaaactcttcatttgtcaggtgggaacactgaggcaagggtgatggcggaagcttacggaacggggggtggatgtgaggtgcatcgggctgcgcttgacagtctgcctgtagcctcatcctctcccccatttccttgccgtcttccaatgcccgcatcctcctcccctcccgtttttgg

SEQ ID NO: 68126 - DNA, 1069 bp, Homo sapiens
acttccctcagacctgtccggggtaattgagacccgccagggtcccgttagaagctaccatttccctcaccagaaacttgccacgcagtgtgagccgagagagaagcgggcagagacgctataccaccttctccccggcaatgcgcatgattctgcggctctgtgctcgccacacttcaacgcaccttgaaatgggctcgcctccttcgcgccgcgacgggcggaaggctgagccaatcggacccccggcttgcgggcggcgcccaataggcgggcggcgggggcggttccggaggcccggcccggctaggcttcaccgtggacctggctgcgctccgcccgggcgagtagtgcaggtgccgctgcgccggggccggggaggcgcgcgccgagccgagcggagcctaggagggatggagagctggccacccgggctgcaggagcaccggcgcggggcgtaggcggcgcgaggcgggcgcgaggcgggcgctcgggcgcgaggcgcgtgcgggcgcgggagcactttgcgataggatgaggctccgggctggcgcggtagtactatgatttggtatgtggccactttcatagcaagtgtgatcggcacccgagggcttgcggctgaaggtgagttgaagtgcggcgtccctcccctgcccctcccggcgccctcggcccctcgcgcccggcccctcggtttcccggctccttggccccccggttccccagctccccggcgcgccttcccgcgggtgaggcttgggctccgacgcgggccaggcggcccgggagcattgccggggagggcctgggggccgtgggctggaggggcgggcgggaaggggccagagcccacgggctgccgggcactcggggaaaggacgcagtggaacctgggtcgacttcgcccaccacgggccccacggtgcacaccggcgcgcctagcccgtcgcctcctgcccggcggccgcctcccagagctgcgggaaactctggctgcgggagtttgcggtctccgggcaggctgcagcacgctagagccccgcgccgcgaggagcgcctgcaggga

SEQ ID NO: 68127 - DNA, 1136 bp, Homo sapiens
gagaaaaagatggagaaatgcttatgatatcatttaagtgacacaagctgcaggtatactagtatatactgtatgattacgattacacaaaacatctatgcttaggggaaaaaacaggatgagaatgaaccagactgttgataggggctgtttatgagtggaagtgttacagcaaattgttttctgcttttctttgtttttgttttcctggttgattcttgtattcctttgtctgttttccaaatgttctttgatgaggatattttttgtgtaatgaaaaaagttgcatcttggtttggcttccagtagatacaatagtggaattttaaatttggcactagtaatgggaaaatataatttgtttgtttaatgtgatagcatgtggattgtgcctttttctagcttcttaatatcagccacattggatgaaggagtggctgactggaagttcagttgcttgataatgtattgtttgtgactcatttgagagattagttgccactgacttttgggtgggggagtcagctgtggtgtcctcagcaaatggttagctggaaaactgagagctgccgagattaccggcctccccccttctttttgaacacactgacaaaacgatctgagtaatggcctttgttcacctgttcaaagcgagccaaaatttattgagcacctactctgtggcagcccctggaagatctctgttttcttcctcttgagtgataaaaatacagggtgaaattgacttctgttgaaactagactctgaaagatgtttcccgaagcactctgtcagctgatgtgccccatcacttcttcctgcccaacatggacttccctgttggatgtctttctctaaggaaaatatttaatgtctttagaatgaagtgcagctgcctggaagcttagagacaatgcaacaaatccaaagacagctgctttttttttttttttttttggcaggggtggggcatgtttttcctttaaagcatctctgtcagggtactgaaacttaatcagccaatccatatttatttggtagtctccattttcatggcagtaaagcattccatgggcaaagcaggagaacttaagataatgtcttccctttaccagagggaacatatagtttagtca

SEQ ID NO: 68128 - DNA, 1118 bp, Homo sapiens
atgagtgagttataatgattaataacacctgccaattactgaaaactatgtgataagcattgtgcttattgctctatctggggtcttagtgagcttgggcttctatgacagaataccacaaacagggtggcataaataagacatttgtttcacgggctctggagcctcacctgggtaattttttgaacatttttttgtagaaacaaggtcttactatgttccccagtctgatcttgaactcctgagtttaagggatcctactgccttagcctcccaaagtgctgagattatgggcatacaccaccatgccctccctgaatttcttttcagttattctacttgttatatgttgtggtttgtatacctgtgagtttctttctttcttgagaattctcagttcttatccattcaaatatcacctagcttgtacctgcttaactttttctttctgtgactgcaattaaacatgtttagtcattctgtccttcaatactgttaacctcctttgtcattttttcatgttcttgtctctctgtgctattctgggttctttattcatttttgttttacagctaactttttctgcttccagctgtatctaacttattattgataaccaatcaatacacagtttttccaccaattatattattcatttctaaaattttcttggttctttttataatcaagttgttttttgcttgcttaatttttttactccttttcttttcttttctttcttttttttttttttttttttgagatggagttttgctgttgttgcccaggctggagtacaatggtgcaatctcggctcaccgcaactgccacctcccggggtcaagcaattctcctgcctcagcctctggagtagctgggattacaggcggccgccaccacgcctggctaatttttgtatttttagtagagatggggtttctccatgttgatcaggctggtctcgaattcccgacctcaggtgatccgcctgcctcggcctcccaaagtgctggatcacaggtgtgagccaccgcacctggcttactccttttcaaatttttaaaacattgtgtgcacagctgttttgtattccatatgtgatatttcaaatatctgaa

SEQ ID NO: 68129 - DNA, 1040 bp, Homo sapiens
tataattatccccatcgtatggatgagaaaacagaaagattggtgaacatccaagccagaaacacttgataagcagtagagatagacttcaaactcagatgttctagagtttcagctcttaaccactatattatactgcttccttactagacaaacacttagttttaaagtaaatattttttgagtaaaaaagtgaatgaagtaaagttaactaaagttaatttcctgaaatcacagtgatgtttatgtcttctttcaataaaccattctcggtataagtggtcagccaggatacatgttgctgtgcctggtgctccttgtaactcaggaagatattgccccattctaaacagccagcatggggtaacagtgtaagcactgtgaacatttcttctctgttcttacccatcttcaaacagaaacaaccaggagcagtttaacagtgatacttgagttatgaacttcatacatattgcttaattgtaatggcaaattaatgtgttaacatttatagaatggtactgtcattgaagtttgaatttaaatgtgggttttaacccagttctataataattgctgtgctctgggaaacactgaatcttttcaaggaggacagctatttaactataagtagagtcatttgaaatgcagaagaccagaatatttattcaaagagtggtagcaaagaagtgagatgagaactgaggtggagtgttctttccatcctagtggagagaacacagagctgtgagtcagggtatctggaatctaagcatgtctccaggcttaagtttctattgtgagtttagctaaggcattcctgttgataatactattgctctaataccaaaaagtgtccactagaaaatagagtaacctttgtgcctttgtaatgatagtgttcttttggtataatactctactaccacaagtattgccttttatcatcttaaaaacaaatctgatcatatttctccccttatttattctttttcctccagtttttatcgagtgctagctatgtgccaggaatttataag

SEQ ID NO: 68130 - DNA, 1051 bp, Homo sapiens
ggctcttgcactatttttacctctaaatattacattctcagtagtgccctgcttctaaggctctgaatacaggcttaaagtcatcttatcttgctggaatttgctgtgcagagccataagcctcccattttgttagcgtcagctaggccagtaggaacagaccgggaccttgtctcacactgatgatacctcaaatgttggccggctatgtgaactgcctatttcctattgctggagttttgatttttaactaaatacaaatctgtagattctctcttctcccatcccagaaaacaaaacaaaataatgctttctgaaattgtttctgggacttaaaagtaaaaaaataatggtatatccaaaattctccatttcaaaacacaacaacagattccattaatatagactcaagatcaaaacagcacacgtgctaagctaaggtagacagtgttgactccaagtgttttgatcaataccatgacaaaccttttccctttgacacactctgaattttgtttgggaggagggtgtgtgtgtgtgtgtgtgtgtgtgtgtgtgcgcacacatgcacgcagtgtccatcagtatcagtgcctgcccaagttaggaaaattacattcctggttctgtattgaggagaaggatgtataaagcaacatgaaacattagccctcattttcttttaaattaaagactaatgttaattgttctcaaaactggatttttttccttaaaattaaaggaatctttttcttttggatttaatgaagtattgctagctgaagccagtttgacatagagagatgtcagaatgatttgaaaggtgtgcagcctgatttaaaaccaaaccctgaacccttttaaagaacaacaaaacatgttttacatgctcaaaaaaaaaaaggagggagctggcagatgggaatgataaggcaggagaggaaatgaggaaatactgactcgcttctgctcacaatggccttcctagctcacacggctcctcagattcttctctggaactactgtgttctgtttccccttccctttccta

SEQ ID NO: 68131 - DNA, 1048 bp, Homo sapiens
gatgctagcgaggtcaatggctacaagtacaaagtaaaaaccagaagctgggagttttgcctcttactccctacttcttgctttattgtataatcttataagaagaaatacaatattaaaatctatccagaactaaaaaagaaagcaacaaataaagtgggaagaggatctgtacgaaaaggaaaacatgaatcagaccttgaagcctaaaaggagatcccattgtttgagtaaaaccctatcttggatgagtctgcaagggaagcgacctaaaaaaagcctctgacatgatgtgcagctggcaccgtcatcttcaacacagccatctcttccttccagggaagatgtggaactaagttgagagagagaagagggggcgggagctgcttttggctgcccgtgcagcggcggtggcggcggcacgatcggccgggctgtagccgttgtccgtccgggagcggctggagcagcagtggcggcggccgtgcacctcgggaggcgacaccacagggcagcggcggctgcaggagcagcagcaagacagactcgtggagacgcgccgccgccaccgggcgggtgtcgcgcgctgaggctggggggtgtcgtcgccgctgccgcagaggtaactgaggagaggggcgcctcctcgctcctgccaccgccggacttcaatgcccggtccccgctcgccagcgtttttcgttggaatatacgttgcacatttacggcgattctgagtgtgagggcagacttctgccgggctcagcacagcgttttcgctgacaagcttagaggttctatgtgccataattaacactgccttgaacactcctggacacaccgaccggcctcagaaatagctggcttttttttttaattgcaagcatatttcttttaatgactccagtaaaattaggcatcaaggaaacaagtggaaagcgacctacacttttaacttgcctcactagtgcctaaatgtagtaaaggctgcttatgtagttggatttttttggagtccgaaggtatccatctgcagaaattgaggccc

SEQ ID NO: 68132 - DNA, 1034 bp, Homo sapiens
ttttttagttctggatagattttaatattgtatttcttcttataagattatacaataaagcaagaagtagggagtaagaggcaaaactcccagcttctggtttttactttgtacttgtagccattgacctcgctagcatccgatcccctgtctgggacatgagtgtagtcatctttccatcgatggatgctgggaagctgaatcggtgttgagaacgtgctgtgagacgcagcacagaatgtgagccccgacaatactcaggagaatgtacagctcgttcaagtcccagcagcactgtgtgctcatcctgtagctccttcctgctttgctaattatcaaaatgttggtaggagaaagcacagtgtctgctttgttttttctctacattagacatcagtcctacaagctggttgacaggcctcttcagaaaaagcaccccgatgggttcattttcctcttcagcagaatagtcaactgatctacaggaagcagcgtaccttcacacttgctctatgtcaaaatcatgctctttgtgaaactaaaggtctcactttcctctgtccttctctctctgcacactgctgattggctggctcctcatatgtgaaaattcgtgttctgtatagctggtaggttttcctgcgacatcccttccctgtcccacccttgtcttcccaggaaaagcatagattttccttgtggacaactgtccataaaggtagaatgctagtaatacttgagcctagaaattacttaaccagatgacagtaaaacttagaaattgatcccaaggtcctctggctctctaccctgcatttgctttgctgaggctctctaaacaaatgaggaaaaggctgttgttcagaggtggtgactcatatgcagatggatggccacagtgcgctccatccctgccatctctctttgtcatcctctgtcttgcccatgctgcagtgccttgcagatttgtttatatgcatgactttgtcatctgttgctgagagctgaggaaaacctcctgactggtaagtgcc

SEQ ID NO: 68133 - DNA, 1071 bp, Homo sapiens
agcttctgaatgagtgtctagctctgtccgagtgcatcagctctcgctgccttgacaggagtttctagcagaggtatgtgcacgtgcgctctgtgcgctctcagccacaccgcgggtctcagatcacaaacgatgacttgtgtctgaagtcgccctgcaaagccaacacacagttagagccatcaaggggcctggtggcaagcagggaaaaacacggagtaagtctaacatgggctaaatacagatggaataatcattcttaaaaagtaccatcactagcgcttgcaaagcacaaatcccattagtgtgtgtgtgtgtgtgtgtgtgtgtgtgtgtgtgtgtgttactgtgaaggggctgaggagctcaggagctgcacaatcactcagaaatcttcccaggagacccgtgtggtttccaagggggaatgttgttttccctgctgggtacacctaggtttccaggtttactaaatgattacctcctcgtcagtgcggatgtagttaactccatctggtttccctgggttcttgtaactatgaggagaagagagcagtttagcaacagggttgttatattattgccagcttgaacttcccttttttcacataaggcaggctcacctttctccatcctgtttattgttgatgaagtagccacgtctgtatgcacagcagatgcccaacgtgatcagggccagtacagcaaggacaaccagaacccccccaataattccgccaatgttcaggtcatctgaagaaaaggaggtttggtggaagccatgatacacactatctgttatttaaaaaggccctggccctgctgtgcctccttccttcaccccaaacccacttgccccctgccccctcaggcctaccccagctagaagagagaacacttacaatccttctagcctagaacatataggacaccataactcctaacttcacacgtgaaaagtactgagacttctacagttgaaatgcagtcgcactgaaaagtgtattaaagtgggcttggcactgtaggcttaaaaatcctctggctgaatgcctgagattacttatggag

SEQ ID NO: 68134 - DNA, 1530 bp, Homo sapiens
gctagtgatggtactttttaagaatgattattccatctgtatttagcccatgttagacttactccgtgtttttccctgcttgccaccaggccccttgatggctctaactgtgtgttggctttgcagggcgacttcagacacaagtcatcgtttgtgatctgagacccgcggtgtggctgagagcgcacagagcgcacgtgcacatacctctgctagaaactcctgtcaaggcagcgagagctgatgcactcggacagagctagacactcattcagaagcttttcgttttggccaaagttgaccactactcttcttactctaacaagccacatgaatagaagaattttcctcaagatggacccggtaaatataaccacaaggaagcgaaactgggtgcgttcactgagttgggttcctaatctgtttctggcctgattcccgcatgagtattagggtgatcttaaagagtttgctcacgtaaacgcccgtgctgggccctgtgaagccagcatgttcaccactggtcgttcagcagccacgacagcaccatgtgagatggcgaggtggctggacagcaccagcagcgcatcccggcgggaacccagaaaaggcttcttacacagcagccttacttcatcggcccacagacaccaccgcagtttcttcttaaaggctctgctgatcggtgttgcagtgtccattgtggagaagctttttggatcagcattttgtaaaaacaaccaaaatcaggaaggtaaattggttgctggaagagggatcttgcctgaggaaccctgcttgtccaacagggtgtcaggatttaaggaaaaccttcgtcttaggctaagtctgaaatggtactgaaatatgcttttctatgggtcttgtttattttataaaattttacatctaaatttttgctaaggatgtattttgattattgaaaagaaaatttctatttaaactgtaaatatattgtcatacaatgttaaataacctatttttttaaaaaagttcaacttaaggtagaagttccaagctactagtgttaaattggaaaatatcaataattaagagtattttacccaaggaatcctctcatggaagtttactgtgatgttccttttctcacacaagttttagcctttttcacaagggaactcatactgtctacacatcagaccatagttgcttaggaaacctttaaaaattccagttaagcaatgttgaaatcagtttgcatctcttcaaaagaaacctctcaggttagctttgaactgcctcttcctgagatgactaggacagtctgtacccagaggccacccagaagccctcagatgtacatacacagatgccagtcagctcctggggttgcgccaggcgcccccgctctagctcactgttgcctcgctgtctgccaggaggccctgccatccttgggccctggcagtggctgtgtcccagtgagctttactcacgtggcccttgcttcatccagcacagctctcaggtgggcactgcagggacact

SEQ ID NO: 68135 - DNA, 1013 bp, Homo sapiens
acatggaagacaccagtgtccctgcagtgcccacctgagagctgtgctggatgaagcaagggccacgtgagtaaagctcactgggacacagccactgccagggcccaaggatggcagggcctcctggcagacagcgaggcaacagtgagctagagcgggggcgcctggcgcaaccccaggagctgactggcatctgtgtatgtacatctgagggcttctgggtggcctctgggtacagactgtcctagtcatctcaggaagaggcagttcaaagctaacctgagaggtttcttttgaagagatgcaaactgatttcaacattgcttaactggaatttttaaaggtttcctaagcaactatggtctgatgtgtagacagtatgagttcccttgtgaaaaaggctaaaacttgtgtgagaaaaggaacatcacagtaaacttccatgagaggattccttgggtaaaatactcttaattattgatattttccaatttaacactagtagcttggaacttctaccttaagttgaacttttttaaaaaaataggttatttaacattgtatgacaatatatttacagtttaaatagaaattttcttttcaataatcaaaatacatccttagcaaaaatttagatgtaaaattttataaaataaacaagacccatagaaaagcatatttcagtaccatttcagacttagcctaagacgaaggttttccttaaatcctgacaccctgttggacaagcagggttcctcaggcaagatccctcttccagcaaccaatttaccttcctgattttggttgtttttacaaaatgctgatccaaaaagcttctccacaatggacactgcaacaccgatcagcagagcctttaagaagaaactgcggtggtgtctgtgggccgatgaagtaaggctgctgtgtaagaagccttttctgggttcccgccgggatgcgctgctggtgctgtccagccacctcgccatctcacatggtgctgtcgtggctgc

SEQ ID NO: 68136 - DNA, 1401 bp, Homo sapiens
aggtagaagggacaggacttggctgctgattccatgtggaggagctgctcacggtgccatatttccagcgcgcatgctccagtcactggctggaaaccagcaggcacgcgtggaggtgcagaggcaaggagttgaagtgtcctcagggaatctgggtgagccacagtaggaggtgtagtaagtgggacagggcggtcaccgggacaggggcaatgatggaagacggcgggagggaagccagaggcgtgaacagtgaggcccaggggccagccgagtgcctgagggctgcgggtcagagaagggggtcagagagacggaaaggagcatccccaggaggggccctcaacactgccaggccctgggacagggtccagtggaggtctgagggccgccgctgggacactgatgtggacaccctgcctacgtcccacggacaactagaacagagacctccgatagaccacgcggctttcactcagtggtgtctcctctttatgcagagagcatcagtgatgtcacgtttggagcaggggtcagttacatcgggacaccacggactccgtcgtcagccaaaggcaagttcttggtgtccttctgggctgatagatgcactgcctttgaggttctgggaaagctgaatgtgtttgtttgactcccttttagagaaaattgaaggccggagtcaaggaaatgacatcttatgtttatcactgcctgataaaccgtaagtttagcagtgttccttttgaggtggatgtttctgtcagggtttttctgagttccagaatgactgcacatgtcctttccctaggcccccacagcctcagcagtggaatgtgcggtctcccgccaggaataaagacactccagcctgcagcaggaggtccctccgaaagacccctctgaaaacagccaactaaacagcgcctcccaccagtgtccaggcaggcaggagcccttgaggaagcagtctcgtgtcctccgtgtgaaggcagctggatcacttcccgcagtccttgggcagcgctttgctgtggaacacgagagctcctcctcaggggcctggcactcaccttctattctgtatgatgtatttggttaaacactgtcaaataatagagatgtgccagatttagattttcttaccctaatctgtttaatattgtaactttattccatttgaaagtgtcaagcccattcagataagctataatctggtctttaaggaacacaactttaaaactgcagctttcttttatataaatcaagcctctgttaacttgaattccttatagtacatattttcccatctgtaatgacgaaattttgattctaatattttttctattatttataagtgcaaattttttaaaaaagtgtacagctttctaaaagtaataa

SEQ ID NO: 68137 - DNA, 1023 bp, Homo sapiens
tcagtggctttatagcattgtggctgtggaaataactgatttattactatcctgttctttgaaatgttgattttcaatttttccatacaaatactatcacagtaaacatccttgtacatatagccttgtatgtatgtaatccttgggattaattcccagcagtcaaaggccatggatatttaaaaactttggatagtgtcaaactgtcctctatcacttatgccaagttagactcttttatttttttgaatcctaatgagaatggacattttttctcatgtttatcatttatttgtatttcttcctgaattgcctctttataagaaaattgtaaacactagtgattttgactttacgtcttgcagatatgttttctcatgtggttgttttgctcttcgttattgtttgggggtatttctggatagcagcaccttttctgttctagtgtcttcatacagtttggagcaagagtcgaatggcgagattgagcacgtgaccaagcgggccatcagcacccccgagagtgagtaactgatcggaacacgtgggcttctcctcagtctctcctgcattcgtgatgtgtttgctagagtcgcagtaaaactccttccggtgcaggatagttctgatggtcagaaccatgagtgcattgctgaggtggagtatttcacagtgaccacggtcgcttgatccatgagcactgaccgagtatgttgttccagtgtcgttacattcagtcagtcaaacaccacagtggcccgcggagcagacaatgccgttgaggcacaggtaggttgggtgactgacccagtggtgccttctggaggcggccctccgtgtctctgggctgtccgggtgcactgggcgctgctgggtgggcctgctcccagggcgggcagacgtcagcaccagcaggtaccatgcacgctctgcaactgccaagaccagagacccggggacccctgctcggagcctgtgtctcattcccctccatgttttttcctactgtttgtgcttttcctt

SEQ ID NO: 68138 - DNA, 1135 bp, Homo sapiens
aatcaggtactatatatataaattcatagtattttgtagatgtgtacacagagagagagacagagctggctgtcttcatgcttagccatttttagaccattgtcccttcaccagcaggaatacgaagtgtccctctgggtagccagaacgagctgacttctgttccaaggggagggtgttgaattgaggactgaaggtggagcaagagccaaggtccctcagggtcttctgtggagatttggggcttttgtcaaaagctactcaacatgtttctaattctttttccccatttagaatatatgagtagtatttgtccccaccctatcttacaaagccttcagagtgttttgaggtaatgcttacaaagtctcccagagaaaagcagaggtcctctacatccagtatcataatgaaaagcaaaaataaacttacatagtgtggtagggtggctctactcaaagaactagatcaaggagaggcctgtctttcagaagttcatacatctaaaacatgtctttgtttgtgttaccaggttcagaagaggaatttcatagaaaatattattccaattatcatctccctgaagactgtgctggagaaaaataagatcccagctttgcgggaactcatgcactatctcagggtaagggtggagcctgtgcttttgtggttgttgtcctaccagttcattacttaggatcttctgccagttatgacagtgcaggcaatccgtgaatgattagaaccccaaattctgcaaacccaacattaccttggtaactgctgtggagctaggggttggctgtgggttccaccaaagccgctctttcccttggatgtgcagccagggccgtgaagagccggcccactgtgccaagcacgtcttcccttaatggagttcaagtccatctggaaaactttcccagctggggtcaagaacacagtcatcttcgttcatgctgcttgggggtaaggtgaaagtgagtcttcgggtttgatttcagggtgcttaccttttgcactgactcagattcacaaggtcaggaaataactgccctgcaggagctgccttcggagctgccatcaccaggctgaattctttgtcaagcaaggggaccatgaggagctcagtcgg

SEQ ID NO: 68139 - DNA, 1165 bp, Homo sapiens
tttgtgtcacaagtgagcatgccactcccctaagcttatgtcacaagtgagtgtgcccctccccctaagctcatctcacaagtgagtgtgcagctccccctaagctcatgtcacaagtgagtatgtagctccctcaagctcatgtcacacgtgagtgttcagctcccctaaggtcatttcatgagtgtgaagttcccctaagttcatttcacgagtgtgcagctcccccaagctcatgtcacaagtgagtgtgaagctccctaaactcatgtcgcaagtgagtgtacagctcccctaagcttattttacaagtgagtgtgcagctcccccaagctcatgtcacaagtgattatgcggctccctcaagctcatgtcacaagtgagtgtgcagctcccctaagctcatgtcacaagtgagtgtgcagctcccctaagctcatttcacaagtgagtgtcccactcttctcaccatctactggcttccgtgttctccctggaatcctggtgccatgctctggtgctgacttctttcttactgatggctttaactcttgccagatggtgacaattctcaaacctgtttcccactccagcatttctcatgagcctgagctcaggtccccctgctgccaggacgtgctccgggtgtctctgacttactctgtcaaaactccctcagtcatctcttctttctgctcttcatctcctctttctcccacagtttatggtgctcttgcagactggagtctggtgtgtcaggctgaggcttttgttggcaggaagtgtagaatttggatctgaatgactggggcagagcttggctgccacaggcctctgcaggcctgtgttttcctcctagcctggattgccaatgtgtatttcccacctggcctctggaggcttttgactccaaggatatagactctgatcatatcttgccacaagatcctgcctgttttctcttaccaatctatctctctagttctgaccttatttaagcttatcccatttccatggtttccttaccaccctttctgtttctggtttctttctgtcacaggccatgtaccaccttgctgccagagcagtctttctttctttttctttttttttttttttttttttgagacagaatctcactgcgtcgcccaggctggagtgcagt

SEQ ID NO: 68140 - DNA, 1037 bp, Homo sapiens
aaagtcaaacaaagagagacgaatgaaaatctacaaatttcttctagagcacttcacagatgaacagcgattcaacatcacttccaaaatctgccttagtattttgggtaagcccagtgtgtgtgggagaaaatgtgtgtgtttgcaaatgaaatgctgtgttgataatggcccagcaggcctctagtaagggagaccctggcactgcaggaagacccctgtcatcttgtccttctctggcatcagctgtgccccagacaaaacacccttgcagaccccctgacagcctcagatggccccccagttgtgggaattacacctcctctctgggccagagcatttctcagaagctcacgtttttctctctctctgtctctcagcgtgctttgctgatggcatcctacccctggacctggacgccagtgagttactctcagacacgtttgaggtcctcagctcaaaggagatcaagcttttggcaatgagatctaaaccagacaaagacctccttatggaagaagatgacatggccttggcaaatgtagtcatgcaggaagctcagaagaagctcatctcacaagtgagtgtgttgctcccctaagatcatcttctcacaagtgagtgtgctgctcccctaagctcatctcacgagtgtgcacctcccccaagctcatctcacaagtgagtgtgcacctcccccaagctcatctcacgagtgtgctgctcccccaagctcatctcacaagtgagtgtgctgctcccctaagctcatctcacgagtgtgcacctcccccaagctcatctcacaagtgagtgtgctgctctccctaagctcatctcacgagtgtgcgcctcccccaagctcacctcactagtgagtgtgcccctcccccaagctcatctcacaagtgagtgtgctgctcccccaagctcatctcactagtgtgcccctcccccaagctcatctcactagtgagtgtgcccctcccccaagctcatctcactagtgagtgtgcagctcccccgagctcatctca

SEQ ID NO: 68141 - DNA, 1021 bp, Homo sapiens
gcctgtttacatctggcattgaaaatcttcattttggtagggtcctggtggcatctgtgtcccatgtgcagcattgcacagatatgttgagggcatgggtggaaggagagtgcccagggcttgctggtgattccaaagcgcattgagtcagttgctttgcagagggaacttgtcctcctgatccaaactgtgaagctcttgtcattaatccttattcttgaaaaaagttccagttactaaaattggtttttgttcataattgtgggcaacaaacttgaagttgggaggtgaaggccagatatcccttttctggtgactgttgtcattgcatcagtcttataagaccactggcctctgattgcagaagcagctttggggttcagttggtcgattactttccccacttgaactgcagctggatgacaacaccttgtgtcaattttgaaaggaaacctggtggaaaaaatatacttaccttggattagaaaggaagctgtggagcaaggacagaccaaatagctgaatttctgtcttctttggatccgagggaactgtttattgggatagattttgaatccctacgcttatgtacagctctcctctgctcagcagagttcttggtgtattcagagactgttggtacatagcaaatgggtctccctctttgtttctctcacctttgcagcttcggggagttttgcctggctcacctgttactgaagaggaaccctgtcatgttcttccaacacttcattgaatgtatttttcactttaataactatgagaagcatgagaagtacaacaagttcccccagtcagagaggtcagtgaagcagctaagtctggtctccttgtatctgggtaagagctgggggaatcaggggaggttaggctctttgcatgtagtgattggacgcagaccctgccccaggtctttactgtggcttggcaggatggcgtaagaaaatacagtcgtgagaatcgcttcctaagggcagcgcctgtgatgagcactgggatc

SEQ ID NO: 68142 - DNA, 2065 bp, Homo sapiens
tacacactgagagcccatgtttggcctataatggggagaacacctttcacttaggttgtatgtctgtcctggtatgttctgtatgctcatcttttcatgtattacgaaccgtattataaatagagggtggcaccatccctctaatgccatgtgctttgagtcatttttctcctgtggtagaagggtgatgttgttctgcacatacacttctcggcactacattccgacggtttggaagtgtgtgcctgtgcactcagccagtgtgccggggacagaccgcgtggtgggtggggtgtggctgggaacagtgaggcttgcccatgatgacgcactctgaaacatgccggcttctctctgcacaggaggaatttgtgaaatggaagggctccctgttcttccgatttgtcagcactctgatcgattcacacccagacattgccaggtaaatcttttcctcacgtcagacgactcaacagtttacctcatttctgatgtatgctggatttctttttttttcagattggtttagagttaagtaggatttagtgagctttcggtaggtgccaggaaaattagcagatttttaagatgctaagcaatataacaaacctttgttttgcacacaagtttaaaagaaaatggttagattcatcattgaataatctcagcattgactgcacttgctgacagtgtttgctgttcctgaaggagcttgaagaatattatatgcttgctgtattacactgtatagagtagcagccactagaaactcactgttaatttctaggcaaaaaaaaaaaaaagttaattttgataaagagctgagactttaattgcagaaattttaaggaggaaactaggaattaagatgaaattgcacaatgtggaatcaagtgtacagatgacaagactccttggaaatgggcatttcttcagacttctgtggcgtgggggagtgactttggcaattattaatttctatccttgcatctttttttttaaagatttttttcaaggggttgagaaatggtctgatagaatttgctaccctagagtttgttgtaacagtaattctttttcaagcaagtctgcagttggaaagtagaatgctgaatgccatagcaaaagccccacagtggggaagaggtctttacagagctcattaactataaatggctgctaacagtgggtccctctggatctaaatatagccaccaataatttaccctgagttccgtggaagtttctgctcagttttctttaggtgtgattttccaaggaggggaacatttcacataacaaaccagtaaaactaacattctacttactgctttctagaaccagaggcaaaaagctaaggctgtcacctttttttagatagcttcacacaccctcttaccttcacaacgtgtccactatactgactctcaggactttttacgcagtacgtggcccaggagaaggtgtaatcagacaggctgggaatgctttcagatgatgcacctgggaggtaaaatcggttacttaacctgcatttcctcatttttccccgctgttgttagcccctatatgtgtatgtgaaaaagagcaatgatcaatgagtaaactgtatgtgggatttgtacatatgggtgttcagatcatcaatcaaatgaagagcatagatatactttaccgtgtagtaagattaccagggcctcttctagcattttaacacttcccccttaatctatcccttttatgtccgcatcctgggtttgttgaaaccatggttcaaatgtagaccatgattttcagctttgaaaagctgatgactacatttgctaactgtaatttaagttagtctgttctctggaaattttccttttctttttatttgacgtgtaataattatacatatttatgggacagagagtgatgttttgatacatgtatagagcatgcaatgatcaaatcgggataattagcagaaccatcacctcaaacatttatcatttctttgtgtcaggaactttcaaaatcctctccctagctttttgaaaatagacagtaaattgttgttatt

SEQ ID NO: 68143 - DNA, 1524 bp, Homo sapiens
gtagctgggattacaggcacatgctatcaggcccagctaatttttgtatttttagtagagacagggtttcaccatgttggccaggctggtctcaaactcctgatctcaagtgatcgcctgcttcagcctcccaaagtgctgggattacaggcgtggtaagactgaggaaagagtgatcaggaggaattaacgttacagactatgaaaccacaagccttccaggctcagtggtacacaacttactaccggcagagctgggactagaactaaggcctctgactttttcctaattttcttttcaccagcactggttggaaaaagaatcatgtgtacagcgcgcagtcagggcctaggaagtcatctgccgcttgctgctggcccagggccattaggacggtggttacattgtcatgagagcctatgaggaaggcaagaactgtcttcaggttagacactgagagctggaagcgggtggggcttactactgcattagcaaagaccgccacggttttaatctgccgacacaacctcacttggtggttgacagaggagcaaggccctgagattgtctggaatgttaggatattttcaatccatgtgacccgcttgtttcccctaaacacgcttctccttttcttttctctgtaagtgaatatcatttattttactgagagcaacagattacccaaagatatagctcagcagcagtatatatgaaaggactgtggtctttgggcatttttgttatctgttttgtgactgtcattaaaaaattgatgagatcttgtatcagtagaaatagtgtctagaacaagaggagcagtgatcctgtgtgctggctgatagttcagtatcagtgacaaatttacagagaagtgttgatgaaattgaatataactagaggagagcagttaaataagggtatcacaaagcaagttatgtaaggaactgcagaagggcctggagtctttagcatggagaagggaagggttggggacggtaggctgcctagctaaattcaaatttatgaaggactttcagataaaagaattggatttatttggtattcccagacaacctatctggaccaatgaatggaaattataaattttggtgaactgcagagaaaacttactgaggtctgcccaaaatggtgggcttgccccagagcatgtcccctgttattggaggtattcaggagaagctggacaaggacttggaacaggctgccatgtggagagaatgccaggattgggtggccttgtcagctttcccagattctgtgataccgaaacttactagtcctagtacccaggttctggcctcattgggatcaagcataagaattgcagaaactctttgggccaatgttgtggtccaggttgtgcaatctattaaaattttaaatgtaatagttcttttagaagtaataaagccaatagtttccagatacgttagggcaagtcagactaaaagcattgctcatagtggtggcttgccaggcactggatgatggttaacaca

SEQ ID NO: 68144 - DNA, 1054 bp, Homo sapiens
agcctgggcgacagagcgagactccatctcaagaaaaaaaaaaaaaaaaggacaatgttactaatttttgtcactataactgtgtaagctctggatgtatctgtaactgaccccatgcagttatgtagaaattttggaggggaggaggataagaagagtctgaaatgaattgtgaaattttattctttactttaaggaatattttatgaggggaaaaatgaatataactgatagtagaataataaaaatttaaaagatacctagtttggtatcagacacgccactaattaggaacgtctacatataagtttcatgtgccacttgagtcctggagcagcagaagttgataccctttcagtgaggctcccatctgaatcattttgtatatttacagttgcaattctgcttttctatcttttttttttccagccgatatttaaataaggcttttcatatctggtccaagaaagaaaaattctcacccacttttataaacaatgtaatatctcacactggcacggaacattcggcacctgcctggatgctgctctccaagattgctggctcctcacccaggctggactacagcagaataatacaatcttgggagaaaatcagcaggtttgtatcttctaatttaaccagtaatgacactgaagagtcttagaaacaaagcccaagacttaaggaagtgagctttttcatagctattcatatacagagaccttctgtttaaaacctggtataaaaacaagcatgaaaaaaataagaatcatgtttcacccatttcccctttgtccaagtacattaaatgccttgatgttcccacagcttgactcctaagccatgctacctaccctgcttcctccagtgttattaatccagaagaaaggcctttgttggcagcagtgtttaacttgcttctcccttcatattcctcctgccctttctctagtcagcagaatcccaattcaaacaccttaggacatattctctgtgtgattgggcatattgcaaagcatcttcctaagagcacccgggacaaagtgactgg

SEQ ID NO: 68145 - DNA, 1587 bp, Homo sapiens
attagttttgaagtgttctaaaacctaaaatttattagtcatttacgtaacatttaaaggtcattgaactagttgtactcactgactttcaacttatattacagaatatgtttcagccatcctgcgggtggatattggttggtcaacttctctttttgcttttcaggtggtagataaatcagagtatcgtacttttgcagcccagtccctagtccagctgctcagtaaacttccttgtggggaatacgctatgttcattgcctggctttacaaatactcccgaagttccaaggtaggagatagctctgcataaaaccttgggtcctttttaaactctttttaaaagggtctctttttctaggtctgaatgaggagggttctttggttcttactcctatctgatggcaattcttatgatcttgctttaccagatcccacaccgggtttttactcttgatgttgtcttagctctgttagaactgcctgaaagagaggtggataacaccctctccttggagcatcagaagttcttaaagcataagttcctggtgcaggaaattatgtttgatcgttgcttagacaaggcgcctactgtccgcagcaaggcactgtccagctttgcacactgtctggagttgactgttaccagtgcgtcggagagtatcctggagctcctgattaacagtgagtatggcgactattgggacagtaaaccggtcttgtgctcattgagaaatagactgcaagggaatcgttcttttctgtggcaaaagtaataggtatggcatgatctatttttactctcaaaaccatttttagtatattttcttgccaaataactttttaaataggcaagcctgatacatttgcaaggccttttaaaagtatttcagatgttcatatctgagaggtgacattggtggctacctttactgttgctttgcattggtgggcattggtcgtattaggatgaatctccgtttcaatgcatacccaaggagaacgttatcagttgtcagcaatttagaatctgtctgccttgtctttgagcctaattatcttgattttgattcctccgtggataattactcagtttatgatactgacttcttccttcttatctttcttcttgtttttaggtcctacgttttctgtaatagagagtcaccctggtaccttactgagaaattcatcaggtaatggatcaatacattttcaaatattgaatgattatcttttaaaaatttgtggaatatttaaaatgtttttcttacctccttatttacctgctttaacattgtacttttttcatgagagaggttgaaattcatttcagtaataatgttgtaacttaaatgagtaacatgccctgctaatgttattaaaagtataacacatttttagcttaatgactgtaattttttttttaaagctttttcctaccaaaggcagacatctaaccgttccgaaccctcaggggagatcaacatagacagcagtggtgaaacagttggatctggaggtatgtcagattttatcactgtcagataggtaatactgctggatttcagacaaccgtaagtagag

SEQ ID NO: 68146 - DNA, 1026 bp, Homo sapiens
taaggactttttaaaacattaagtaactaaaatgttttaagtgaaaacacgatcgtttcgttttttccatgagagtttctcatatgccagtcgcaatagtcttcatgtaatgttacagataaacatcactaaaaatggatcaagtctgggcattgtagaaatttcttcttgaggcggggcgcggtggcacatgcctgtaatcccagcactttgggaggccgaggcgggcggatcacctgaggtcaggagttgaagacgagcctggccaacatggtgaaaccctgtctctactaaaaaatacagaaactaggcgtggtggcgggcacctgtaatcccagctactcgggaggctgaggcaggagaaactcttgaacccggtgggggaagttgcagtgagccgagatcacaccattgcgctccagcctgagcgacaagagcaaaactccatctacaaaaaaaaaaaaaagaaatttcttattgggttaaagtttggagaagtaatgttactaatgcatttcactgagctaccatgaggtggtactgtgtcttagtcaatttttatatttatccccaaaggatatattttacatcttcatatgaaatttagtaagtagtcaaaagaattgtatgaagattacatttttgttcttacctgatgacttagctactctgcagcagctctcaaaactgcacgggaactacttcacagttttctacgatgacattttatgtcttcactcttcattctactgaaaccactcttatagcgtgaggtagagtgttttaataactaggatttctaaatataggagtagtggtttttggggacagtcgctgactgtattgtgaacagtagatgtgtttttcttttacaaagcgcccttgtggatgaattaaaggagagtatattcccagtcgtccgtatcttactgcagcacatctgtgccaaggtactgtttgccttagtaatattaataacatggaagtatatcgtgtgtgaagataaatgtgtgtgtgtgtgtgtga

SEQ ID NO: 68147 - DNA, 1035 bp, Homo sapiens
aatatgttggaaagtgctttgtaaactggaggcaaaaagcaggtgtaaagtatcgttctttccccttttgaataagggaacattagtagcattctttgccctatgtaaatgacagttaattccctatttgtcctaaattctgggttatgatatgcaaagggtggggagagaaactaggtattgtttttatcagacatatcatctgtcagccattctttcacactgtttacattgtgcatttattgtatcctgctcattgtttaagaaatatatccctagtgttcagccagcaattatgccagcctgacctaccttcagatggcttgaaatggtttactacagtctgcatcactatgtctgagacccttgtgttctccatccgatcttaaattgaattttcttttctcttctaggtcatcagttgtgttttccatcaaatgctcagtgtaatattaatgttagaagttggtgaaggatcccatcgtgccccccttgctgttacctcccaagtcatcaactgtagaaaccaggcggtccagtttatcaggtgaagcacacaaatcgtgaattttcaccctgtcagtctccctcagtactctgggccctgcactaagatttctgatacatgtagacttaaaatttctggcctgatggtggttttgggggtgaaaaccaagcacttcgtagctaatgtgctttatgtgtctgggtctctgttggtaggctcccagctggggcactgttaaagagataggaatctgcagaacacgggccagcgccagcctccagcttgtttgcgctcaatatgtgggtcagcctcagagagaggatggtggcctctcctcctttcccttgtctgcttcattgcagccagttcacctctttcccttttctgttgctctctactttgcagctctttgcttttgttctttgccactttcttcttgtttctttgcacttttctattcctttccctctgtagaaatgacttgaaggaaaggattgagttgctttttacctccgtagcaataagtg

SEQ ID NO: 68148 - DNA, 1047 bp, Homo sapiens
gcaaacactgtaacaattttgttcatttagaaacactttaatttctttccctttgtgtgctttgttacactgtgcttgctgggaggcacttttctgcatttatttgcctggcaaaactcttacattcaggtccaattgaagaatcatcttattcctctccctcctcccccagtactattccctattaagctctgtagcattttacattttacatatctattattttaacactcatccatagcaaaaataataaataccatctattgactgttttttatgtggctagcacattgttagggcctttatacacattatgtttcacaaaaatcctgtatttccaatgatgaaggagagactaattatgtgtaagtgatcaagtcaggatatttgcctcgttctgactcaaaattcagtggcctctcttctatcataggctgctttttttggtatcctaagtgtgaaatgttgagatctttgtggacaagaaccctctagtattcatctttatatccctagaagtataagtggcttccctagtattttctcaaagtgtttgttgagtgaataggtgatgtatttcttcctcttcttccatcctaagtgaagtagcagagcagaagttacctgcattcgacagctgagaaaataggtagtgagagatttgaatagtgtaaagatactgagggaaaaagactaactcagtgtctcctatactctcactcaacaatcaacactgaagacttctgtgaccaaatggtagataacagggccagttactgccatccaaattagatttgatggtatttacagtagggaactgtcataagcaaaaccaaaagaaggagtgagataacttttgctgtggtctataatgacctttaaaacattactggaaatttggaaagaaacaattgtatttttcagatcttctttcaggcagcatattccatgtctttggaaggaatgctgtgcatagccacttagggtacagagaccccctccttcagggtcaagttcaagtgacaaaagatgatgaccagattgtat

SEQ ID NO: 68149 - DNA, 1035 bp, Homo sapiens
cttagacaacatgtttcttattatttggctttgggatgtatttcttgatcaagaacaaggcattagaataacctttgtagttctattcgatgtaaaagggagtttgtgttcctgaaatacacacatggacagggagtaaagatgtactatttggaagtctatttggaggcacagagtgacttttcttagacaatatgtttcttattatttggctttgggatgtatttcttgatcaagaacaaggcattagaataacctttgtagttctattcgatgtaaaagggagtttgtgttcctgaaatacacacattgacagggagtgaagatgtactatttggaagtctatttggaggcacagagtgacttttcttaaactcttatattcctcctattttatcttcctggttccccgaaagaagcatgttgtgaagtatttgtgtcatacacctgtgtcagtcattgtaaactgagcttggggcaccagagcgaggctagtgagtgagtttgctgaagctgcggtcgtgtggttttctccttcattgcattctttgactatgtgtgagatgggtggaacttcagtctgttctgaggtctggctgacggggtggcatatggcagtaatcaagttgatagcactgagctctgtccctcttccttgttaatttggaggcaggcaggcagaggtgtcacttttatcctgtcacttgctgtggcaatctcatctgcaccgatgacttattttctttgttttttatttaaaaaattttttgagacatggtctcactccgtcacccaggctagagtgcagtgccacgatcacagctcactgcagcctcaaccccctgggctcaagcaatcctcccatctctgcctcccaagtagctgagactacaggtgcatgccaccatacccagctaattttttaaattttatgtagagacagggtctgtctttattgcccaggctggtctggaactcaagcgatcctcctgccttggcctcccagagtgctgggattacatacatgagtcactg

SEQ ID NO: 68150 - DNA, 1127 bp, Homo sapiens
ggcgggccacagagggcagcttgttaaacccttcagggctgtgtctctgtcttctctctcatcccctccacagcagcgtcctccccagggatcctaggttcagccagagacttgttattcaacagaccaggtcctgtctgcccctgtggcatataaggtttgctctcctggaatgcccttttctccctccacacagcactggatcgcagcatctcaattagccctttccgtgtgttcccatttctctatttgcccatctcccccggtgaactgtgagcttcccatgagactgtatcttattcatcctgtgcttagcccagtgcttagctcagtaaatgtttgtggaatgaatagctgacttaatttctctctttcctagtcccctcttttaacttaagaaaggtttattgggacactttaaaaaggtttattgattgaatattgttcggtgaacaaacatgcaaagataaaactacgagacggactcctttgccccaaaagccaggagttagctgatgaaataaaacctgtacacaaatacatggtcagtagtggtaagggccgtgaaaggcccaagaataacatgtgattggggtacaaggcagagaaatcactttcccttacagcaggattcttgacccgggggcatgggctccctagagggatttgggggaagggtctttgaactccctagaattgtggttgaaaaggtctctgtataggtacatatgtgcatctttccctggaagagggtctgtaacttcttaaaaggatacaaagccctcaagggttaagaacctttgtacaggcttctctcaagtgggccaatttggtacctatatctaggtagcatctggagactgggagtgtttattcatgacagttccgtctcctacagctatttccttcgtgctaccatcagccgccgcctcaatgatgttgtcaaagagatggacattgtagttcacacactcagcacatacccagagctgaactcttccatcaagatggaggttgggattgaggactgtctgcacattgaatttgagtacaataaatccaagtaagtgtctcagtgccaaggttgtgaaatgattatttaaggaggttaagatgggacttgatgc

SEQ ID NO: 68151 - DNA, 1041 bp, Homo sapiens
ctgaggctgtttgctcaggtgtctgcagtcttcctgtagcctgtgcacagaagggtggtgtgaaacagtggggaacactccagcctggggactaggatcctgggtttaccacctttctctaccccctactcacatcctggttatccaagagaacattatctcttttcttccaactgccttttcttcacctgtaatataaggaggctgaattctgatgtccatgccagcattcttatcctgtgagctgagcatcaggttttaagattttactcgttctctcatgcctgatacgggctgtgcacatgtagactattgactgacccagagaaaaaaccctgagggtcaggaagtgttacccaatgtggctcacttcgtaacaactcacaaggccaggccagcggagcccagaaagcaggcgctgatgccgagagtgatttgctcttctcactctactgctgctgcctggcctgtcggcctagagcggacagaactgtgtgctttgagccatccaggtccagttctctaaagacattgtgtggagatcagaggaagggagagactggtccctgcgcttgtgggactagcctctcatacattaggatatctttcaaaaacacaaatataaaaggtactaaagcagctgcatgctggggagatagagcagatgaacaaacatgaatgggtaccatgcaggagagacgtcctttgcgtgggatgtggaagggacagaagctactttaatccaagtaaagaccgcactgggaaacagttcagccacagccatgtgggcagtgatgggtgagtgtgtcctgcaactggacgtttaaccagcacgcttggccgtggcgtgtgcgctctactgaaacagaaaggtctggccacagtaccaacatcttactttctgtactttctgttccccagataccacttgaaagatgtcattgtagggaagatatacttcctgctggtgagaatcaaaatcaagcacatggagatagacatcatcaagcgagaaacgacgggtacaggccccaacgtgta

SEQ ID NO: 68152 - DNA, 1069 bp, Homo sapiens
tgcccaagcccctttacccctctccctataggttacacaggggagaccagggcctcggcagaagactgctgccacacttccgaatcattctgcttgccaaataggtcatcttcaccagttgactgacccaagtttaggaccattggtatcgtgtgtttaaaaaacacatataaaaaaactcttgtgaatattcttgttatgctagagaggaaggtacttctccctctacggctctgcgctggggcctatggtagtaaagttgtttactgtcctttttctgcttcccctggaaatgacaggcattactctcccattggcctcccttccctttatagaaagaccaagcaggccccactggccaagaggtacggtatttggcagtctgagttctcagtaatttggaaagttaaggagttggttcctgtgtcacctttcagttagtgtgggaaaggaagacttctgttttcctgagatcagtgcagtctcaggcctttggcagggctcatggatcagagctgagactggagggagaggcattttgggtagcctaggagggcgactggcggcagcagaaccgaggaaggcaaggttgtttcccccacgctgtgtcctgtgttcaggtgcgacacacaatcctcatgggaacaggatcacccatgcgctgcccttgatgatcaaggttggggcttaagtggataagggaggcaagttctgggttccttgccttttcagagcatgaggtcaggctctgtatccctccttttcctagctgatattctaactagaagcatttgtcaattcctttgcctcccaactgacaacacacgttcattttccaaccttcctaacatcttaaacctttcttctgggagaactagaagacagaatttgctttgattctctcaggcgctgtgcacaagccaggtcttctgttttctctttcttactctacccacattcttgccttctctatccaactgtgaaagtgaggggaggctcctgtccccctctcttaaggtccccaaacctgggagtgcataggtactaaatcaagcagtgcaacttgtaa

SEQ ID NO: 68153 - DNA, 1085 bp, Homo sapiens
cacaggtacatcttacatggtactaaggcgagcagtcattcgttcaaaactatttaccaggtgccaagcactatagagtactgggtaatagtaacaggtaactctggccacattccctccctcatgggtgttacaggtgaggatgctgactgagaaaggtgaagtaccatgcccaagtttaatcagctagtaagtgggaattcatgaggtcattctggtatatggacaataaaggagagggcccactcttaccctgggtcaggggctggattgataatctctggcgagtgaagagaaccatattttttaaggggccaccagtagctttgtgagcttgatgataggatttgagctcagccaggggaatgaaacgtttcatcatccgaacaaactgtacatccacctatgtgacaacagtgtacatgacagaaagacgtgtctaggctgactgtgcccactgtatttttaaccgcccacaggaagctcctatctcagtatcacctcatctgagtaagtgctgggccgtgtaccttgacctacagtcaccccaaccgtcttcttcccctggttcatccttcccctgtcatgaaatagaaagcatagtctttaccatggaccacttagggttgtcctctttgctagatgggtcataatggggattgtttttctcaaactgtgtgtggtctgggtaagcctctttcacgatctgaaaccaaaacaaaagctttgaatcatctgcctgcagtcagctccacagccaatcttttaatccatatccaactttcatttcttccctgcacattcttaacccatctgccttgctgtacagccaatgggggctcagatatttggaaacaatatatagtctaatatatagactaggaaatcaactctgtttttacaaaagtcttaaaaacatgctctaaaaacaaatggcaaaggttattactggtaccactgtttttttcccctctgcacagttaataattttatcctgataagcttggaggagctatcatcaggcctgttttcgagtgagatcaagacttagaggtggagtgaagtctgtgctagtcggacctgaa

SEQ ID NO: 68154 - DNA, 1035 bp, Homo sapiens
tatgtgcttactaactggccaaggattgtttaatgattgaatttatttcctcttgcctagttcagcattgaggatctcaaagcacagcccaaacagacaacatgctgggatggtgttcgtaactaccaggtaagagggtaaggaggaggtcgcctgagacccaggtgggatgaatgcctgcctcctcctcatgacgtactcagtagcagaacctcttggccaaggttgctttttctcagaagcaaacctgataatgtattaaaaaatgccttaagtactctgcatgaaattttcaattggcctgtgttctggccaatgtcctggtaaaagtctgggtgtcctggcaaaggggaaggactttctaatgaattgaggagttgcagacaagaatcacccatctattaaaagcagacttgatttctgctaaaagctagtactttccagctggtgggaggatagttactctttcttctcccgggacaggctcggaacttccttagagccatgaagctgggagaagaagccttcttctaccatagcaactgcaaagagccaggcatcgcaggactcatgaaggttagttgggcaggttttggtgtgaatcccttttcctccagggagactaacttaagtagatataaagggatataccttaattaggcaacaaaaaagtacactcccccccaccccatcccccttttacaggaatagggaaaaactgccctggccccttcctatctgataactcaaagcaggccttcattcaggtccgactagcacagacttcactccacctctaagtcttgatctcactcgaaaacaggcctgatgatagctcctccaagcttatcaggataaaattattaactgtgcagaggggaaaaaaacagtggtaccagtaataacctttgccatttgtttttagagcatgtttttaagacttttgtaaaaacagagttgatttcctagtctatatattagactatatattgtttccaaatatctgagcccccattggctgtacagcaaggcaga

SEQ ID NO: 68155 - DNA, 1009 bp, Homo sapiens
ctaactcctgggcaggaagaccttcagtaaaaggcttagaaatggagtttatcctatcaacaaaagagagcaaggaaatgatgtaaaggcagtctattttcagagccagagaggaactgggagattgtagatagtttgtggttttcaattagaggcactgaaattgggggcagttggtgtcacaatcctaaaagaagttgtgagaagtgtttgtaggttagtcaggtagagtagacattagtagattctcttaataagttagaaaatgtttagctgaaacaggtatctttctgagtgctgacaggcctttaaacctgaactttttctttttcctcattttaagttcttgtgggtctaagtcttgggtgctgaaacccatacctcacaggctcccgtccccagggaaggccgccctacctgctggattgttgggcaaccacgcagtccctgatttttgccaggtggggtggaactcccagccaacacgagctgtgatcttcgaagactgtgctgtccctgtggccaacagaattgggagcgaggggcagggcttcctcattgccgtgagaggactgaacggagggaggatcaatattggtgagatacgcaggggtgtggcagggaggtagcggtccgggacaggcactgctgttttccagcttggttggaacgtcggcgctcttcccctctagcttcctgctccctgggggctgcccacgcctctgtcatcctcacccgagaccacctcaatgtccggaagcagtttggagagcctctggccagtaaccaggtaacctctgccttgcctccacatggctttgcactatttgcagcccgggacctgctctagggcccacatttccaggagagaagccaggaaattcctctgtcagtcccaccactgtcctagccagagcttgtgctttatttctgtccatcttttcttgggatatctttaacgatattaaagtgtcgggtgagtgaagtggacttagcacttaaaagcaat

SEQ ID NO: 68156 - DNA, 1171 bp, Homo sapiens
gaggccctctttgagcttggctgtttgtggttctttcatgggtttatggcgggctgccagatcgtgggctggggtaggaagggaagctgcttgctccacagtcttcccagagtccaagacgtctagtccctgtctccctgcagatctgcaaccaggccttgcagatgcacgggggctacggctacctgaaggattacgctgttcagcagtacgtgcgggactccagggtccaccagattctagaaggtaaaaattgccagaggttattctcttcccttcagaacgggggcgggatcgctgctttccccactctctgtccccatgcctcctgggcctcagggtgcagtcaagccctgtctgtctcgaggcttcctcctccctcccgttccgcagagctgttctggcaggggcctggagtccagagccgcagcttcgtccctttcggggggcctcagatcgctctgctgctgcccttttcctctggagatctgcgagaagggtgaactgagataatggatgagaaagcatgttgaaaaccacagccggggcttttctctaaggttatcgagtacgtggttctcagggatccaagaacagtgatggacaaggcaaatgtgagccagtatggtcatcagtagctctatattgattatcagccagatggcctaaaagatacctgtctcaatattactagtgtatttttcaataaaataaaccatcactatatgggtatcttcttggtagtcacagacattctatcgaggaaacatggaagccgttggggtcgggctcggagcctggctgtctccactctctacagccagtgcggaagtcttgaaatgacacgactcttggaaaagcaggaggggcagaggcttctttgagtgacttcggtgaagcaacgtgaggctgccttgctggaaacattatataatggggcttccctgcccctttcacagcacccttctcaaacctcagcctgtgctggaatcgcctggagggcatgggagcgcagattgcgggcctcaaccccagagcttctgctccagagggtctagtgtgggcctgggaatttgtatctgcaacaagtcttcaagtgaggctgccacagcttgtctgagaaccacactttgagacccaccgctctggtgttaatgtcagagtcacaggc

SEQ ID NO: 68157 - DNA, 1043 bp, Homo sapiens
actgtccacagcgctgtcagatccaacgagagccgctgagtcacatctggccaccgtccgcagcactcacatctggccaccgtccgctgcgctcacatctggccaccgtccgcagcgctcacatctggccaccgtccgcagcgctcacatctggtcaccatccacagagctcacatctggccaccgtccgctgcgctcacatctggtcaccatccacagcgctcacatctggccaccgtccgctgcgctcacatctggccaccatccgcagcgctcacatctggccaccgtccacagagctcacatctggccaccgtccgcagcactcacatctggccaccgtccgctgcgctcacatctggccaccgtccgcagcgctcacatctggccaccgtctgctgcactcacatctggccaccgtccgcagagctcacatctggccaccatccgcagagctcacatctggccaccgtccgcagcgctcacatctggccaccgtccactgcgctcacatctggccaccgtccgcagcgctcacatctggccaccgtccgctgcgctcacatctggtcaccgtccgcagcgctcacatctggccaccgtccgcagcgctcacatctggccaccgtccgcagcgctcacatctggccaccgtccgcagagctcacatctggccaccgtccgcagcgctcacatctggccaccgtccgctgcgctcacatctggtcaccgtccgcagcgctcacatctggccaccgtccgcagtgctcacatctggccaccgtccgctgcgctcacatctggtcaccgtccgcagcgctcacatctggtcaccgtccgctgcgctcacatctggccactgtccacagagctcacatctggccaccgtccccagcgctgtcagatgccgaccaaaccctgctttggtgttgaggtggtttgtctagtagcctcctttcttaagggaatttaatctgctgcaaatggttctcatgtatgcaatagatgttactgtaactgttttataaggtgcattgccttca

SEQ ID NO: 68158 - DNA, 1105 bp, Homo sapiens
ccgccagggcccaggaacctctccaggaccagggacagcgctcagcagccgcgccgcatcccgcgcccgatcggccgccgcgtcagcaccacggacagctcctggagcagccccagcggggccctggcagcagggctcacacaccccagtcgccccacaagcatctggggacacaaggggccgtgactgacaaggagaaggagcgtcccccgagttgctgcgctgctgccggagccctccttcagcacaaatccccctccgccctcggcaagggcgtcctgagcaggagacctgagtgagcggggagaggagatgggcactgttgtggtgggagcaagggaagcaagtgggtgtgagggagagacggggacgttgggtgcgtaggagtctaaaggaccggagtgatgtggcctgaaggcgccagaagtgtgcaaaggagattttgggtaaatgagggaacgatatccctgcttgagaaggttttggggaatgctggagcaaaaaggagtaaccagaccattagtaggagcaaaggaggaaggaggtgggtgttaagcgattggtgatactgggaactgacagcatttaaacggggttaggctgggttgaagttcgagtgaagattaaactgtagaaaagagaaccattgaaggaatctttttaagtgagaaaaaatttggaaggaagtttgggtagtaaaagtatttgcatggagactgagatgtgagaaaagctgaaggcttggaaagaggcatgtgaagagctttaaaaaggctggggcccaggaagagtaggactggggtagaggggaatccaggaggccggggacaaacctgaaaagcaggagtgatgtgggaaaccaagggagctggaggcagaggaagagaaaatgtggctctttagctggtgaagtgggagccacagctaggagtggctcatttagggaagctttctcttctctgacctgattggacacccttcctctgaattcccgcagagccgaagaggtgcaagggaacatcccatcaaaccaatggaggactcaggcatggcttgaggactcagtctggttacagctttttcctccaactcaaggagggttttt

SEQ ID NO: 68159 - DNA, 1046 bp, Homo sapiens
ttccccagcacctgtcacaagtcgcacagcaagacggtcctcctgccagctcttctccccttctccctctgccttcgaccctctcaccccaccccagcagtcctgggggatacaacctagggcaggccaaggagtgagcatgcaggtccctttggggagccctttaggaatagagggcctaggtgtcattttgaaattcctccaagccctctagggagtttgtgtcctgttgcagagcgactggagcccttcttagccatctgaattgcagagccctctgggctgctcaggccagagggctgtggagttgcagtcagtagaatctgggccctgctccccgagccgggtcctggacagaagccatgttctgctggagagcagcccctccccacagatccccataccccaagcctcagggtccagcctcactatggggcacctcttcaggaagatgtggtggctatgtttctaagtcactttccctctttgcatcttggtttcctcatgtgtgaaccaaaggctgtaccagagggcctcctggccccttcccacgctgaaagtgagatttctaccatgggcacagagagcaccagggcaccagcctacagaggacagtggtgaggacagggcactccatgggttgtccctctccccggttcattcagttcagggaacagcactgcacagctgctctgtcgcaggccctgtgctaggcctggagatgctatgatgcaaaagatacaggcctagtcatcagggtgcccacagcccagtggtgggcagacacggggccagcaccagtgttactacctgagcactagctctgtgtcaggcccaggctaacggttgccatgtgttatctccccgggtctgcacaacgtccccgtgagattggcaccattaccgtcccatttctggaatgggaagattaaggctgagtgatggtgatgttaagtaacttgcccaaggacacagtcctaggaagtaatgcagccaagacatggactccgcagcccatggtttcgaccctgtaccttccaccatct

SEQ ID NO: 68160 - DNA, 1131 bp, Homo sapiens
acagcgagaccccatgtgtctgtctgtctctctctttttttaaaggacagaggctaagctgtaaggttagcatggttctgcctgggctttgcttctgtgcttctgtgcaggctgagctgtaaggttagcatggttctgcctgggctttgcttctgcgcttctgtgcaggctgagctgtaaggttagcatggttctgcctgggctttgcttctgcgcttctgtgcaggctgagctgtaaggttagcatggttctgcctgggctttgcttctgcgcttctgtgctagcaggtgcccacaaaatgtctttttgaatttcttaatttttgggttctggatgcaattcgtgcacgccaagaaactacttgcttgtcagtattttaattctgtagtacatgtgtgtgaatatcagccagtacttacagtaggaggatgaacagaaaaactgagaagacctgtctttcaaaagatgggtttatccactttttaagggaaaaagtgacagtttggcatgggatttgaaaagtggaaattgtggaaaaattgagctgttgaagtcccacatataaccagatttaataaagcttcacatgtgaattagctccatatgtgtgtagaaggttgcttttatagcaggtccttaagtactccttttgaaattcctcctttttttttaagtcataccattacttctttggatatgaatgtcccaagtggtatctcctactgtagtatgaggaagaatggctgttaatgtattttttgaattttggtcttgtcttggcctggatcatatccagtcaccactatgcaacaaatgatgtgcactgggcaaggatatgatgggttatgaaagctgtatcttgtttgttttttcttttgcagtactccaagtggtctaaacaggaatgtcttgtaaaacctcaagactccctattgattattcccttacatatttatttacaatttatcagggtaattggtggtgccttatgaaaagtataactcgatttcttgatctttgagcatgttttgtgtttcttgtgttttctaaaagaatattagatatggttaattgcattacatctaaaagatttaaaaaattgtgtgtatgctcaggttccccacacccat

SEQ ID NO: 68161 - DNA, 3211 bp, Homo sapiens
tattgacctgtgtctttgactgttataattggttaatttgtaagatttgacatctgatatttgctaactttttatagggagttgtatttgtaacggaagaagagaagaataaaaaatattagttttaaaagtggcctatgtgactgcttttctaaaaaggtatttaatgctcttagtactttggcttatctctttgaaataaagctaatacacaggattgccttcacattgttgtactcttcctttcttgattgataattgcattgtcttagagcctagaaattgttaatattagctaaaactacttggctgctctattagaagttccctttttgtcaaatttttctcaaacatgtttctgcctcacaaggagccccaggtattcatgaggtaatggagtacctaagaggcctaattttgtggacacactatggtgaaatataattttggggtattaacttctcagcttctttctttaaaaaataaccccataagaagtcattgcctatctagacatcccagttgtttgctattgtttaagccaagaaagctctttggtttgcttttattctaggcttaatgtttatgtaacctaaacattccccaatcttgtttcctacaggtagactgggtacaatgtgatggtggctgtgatgagtggtttcatcaagtttgtgtgggtgtatctccagaaatggctgaaaatgaagattacatctgtataaactgtgcaaagaagcaggggccagttagcccaggtccagcaccacctccttccttcataatgagctacaaactaccaatggaggatcttaaagagaccagttagcagatgcttggttagtttgggacatggggggacatggaccacattgagaccttagtcatcaagtagagtggtttatatccacttggaatgttgcttccaaagatgaatggccttcagagaaagtccccttagtgctggcttcctctttgcatggactctgtgggttacattctctatcaacatatctatgcagagggtgtcttctttggtacaacagccaatatttcatgtctcctttgagtgtggtttactgcattaaggccagatgcttaattgagctctagggtggctggttagtattaatacattggtgtgctaacagggcatataggatgtggcttttgtccagctgatagtagttagaggcttacaacttaggagcagcaccaactgaaggtgctaattgcttggatctccttcattgggatagttggagagggattggagtaccactttccttccactgttacctggtacttaatgccctaaagatacaactaggagtaacagggccaaagttatttctgttagacgtcaaggaatggtatcacagtctattgacctcagcgatttgtgcttgtttgtgctagaagaacatcccaaataggagaacctctcacaagctggggcaggtcaccttatctttgtaagatgaggatatcatctagatcagaaatctgactagattggattctgaggagaagaacctactacaaggcaaggagccgttttttggctttgaaaagtcttgctgtcttgggtctacattttagggaagagcaggtacatggatccaggcttctgccaaaaaaaaaaagagaagaagatgacgatgatgaccagtcgtactatcttactgagccacagtgatgcatgcttttcggggaaaacttcattcacaagtattccagacaccaggcttcaggcatggccatgagcaagaccagcaaataacagctttttgccttgcagccctgaccccaatgtctgctgtttccaacactggtgatttctaactacggcccacagcagatgctgttgaataacaccatggcttcatcagaggatgtggggttgtagtacctctgggtgatgaagttgttttagtaaatccatttttaaaaaaaaaaaaggacttgtttttacttttttctaaatgtctctgactactgactgttctatacatagattatttttccttttttaatatacatatatgaatatataaatatatatatttactgttaccagcagcatatgacagagtttcaacatcaaaaatccatttgggggcttgctttttcttttttgctttaaaaaaaaaaatcccattccttctttgtagtacaaggagttagcactccctcctccatcccagcctgaccagatcttccattttgcttttgttcatatagataattatatgtcctttgtgtgttgggacttgtccctgtctgttgggaaacttggtctcactctagtctgtgctggctcttttttcttttgtgtgtgaatgtttgaaactatggtgctgtgtcctcttccctcctgttgtgttctctgttcttcttaaggtattaggtaagctgtatgtaaactcttattagaaggggactaatttttttttaaaggacaaaaaaaaaaatgactaaaaatagtgttttgtcatcactgtctggtgtctttattttggtttaaaaaaatctgtggtttgacttaaattcatcagttttccttttaaaggggggattggggtggacctagcaacagcttatagtttcctcttccctttttgccccagtctcttttaaagaactgtcttctagtaactagaagtgaaatgtactgtccagttacagtttgagtgggtatgagatttaactcaaaaggaatcttacaaaaaaaaagatgttttcttataaaatccaatttctgtaaatgttttctctgaagttcatactacctactttttattcattcttaatactgtataacattttgagtgttttgacttgttcagaggtttgttagtgttgctgtgcatatgtcttgaggtctcatctgaagtaagtttgtgtatgatcgaagatttcaatggatattgcaaggtaactaattaactgatttcataagttttcgttttgccaagctaacgattatcaattaagaatttcctctggttgatgttatacaagaaagcacaatattttttgcctgttgatcttctttgtaacagtcttcagatatttgtgggttaaaaattgaatgtaattttaagtgacagatgcctggaatacatttaaaatttttatttttccttcctaatcatccattaactattccactatcagtggagagtcatgaggatgctgagaaagtatg

SEQ ID NO: 68162 - DNA, 1138 bp, Homo sapiens
gttttcctttttcaaatccagcttttgctaggaaacttggggtgcaaaagatattaaatgccaaaataacaaaagctcagtttaattagtaagctaagaatatcactaaattaccagattttcttttttcccagtgcagtactattctctaagaaatgaacaaaatatactatgccaaatattttttattaagtgtgaatatgaaaccatacagcaaaacatgaatattaaactaatatttcctctttttaatatatttctttttgaaacagacatttcccccagatctaaacatagtaacctatttgtactgtaatgtaaaatctcctatcatttaatatttgaacagttcatagctgtgaagtttagtaattatttttgtgattcactaaatacatctcctagaaataatgaaagggggggaaatgacaatttatacagttatccaaattctgtgttcttgagttttcaggatactacatagtctgttgcccctgtgtcaaaatcatctgtggattcagttgacatcccaaactttagtttgctttatgttgctgtgggcctttcacacaaaagtagaactcagagttgattgttagtagatgaacatgataaaaaagatattggtaaagagaaggactattttttgcttgttctattatcaggctaaattgttatataacctgtagtctaggttagaatttgtgtaccagtatctcaaggaaggttatatactcttttgaaatggtagaagatctgggcttaggaagggacctttagtcaaaatcacaaaagggaaagtattgtcttatttgtaagagaattttgggaaattgtaagccagtgagtatagtgcaaacactagatttaaaaagacatgggacacttttctttgtagcaaatactgatacattaataacattcttatccaatggattagcatgaatggggactagactggattaagaaagagggttggaggtgtaagggtgaaggtaactgttggttcacaggtaccattataaaaagcatggtatctcaaacctgggcagcacagagaaccacagtttatctatccagttccctttaccagtcccaaacagccaaaacactcactctgagtgcacgtactctacag

SEQ ID NO: 68163 - DNA, 2338 bp, Homo sapiens
ggactacaggcatgcaccaccacgcccagctaatttttgtatttttagtagagtcggggtttcgtcatgttggtcaggctggtcttgaactcctgacctcaagtgatccacccgcctcggcctcccagagtgctgggattacaggcctgaaccactgtgcctggcccataaatcttttttattgtagcataatgtacataacataaagtttaccattttaaccctttttaggtagacaattcagttacattaagtagattgacagtgttacgcaactgtcaccactattcatttcctgaattttttagttatccccaacagaaactatacccactaaacaaatctccatttcttcttcccttcagcctctggtaacctctgttcgactttctgtctctccgaatgtgtctattctaggtacctcatataagagagtaatactgttttttaactgtcttgctttaaaattgttcctaaatttatatttttgaaggatgacagcatggaagagaaaccactaaaagtgaaaggaaaggactcttcagagaagaaacggaaacggaagctagaaaaggtagagcaactttttggagaaggaaaacagaagtccaaggagttaaagaaaatggacaaacctagaaagaagaaattaaaattaggtgcagacaaatcaaaggagctgaataaactggccaagaaactagcaaaagaagaagagagaaagaaaaagaaggagaaggctgctgcagccaaagttgaacttgtgaaagagagcactgaaaagaaaagagagaaaaaggtgctggacatcccctcaaagtatgactggtcaggagcagaggagtctgatgatgagaatgctgtgtgcgcagcacagaactgccaaaggccctgcaaggacaaggtgagttccaactgtttatagtcaagcatgagaggtcaaggagcaacagttgtggagacacatgtttgatatcaatgtgtagtatgtttttggttctaggatttggacttccaacataatgtcttttgtacaatttctataaactgttttgaataatgaggctcttagtgtgcctagtagaagtgttgtatttcaaaaatcatatacttaatgaacataatgagacaggagcagagagaagctatgtgacattccctggcaaacagtgcatttcatatgcagtgggcataacaagtttcagaataatcttgtgccttccctataaggtgactcagagaactaaataccttgtcggatagtcacaatggcctgaaaaaaatcctgggccagtattgtaagagctgtggcaaattgcattaagatggtattccaaagacttgaaacttttagtccatatcttacactcagagctgtgggcaccctcctaaatggaatatgattttcttcaaatcttttgcaacaaataattcaaacctataaatgcattattttaggccaggcaaggtgtggctcacgcctgtaatcccagcactttgggaggccgaggtgggcggatcacctgaggtgaggagttcgagaccagcctagccaacatggtaaaaccccatctctactaaaaatacaaaaaatgagcagggtgtggtggcggacacctgtaatctcagctacttgggaggttgtggcaggggaatcgcttgaacccaggaggcagaggttggagtaagccaggatggctccattgtgctccagcctgggccacaagagcaaaactctgtctcaaaaaaaaaaaaaaaaaagcattgttttaaaatttccaaccctaaattttaagtatagtaattctcttatggccgttctttaaatataatgttgacagtatgaacttctgagagtaatagtcagactttatgaaaaattccagttgtttaaatgattggaggcacctgttacggctcttatcaagaatattgataaatctgtagttttaattttattatgctcattatactatttgatatttagaattctaatagtgcctcagtttgaaaatataaacagtaaataaaactgcatcactgttccctataggttatgccctcactttttcaatgaaatacttaaacctttttagagcttgaaggcaccaacaggttactttgttcaggctgctcattttacagatgatgcaaccaggactcagggaaggtaattatgtgaccaaagttacagagctagttagtagcaaaaccaaaagtagaaccctagatcttggctgtcagaccaggttctctccactaacaccttaccccatcaataattgagatgtaagtacaaaaacacattccaaaactaaatgacacatatttaaatgag

SEQ ID NO: 68164 - DNA, 1002 bp, Homo sapiens
tgttgcccaggctggagtgcaatggcgtgatcttggctcactgcaacctccccctgcctagttcaagagattgtcctaccctcagcctcccgagtagctgggatttataggcatgcgccaccacgcttggctaattttttgtatttttagtagagatggggtttcactatgttggtcaggctggtttcgaactcctgacctcaggtgatccacccgcctcagcctcccaaagtgttgggattacaagggtgagccgccacacccggctggaagaactgttttttattaataaccccaaaccattttttttagagtgggccttggaattgttcatctttttggtctgtatttgtttctaattctgtttacattttcatactgatataatgaatccagatatctgaagttagtattgggggatggggggctagtctcaatatttgctttgaaaacatgttttttccatagttttaattttttttgctttgttttatggtattttttgggaaaggttctagcaccccaaggaaacaacctcggaagagccctttggtgccccgaagtttggaacctccagtgctggagttgtcacctggagctaaggcacaactggaagaacttatgatggttggagatctcctggaagtatctctggacgagactcaacacatatggcggattttgcaggccacacacccaccctctgaagacagattcttgcatatcatggaggtgtggatttaatacttatttaaacagtggttaaaaactagaatgcctaggttccttagaggtatcataaatgttggcaaaggggtggctgagggcagtaatctggctggtctactttcccacttcagccaaagaaattgggctttatggcttgctggcttgcctgcctccctgcctccctccctccttcctccctctttctttctttctctctttctctttctttctctctctttctctttttctttttctttcttttctcctttcctt

SEQ ID NO: 68165 - DNA, 1152 bp, Homo sapiens
cttgccccagggaatgaattacgaggtgataggaaactaatactttaagagtgtttaccttgtgcaaggtaccaggttaggcactttcatatgttatcttatttaatccgtaaaacagcaaaatacggttggtagtattctcatttttcagaaaacggacgttctgaaacttgtaccccatattaacagtctaaaagtacaagagccaggctttgtacccaggttgcttgatttcaaggcatgccatctttgtaccgcaccctacagaagaggccaaagtactgtactgatgtacatgatcaaatatgatagcactttgcccatttcacacttgaggaatgtttgcatggaaaccgccaggggccccacattttaggaaactgtttataactgataacttgggagaaagatcccacagccttgaggatttggtattttggggggtatattgcagtgactcttttcaattaaatgtttgtcttgtacaggtggcagttttcaaagaacgggagcaaaaagagattgaagccatgcattctctcagagcagccaacctagccaagatgacaatggtggaccgcatagaagaagtaaaattttgcatttgccgcaagacagccagtgggtttatgctacagtgtgagctctgcaaagactggttccataacagctgtgttcctcttcctaaatcaagttcccaaaaaaaaggatccagctggcaagctaaagaagtaaaattcctttgccctctttgtatgcggtctcgaaggcccaggctagagactattctgtcactcctggtatcccttcagaagttgcccgtacggttgcctgaaggagaggccctgcagtgtttgacagaacgtgctatgagttggcaagatagagcgcggcaggctctagccacagatgaactatcctctgccctggccaaactatctgtgttgagccagcgtatggtggaacaggcggctcgagaaaaaactgaaaagatcatcagtgcagaactccaaaaagcagctgccaatccagacttacaggcaagtttaggatttacattctttttctatttcatgggatatgtcagtgtataaatagtaaattgagtctgtcttaccaattgattaggaaaataacagtaacttgtcagca

SEQ ID NO: 68166 - DNA, 1084 bp, Homo sapiens
atgtgtttcctctgtaatttcaaagggctgtctctctaccaggtggggtttcaccatgttggccaggctggtctcgagctcctgacctcaggtgatctgcctgcctcagcctcccaaagtgctgagattacaggtgtgagccaccacgcctggcctgctaactgtgtttatatatgtctgtgctttagattgtcctttgaactggttgttatatctactggtactctcaattaataaataaaatcattgatgacatgttcattaaaaaaataatttacacaaactttaaaaaataggacattggaagttatattaattcaagagatggaattacattcaaagaataatatttaataaaagaactaacactaaactttgtaaggtctttcaacagtatattgccaaaccccataagagaactcaaattgtgagaatctactttggtttttcagagtggcagcaattacgcttatttggagcagcttgagagcttgtctgcgaaaggacgccctattcctgtgcgtcttgaagcactgccgcaagtggaatcacaggtagcagcagcacgggcatggagagaacggactgggcggacgtttcttaagaagaattctagccatacattgttacaggtacttgaacttcaacactctcataagcagctgataatttaagtagtaatagtattggtgagggttattttcagtttatctgattaccattatacaagtgattcttactaggtaatatcagatgttgacttgaaatctggaaccttgggcagattcatttccagttaatcttgtgctgtccctagaaaaagcagtcggccttggcttgttattggactctagtcattgaaatcgttttgttctgtttttttgagacagggtcttgccctgtcgcccagactggagtgcagtggtgcagtctcggcccactgcagctgtcgcctcctgggctcaagtgatcctttcacctcatcctcccaagtgtctgggactacaggcatgctacaccatgcctggctaattttttgtatttttggtggagatgggatttcatcatgttgcctgggctggtc

SEQ ID NO: 68167 - DNA, 1092 bp, Homo sapiens
tgttgagtggctgtattagcatcagcaccccattggacttaatgagatttaaataaagtgtttatatctgactgtatgtcagcaaatttggctgataattaacggtggtccttgtgaaagcatttctctagcagctaagattaatatttatataatttctattgtgaggatgaggaaactggggtgcctggagagatcacatagttactgagtgacacaactgaaatttaaagtatcttccacttcatttcaatacctctgtgtacttaactactttgccagccacttactttggatgcattttggtaagaaaatatttaggtgatttaattagcacagctctgagaagcctctgtgtacactggatattttgctatccagatgccatgcagaatacatactaaaatttattcatagcttttcctgttggaactgttcatattactcagtgtcttcagacgaatgacagttccaggaggtgggaacatattaagtggacaaagctaaataactttggaatgtaaaactatgattttgataaacgtggcgcacctggtagtaggccaccaaatgaaatttcgtggtaataatagttaaaaactttgttttcccagtctctgatatttaatcagtcaccaggttctgatgactctgtctccaacatgtctttcatatctctctttcaaattcattgtcactgacctagttgtagtcctcttatattttaccttgatatttgagtttggtaagtattgatggagaacctgctacatgccaggtgctatttctaaatgctatgtagacagtagtgaacaagacactcaaagatctctgctttcatggagctaccgttctagtagagagagagagagaaataaatgaatgaatttcaaataattagtgtcatgaaaaaagtaaaactggtaaagaaatagaggattatgtggttggtggaaatagtgggagttagactcttctaacttctgtcagaattatctttctgaaacacagccttaatcttcttgatctcttagtattggttattaactacttaccattattttcttgagattcttcctttgcctttggcct

SEQ ID NO: 68168 - DNA, 1006 bp, Homo sapiens
ttgagtgctgaatacttccacttaaccctttttggcctgaacttatttaattatttatttttacaatatttttctttttcttgtaagggcaggctcatgttaaactggtctaaaagagtttgctgcctcagttatataccaaagaactccttcttgatatacaataaatagaaaattagcagtttaggccagaaatttagcatctcagattatgggaattttctgtgggaaagcctttgaaactctggctgggtcttacagggttaatatttacagttaatagaatattgcctctttatatttaaatggatttggtattctgtcttctttctaataaaagggaggacctggagggtaagtagtggttctgtgctgggatatgttataagcgagttatttaatttggaaatctcattttcagttgcccattggacgtcaatgtgtaaatcattaccgacgcctaaggcgccactgtgtcttttcacacgaggaactaattttcaagatggcagcagatccagaatgcttagatgtggggctggctgccatggtctgcaaagaattgactctcatgactgaagaagaaacacgattaagagagtctgttgtacagatggtgagtttgctgagcacattttctatgtttgatactgcttatgggatatgctaaataaacctataggtagaattttcatcccttatcccctaggagttgagcataaagatcactgatttggagaagattttatatttttataattgacatattgatttctccagattaaaaacgttttaggaatcttgtcatctctaggtttttaaaacaagtcctatcagaatttcttaggtatatatttacattttaaatcttctacatacagtattgtttaaacaagaaaatttaaatcattttttttttctgagctttctgttgaataagttatgtttctggaaattacagactgtcagtttgaattaatctttttccctcccctttaagtaattt

SEQ ID NO: 68169 - DNA, 1060 bp, Homo sapiens
tttgtttcctttgctaatgagtaaaatgatacaatgaatagtcttacttgctccagtaattttgaacttttttcttattaggctttggaaacagcataatttagcaagaacaagactaggcttaggattttgccttgggcttgagctctgtttctaaacattcaatcagcatttattgagtgtttatgatacatggtaattggctaggtgtagggtagaaaatgggaggatttagataggagctggagatagtttctgctgttcccattctctctgttattggtatttgaccttgggcagcttttaaaatttcattgggcctaagttttttagctggtatgtaaagatgctgatagattcacttaataacctcagacaagttagaggatatgtgtggaagcccttgacactctttagaagaagggtgtgatataaattaaaagttatagcagttttatctgtggaataaattaatgggactaatgtttataagttacaatggataatcacttctattttatgtggcttcctcacatattataatagttaagaactgcaaatcccacagtatgatttttttcttttgcttgtttttgtgttgaggctctgagaaatttttaaagagtacgtatttaagatatgaaagagttgtgtgttgttaatagacaaaataattgctaatcataagatatatatatatacacacacacacacacacacacacacacacactttttcctttggaaagttttttctttgaagagtatggaaacactgcataattcagagatagcctcaaattttctttgctttctctgattcctttctgcctttctcaaactgtagatgaattctaaaaggctcttaaaggtccattttcttattttttctcttttatattacaaatccaaacaaaactcctttatccaagttcttctgcctgagcataggaaagaagttgaagttggagtgcgtatatacgtgtagggcatagctattgttgtaatttggtttgtagcttgataattatggaaattttcaaaatttattttaaagactg

SEQ ID NO: 68170 - DNA, 1086 bp, Homo sapiens
atttctaggtgtgtttgtataatggttaggagtgatggtggtgactttctgcatcctgtcagtcttattgttataatttatccggtatttctaggtgtgtttgtataatggttaggagtgatggtggtgactttctgcatcctgtcagtcttattgttataatttatccggtatttctaggtgtgtttgtataatggttaggagtgatggcggtgactttctgcatcatgtcagtcttcattgttgtcacaagttcaagattatgtatattgtattttgtctttacagtatctagcaccattctatcaatatagtagtaaacattttaggaaattatgctactggctataaaatagaaatagtgatgttgtattaagatgggtctcatactgttttcctgattggctggagaataacaagaattgctcatgtgctttggagtaaaccagaggtatctgaaataaagggaaatctaaatagaacatagacagaaggtaggattaaatgtttagttatatgagttacatgtagtggatagcaaagagcacagattgtatgcactagactattataaatattataaaaaaattttctgggaagactcccttggcatttctattgagcacttttcatttctgatctttcatttacagttttttcttctcttataggaatatgcactttctggttggaatttgaataacatgcctgtcctggaacagtctgttcttgcacatattaatgtggacatctctggtatgaaagtgccgtggctctatgtgggaatgtgcttctcttctttttgctggcacattgaggatcactggagttattccatcaactacttgcactggtatgtacagtctaaaatacagcatgcatgaactctactaaagtctagtggattaatgatgctaggtttttgatctttaaggtttatagacagaagtatatttaaggtttcaataatttctagccttggcctatttctttgggtagtaaaattgaactcagtgaagctatttagaagtatcctagagagcactgacttattttgatcattgtggggataattgaaatgtccat

SEQ ID NO: 68171 - DNA, 1106 bp, Homo sapiens
ttagaagtcttttgcctctttattattggctagttttactattggctagttttacagggttgaaataagcaataatgaaaaaaagtctttgaatttctttagagaaatgagtacctctattacagctgtcccaaacctttttggcaccaaggactggtttcatggaagacagtttatccatggatggatgggggtatggaggatggttttgggatgaaactgttccacctcagatcatcaagcattacttagattctcaaaaggtgctcacaacctaaatccctcacacgcagttcacaatagggtttgtggtaatgcttgcccggttggttgcccactgccgctgctcacctcctgctgtgtggctgggttcctaacaggccgctgatgggtactggtccacatcctggggtttggggacccctgctctgttattcttattcatttcaatcataacttagttcttctgtattttaataatcttaggcaatgaccagagtgagattggatttcttggatcaactagcaaaattttgggaacttcaaggatctactctgaagatccctgtggtagagagaaaaatcctggatctgtatgctttgagcaaggtgaggctcatactggtttagaaattagagcacaggcttgtgaatttaggaatatcaaatagatttggtaggaaacattgcttccaatagaggatttgtttgacaatgaaatgcactagctgggtatggtggcgcatgcctgtaatcccagctactcgggaggttgaggcaggagaattgcttgaacccaggaggcggaggttgtggtgagctgagatcgcgccattgtactacagcctgggcaacaagagcaaaactcggtctcaaaaaaaaaaaggacaatgaaatgcacatttgaataaatggaaatgacagttctcaaagttatctttaaaacttattttatatttgttgagatcaatatttaattactaaatattaatatttatcaggctctgtgatatacaatatgcaaaataaattactctagcctgctaatgttatcttgtgctgagtgtacaatgttctgtgttgagcttgtcatctttttttttgtt

SEQ ID NO: 68172 - DNA, 1062 bp, Homo sapiens
ccagacaaccacaaattgtccacactggtggctgagctactgacacctttcttttctgacggtccagtatacacaagcgttatgcaccagattattaaaaatattgcataaaattaccttagcctatgtataactttatatgaaacaaaagaattttgtatttaggcttggttctttctccaagatatctcattatgtatatgcagatattccaaaatatggaaaaatctgaaatccaaaacacttctggttccaagcatttcagatgagggatactcaacctgtattaaaattattttatcgaaaagaattgctcattctgtctctataataaagaagacttgtaagttagtctattagcaccatgatttgtggcaaaacccccctttaagggaataattaatgcattccttgtttacataccactgtgtttttttaaaaaaatctttctatttaggactggcagcctccatttgcctgtgaagtaaaaagctttcgtttcactccaagagtccagcgcctgaatgaacttgaggtaagtgttttgtcactatttctgcttcctgattcattctttatattagggctgtaggtagagaactttgagaagctcatgtaccacagcctagagtttgtgttaattggtattgaatggaatagttacttgatgtttggaggaagagtatgattttttaaaaactgtgcaaagttgttatggtttttccatttaactgagaaatgttcaatgcttagcttcagagacttagaattcttaaattctactttctctagtgtttcttactctactaaaatttttgttaatcttggaagatttctttctccctcggttcttggaaaatggatttttaaatcctattttaaaaccctagttttcagagtttgttttgttttggtttggttttggttttggttttaatggaactttgccaggagtgttaatctgatttattaagattttaagtattactttttaattactttaagtattattttttaattactttaagtattactaatttatcttaaattttctaaatggaa

SEQ ID NO: 68173 - DNA, 1320 bp, Homo sapiens
ttacgaagcacgggcggtgaggcgcggtgcttaagattaagcccggcgtgttttcgagtgcactgatacacaaaagggaaagggaccctcctcaccggaagcacaacctctgccctctggggcattacacattcctccgcgccggaagaaagcgtcacgtcgcgtcgcgcctcgccccgcctcgttgcgcctcgccccgcctcgccccgtcggcttccctcaatccgtacctctagtaaagaagagcttgtgcccctccccgaccccttaccaagggcgagctgcgtggagtcgttggactgggcagaactttggcgggcaaggagacaaacagccacactgtgctgccggggaagagaagaagaaggaaaggccagacacacaggcgtcgtgcagctgcggaaggattccgtttcctgcagggggcggagggatttgacagcacggtaacttccggaaaagtcctgaacctcagtggaaaagccttgcaagaaacaataacaaacgggaggaggaagcgattctggggtttctgtgttgaacggttcttgtccgcgaagatgcgcttcggcctctgtcaggggacttgaacgggcttagtgggcttcagccagcttttctccaccggttccccacggggacccccccccccccccggccgttgcaatggcgggcgtggggccggggggctacgcggcggagttcgtgccaccgccagagtgccccgtctttgagccgagttgggaggagttcacagatccgctcagctttatcggccgcatccggcctttggcggagaaaaccggcatctgcaaaattcggccgcccaaggtacctcagtctgtgaagagagagggggagaaggaagaatgggggagtccgtacactgggtttagctttacttttctgatccttgtctcgtttcatatgtactctcttttgagacaactggagcctgtttctggatgtttttgcctcggtttcttttgtggtcttatgtagacacgtctgaaagcgagaaagtggtgtctcttgggcctcttccgcctagaacttgggaactgatacttttctctcagccgtgggcctaaagcctttcgttagccgatatggtgtttaaagtacagtattatgacgtgacgtattcttccctcacgtatcctcattatggtttgatagtcggctatctctttattcaagacctggttggatcaaatatttgcaggcctcatctcagggctagggtttctgaaaaggttatctgagctctagtctcaccggatggtattactagacaagaactccagactaattattgcc

SEQ ID NO: 68174 - DNA, 1022 bp, Homo sapiens
cgccacgttctgtaaaccatctccatatcaagtcgctctgaaatccctttttatgttgttttttttaattaattaatttttttttttttttttgagacagagtcttgctctgtcgcccaggccagagtgcggtggtgcaatcttggctcactgcaaactccacctcccgggttcaagtgattcttgtgcttcagcctcctgagtagctgggattacaggtgcacgccaccacgcccagataaattttgcatttttagtagagaccaaggtttcaccatgttggccaggctggtctcgaactcctgacctcaggtgatccgcctgcctcagcccaaagtgccgggattacaggcatgaaacaccacacccggcccgaaatccctttttagcgtttgcttccttggcccagtccagacctaagctatcttaggttgagttctctgggaaacagactgtacagtggagatttgcttgcaggaattttattgggaagtgagggaacttaaactgggattcagttgcagcaggcctcgtccaacacgatagggatctctgaagctgggatggctcttcagagatatcctgaactgagcaaggggattggatttttgtgtttcctcattgaccaggcactggatatgggctgtccctgaggaatgagaggcagaaacttgggtgaggcagttcccttgtctggggattcaactacaagctatcagcaggcagcattcctggcagttggcagaatgagcccatcagccccgaagagcaagatctgagcagtaaccctcagcagccactaccattcccttttagaattagctaagaagtggccgggcgcagtggctcccgcctgtaatcccagcactttgggaggccgaggcaggcagatcacgaggtcaggagatcaggaccttcctggctaacacagtgaaaccctgtctctactaaaaatacaaaaattagccgggcatagtggcgggcgcctgtagtcccaggtgctcgggaggctgaggcaggag

SEQ ID NO: 68175 - DNA, 1024 bp, Homo sapiens
cacctggctaatttattgtattgtattttactttgtgtaggaaggggttctcactatgtcactcaggctggttttgaactcctggcttcaagtgattgtcctgctttggcctcccaaagcactgagattacaggcatgagccacaacacctggccttattctgatcgaataggatttactaagaaaatagacacaactattttagtggttgattctaaggaaaatttagtggttgattctgccagaagatgaatatgattatttaggtgacatcctgcagagttcccttatagagattcctatttgaaaagttaagcactatgattatgatgtttccctttgtcttccgaatcccttcattagtgagaaccccttcattacccttacaggtaaatgaatctgaactcctctgcgtgggaaatactgatatttcaatagcacacagaaaagctgagtaaaatcttcttgatggattttgttttctattttagatcctaaaataagcaaaagaagaccatcgagagagagaaaagaaagttctgagcattaccaaagagacatacagacactcatcctacaggtaaagaatgtattttggcagaccaagatggcttttatccacaggtgcagctctatgtcacataccctcagtgtcatgtgataagtatctccttgcacacaggttacatctaagcatcatgtggttaagaaaattgagattgttcctaatttctaagagcttatattttgaaaccatccttttctatttgaacattcttaaggtgctactctgaaccttcaattcaatatactaagccccatccaccaaaaccattacaaggtaagaattcactggcctagggatatgcagagattgcagagggaagcttgtctatgctgatagatcaacatttgatggtatattcatttatttagtgcttaggttccaaagtctaggaaagtaatgaactgttctcttacctcctggttatgtgtcatttggaaccatgatttttcatctagt

SEQ ID NO: 68176 - DNA, 1007 bp, Homo sapiens
ctcagctaattttttttttttttttgtatttttagtagagacggggtttcaccatgttggccaggctggtcttgaactcctgacctcacgatttgcccacctaggcctcccaaagtgctgggattacaggcgtgaaccactgtgcccggccaggagtacaataaatatttgttgaatgaatgaatgaatgaatcaacaagtctaatattttgaatccccaaatactacaacgatcagctgctctttgaaacctagttcttgaggcagctgctaccagagcttcctggactgaatggatcttacattacaaattgtaggttctttggaattccttcaactctcccagaaaaataaacaacttcgttacgacataaggacattaccttaatatattcactttgagcatggtgactctcatgcataacgggcaacacttttccaattttatcttctttcttcttacactgcaccctatattgcttaatctttgacatcaaattatctttttcaagcatccatgacttctctttattttggttttcagatctgagttgcagaaaatctttggtgctctcatagagcagttcttgggtgtggtgaagactaggaaagaaagtataaatgcagacatgaggatgcgcacacagcacacctgaaagcaaggattattccaaaatggaagagagtggttcttttaaaatggtgtgatatataaattttgtaaaatattagcaggtttaaaaatctgatcactggcaatcttacatgttttactgggtaaagtataatgtatctacccatgctcactggttcatagactggtctttacaggtactttcctgagtgcgaacttcagattatatgattagaaggactacagggatatttacacatagcctgcgttaactatggaccattcctaggaataagacaaggaagaactaaatcacggtgttctgacaagttaatacaaattctatagtatcaaaaacagctttgcttttgtg

SEQ ID NO: 68177 - DNA, 1095 bp, Homo sapiens
tgcccggggcgggggcgggggcggggccgggggcgggccaggttccgcgagcaggagagcccagagcccggagcccggtccggggctggcgggggcgcgggcggaggcaggcgggcgggcgccggggaagcctccttctgggcagcgagtgagggcgggcgcgcagggagggagggcggcagcgagcctgcgacgggagaggcgtggggaggagagcccggcgcggaacacacgcgcggaggaggagccgggctcggctcccggagagacctgctgggcgcccgcgcagcccggagacccctcgcgcccggagcatgagcccgagccccgccggagagcggccgggagagacggcctcggcgcagccctgagacgctgggccgggacgcggggcgccctgggcgcggggcccggccggggggcggcggctcggggggttggagcccgcgctggcggcggccgcctcggcgcagcgccatggggagcccccgggccgcgcggcccccgctgctcctgcgcccggtgaagctgctgcggaggcgcttccggctgctgctggcgctcgccgtggtgtctgtggggctctggactctgtatctggaactggtggcgtcggcccaggtcggcgggaaccccctgaaccggagtaagtagcacccaggggaggcgaagggcgcgggggtgggcggcggcggcggctcctgcgttggggggacccgcctctcatcccatcctcagacccgatttcccacccatttctccctcaggtgcccggcgtcgccccgcgcgtactcggggagagctgcgggcgggggaagccgcggggccgagcgcagaattcccgagcccgggcctgcccgccggccacgtgggtccggggcaccctgggggctcctcgcgtctcccctcggagagcgacccggagagaggctccccgcccgtcccgccgagacgctggcggagaccgggcccctccagccgctccgggcttgcggttcccggggaggaggtccgtggggtccacgcgcgagctagggattcgggtgcgggatgccctcggccgtccacacccaggcgcgcgctccagtccgcgca

SEQ ID NO: 68178 - DNA, 1043 bp, Homo sapiens
tggaccgggcagcaggtagattcctacttctgtttttaacttagccaaagccacttaatatttccgtgcctcagtttcctcctaggaaaacaggagagcgtggtctctttgcctttttacatcaataggtatggctgtgcgaggtggttttcaacgtactgtggatgggcctaacaaagtaaaactgacagtgacaggggccgtaaaagatcctgtaatagttgggaaaagaaatggagaaactcccgttactaccaggtgcccaacgcaagcccggggagccgaggttcaaagttctggcacgtggcctcccatgccttcactttcctcccgctttggggaaactcggacagagtggctgagcaagcagctgagaagatactctgactctgacctgtcgtcgtgtcagcttctctacccagagttgggtgtggtgctgtgccttctcttgtggccaaagagagagaattactagggacagtcgctgagctggttcaggttggaaatgtatatttatggcctaacctttctgtggtgatggaaatcattccggctgtgagttagaggagactggctctgccactaactagcgggggaatcaagggaaaaacgacagcttctcaggtgaaaatgaggcctttggtccaaatgatctccaaggtgtctttcagtctggatacgaagactgatctgcacgcaagcgtttccagggccagagagctcagcacatcaccaggaagccatagcttccaccccggggccacgactccaagcagcagagccccttcctctgatgaccaaaatctgccgcccatagtgaattcttccctcctctgggccttgttcttccttctgaaagacagagagtgaatctattctcccccgccatggccactcaggcccaaatggatgagctcctttggagtgtgtgtgggtgggggcctgggaggcgacacctcctcccagtgtagccatcattttgtttagccagtgggatcttgtgcacaaattaaaaacagagagaaaggcagttgctttgtgac

SEQ ID NO: 68179 - DNA, 1078 bp, Homo sapiens
aaaagattaaaaaaatacccaggcatggtggcgcacacctgtaatcccagatactggggaggctgaggcaggagaattgcttaactcaggaggcagaggttgcagtgagctgagattgcaccactgtactccagcctgagtgacagagcgagactctacttaaaaaaaaaaaatggtttctagagatgaaatatctcagagccaagggatgacatttgggcgcaaatccaagacagaaggatggcatgtgctggctccttttagatctcccatttaagtgccaggattacttgctggatcccaaagtattctgaagctcaggaagccgttggctttcgctgccttacctctatctgtaccacatctctctggttggcctttgtgacttctggctgactcgagtgggctgagggaggcacacccgcggtgtgaggcagtgactgcagctctggccaccacagccgttctgatttggaaaggatacaaaccctccagtgagagaggtaatgcagggcacagcagtaatctgagatgcaggcagggagagagggagaagcaaatgagacagatgtgtgggcagaggagggatagtgtggcatggagttgaaacccagtgaagcagcaagcacaaccgcctcgtgtgctcctgtgggcagggactgtgtctcatgcagctctggtgggtgtgtgcctctctgtcccagggaacctccttttcacgtggtttacctctcgtgtagctccttttcacgtgtccggtttatcgctctttatgctgatattccagtcaccaggctactatgtgtgtcttctaatcaactttcaattctgggcacatactaggcgctcagataagtaccttctcgttatgaatgtgtcagctctgaatttccaagcacctgatattttccactggcagatactgtgtttatcagggactgatccaagaatagaacctaggaattcttgttccctgtaccataatacatatacacaacaatagcctttgaatacaaatacagaagataagcgataagacatcaatggtttttttttttttaatcataagcgtattttc

SEQ ID NO: 68180 - DNA, 1067 bp, Homo sapiens
gcaacatagcaagacccccatctctaccaaacaataaaataaaataaagaaaaattagctgggcatggtggtgtgcacctgtaatgctagttattaatacttgggaggctgaggcaggtggatcgcttgagcataggagttggaggctgtagtgagctgtgatcacgccactgcaccccagcctgggtgacagagcaaggccctgcctcataaataaataaatgcttatctgagcgcctagtatgtgcccagaattgaatgttgatttgaagatacatgcagtagatgttaggcgccattgtttattataacttaatcagcttttcaataccctctgtccctgttttgattggttttagcatgctgactttcacatatcaaagaatcctaggacagggtggaccccaggggtgcagacatggaagaaaaccaaaagcaaagcagaagtccagagattttaaattctgaaatggattatatctgcatttcttcttctaggcccatggcagacatctccaatagaacatgaaattcttttaccgagctcagctgcagcctcagaattttctcaacatttctcaccaggcagtcactacaaattgacttgagctgccccttaaaaaggttatctatttacccagcctcctgattttaccagtgaagaattgaaagcctggagagctttaatcaacctgcccatatagcagtttataggactcctggtgcctagactattgtttacaacacaccatgccactcaccctctgccttcgctcattccctttttgtttgctgaggatgcctccttttaacatctgagtttcacgaggtcagggaagatcctttctttttctaactgccctaacaatctggtagtatattgtgcctgcatatagaccaacctcaagtctattgatctatttttttcttaccagtgaactagctgaagttattgccactcagttgggggtggatcatgcatgttcccaactcagctgcctttaggggtgatccatgcactgacaccctgcattgacattgatattggagagtaacctgcaaagaag

SEQ ID NO: 68181 - DNA, 1165 bp, Homo sapiens
ataggccctgttttgcccatttgccctacttttcaagagaaacaagaaattgagggttttatgtgaaatttcccaagttttaaatgttggctcaaatttttctaaaatacagtgagctaaagtcaggaggcagctgttttatttttcttgttttcagcaccagcatttcccagccctgcctccctgggctgctcttgccgaggcttgctggccattctcttgttgctctcttgttcgatagcacagcatcctctaacgttaggattttgcaacttctaacttaaggctttcacctccagcagatgcacaaacttttaggagaagcagcttttttttttacgtttaatttttttaagagttggggtcttgctctgtcacccaggctggagtacagtggagcaatcataccgcactgcagccccaaactcctgggctcaagcgatcctcccgccttggcctcccaaagtgttgagattacaggcatgagccacgcccagccagaagcaactctttaaaatcttatctttcacttatcaacctggataaaggttctgaaagcaagtttcaacaggaggttcatgggaggatcacatctaaggttctgatgccttaaattgtggttgtggcttggtttctctaatggctttctgctgagcctagtcctgcatgtaacagggctccagtggcaggtggtgggagccaggataactgagctgggcagaatgatgcagtgggcagaaccttggctttctagtatggacattcggctggtacacaccttccggtcattccacttatgctgaaatactgaaatatttctgtattgggaggtaaatagctactgccctgaatcccgtgggtgccccaacccgggacccaccaggccttcatactatccagcaatgaatggggtcatgcctggctacagtgtgtctctaggaccgtgcttcaaggccagggctggcatccattctcagtgctcaatgcccgtattatggtgctgtaagcattttgaactcacccctggataaatctgaatttgaatcctggctccactgcttttttttttttttttttttgacacagggtctcactttgtcacccaggctggagtgcagtggcaagatcttggctcactacaacccccacctcccaggttcaagcg

SEQ ID NO: 68182 - DNA, 1003 bp, Homo sapiens
gtgacatgacccactgggtcccaaaagtcggtggtgcccagttggccactcaactagggagattgttaaatacagatgcccctacatttagaatgagaaattctaattcaggaggtctgggtagagtccaggaatcattgtttttaccaagtgccctgtgatgatcctgattaagagctgaatctgggaaccatgctgttctcttgtcggtcatctctgcctgtgtttcttcacacagaaccggtgcaggcggtactgtacttacggcaggtgctcagtccaccagggtgacttgatggattcacgtgaatccatgagtgggcctgggccagctgaggcagggccttcccctcgccctttattgctgcctctgtcacagacttcattccgtctcctaggtgggatctaggcctctcctaaggctgagagcacaggacaggggagaacaagcctgagcctcttgctgggcttcaggataaaccagacacacagaatgaggattgagttgccttcccaggaggtggagatctgagctaggcagattaacttgtttatgagggtgttctccattgcattccccccgggcatggacccagttggctgaccttgtgtggaccacctgttgacagggcttcctgtgtcccagcgtcctgcagccctcggcatcaggtgctctgacttggagcaactgtcgtagttaagcgcctcttctgcctggcagctgcgctcattgcctcctaattatacgctctggggcctcccttgaaggtaaaatattatatcacagctttaggggtctgcttccagtgttgcattggttccaaatgatgaggacaggcaagaggtgtagggacacagggctgagagacatgttaagagacggatacaaagggattggaaagagaaaggagaaacaggcgggtgaaagatgaaatgttaagagaaagactgaggaagagggaggccaagaaagacatgaagcaagggaagttaaaatctggaa

SEQ ID NO: 68183 - DNA, 1021 bp, Homo sapiens
aaggacaggttacaacaacctcagtttgactttggcaagttataatcatcagacctcgcagatctagcagctggcagccctccagatcagataatgtaccttatttgttttcaagcttgatgcagaaaagagaaagggcttaataagatccttaaaagagtgtgtttttccaaaaggagccgtcaggtggggagagggcagggtggccgtggctcctggctgctggtcccaaacccagtccctgtgtgggcctggaaaacttttttggcctcagggccatacctctttctgctttccttggattccattgcttttgcattcaacaaacaaaagggtctgtgtgagatacttgttaagacatgttaaaaaaaaaaaaaaagaaaaaagaaaagaaaacaaacgagttaaatctcagctccattatctagatgttgtagttcttgggcagatatgcactctccttaccagtcaggacctcagttttctcatctgtaaaatgggaataataatacctaccgtaaggattgttaggaagattaaatgagaccatttatgtcaagtgcttagcgtgatgactggcctgcgcaaacgcacattcgttagctgttgtgtttgtcctctgttaaatgcatgtggtgggttaaacttgttgtgttaaacctgccactatcttctgttgaacttgttggtgggttaagtgggttaatgtacagaggagggctttgtaaacagtgttgtttcccacccaggtcccttttgacatcttactgtagtcagcgtacaagtctagcctcttcataaataacacaattttatttatttatttatttatttatttatttattgttgttgagacggagtctcgctctgtcgcccgggctggagtgcagtggtgtgatctcggctcactgcaatctccacctcctgggttcaagcagttctcctgcctcagcctcccgaatagctgggattacaggtaagcaccaccacaccccactaatttttgtatttttagcagaga

SEQ ID NO: 68184 - DNA, 1676 bp, Homo sapiens
gctcatccccctggagctgaggatctggggcgggcatggggtgctcacgctcactcaccactggcgtctccgccctgcagttccggggccgtgccaacctgcatgtgtttgaagactggtgtggcagctctatccagcagctcaggaggaacctgcatttcccactgtacccccatgtgagtgcctgagggctgccttgcccacctccctccacacctgcctcctctgcccacttctgtctctcatctttccttacatcttttctggtccatattttctcctttatctcttgagctctctttttgtctgcccataatagttcccttgtttccttcctagggatcctttcaatttcatcccctgcatcatttcagtttcaggctctctggctcacaatatagtgtacccagggccaccatgtacagttgtgctggttgtgcactgtacaaggtctcctggacaaagaggcaaatgggaactgaaattgagcctgcactccactcacaaagccacagccctggtccctcctgtcatagtcccctcctggtcttcccgccaatcctggcgggaagtttccttttccctcttctgggtaactgtttccttcccctttcttggcatagattcgcacaaccctgaggaagcttgctgtgtcccccaaatggaccaactatggcctccgcatctttggctacctgcacccctttactgatggtgaggccagccccaaaaccccatccttcttcctgctctagagttctgcatcggacccaaagaacataagataaggttataggtagactggactaacttcctgttagtccaccctcaggaagagaggggaaattgagtcatattgcggtcttgtccaactcccacaggctgctgctttgctccctggtttgcagcctggaaccagctcatctctccatataagtcttctccatcttcacactgtctcccaggatgtagaaacccccactttacagagagggaagccacagcatcaagcactgaagggaatttaatcgctaagacactcacaaaagcctccagcttttatgctgatgccctccttgccctcatctggaaactctccccgctgcccagggaaaatccagtttgccattgctgcagatgacaacgcggagttctggctgagcctcgatgaccaggtctcaggcctccagctgctggccagtgtgggcaaggtaaggccagctcaaccccggtccctcccatctgctcctggagcctgttcattgagtcctccagcagctgctcattactgttagcatctctggtgtgacagcggggaagaaggggtggaaaagaagtctcctccctcacccctacccctctacaaagggataaactgaggatggggaggagtgaggagtggggaggagcgaggtgtggggaggagcgaggtgtggggaggagtgaggaatggggaggagcgaggtgtggggaggagcgaggagtggggaggagtgaggagtggggaggtgagaggagtggggaggtaagaggaatggggaggagcgaggagtggggaggagcgaggagtggggaggtgaggagtggggaggagcgaggagtggggaggtgagaggagtggggaggtgcgaggagtggggaggtgaggagtggggaggtgcgaggagtggggaggt

SEQ ID NO: 68185 - DNA, 1185 bp, Homo sapiens
agctccgcagagcagctggtgcgtggtccctggggcaagtcggccggcggaatcccacctccacccctcatcactctggcagactacccaagccttctgtgcctctgtgttctcctctacgaacaaggattacatgaggtcacatattgaaagcatttagaacagtgtctgccacagtctctgagctctaacggcttctgttactgttctttgggttcttccgatcatcctgtggaggaggtactctgattatgcccatctcaccaagagaaaacagctcacactgttagcaagtgatagagtgggggctcgaacctaggcagttaactcctggcattctaagagcaaggagaagggatgagggagtgtaaggtgctggaagggggtgggacagagccgcgaccccagggcccatggagatggcgctctgcttccctgccctctctcccgccagcctgtcagcctcccacaggtactacttcgaggtgctgcacaagcagaatgaggagggcaccgaccacgtggaagttgcagtgagtttcctgctgctcccgcctctcccagctcagttcctggcactcatctccccttgtcccttgacccctgttggaaatccagctacctcccaccttctgcatctaccctctctctcctcttccagtggcgacggaacgaccctggagccaagttcaccatcattgactccctctccctgtccctcttcacaagtgagtaggctctggccctgccctggagatggaggccaggtggggacagcctaccctgggggatttggcaggggaggaggggaggaggggaggaaggaagctcgagatgcttgggacacgggtatgaaggggtccagaacaagagtgggaccttatgaccaggagtccttaactccccagggtcagtgacccctttgagaacctgctagaagctctctgagcccttgcctcagaaaaatgcccttgtctacccacccacacacaacattttgaatacaacttcaagggagtccagagactgtgagctcacaccagatctaaaaactctgaggctgggtgcggtggctcatacctgtaatcccagcactttgggaggccgaggtaggaggattgcttgagcccaggagttcgagaccagcccaggccacatagcgacacctcatctctacaaaaaatt

SEQ ID NO: 68186 - DNA, 1045 bp, Homo sapiens
gcggaaactcctggctcagccccgggagggcctgctggcccccttctccaagcggaactccacagcgtccttcccagggaggaccagccacattccagtgcagcagccagagaagaggaagcaaaaacccagccctgagcccagccaagattcacctcattccgacaagtggcctcctgggcaccctgtgaagaacctgcctcagatgagggggcccaggcccaggcccgctggtgacagccccaggaagactcagtggctgaaccaggtggagtcgtacatcgcagagcagagacggggtgacaggatgcggcctcaggcccctggaaggggctggcatggggaggaggaagtggtggcggccgcaggccaggaaggacaagtggagggagaggaagagggggaagaagaggaggaggaagaggatatgagtgaggtgttcgagtacgtacctgtgtttgacccggtagtaaactgggaccagaccttcagtgcccggaatctcgacttccaagccctgaggactgactggatcgatctgagctgtaacacatctggcaacctgctgcttccagagcaggaagctctggaggtcacgcgagtcttcttgaagaagctcaaccagaggagccgggggtaaggtaaagggctctcctggggccagggactggggcacgtggcagccagctggcctggaaggcaggggcctaagggctggtagtgggttcccccagccgcggaaatagctggaactttgcccccgactcaggctcctgggaaggacaagtgcccggggcccctgtccctggagaggatcttgaccaggcaggtgtttgtcccgccattaggcaaggttctgaaatccctgggtgcctggcccagtacgtgtgttgaggactggaaggactcagtagatgaggtcccctcctccgaggaaagagctagtaaatagacaaacaggcaaaacagaggctagaaaaatacaaattaagaccctgcatgtgggctggaagggttagggcgtgatgcatgactggagttcttt

SEQ ID NO: 68187 - DNA, 1233 bp, Homo sapiens
gaactacaggtgcccaccaccacacctggctaattttttatatttttagtagagacagggtttcaccatattagccaggctggtcttgatctcctgaccttgtgatccacctgccttggcctcccaaaatgctgggattacaggtgtgagccactgcacctggcattgtgttttgttttaaatagccatcctggtgagtgtgaaatggtatcacactgtggttttgatttttatttctctagtgactaatgattttgagccaaccaattgacatctgtcttataactcattttgtcttatggaatgttgattcgaccgtttttattgagggtcagtttctcagggaacctcttcagtgtgacccctcttattcagctcatgtacttagaatcttggagctgtaaaagaccttcaggatcatcacagctcaacaggtacattttcaaagagggaggcagcgaaccctagagagattgcgaatcttgcctgaggccctatagccagccagtggcaaagctaggacaaaaaccagggtctcccaacaactagctttgcaggcttctcacacaccgtgctaccctcccagtgtggaaaggaaccactcagcctccccacactttctgccataggaggtaccagctacagcgcattgtgaacgtggaaaagcgtcaggaccagctacgtgggggtcgctacctcctggagcttgaactgttggaacaaggccagcgcgtggtgcggctctcggagtatgtgtctgcacgaggctggcagggcatcgatccagctggtggggaggaggtcgaggcccggaacctgcaaggcctggtctgggacccacacaaccgtaggagacaggtcctgaatacccgggcccaagagcccaagctgtgctggcctcagggtttctcctggagtcaccgagccgtggtccacttcgtcgtgcctggtgagcctcaagctgagcctcggcattctcaggggcggggtcctcacactgtcaggagcacccacatctgcttgcactgatttgatcccataagcacttctgagaaagaccaccttatagttgaggaaactgaggctcacaaaaggaaagtcactggtttaaggttatgtggctagtaaatgttgccgctaaaaacaaacactgcctcataggccagtgctctttctttcgtactaggtttcaggattgggtgtgataactggggttgctaacactggggatga

SEQ ID NO: 68188 - DNA, 2646 bp, Homo sapiens
ttttatatgagaaggaggaacacacaacaggcagaagtgtaacaacagaggtaggatgatggggataggacgacgatactaagagggacagataacagggtttcactagtagagcgtggcagggctactgacaatgagccccagccaaggccttctcgtgggtcccctgcctgggaggagggaacgtggggagcaggatgcagaggcccccttaactggtgagcactccctctgcctcatgtctctgtgctgcactgctaatggttttgcagagttgcactgtcccctcagccgaggtccgatgggcactcctgactcacctgggagctgggggtggaggcgctcatccgctcatctttgccttgtctgtgtttccttctcctgcctgaccccctggggtagtgaagaaccaggcacgctgggtacagcaattcatcaaagacatggaaaacctgttccaggtcaccggtgacccacacttcaacatcgtcatcactgactatagcagtgaggacatggatgttgagatggcactgaagaggtccaagctgcggaggtgagggggaccaccagccagggggtggcatgggccacgtccatcctaaagtcctagggctgctgggtccagggtagagccaggagtcctgcccagccttcctgattcctagtctccaacttttcccagagggctcacctgcccataatcccatcccaggagcacacatcatctctcttctatgcctgccaacttcctccaggggaccaccgcagctgagtcctgatacgcagccctctctccccttcctgcagctaccagtacgtgaagctaagtggaaactttgaacgctcagctggacttcaggctggcatagacctcgtgaaggtaaagggcctggatggggcctgcgagatggaattcaaggctggttaagaggtagagagacatttggggtaaatgaggtggtgagcccctcagggaggacgggaatgaggacacaggaggtcctctctgctgtgctgcaggccagtgctagggtgggaccagcaaatcacagtggagcatttgcccagttgtccagggtccttggagcctataaagagtggggaggagtcagaattcactctgatggttaagacctgtgctccaatgttcagcactgtggaactctgcccagcagctggttttgtgggagtttgtgaatcactccaatagggaagactccgaggcttctcctagacggcgacctgacctcctagctctggtctgcagggtctgctgaccctgcccacatctgtccccaggacccgcacagcatcatcttcctctgtgacctccacatccacttcccagctggagtcatcgatgccattcggaagcactgtgtggagggaaagatggcctttgcccccatggtgatgaggctgcattgtggggccaccccccagtggcctgagggtgagccctgctcagactggggagggaggaaagacttctctgatcttggctcttaactccagagctgggaacagtcatatctatgagcgtcagcatcctcctcccctgccccaccctgccctcctgtggccttcactccccggaaaactcaccagacaaggtccccttgggctgagctgacagccacagcagcaggtgcagcagtgcacacctcctgcgccgtcttctccttgattcattcatcacacacttactaagcactgctgtgtgccagatgctctgccctgtggggattcaaagatgggaaaggtagcctccctgcctgtggaaagggaaacggacatgtaaactgacacacagctgtgtcttctgtggctgccgctgtccgatccatttgtagggttgttatcagcccatgggcacagcctggtagcactgctgagccctgaaccttagttaggggtctttcctccaaaacaggcaaagtacttgttcagctaagacagttttcagcctccctcaaccccagcctctgactttcagaagagcctctaggcacacagcctggaagcctccttccttcctcctcctggcctctggctcatctcacccgaagctcctgtctgtccacaggctactgggaggtgaatgggttcgggctgcttggcatctacaagtctgacctggacaggattgggggcatgaacaccaaggagttccgagaccgctggggcggggaagactgggagctgctggacaggtgactgggaagaggagggcatccacgaggcctgggaattccatggcgctccaggcagggagccaggctacagcagcctagctgtccccctcggccgcagagtcccaaagcacagtaaagagcactggactcggaggacgccctcaaatcaccggcctcgctgggactcagtttctctattagaggggtgtgactcgccctctgtctgtgtcacagggttggtgtgaaaattaacatgcctggtacaccgtgtaccaggtacaccaagctgtgtagacataaaccatgatgttctcagcaccaagcagggcaccgtgggagagactgcatcctccccagcccgagggtagtgcgcctcccgtcagctgccgagcggggagcccagagttgtgggaatggataagtagacctggcaaaggtcaggaaagac

SEQ ID NO: 68189 - DNA, 1048 bp, Homo sapiens
ttgccccaaatctcactcacttaagcgttagaggcttgaaaactaggtctattggtgttttttcccgttgagggaagaaagaaaaggaaggtgacacactaagagaattcgagtgaaaagggggaaggtaaaggaacgtagataactgggagctcataaaaagggtctgagatcaaaggagcccccagggcagctggaagccttgatttgggaagccgggtccagcagtcacctccaccttgatctctgtgctgggcttttgctgccatgcacggctcctgtacagccctgaacctcctgcctcctcggaggctcaggcatccagttcggccactctcagccctgccagaagtgcagcctccctgtgagagggacaccctgcaggctgcacatgcacaaaaggcctggggagggcctaggcgccaggtgtctcagtgcagcagccctgccttcctccgtctatgacgtgtgccctggaggctgggcgccagttatggggcactcagagtgtgccaggagccgtgctgagccctcagcatccatccttctcgtcttccccacctctgatgtgtatatagtatgtctactctaatattagatagatagaattctatatcacacattatcctctcattacacgtatgtgataatcgtcctcctagagatgagcagacaggctctgaaagaaggcgtgacatacccagtcatgcagctgggatccaaacccaggctgcctggcttcaaagcccacagccgtccactgcacctgccttccctgccccgtggggagcgaacagagggtctgtggtcgatggggaggggccccccagctgccttctgtgcttctgttggctcatctgtgtttctcctcctccaggatactccaagcgggcctggacgtggagcgtctctccctcaggaatttcttccatcatttccattccaagcgaggcatgtggagccgtcgccagatgaagacgctgtagccggagggtgtccgcggggcccagcactccccgctctggactagcagtggctccccagggcc

SEQ ID NO: 68190 - DNA, 1062 bp, Homo sapiens
tatttttagtagagatggggtttcaccatgttggccaggatggtcttgatctcttgatctcccatctcccgtctcggcctcccaaagtgctgggattacagttgtgaaccactgtgcccaggctctctctcttttcttttctgttttctttttttcttttctttttcttttctttctttctttttttttctttttctttcttttctttttgacagggtcttaccctgtcacctagggtggagtgcagtggtgcaatcacagctcactacagcctcaaactctcaggatcaagcaattctcccatttcagcctcccaagtagctgggactacaagtgtgtgccatcatgcctggctaattttttttttaaatttttttatagagatggcatctctctatgttgcccaggctggtcttgaacttctgggctcaagcaatcctcctgcctcagcctcctaaagtgctgggattacaggtgtgaatcaccatgcctggttgtacactactctttcttacttgtctctccttctagtttgtcttcactgccacaggggaacctcttctagtagctgctatttcttcaagaaggacgtgaagctagagactcaggagtgcttgtttgttaggttggaattaggagccacatccaggagaggctgagtaagtccttcatctcatccagtggtagccaaacttttcaagcctgagtacctctttaagacttcaaaaccttagctgggagcagtggttcatgcctgtaatcccagcactctgggaggccgaggtgggtggatcacctgaggtcaggagtttaagaccagcctggccaacatggcaaaaccccgtctctactaaaaatacaaaaattagccaggcattgtggcgcacacctgtaatcccagctactccggaggctgaggcaggagaattactccaacccaggaggcagaggttgcagtgagccaagattgcgccactgcactccagcctgggtgacagagtaagactctgtctcaaaaacaaacaaacaaacaaacaaacaaacttcaaaaccacttttgga

SEQ ID NO: 68191 - DNA, 1781 bp, Homo sapiens
cggcccctcccactcctctgccccggggccgccaccgcccgggcgtcggacctggtcccgtgctcgcggtgccgccgccctctgggcctagcccgcccagctcggcgagcggcggcagtgggagccgcgtccgccgcatccgcctcgactcggtgccggcccctggccctcccctcatgactgcggcgcctctgctgccaccgcccgcccggccgccgctcgccgcaggatggatgcggaccgtgcggcgctaacccccgtggctcagctcccgaatcgcccgccttcgagccctcctcgtgagccgcagcagcctcggtgccagcccccgccgcagctgggcccagcggtccgcctgtccctcgttgcggcttgtcggtgctgagtgaggcgtcgtccgggtcggcgcgaacccgcccggccgcggttccctgcagacctctgcgcgggcggctcggcccttcacgcccttttcgttcacgaatccgagcccgctcgcctctctccagcgaaccgaccatgtctggcggcgccgcagagaagcagagcagcactcccggttccctgttcctctcgccgccggctcctgcccccaagaatggctccagctccgattcctccgtgggggagaaactgggagccgcggccgccgacgctgtgaccggcaggaccgaggagtacaggcgccgccgccacactatggacaaggacagccgtggggcggccgcgaccactaccaccactgagcaccgcttcttccgccggagcgtcatctgtgactccaatgccactgcactggagcttcccggccttcctctttccctgccccagcccagcatccccgcggctgtcccgcagagtgctccaccggagccccaccgggaagagaccgtgaccgccaccgccacttcccaggtagcccagcagcctccagccgctgccgcccctggggaacaggccgtcgcgggccctgccccctcgactgtccccagcagtaccagcaaagaccgcccagtgtcccagcctagccttgtggggagcaaagaggagccgccgccggcgagaagtggcagcggcggcggcagcgccaaggagccacaggaggaacggagccagcagcaggatgatatcgaagagctggagaccaaggccgtgggaatgtctaacgatggccgctttctcaagtttgacatcgaaatcggcagaggctcctttaagacggtctacaaaggtctggacactgaaaccaccgtggaagtcgcctggtgtgaactgcaggtaaagccccacctactttatttgacggtcctttggatcccaaatttggctcggcgaagccagttgatcgagttcacccttcacttggcattctctgttggactccgagtgggacggggaggccaacttttgaaaggggctgaaattaggagaatgtggagcatgtgcctaggtgttgggataggataagaattattggtagccagagggatttgctaccgggcagcggtggtgaaggtcatcttagtacaaacgaattgtctcctggtttagagtctggcaggaaacttggaatgagtggggaagttgaaagtacagatgcttcttcttctgtgcatttcaatctcatcaaaggctctgcagtgatgagctgcgtctgggtgtagaagcgtgttttcattcctgagatcaggctgttctttttaaatgagaacaaccttgtacctttggatgtattttgcttgatggttgcacaggcatttagtataaaataattattaaaa

SEQ ID NO: 68192 - DNA, 1045 bp, Homo sapiens
ttgcatgcactactgagcataatgggaaaagaaaagtgctataaaaacctaagtaccaagtaactagctagaaaaagcttttaatgggagagctggcatggtcattaatctggtagaatagtatttgaggaaacagttgcatgtgttaagctgcagtttcttttggttattgaaaaccaaataggaaattctgaattaatacttacatgctgaagtatctttgtggagcttattttgagcgttagagtgggagacttagttctaatgcaaactatagaagaatgaccttgggtaagtttgttgtctaattagtaaactgagtggtagagttggataatcctgtcagctttaggcccatgccttaaatatgcttcttatcctctcacagtcaaaaaggatttttaccttggtacagtctgattcctgcaacacctctctagttattgaatgtatagtagtttgctatagacagactactttgcagtggctatcaaacctttctgagactcattctaagaaatacatttacattgtgacttagtatatgcacacataaaaagaagaaagtttcacaaaatagtttccttactagcaatgagctgttttttgttttatttcgttaacaacaacaacaacaacaacaaaaactgctaaccatctttttcttggggttgcactactgtccaatgagcacatagtgagggcagtactgctaacgcctacataacatgcctgcatcatctagagctttgctttaccttggtacaatttttggaagaatgaaaaactgcttttccacagggggaaaatactgtttactgcccatctttgaaaaacattttacttagagcataaacttgaagctagatccttttaaccacttaattaaatcatacagtaagttgttgatagctatttgccacaaaatgaaaatatagtggctatatgaattttagctgctgtcactgttcattaatcataacataagctctgaacacagtgtttcttcttagaaaggtacaaatgattatgattttgtataaca

SEQ ID NO: 68193 - DNA, 1064 bp, Homo sapiens
tttgtacttttagtagatgtggggtttcaccatgttggccagcctggtctagaactcctgacctcgtgatccgcccacctcagcctcccaaagtgctgggattacaggtatgagtcaccacgcccggctgatactgttattcttgtaacaaaaaagcttacaatgaggaatacatttatattgttttgcttaagattaaagccatataaaaaatttacagcagaacctggaagttctttcttgaccctaacctcctttactcctttgcccagaggcaaccatatatttgtatgtatttccaattcttcatgcttttacacaaatatgtactcacattaaaaaaaatatatataaacatattattctatgactttttttttctttaattcatagagttcttaatcaggtctagtgaactcaggacaagagacacaacttggatataaatacctttaagcctctgttttcttcatgtgtaaaatgagggtaatgttttagtgttattacaaggtttaaatgagactacatgtggacaccttagcctggtaactaagtcacggtagctgctattattaataaacaaggctaacatgcttctatatgatcctcctgtacctaagaaataaacttatagcaatagagcacaatcagccagccatttaattttagagaataacatcttcatgtggcctagtaaaaatgactgttaccaaataataggctttttatgatgaatgaatgagtcagatgttttctctgtagtttttagaatcattgagataccaaattcttagctgttttatggaagaactttataaagtagagtttactgaagttgggtgactagaaaagcctataaagttaaaaaggagaaaacgtgttggttctcctaattaatgtaaattaaaacaaggagactgcccacaagagctaaatagtaaatttcggtcaaaaataatgatagtatttcttttttcaattggtagtaaaacattggaaataattattccaaatgaaaagacaggttgataacagttttcaaaaggatcaggataatagagatt

SEQ ID NO: 68194 - DNA, 1014 bp, Homo sapiens
gccaggtgtggtggcacacgcctgtaatcccagctattcaggaggctgaggcagaattgcctgaacccgggaggtggaggttgcagtgagcagagattgtgtcactgcactccagcctgtgcgacagagcaagactccgtctcaaaaaaaaaaaaggtgaaatagatgcccatgtcttgctaagtcagtgtggtgcagaaaatgataaggagggagtattccaatattgacctaaaatattttaatcaagaattccagacacttttctccacccatattttgatatgtagagttatcatgtgtggtcttaatttagcagtaaaattttgaatattgcacatatataatactagagaaatttaaatgttaataagacttgaggaccagataattttggggatacagttgttagctgtaaagtaaaaatttcaagtttaatgaatgaaaactagtctcactgctccattagcacaattggtttggaaggtttgcttctgggcgaataaagtgaacaatagcaaaggatgggattgctactttaaaaatactaaaatatgagggtaaagagagatgtctgtcagaggatgtttaaaatgaaacagcttcttaaaagcaagggacggaagatgtgcaaatggttatgaggtcattgtactaaacattagcattgtgcttctcactccagaagaaattacatcagtggataatctactgagcactgtaatttgggtagtactgagatgagcaattgttttagttgttgcctgacccccaccccacccccagcagcctggaactgtgcatgttatgaagaggtcatgtgacacggatccttggttttgctcatttatcctgtcaaaacaacttaatgtagatggaaagaaatgaacgaaatgaatagaatgggttagctgtatcagctttagtttatattgaaggtaatgaatgctgcaattgggatagtatagtatattaaggccccaggaatatccagctccataatggtgaagagaa

SEQ ID NO: 68195 - DNA, 1160 bp, Homo sapiens
gggaggatcccttgagcccaggatttgaggctgcagtgagctatgatagcaccgctgcattccagccttggtcacagagtgacttcctgtcttttaaacaaacaaacaaaaataaaaacaatgttttggttaaagatagattgattttaatcaaggcaaagatagaactggaatttatatttaggtctttgcctccaaagcctatgttcatttcctgacattaaattgcatgtctagcaattgatgacttatgttggatatggaaagttaactgcaccttacaaaaatgagactatatctgagttacacattaacagtaaagatactaaaatgatctcaagcatgaatgtatataatccaaatctatcatttataacttcagcatttgcattttttaaacaccatcgatcatgatttagtaatgtttaagtgtctaagattaactgtctgatttggtgttttatcattttaaaccacattctgttttggtttttgattttaggatcgaaaattaacaaagtctgagaggcagagatttaaagaagaagctgaaatgttaaaaggtcttcagcatcccaatattgttagattttatgattcctgggaatccacagtaaaaggaaagaagtgcattgttttggtgactgaacttatgacgtctggaacacttaaaacgtaagttcatcagtattacaaaagctgaccaagaagtatgagagaatttgattttttaaatttcaggtctaccagtttcactttggttgttcagcctaagaagggaacagtccttccaactgttactgtattagcatatttccttgcccacaaagtcctctagtatataaagtgatttgataattatttcttggtaagtattgaaatgagaagttatggccgagtgtggtggctcatgcctgtaatcccagcactttgggaggccggggcaggcggatcacctgaggttggatcacctgaggtcaggagttcgagaccagcctggccaacgtggtgaaaccccgtctctactaaaagtacaaaaattagccgggcatggtggcgtgcacctgtaaccccagctacttgggaggctgaggcaggagaatcgcttgaacctaggaggcggaggttgcagtgagctgagatcacctcacttcattcca

SEQ ID NO: 68196 - DNA, 1103 bp, Homo sapiens
aggaattcatatttggtgctttgttaccataattctcttaccaatcactaattaaatatttttggctctgaaatatttagctgatatagccaacttgatctcccatttctttaagaaaaaactagttacctaatactatcattgtttagatgaaaaagcatttggaagacttatttttctgggtctcttaatagaatttttattttaaactatcatagccctgcttactaaaagtattattaacctttagtgttactgaatcttagtatgctaaatttgatattcccatctccagtcatgttagaatttaatggaattcttcaaagcaacaaactcctatcattgataacttgtttggtatactttgctttttctaggtatctgaaaaggtttaaagtgatgaagatcaaagttctaagaagctggtgccgtcagatccttaaaggtcttcagtttcttcatactcgaactccacctatcattcaccgcgatcttaaatgtgacaacatctttatcaccggccctactggctcagtcaagattggagacctcggtctggcaaccctgaagcgggcttcttttgccaagagtgtgataggtatgtttcaggtgtaccttggagcctgactggctttctcacattccttttatttagaatcctggctctgtcagagttttaagtgatataaaccttaagaaattcatagcttgaactcaggaggtgatccattgtacttatgagatataggattctctatatttgtgcttcttggaatcatcttagagactattggtaacattacgttacaagaaataaagtgaactttgttgataaaacctaatgtaatagccttttttgttgttgttgttgttgttgttgttgagatggagtctctctctgtcacccaggctagagtgcagtggcacaatctcagctcactgcaacctccacccaccgggttcaagcgattcttgtgcctcagcctcccgagtagctgggattacaggcatgcatcaccatgcctggctaatttttgtatttttagtagaaatggggtttcaccgtgttggccaggctggtctcgaactcctggcctcaagtg

SEQ ID NO: 68197 - DNA, 1032 bp, Homo sapiens
agtaatccatttcacggttctgccctcatgacctgatctgctctcatgacctgatcacctcccaaagaccttcacctcttaatactgtctcattggacgttagatttcaacataaaaattttagggggacacaaacattcagactatagcatacatgaaggaggaaatatagagtgtcttaaaaggtattgtcctagagctaggtttattatatcgttgtttgtattcattgtgcacagcacaccgtaggcactcattaatattttgaagaataaatgattcaaagtaatgtcaaatatagtcaaaatcagacattatgtatatttgggagagttgtatttactctgtgaaagagaagtgaaatttgaggtgaccttcagaattatcctactaaaatgaagttgaatagcagcaagtagaaactgatgtacctataaaagcaatatattttatattaatggcaaaaaacacaattacttttgcatgaacctaatagaataggaaaaactatttggtgcaaataaagcagaaaacaataataggtagaaaggctatcccaggactagaaaggctcttctgtaggttctcaaatctcagttgtaatttctgaacaactagtttaactctttccattatggggctaggtctgtattttattttattttatttttttaggtatttccccttaatttttaccctataattactactctcactttgttctttcttccctgagacttcatagggcagaccaaattgtaatttcccttggtgtagtccgtaaaatgtttcaagacagtttttctaatgttaggagtccttttttgtcaagacccatcattgtcaatttgtaaaacttgttcctttgaatttcttgagggaaggggcttatatgcattattggaagagggagatgctcagcaactgttttcttgatcttcaggaggttacataagaaggaagagaaactgtaattgaacataagaacttggcaacattgtataatattgcagaggccttggtggtaaaggt

SEQ ID NO: 68198 - DNA, 1038 bp, Homo sapiens
ggttatttacagtatatcagaaaactcagtactgctgtatttaaatatggaaaacaatctttctatatcctttgtttttattctgtagtctaccgccttgtgaattacagatcaatattcagggtaggtaagtaaggtcagcttttttgaggaattctgaaataatgatttaataattattatttagtacctaaaacactgggaatgctaccacctttaatcttaattaaatcacagcagaataatgaaatgcttctgaaaatcatgcaaaatgttcctaagatatagccccctagtactggaacttttcttttacaattataacctaaatttgctggatagacatagaaacaaaatttattaaggaaccagttcagctaattccaatagattttcactgatagcacaacaaattctagctgctaaagaaataaatacaaagtttccttcaactttttaaacaccatctaatcaggaatcagtctcacttgtttcagtaaaaaggtagggtgaattgcaatctgttatataaaaactaaaaggaattttaccctaatggctttagttctgttttttcccagacaaaatgttcaaaccttgcaatccaaaagctaatggaatcagtgacaaagtcaaattacacaaacaaagtaattaaaaatccccattatttctaacttggttgttatagggctggattcagccagattcttacagttatgaaccattagtttacaggaatttgaacataccctatgatcccattggaaaacaagcctctttgaactccctaccaaatcaagctagctctatcaaagaaattaacttactcacgattccccaaggctcgttactctctgaatacatgaaagcttgtgtactgctccagttcaaacgcactatccttcatataaaaagttgatatcattgcctgctacggtttttattattttaaaagcacaccaaagtggtgctaaatatattcctacttttacttggatcttctcattatcagtggcatagactttcatgacaact

SEQ ID NO: 68199 - DNA, 1050 bp, Homo sapiens
ttgaactcaatcccttttttcttttaaagtacactttcaaaatgattggaggaagggagtgtttttggtaaatgggtttctagtgtacatagagttaagcatccaagaaaggttttgataggtccaggagatagaaactgtgcgcaaagtaggtggagcattgagcaagtaaaaatcccattttgcttgtctaggatctattactgttggcagagaagcagaaggaatattaacagaatagttttcctgctgttgggcatgcagttttgtccatctagaataaatctgttgttggctgagtagagcaaattcctgtctgagagttggggaagcatggctagtgttaaacaagaaactgtgtttcagtctgactttgatgtctgccttccttatgctgtgggctgatgtacatcagagacattttttccttcattttcctccaataagaaatctgttttgccttttctgatggatattaaaaagaaagatttttgctcagtatttgtcatcataaattctcattgctgctgctgccctcaaaaggattgtataaatgaggtaggtaagaatttccagtatatgtaacagtttatattgtagcctttttggtgatattggtagaaagtttccaatattgaaattgttaactttcagttaaagtattgaaattgttaacttgagaatgctttaaaaatatttagagttctgtaatttagtgaatttatggtgtattctgtgtgaggagggggtaggcttttgtaaattctgaatggttagggaaaagtttacctttattaagagttaatgttaatgttaccctacgacatttgaagcatcagcttttaagaagcaagtgctggcaattcttaggatctgaaagattgcgtcagagaattctgtgttgtgactcacttttatttttctagcagattagttggcaaaacacagtatatagaattcaaatgagaagtcagcctataaaatgtgcatatgtttttgtggggtttttttagttcaaataatacaacataaaatttgataaacatttgt

SEQ ID NO: 68200 - DNA, 1152 bp, Homo sapiens
aaattatcagttataaaaattacattgagttctcatgtcttaagaacgagaaacctatgagtacattttaaaaactgtaactttgtatttattttaaacagctttctattacatgtcccagatgacttttctgtgggtcacttttaggatcagtgaggtttcataatcattccatgtacacatttacttttaatatacaatacctgtatatgcttgcttcttaaatgattcagaatacctcagctaggtattttaataatcctggcttattgatggttgctgactggtaaaattccttgttatatttttcagtatttaagtgggtagcattaagcagtcttaatcttttaataccagctactggactggtaaggtgtgtctcagttttattggctaacttggcacctatggtacattttttaaggcagtagtagtatctaaatatgtggtatagcattggtatggaattttctatacaaaactcttggctgtaggttgaaaaagcagcataacctaccaaatttaaggttgtattatgcacagttattggttttgctatatcttaatatcttttgcgcagtgagtattcctatttgtaaagtcatgaattcatatatgtttgcagggataggattaacaagaggattattattaaggataatcaaggatgaaagcaggttcaagaaaagattttccttcctttattatctttggtgattgcctttatactcagaggtagccttgggtcagcaaacttaatacttcaaggagctttgaacccagatacgacatttgaattcagttggacaggtgttatcattattggctagacaggaaacctgaagctcagaactacttctacttgtccagttcacactgaatgtcttttattgttaaatgtttttgtcctttcaatgtgcctatgctagattaaaacagaagaatcagtatacatttgctttgttaaattaatacatagttttattgccagtaggctacatacattcccttgaaatgtatgtgcttatggaagaaggaacttttttttttgagacagggtctcactgtgtcacccaggcgagagtgcagtggcacaatcatggctcactgcagcctttacctcccgggctgaaatgatcctctggcccagcc

SEQ ID NO: 68201 - DNA, 1085 bp, Homo sapiens
gtgtgtggcattcatttttttcttgcatttcctattttcataagtcttaagtttgaaataccagcttgctcaattaaagcaggcttttgcttcagcagcattattttgtcttcactagaattatatgaagataaaaacaagctgggaaaaacttaggtggagttggaaaaataagattgaggaaaatacagatagtgatctttgtagtcattctcataaatgaagcttttaaatacatgaatttaactttagggtcagccctgctacacagttccttgctgtgaaaagttagccctgcgagtagaattctccaaattgggtcttcggaataatacaatgagtaattgagcattatccagctttggatataactcttgtacttaaaagactttagagcttatcattttatgtatttcatttatttcatttagatctatgagagattacatgcatttctgtgatttattagtcactaattttgttttaccatatctgtcattgacactatagataatcagaatttatgtatatttaataacttaacttttctgaccaccccaccccaactccattccctttgttttatgtgtctgttgacttacagtgccacttgaacagcatatcagtgcttcaactcttgatccgtgtggtgacttagatgaggtcagaatagatgagatctttttctctttcaccccacctcttagacagtagcattttgttcttacatcttatgtatattttccacacattgctgttttgtttttgtttttgtttttgttttttttaaagatggagtcttgctctgtcaccaggctggagtgcagtggcttgatctcagctcactgcaacctctgcctcccgggttcaagagattctcctgcctcagcctcccgagtagctgggactacaggcatgcgccaccacgcccatctaatttttgtatttttagtagagacggggtttcaccatgttggccaggatggtctcgatctcttgacctcgtgatctgcccacctcagcctccccaaagtgctgggattacaggtgtgagccacggcgcccaacctgaaaatttattttta

SEQ ID NO: 68202 - DNA, 1970 bp, Homo sapiens
actataaacaaaggaatgtttgtttcaactcttttttttttttttggacacagtcttgtcacgtcgcctaggctggagtacagtggcatagtctcagcttactgcaacctctgccttccaggttcaagcaattctcctgtctcagcctcctgagtagctgggactacagacgcacatcaccgcacctggctaatttttgtatttttagtagagacagggtttcaccatattggtcaggcgggttgcagactcctgacctgaggtgaaccacccaccttggcctcccaaagtactgggattacaggtgtgagccactgggcccagcctgtttcaactcttgttggagcagtttattagatgattggcatattgaaaccattttatcttaagattgtttcacaatcagacttctgcttgcccagtacacaaattattgaacaaggaattaagagaacttactggtgtaaataaagcttgctgtggtagaaagtaccaaactagaaacaaaaatatttattttctagtttctatttcagcatttacagcttttataactgtgagcaagattctcaacctttctgggcctccatttcctaataatcaggagatgatatcaaattgggtgttggtcagacaagatcataaatatgaagatttgtgttacttataaaatgctatataaatgatcatgtggtattttgaagctttaatagagccaattgtgttagcccaccattactagtatactattactaataagatcattggatttaaaaattatgttacaattgtgttagctcgccattactagtatactattactaatgagatcattggatttaaaaattatcactgtcagctcttattcatgaatgagattgttatgatgttttataacttcagagtaaacctctgtaggcacccttcaaattcagcaatgtaaaaatgagttatactttcccctgtattttttcccatttttttcttctgcgaataacaataattggccacatttgaaaattattttttcaaactaatggtgttttatttttgttccttttcttttccctctgtttggaagatattccatcaaagaccttttgaaccatgccttcttccaagaggaaacaggagtacgggtagaattagcagaagaagatgatggagaaaaaatagccataaaattatggctacgtattgaagatattaagaaattaaagggaaaatacaaagataatgaagctattgagttttcttttgatttagagagagatgtcccagaagatgttgcacaagaaatggtaaattgacattagccattttaaaattgatttagacttatatatatcaatactatcattaagcaaaaaagcagttgatgaagtgccgtgtgtggcatatcccattgacataaaattgtgatggccctaaaagttatctttgattagtgggattttcgtgtgtgtgtgttttttttttttttaaacttctttgtattgcttttataatgggtgttagattttatagtcctttttaaaagtaaattttttttttttttgatggagagagagacagggtcttgctctgtcaccaggctggagtgcagtggcctgataatcatagcttactgcagccttaaactcctgaactcaagcaatccttctgccttagcctgccgagaagctgggaccatagggacgtgccaccacacctgactaatttttgtatttttagtatagacagggtttcaccatgttggccaggcttgtctcgaactccttatgtcaagtgatcatcccacctcagcctcccaaagtgctgggagtacaggtgtgagccacttcgcccggccaaaagttatttttgagaaaatatgtagatatatatatacatagggatagatagatgagatagataggtagaactagtagaatgcattccgaagtcattttgaaaagtctgtaagattg

SEQ ID NO: 68203 - DNA, 1429 bp, Homo sapiens
gcacattctacaggcacagtcccagggcatataccttctactgtccaagcacagtctcagccccatggggtatatccaccctcaagtgtggtaagtaaatgcttaagagcatgtaatactacaatgagagccaatggatagtctgctaaattaaaattctttgtacaaaccaagtaacagtatgagtctgaagtagaaaatataaaatgctgtgtctctaaagccttattatagagtaggatatagacattaatgtgtgggcattagctgaactgcctacatgaagcagctatgtgcaagatttagattagtctgcatttttactaaagggaacgctctctttagcacttaagatgttgaaactattcacagcaacaaaagctggacatacaaatgttttgcgggtggggcgagaagagtttttcaaaagcttgttaaaatgattactaagtatttcctgtaagattccctattgtacaaaacacaggtaagaccttcaaaccattatagaatgctgcatgtgagtactctagattgagggaatcctttatttgaatgactgtttaatttagcgcttgtgttgagttaatcatcagttgctgtgtgtgttcctgccttttaaagtctgtgttggacacaagttccttccccagtatatgttcttttgctttttccctttagttggtaactgttttattactgatttattttcagaatcaacttatagaaattatttcctgaaacattttatgcttgtatacacatacacacacacaattatcctgtgttttacattagacactcttgtttctcatatagagaatgttaaagtagatcatcagataataccccatttcttttgttgacctcagaggaaaataaaatacgtcatctgcctctgaaaggtattagaaaataagtaacttgtcactgtacagcacttgtttagtgagatctttaagcagacagattttccccttctcagaaagcttttaatctaaactttgtggaattcttgctcttctttaaatgaaaatctttctctgttaagaaaatacttctgcttgttcgattttttatcctacagcttggaataaaagatgttcatttgtttcagagtccgtttaatcctgctttggctaggtctcaaaatgaatggccacagtaacacaaataaaaaactaatatactaactttttaaaacaatctactttctgtctttaaaataattgagggtagaatagaagaactttataaagactgcacagaaaatatatttctgtgttctgacaaatattacttgtcagcatttcttgtcagtttctacctttaattgttttttttctggattattataactagattttgctaagactttttttttaaaattttctcttgtctatactcatcatgggggagcattaggtct

SEQ ID NO: 68204 - DNA, 1850 bp, Homo sapiens
tttttttttttgacagcgtctcactctgtctcccaggtgggaatacagtggcgtgatcttggctcactgcaactttcacctcctgggttcaagtgattctcctgcctcagcctccccagtagctaagattacaggcacccatcaccacgcccagctaatttttgtattttttttagtagagacacagtttcaccgtgttggctaggctggtcttgaactcttgacctcaagtgatccacctgcctcggcctcccaaagtgccaggattacaggtgtgagccaccatgcccggcctaaattattatttagagattcagattgaagatattctcccattgattactttgtaaaagtacaaaatatttcctatatccagttgtgaatttcttctagaaagctaaactttttcctagtagatcatgacttttttacctttacaaataaagagtggcaagtataagaaatactgtgagccaacaactttccatctcatgtcttctaaaatagaaatgagaatctttttctgaggtttccagagctcttgcaaaataatccaatcttaaaattctctgtatcttttaatgtactttaaactaatagaattcattcttgttgaatcttaagtttgccaaagttgcaagctaatattcattgttttccctgtctgcacccttcagtcagttggtcattcttaaattcatacacttgtaacacttggtgttatttcagaatatttagcatgataactgatcattatcatgatcattcattaaacctgtccttgactgacaacgcagaatagttgtgaatagttgtgatctgtcagatgtgctatgttgagttatagctctcctcaaaaaaaaaactgactttgtggaattgggagaggatggaacatttcttcatgcaactatgccctgttatcattgtacttttgtttattttgttttcacagtactgtgtttttcatgtgtgtgtttgttttgtgttgagcctcgtcgtggccgtagcatgtcggtttgtgttcccatctttctgctgttgcctctgtgtcccgcatctctcccagtgctcttccaccccaccgccagtactgtctgcacctctttctccttccctcctccggactgccccgaggaaacttttgccgaaaagctttctaaagcattggagagtgtcctgcctatgcactctgcctctcagcgcaagcaccgacgctccagcctgccttccctctttgtcagtactgtatgtaactgtaaacttctgacaaatgaacaattattaccaatgaatacatccaggcaacaagaattttaattaaaattgaataaagaacaggactaaacttggttatattatgcttctaggataccagttattcctgtaggaaacttttttgtaataaggctttaagggggaataaaaagcaaggaggtaatgagagagaatacctataatgtccttggcacataccagcatgtgtccaataaaatttacctttcattatatcttcctgtttcctatcgacataaaattctttcattttcatattctagttttaaaaggattaattttaaagttattgccttaatcaaaagcaaattttatcaaacattacccaaacattttttctcctcactttattctaaggagacactaataaaactggatgagtcctttttttttttaataaccttagtcagcaaagaataaccttggagtgaacatttattttaatttaatcatttatgtaagatgatgtatcagcaaaccaaagaactacataatgttcccccatggaagtattttttccttaggtttcaacctaaggtgggactgtagctcta

SEQ ID NO: 68205 - DNA, 1408 bp, Homo sapiens
aatgaaactgaattcttttaaaaagcgggggaggctgtgatagtgaattcttactattatttacttatttatttatgttttggagatggaatctcgctctgtcgccaggctggagtgcagtggcacgatctcgactcacggcaacctctgcctcctgggttcaagtgattctcctgcctcagcctcccgagtagctaggactacaggcgcatgccaccacacccagctaatttttgtattttagtagagatgggtttcaccatgtttggccaggatggtcttgatctcctgacattgtgatccacccccttcagcctcccacagtgctgggattacaggcgtgagccaccgcgcccagcgggtaatgaattattatagtgtatattgtttgcatttggcaagctgtgtttctaaatttagtcttaaatctagaactgcttctagaataaaaagtgctatcaaataaaattggctgtcatttatattacccttttcagttgattagaacaccaggatgtcagaatcagaaaattcatggttacggccgggctcagtggctcacgcctgtaatcctagcactttgggaggccgaagtgagcagatcacctgaggtcaggagttcgagaccagcctggccaacatggcgaaatgtgtctctactaaaaatacaaaaattagctgggcgtggtggcgcacgcgtgtagtcccagctacttgggaggctgaggcagaagaatcccttgaacccaggaggcggaggttgcagtaagccaagattgtcactgcactccagcctgggcgaaagaggaagactccatctcaaaaaaaagaaaaaagaaatttcatggttatgcaactcttatttatgatcagaaaaatggacattttgtgatttaactctgtaacatgtttcatgtagtaaaaatataataaaactattaatcatctagcttgggagagataggagaaagacattactgtcactagtcaaattatatatcttttactatccaccaaaaatctcttctgatttctggttagaaggcatactattaattgataagaaaataaaactgaaggcctctaacatatcacagggtaataagaatatagggaaagttagttcaatagtttaaattaaagcacacttcttacagtatagaactagtcgggcttttatgccttgttttagttcttactcttcctttaactctttttctgttgatgtaatttacattaatgcttaagagtgaactttttaagtgtgggtaaaaacgaaataattacttacaaagtttaattcttccatttcctttgagagaggaaagttatggaaaagcagctcttatctaaagcaaagagcccacagattgatttcattggccctggatgtatttaatggattttt

SEQ ID NO: 68206 - DNA, 1731 bp, Homo sapiens
aagcattgttatttatttattaattataaatttagtgtaaccatttcatagggttacacagaactacccagttgtgcatgtctgatgtaatttcacatatgaatgtatgaattacttgtcttattcatgttgatacagcctcagtccatggcgcatccgtgtggggggaccccaacatacccagaatcacagatatttttcccaactattcatgaacgtccagtttctttttcaccacctcccacctgcccaccgaaagtagccatttcccagcggcgtaagagcacctccttcctggaagcccaaactcaccacttccaacccctgctgaggactgttggccaaagtcttcttccacctggtggcagcccaactaactggacaccagaggccgtagttatgttgggtactacagccagtagagtaactggagagtcatgtgagatacaggtccatcctatgtttgaaccatctcaagtttacagtgactatagacctggactagtacttccagaagaagctcactattttattcctcaggaagcagtgtatgtagctggggtacattaccaggcccgggtggcagaacagtatgagggcattccatacaactcatcagtactgtcaagtcctatgaaacagatacctgaacagaagccagtacaagggggccctacttcaagttctgtctttgaatttccatctggacaggctttcctggtaggacaccttcagaatctaagattagattctggattgggtccgggatctcccctctctagtatttctgcacctatcagtacagatgctacacgtttgaaatttcaccctgtctttgttcctcattctgcgcctgctgtgttaactcataacaatgagagcagaagcaactgtgtatttgaatttcatgttcacacaccaagctcctcttcaggagaaggaggtggaattttacctcagcgtgtttaccgaaatcggcaggttgcagtggacttgaatcaagaagaactgcctcctcaatcagttggattacatggctacttgcagcctgtgactgaagaaaagcataattaccatgccccagaattgaccgtttctgtggtagagcctatcggacagaactggccaataggaagcccagaatattccagtgattcctcacaaatcacttcttcagaccccagtgattttcagtcacctccccctacagggggagcagctgcaccttttggctctgacgtctcaatgccctttatccatctgcctcagacagtgttacaagaatccccacttttcttctgtttcccccaaggaaccacatctcagcaggtcttaactgcctcattttcttcaggaggatctgcacttcatccacaggttataggaaaacttccacaattattttaaactaccctactttgcaccataacatttaaattttctattccttatttccctgaatcatggattttggagaaatattgtttaattttatcagtagagtttccccatctttggggggttgtgaactacatatatgcatttaaaaacaaaatgtgagagaagctacctgatttacctattatatgtgaaaaccagtggaaaaaacacaaaaactagaattttagtcattcttcacaatcacgacttctatgcacgttattttcaaccagtagtgaaaatgcaagtgtatgtaatgtatggttgacccagcattatttaggaatacaa

SEQ ID NO: 68207 - DNA, 1913 bp, Homo sapiens
gcctttttaaaatggcatcagtcaagcaagttgctgtgcattattatatgtccaaataaaatgctaattcataaaattaaggactgattctaatttttagcaactaacaatctagtgagtggtgggctttttttttttgttataagaatttgtgatatgttgcaagctaaggaacagtagacatcttaggccttgtattttcctcaacaaatttaattttagttatttatgtgtatgagcatatacacacttagcaaataaagacaatgtaatgaatgtaatagaattcaaaagtacagtcagtgtttactgtttcatatattcatttggtatattttatcaaatgtgtacatcttataaaatctacatagaagactatgcagttatatattgaagacatttggatatcctacataaagtactatgtgttgttcttcctactttcttcctatgttcttccctcatcaggagcataaacaactcccaaaatgtgcacaaattatcaattatttagtgctgtactaagacacaaaaagatccagaagcttgacagctatacatgggcatgcagtatattcacatcagtattcaagttgcagcccctattataaatattaatgtattgccagtaattatcctttagactttccaaagtaaaaaataccaggtagttaatttatagacatactacagaaggaatcaatatttataatagttaagctgcagtggaatgtgatattatatccatgtaagctttaaggaaccccttgtaaactgaaatggaatgacaaaagtggtagccttttcatttcgttaacatacctatatatagtcctgcatcatttctcactttctagtgagaaacactgtagttggggtttctcagactcaacactgttgacatctgaggttggataattctttgttgtggtgggctgttctatgtattgtaggctatttagaacatccttggtttatacctcctaaatactagtagcagcaatctccctcagttgtgacaaccagaaatgtctccacatattgccaagtgcccccctgggggtggcaggattgctcctggatagcaatgatcgccctaggtacttggcagttgatgataacagattttttgatacttttgataaaagtcattgtggcactacaagaagtattaccaaattagcattaccaaatacctttctttaattcttcagataaatttcagattgatagtattaatactttgttcctgattattgtatttctaataacaaattttattatgaatctgacgattctagccagctaaaattacagcctgagcagcattgacagcttaggttttcactgtcagtgggttttgcatgggttgggatcagaacatgttgtgtggtatgatccttttctaaatttttcttacaaaagttgacccagaggcctctcccatacataatcaggttaatgtttcattttgatcaagcaaactctgaggagattaaatattcattgcaaaagcctgacctctatacacttactttaggccttctctaatttgttgtgttcacttctttccttcaggcacaggggcagagccagggtcagccatcctcaagtagcttaacaggggtttcatcttcccaacccatacaacatcctcagcaggtgagaacaatgcattgcaacattttatgaattagcagtggccagaacactattttaacttttgtgatttgttatataaatggcctgctaagtttttgaaaggaaaattaagaggcataccatgtcttgtgttcagtaacaaagaaaaaaaagagacttttctgtgtttcagaaaaatctcttttgtttaatatacttttgaacaatttagtagacatacattattactgatataattatctttttaaaag

SEQ ID NO: 68208 - DNA, 4176 bp, Homo sapiens
agaaacatgctgttattgatttgaaataaaactgaatcattgtattttattcttagcagcagggaatacagcagacagcccctcctcaacagacagtgcagtattcactttcacagacatcaacctccagtgaggccactactgcacagccagtgagtcagcctcaagctccacaagtcttgcctcaagtatcagctggaaaacaggtaaactttttttttttttttaaacaggtaaactcttaatttctgaaagggtgctaaaagggatttccatgtaacttgtcctttcatgtggatagacttctaccttttcttctaagggtaaccaacccttgaagtaggttaatctcattgcagaaatgaagtgaagatcacctcattggtgcatatgcattatttaatgtaaatgggtacgttactgacagcagtgacaatccaaagtttcacttctagtcttaccagtccaaaattgatgtaacaggtattagaaataacaggttaaataaaggtgctctggtaactgaacctatgacattccctagaattgtgtcagctatgtctgatattctaggtttgaaactatgctttattttcatgtagatttctgcactgtttactgtgtggaatgtttttttttcttaagtagtcctcctaatcacttgagaagtaccctgtagaaggtatgcttttctgaatgaccttttttcaactttatttttgagtactgttgtgcatgtatgtgcacagtgtattgttaccctaatatttcatcacatctgagatgctatcaactttaaaatgtaccatattttatgtaccacattatcagttataaagtagatcccaatttctcacatgttaaaatgatcaggtagtggagagggatgattgcatcctagaatgagtgaaatatgtgaattataccaatttttattgagccatgttggacttaagaattttagaaataatacgaatgaaatcttaattccactgggaaggaattcatttgaatttcagtaactactgtaacagcagtcgtaactttagtgatagcattatggtatataaaatatattccaataaagctgttaaaaaaaaaagccaaccccttgtctatggaagggtcctcttctattgccaaatgctgaagcattagcaaatatttctatgacaaaaggtgtagaacagtaatagtctatttagcctctttctctcctgctctcctttccatattcttatgtggcatattaacttaacactaatgtatgcagggttttgttggtttggtgtttttttttttgtttgttttttccttctttttggctaatacataaatcttgcttttggcagccttgcttttttttttttttttttttttttaagcctgtctgttttgtttttctttaccttcccagcttccagtttcccagccagtaccaactatccaaggcgaacctcagatcccagttgcgacacaaccctcggttgttccagtccactctggtgctcatttccttccagtgggacagccgctccctactcccttgctccctcagtaccctgtctctcagattcccatatcaactcctcatgtgtctacggctcagacaggtttctcatcccttcccatcacaatggcagctggcattactcagcctctgctcacgttggcttcatctgctacaacagctgcgatcccgggggtatcaactgtggttcctagtcagcttccaacccttctgcagcctgtgactcagctgccaagtcaggttcacccacagctcctacaaccagcagttcagtccatgggaataccagctaaccttggacaagctgctgaggttccactttcctctggagatgttctgtaccaggtattgtgttagttagcaaaagagggcaccacagagtttgatcctagtagatcatcaggaacatggaaatctaatagttgagtgtcagaataactagcaataacatgtcaactagagaagcaaaatagtaaaattctgagaaaggattggataatgatgttcagtgattcctgatccatttttctcaagacacttcttcagagaaaaatggttctctcagtattcactgtaagctgattgaatgctagatgtggttaatagtacacctggcaacttttacatatatgggtagaataaatagaatagccaacatggtatcaacaaaaagcttcggggtttagactgggaaaattagcatttcatgatatgactgttatgtggaagaatttttgcatttttccatttaagattggctaggaagaaattgtgttcctcctatttaaatcatctctaggtgaagataaccgacaataaagtagtattgtagagtcctgtctcttctgttggaaccagtctactacttcatttcaagaatgtggtctttatatgccctttagattattagaaagagattggctactattcttctttgctgtgtgcttcttttttttttttttgcatgtcttgctgttttgctaatttattgacccccaacctgctctaactcaccttcctcatttctgtcacagggcttcccacctcgactgccaccacagtacccaggagattcaaatattgctccctcttccaacgtggcttctgtttgcatccattctacagtcctatcccctcccatgccgacagaagtactggctacacctgggtactttcccacagtggtgcagccttatgtggaatcaaatcttttagttcctatgggtggtgtaggaggacaggttcaagtgtcccagccaggagggagtttagcacaagcccccactacatcctcccagcaagcagttttggaggtaaatagaattactgcatgtttatatgtaaaacgtatatatgtaattggacaacaatgataaaggagaaagaaacaggctcccctggtttagaacttatttggagaccatgtcaaactaacttctgcatgactttttcttacagcagaatgaaatgccaatgtggggtccttgtttccactggctgttctgttgggaagtgagtgtgccttggagaagatgaaccctattagcacttcacttctctagctagtactttagccattattcttgtcctttcacaaactttttccattggcagtcataagagtatcttaccctcctgtgctctcagcaatcatttttgccctgctaggagaagatctgaattcatctttgtactatgctctgtctgcgctattgcacactcttggtaagatgctggctgcatggcaagttgtaggttcacactgcctagcagatatgttggctgacctcataccatgcagtctataccagagactagctttagcaacttcctttggaattttaagaccattatctctagatgctgaatattgagaatttactagtaaatttagtgcttctaggacgtagtggggagggataaggaaaaaaataagtagattattggggatagtgaatgataaatctattactaccgagatttgagttatcttttcgattcacagagtactcagggagtctctcaggttgctcctgcagagccagttgcagtagcacagacccaagctacccagccgaccactttggcttcctctgtagacaggtacgtaaaactagaattctccttccttgactggtaaataagacggtatgaaacgccaaactgtcagacctttaaatctcatattataaactgcacttttttttctttttaaatttcaaagtgcacattcagatgttgcttcaggtatgagtgatggcaatgagaacgtcccatcttccagtggaaggcatgaaggaagaactacaaaacggcattaccgaaaatctgtaaggagtcgctctcgacatgaaaaaacttcacgcccaaaattaagaattttgaatgtaagtattcctaatttgtgagtttcatgttgttaaaggaatttgacactgaaaaagattttagaggtcatcaaatccaaaccactcacttcataaaataaagataactatctgtgtgtgacagataattttttttttttttagacggagtctcgctctgtcgcccaggctggagtgcagtggcatgatctcttctcactgtgattgcagtgcctcctgggttcaagcgattctcctgcctcagcctcccaagtagct

SEQ ID NO: 68209 - DNA, 3970 bp, Homo sapiens
gggattacaggcacccagccagataatttatatagtactcttctcatttcatgcccacagtctctttgacttaaatatcacatttttagaaaaatgaaaaggtagttcataaagctatgatagggccagcagttaatatcatttaaatatttcttaaggcttagatgaattgatgaatgtataggatcttataattagccaaatgatattcttacattccatatttctatgataaagcactacttatcttttagaaaaagaatagagagttttagtaagtagctcaaaggctaacgtcttctcaaagatttttcttgctaccagtttaagagacaaagtactagtgctccaaggaacagcgataacactatgcttccttagacataaagtcaagtgctaatctgcattgcttttctgaaattcagtaataaagctgaatatggtctttggagatgatgtaccttttttctttttaggtttcaaataaaggagaccgagtagtagaatgtcaattagagactcataataggaaaatggttacattcaaatttgacctagatggtgacaaccccgaggagatagcaacaattatggtacgtctgcatttggagttctaggtttttccttagtacttgatcttaatagccattgctctaggcaaatatgccatattttataatccatgtttttttaaagttatgcatttacttcaatgtgaataaaactatcacacccaacctgtgatttagtgatgtttttgtctaggctatgtctaactagatattgaagttcttaaaaagagaagagctaacttgagtacaaaataaataaaaatataggtaagtatgcagataggacagaagtcataaaagtgacataaagtttgagaaatgacactaattagactgacatcacatttcttttacaggtgaacaatgactttattctagcaatagagagagagtcgtttgtggatcaagtgcgagaaattattgaaaaagctgatgaaatgctcagtgaggatgtcagtgtggaaccagagggtgatcagggattggagagtctacaaggaaaggatgactatggcttttcaggttctcaggtaggttcaccactcccatagtgaaactttgttgatttaaaatattttcatagttctaaatttgctatgcaaaatgtccagtgatatcacctgacacccatgaccgacaacaaacttttatgttctcttcacatgtggcagtttgctttgcctagtcattgagattgcatttgagaatgtatttaatcacttttgtttgttgtagaaattggaaggagagttcaaacaaccaattcctgcgtcttccatgccacagcaaataggtgaatttattttctttccttgtttttacctttgacttaagaagccattagccgagggtggtggcaggcttctgtagtcccagctactcaggaggccgaggcacgagaatcgcttgaacccaggaggcggaggttgcagtgagctgagatcgcgccactgcactccagcctgggtgagagaatgagaccgtgcctcaaaaaaagcagttgtatgtgccaataatgaagtctaacaatatttataataataatgctattaagttacgtttgtttgtttgtttttgaccaggcattcctaccagttctttaactcaagttgttcattctgcgggaaggcggtttatagtgagtcctgtgccagaaagccgattacgagaatcaaaagttttccccagtgaaataacagatacaggtaagggattgattctgccacattgttatgtaaattctacagtgcctctgctatgttgaaagcttaatcataaagcagtaatttatgatgacacagataataaaaaagaatagaaaactgaagttataaccaacagataaacatatgggagagggaaatagatgaagaatacagagaattacagaaaaagccaagaagcacggccataccaagatatagtctgtataatagatattgtagtatgtgtttatttctgcacttagtactgttgtctatgttttaagattactccatattttttatcaaaaacagatatttataggagctgacttaggctagcagacaatcttttgaatccatccttttaaaatcagctgattcttatctttttgtattcctttgcagttgctgcctctacagctcagagccctggaatgaacttgtctcactctgcatcatcccttagtctacaacaggccttttctgaacttagacgtgcccaaatgacagaaggacccaacacagcacctccaaactttagtcatacaggaccaacatttccagtagtacctcctttcttaagtagcattgctggagtcccaaccacagcagcagccacagcaccagtccctgcaacaagcagccctcctaatgacatttccacatcagtaattcagtctgaggttacagtgcccactgaagaggggattgctggagttgccaccagcacaggtgtggtaacttcaggtggtctccccataccacctgtgtctgaatcaccagtactttccagcgtagtttcaagtatcacaatacctgcagttgtctcaatatctactacatccccgtcacttcaagtccccacatccacatctgagatcgttgtttctagtacagcactgtatccttcagtaacagtttcagcaacttcagcctctgcagggggcagtactgctaccccaggtcctaagcctccagctgtagtatctcagcaggcagcaggcagcactactgtgggagccacattaacatcagtttctaccaccacttcattcccaagcacagcttcacagctgtgcattcagcttagcagcagtacttctactcctactttagctgaaaccgtggtagttagcgcacactcactagataagacatctcatagcagtacaactggattggctttctccctctctgcaccatcttcctcttcctctcctggagcaggagtgtctagttatatttctcagcctggtgggctgcatcctttggtcattccatcagtgatagcttctactcctattcttccccaagcagcaggacctacttctacacctttattaccccaagtacctagtatcccacccttggtacagcctgttgccaatgtgcctgctgtacagcagacactaattcatagtcagcctcaaccagctttgcttcccaaccagccccatactcattgtcctgaagtagattctgatacacaacccaaagctcctggaattgatgacataaagactctagaagaaaagctgcggtctctgttcagtgaacacagctcatctggagctcagcatgcctctgtctcactggagacctcactagtcatagagagcactgtcacaccaggcatcccaactactgctgttgcaccaagcaaactcctgacttctaccacaagtacttgcttaccaccaaccaatttaccactaggaacagttgctttgccagttacaccagtggtcacacctgggcaagtttctaccccagtcagcactactacatcaggagtgaaacctggaactgctccctccaagccacctctaactaaggctccggtaaaattattgttataaaataattagataaatatgatcagttttttttctccctaatgagtacatttttcacttcagccttgtaagttagaaacatatttataaaggtacctggcttatagtatttattaaattgacagcagtttgagggtatatctacaatgaacatgagatttttttttcaagtgtggcaggattttagggttaattatgctgcacagttttccaagatggtataattatcgggtaaaatacaggtatttcttctgaattggtacaaactgaagaagtctgtatcccaaaagggagctaaatgcatctgtcagcaaaatgtacgtaaataatagcagtt

SEQ ID NO: 68210 - DNA, 1429 bp, Homo sapiens
gtttgggggttataaaaaattggaagttagtaaggaaattgatacagaggagaaataaataatctaatcctaggactgaagtaactaaaatttattatctaattatgctgtggtggatttcctcttgttctgccaccttctccaaataacaaggctgtgttacgtctactgtattgtatgcttcagcctctttctgcattgccattgatgtgaggttctttttatagtaggataatgcagaatcttcactcagataaaatagaaattcttgataatagtattagatttctgatgccttttgttatcagacctgcccattggttatttcttaaccagttactgttttcttttctcagaaaatcttgttttacatggcgaaagtctgatacatactgtaccaaataagtagctcaagaatatctggacactgccacttatgtacatatagcctttgttctgttctccctaggggacaactttttactgtattttactattcattttataggtatatcgtagtaacccctataataacaacattagttgtcacaccgtttttttaagacagataccagagagtaacctcagtgataaacatgtcttaactatatatattttattcttatgtttgtgcattcaaattagttgatttgctcttcagtacgcagtctttatatttagcgtctcacggacttgattttccctttgttgtctgtaggtgctgccagtgggtactgaacttccagcaggtactctacccagcgagcagctgccaccttttccaggaccttctctaacccaggtgcctcaagacttgacaaatttcttcctgtgccctactttctttgacaaagcttgctgaagttctccactacgtggtcttggcttttgcctatttgtctttgacttagtaacacctttcttttaaaatgttataaccaatgacccagttcctacttaagtaagaagcttcatagctcttttgtttgtaatgttgcttccggttatccaaaaacacttgatactaattttttttttatatcttatgaaggaagaaaacagcaaagcaaacattttgtcagacccatatagctccctttatcactcacacttctgtagaatagcgaaattgcgtatataatcaaaattaactttgagagtgccctagaaaggagaagcacaatatggcaactgagaaactttttccgcgagtccagagcaaccagtctcttcttgaatgttgatcatttctttcactagccacctaatgaaggaattagcttacttataggtaggtataggggtgatgtttcatgaaaactatgtgtgctgtctcttttaaaataaaagccaccgagctcagtgagatgctaacattatgagatcactcatggaggaactgagaccagcctcatgaacttgagattcc

SEQ ID NO: 68211 - DNA, 3438 bp, Homo sapiens
acacgctaccatgcctggctaatttttgtatttttagtagagacagggtttcaccacgttggccaggctgatctgaaactcctgacctcaagtgatccacctgcttcagcctcccaaaatggtgggcttacaggcatgagccactatgcctggccctgaccttttgttatgtatatgttgactaagacataaatctgaattctgtgtatgacatcaaatacgaaagtaaattatttactttataagcgtagccagccacacagaatctgcatctcagtacccatgtgttctctatgatggtattcaatttttcttcctagtcaaaagtggaggcgctatgtaaagagacaatcagcctactctttgacagggaaataaagtgattctttttttccttttttaaattgtctgtgatagaaattggatattgagaacttaagtttttaatctttgtccttttttatcaggtttctgttgcagcagacggtgcccagaaagagggtaaaaataagtcagaagatgcaaagtctgttcattttgaatccagcacctcagagtcctcagtgctatcaagtagtagtccagagagtaccttggtgaaaccagagccgaatggcataaccatccctggtatctcttcagatgtgccagagagtgcccacaaaactactgcctcagaggcaaagtcagacactgggcagcctaccaaggttggacgttttcaggtgacaactacagcaaacaaagtgggtcgtttctctgtatcaaaaactgaggacaagatcactgacacaaagaaagaaggaccagtggcatctcctccttttatggatttggaacaagctgttcttcctgctgtgataccaaagaaagagaagcctgaactgtcagagccttcacatctaaatgggccgtcttctgacccggaggccgcttttttaagtagggatgtggatgatggttccggtagtccacactcgccccatcagctgagctcaaagagccttcctagccagaatctaagtcaaagccttagtaattcatttaactcctcttacatgagtagcgacaatgagtcagatatcgaagatgaagacttaaagttagagctgcgacgactacgagataagtaagtatattttctcttgtgaaagaatgtcagataaggttttcagacctagatcccagggccaagattaataatatttttcgccacaatatgctaatgtctcatttcttttaaagagacagtgccacagaagccccaccccatacctccccaccacacacacacacacacacacacacacacacacacacacacacacacacacacgattcccaaccactgactcacaggcacaggcagcttctcttgcactcatacagacccatagcatttctagttctagaacttcttcattgttactatattattactgtattattgttactgtattgtattattatttttattaatagcatattgtatcactattaactgctctttatttattagtccactaaatgaatctggcactgggatgtatgattatttggcacgttttgtttggcagattgggtcagagtagcaaattcagctattgtgtgcgtggcctcaaaagtcaggaaatgtttttctcctaaaacattatcaaccatttgttgttggctaggagcttgttggaacatggcttgggtaatgcaggccagcaaggtgagttgacaaactagaatctcgtggtagtacatttggggaaaaggttcattagtaactactacatacttgaaagcaggtttaggaatatgctgttaattcttgtctgaatgaagaggattatggtattttgaattatgtttggttatctttcacagacatctcaaagagattcaggacctgcagagtcgccagaagcatgaaattgaatctttgtataccaaactgggcaaggtgccccctgctgttattattcccccagctgctcccctttcagggagaagacgacgacccactaaaagcaaaggcagcaaatctagtcgaagcagttccttggggaataaaagcccccagctttcaggtaaaaagccctggactaggtcagccacagctgtcctatcttttgtttctgtctccagctgtatgtgacctgctgaacatttgttgtttttgttaaatttcaaaggaatttggctctcctgatatttttgcttccttgactgctgtacttacatttattgtacctctttttgagtctatagaagtagacttagtgaatacaatggcttattccattgtaatccatattgctatctactggtaatctttatttatagttattcttaaggatagacatttagctttgcctgttaactcgtataactcacatttaaccaaactcttgggcagttggaagaaaatacattattctctgtttagtaaaacttgggtagattctttgttttaatggatgacttagtcataattgcaacttagatgaatgtaatcgtcatatagatatttgtgtgtatgtctaagtggtaacttcttgattaaggtttttatttcatttatattgggttaaagaacttgctagtcattggttaggcacggtggctcacgcctgtaatcccagaactttgggaggctgaggcaggcagatcacgaggtcaggagatcaagaccatcctgactaacacggtgaaaccctgtctctactaaaaataaaaaaattaggtgggcatggtggcaggcgcctatagtcccagctactcaggaggctgaggcaggagaatggcatgagcccgggaggcggagcttgcagtgagctgagattgcaccactgcactccagcctcggtgacagagcaagactctgtctcaaaaaaaaaaaaaaaaagaagaacttgctagtcattaaaatcaaagaaatagttaagtgatactcttttgtaatgtagtatatatatatatttatttattttaagagacagggcctcactctgttgcccagactggagtgcagtggtgtgatcatagcacacaacacaacagcctcaaactcctaggctcaggtggtcctcctaccttagcttcctgggtagctgggattacaggcacacactaccatgccctgctaactttgaattttttttttgagacagaatcccgctctgttgcccaggctggagtgcagtggcacgatctcggctcactgcattctccgcctcccagtttcaagtgatcctcctgcctcagccccgcatagtagctgggattacaggcacatgtcaccatgcctggctaatttttgtatttttagtagagatggggtttcactatgttggccaggctggtctcaaactcctggctcaggtgatccacccaccttggcctcccaaagtgctgggattacaggcgtgagccaccgtgcccggccct

SEQ ID NO: 68212 - DNA, 2048 bp, Homo sapiens
ttttcttagccattgtagaattttgttacttttaagtatgggagtggcatactaaaatgaataaccttacaattcagttttttatccataatctactttccaaatatagctctgtttattagtgattgctgaaaaaattcccacagaggaaagagcttttagtcatattagaacaagaattgaaaagacttgggcatctgggtgagaagaatgaaaaaaatataggtactggcttatgtgcctttgccacagtttcacagaaattagagatcagtctcttcacaggaagaatgcacttgattggtaaggagggcaaactagctagcattattcgaactaagaaaagcttccgcattttgcagatgggtagaattaagacctaatatttcatctcttacatatctgaccttccccccagaagcttgttcttctgtgtgccatcttagtgcatttcaccactccagcctcaagtttctaacatcttgtagttgtgttctgtctcttctcctctctctgttctaccctgtttttcccctctcacaggctgtgcgaagtttaactgtgcatctgaacaggtgacattcaaacctggtggcaggaggacccgatttctgagtacgccctgcttggctctttgtgtgtaacacctttactccttccttgtccttgtgtttctgctgcttggatctgatgtttcacgcagtccattttcatttgtctctttttgtatatcatctactcagtggcttggctgaattactgttaccctcagaagtttgggcccccacattaattatgataaaaaatgtcaaaataacaagttatctacaaatttcaatgtaactttctggtagaagtgcttcttcatggatctgtgacagagagtggatatggtatctaggcaatagattgctgggtcatttagaataatgaagactgaactccacagtcgtagtcagtgctgtctgtctgccctagcattagaaatgagagaaatcagccagacacggtggcgtacacctgtaatcccagcactttgggaggccgaggcgggaagattgcttgaggccaggagctcgagaccaaccctgggcaacatggtgataccccatctctaaaaaaaaaaaaaaagttagcctggcatggtggtgtgcacctatagtcccagctgcccaggaggctgaggcgggaggattaccaccttaagaccaggaggttgagactgcagtgagccatgattgcaccactgcaccccagcctgagcgacagagtgagactctatctcaaaaaaaagaaacgaaatgaagaaagcattttgaccaatgatgctcttagatcctggcagcaggtaaaaattatgtaccatttttttccattctttgtcagagtagattgaaatcttatttttcttctctattaagcctaagcagctaccagttgaaaagatgctaggatctcttcattggatcattccaccactactgtcctctaaccccataaaatcaaaagcggtttttagtttggttattctgataaagcacttagtctaataaagatcaaagcccagcatctgcaagtgaaaattctccttctaacatgatttctgggattttgcagctttctacttaaaaacaaggcacaatagcaagtcaccccatcttccccatatgtgaaatggagatgatgccagtgtcctagggccatcgtacaaatcaagctaagatcatgtacagagaaacaggtagcgcttgaaaagcactcatggtttctctctgatgagtcagtgcctacctggcacagaacaggtagtcaataactgttcgtggaagaacagtttaaaacaaacaaaaacatagttcaagtagaaaaacctttgttataatttgaataaagatcttctctgttaaggcctcaaacttctgatgtgattattgaagtgctttttacatgcatgtgctcaggccatcactgtttctgagtatgggtcagaggcccttgggcctcttcacggtgggaagaatttacaacctccctttgttctctgtagt

SEQ ID NO: 68213 - DNA, 3252 bp, Homo sapiens
cactttaattaaattccataaattctcatcccacttttaaaggtaggtggtattacccctgttgttcaaatgaaagtggtcagaaatattgaatcttgtcacttccctttgggtgcaaaatgaaaggccctacatccttagaagtcacatcaggatacatcatgtaagcctggtaaacaaatcccaagagacatacttgaaatatggaaaggaaacaggtacttgaaagagtagggcaccttactagcttgagatgtattattctatgctctcaaaatagataatggtttggaagcacggcttggcttactgctatatttatgttcagaggttgcttgttttccacgtacttttaaaaactattctggaagggaaggggttagtatatatatgtgggatgtggaaatataatagccaatttaaatgaacttaaagctgtaacagtgatactatcagtctactgtggtggggttgctaatgcatttaactgagtgctttttaacagcccagctggagaaacaggaagtgggacaggatcagtggaaacgctgcttgggtatttgaaattcaagcagtgagacctgagagactggagttcctcgccaattccagaacctcagtgcagggcattactcttttagatacaaagattgggtgtagaaactccacatctgtcagccacgtaacacagcccatcagataatcatgttaaggctaacagccagttcgaaacattctgtagaactatatctgttcaagggctaccaggtcctacctatctgtctcacctcctgctttctcttgctgggcgtttgtgtgctgtttggagattctaaatattttacactgatgtttctttatctttaacacattgcttctctctttgtgcttcagggaagatggtgaaaaaagtctgtccttgcaaccagctctgtagtaattatcttttctgttatttttggtccttgattgcaaagcctgttaaccatgagttctttcaactctgcagtctcatagctccctgattcctaacttccatctatctctgtatcctattctaataaatatttaacatgcttaattgagaaatcatctcctagtcggtgccctcagtgataaccccatgtgagcctagcttgtgacagacatggattggtaatggccatgggtatatatagggaggtcagggatgcctagttcctatgggagagcgatcctttggtcagcaaatatgtgccgggcagtgttattaccccaactggaaactcagcagtgacgaaagcatacaaaagtccatgccctcccacgttcacactgaagtgggagatgtgtgctagattgacgaggagaaaaacaccactttctagagtttgtcttcttagactgtggcttctcatactttaatgagaaggccacttacagtgttgtaggtagggtcaacagggaaattctgtacttgggatgttgggctgtaagttatggttcataataggttattgttagtaggatctggtgatgtgggaataggggaaatgtattataatggcaggaggaaatttaaaaatgaatcttgggggtaagtctatactacttattagggcttttcagaagaactaaaaaaggttaagaagttagcatattctctcaaaggcctttctacatcttttatagtcaagtctccttttcttaggagttaatttctggtcagaaaatgataggtttgtttcattctttaatgggaggcctgtatacagaagccagaacgtgaaggtttagctgtatggttgactcttcctcatggtttctctttcctcatagagaatcctgtattaggtaatgtagggtaaaatgaaaagtgaaatttcgttctaaaggggcctcgcagcatcaggggcgacagactagagaggtgtgtctcccagcatgagctctgtggataagcaatggtcacgcctcctgagcttcttgtatttagcttttgacagctctgctcccctgtgattatttctgttttttgttttgattgtctctcacatcaagctcaccaagcaataattgttcaaacaggatgacaatccccatgcatgtgatatgcttgctttctagattgagtcactcactgtcatgactgcccatcctcattgcctgtgcttcccacttcaccactctctcacattggctgttcatggaaggctgttttctgtgctctcatgcttctcccctcgcgtttcctgtactgtagggagcttactcttcccttcacactgtatgtgcaatagcaatccccttgtggctccagcagacaccaagaaatgagctgacactcacactgcagtagttccgtgtcttgccatagcggtaagaagcatgtgaccttcctcactgcagcttcacctcagaattagctgttactgcagcacagacctgcttgtgtgtgccattccccaggtggtaggatataagcttgacttgagaccagcgatggtcagtaacaggctttgaagtggcaggattgcgttaggtgtgctgctgtgatctggtgctgctttgaccttgaaagcaggataacgcatgcacttacttacccccgcattacttgggtaccttaaggactagtggttcacaacttactttaggagcttttatttattctgtaacacgtgagatctggtaagacagtggggggtaaggaaaacagacaagaccatgactcttctttccctcttccccaaaacgtgcctcttggaataatcttcagtgtgccctccagcagagccgaaatcaggcaggcatagactccctcctctctcatcaaaccgcagaaatagagttccttcatcataaccgcaaagcttcctcctcccctttgcaccctgcctcagctgcattttcttgtcgcttctacatgggagtgcttgctgttctgggaagagtggggagaagcggtgggaatccttgagccaattgaaactgaggtcatcttcaggaaaaccatgtcttcctgaagttgaaagattcaggcacaccatacagtcctttcctcatgaataatcttgttctttactcatgggaaattgggagaggttaacccctcccaagtttatgtttgcaaattcatgtttatgggtccaggtgaaaaacttttctgaacacagcatgctacttctcttattacctctctctatttaaagaatggctaggctgagcatggtggctcacacctgtaatcccagcactttgggaggctgacat

SEQ ID NO: 68214 - DNA, 1034 bp, Homo sapiens
caagtaagggtgaaaataatcctcatgagagggagggatgtcatgtgcgtgtgtgtctgtgtgtgtgtagttgaggatgacgaaggaaaaacgaagaagaaaaagttgagctgaccaacaagaggttaggaattcagggaaggaaaaataaaagggtacctgggggatttttgccttgtttttctaaagtattaaaattgaagaaggtcgtggcgtaagacgttaagcagcagcttagttgtttctatcaccttgactcagatgtgtgttacggattctctgcggcaaaagagagacttacctcgtaattcatgtgccctttgcttcctctcctgcctgagagattcatggcatctcgggcccaattgtctaccaacttgtgcaagtcatctgtgaatgtgcccttcctgctggacgtcatggcaggaggctgagcttgggcggcttggctgttcactgttgccccaacagtgtttgtgctgctggttcctattataagcaacagaatacgagcattaaaagaagcctaggttacaatttcaggaagagggaaaacttcacgggatgatgaatggcaagccacagaatgagaagaggatgaactgggaagccatgcaagagggaagattccaaggttttgtttagccatttgttttggtataatagggtgatgaaaacagtttctcttcagtagctgctgctaaggctgaacaactcaggatgacggtaggtacacaggcaggggcctctttcagtccattcacaaagcacctaagagtattggaactgctcgccagtacgctattcccagcatcacgttgctgatggaggtgtgatacaatcagcaaggctagttgctctggaattttgcagaatgcagggaaaaagaggttttcttgtgcattgggcacggttaaagtaggagtaggaaaagatgcttggctaaggataaggagaaggtgggtttccaaaccattggacactgccacattctttagcctttttttttttttttgagatggagtctcactcta

SEQ ID NO: 68215 - DNA, 4227 bp, Homo sapiens
ctctttttccctgcattctgcaaaattccagagcaactagccttgctgattgtatcacacctccatcagcaacgtgatgctgggaatagcgtactggcgagcagttccaatactcttaggtgctttgtgaatggactgaaagaggcccctgcctgtgtacctaccgtcatcctgagttgttcagccttagcagcagctactgaagagaaactgttttcatcaccctattataccaaaacaaatggctaaacaaaaccttggaatcttccctcttgcatggcttcccagttcatcctcttctcattctgtggcttgccattcatcatcccgtgaagttttccctcttcctgaaattgtaacctaggcttcttttaatgctcgtattctgttgcttataataggaaccagcagcacaaacactgttggggcaacagtgaacagccaagccgcccaagctcagcctcctgccatgacgtccagcaggaagggcacattcacagatgacttgcacaagttggtagacaattgggcccgagatgccatgaatctctcaggcaggagaggaagcaaagggcacatgaattacgaggtaagtctctcttttgccgcagagaatccgtaacacacatctgagtcaaggtgatagaaacaactaagctgctgcttaacgtcttacgccacgaccttcttcaattttaatactttagaaaaacaaggcaaaaatcccccaggtacccttttatttttccttccctgaattcctaacctcttgttggtcagctcaactttttcttcttcgtttttccttcgtcatcctcaactacacacacacagacacacacgcacatgacatccctccctctcatgaggattattttcacccttacttggtaaatataaagagccaataaatactacagaagactgttctgctgtatcttacaggattatactagaagtatatgttagcgccacacattttataccatggcccacaccagacttgacacgtggtggttttgttttcagggccctggaatggcaaggaagttctctgcacctgggcaactgtgcatctccatgacctcgaacctgggtggctctgcccccatctctgcagcatcagctacctctctaggtcacttcaccaagtctatgtgccccccacagcagtatggctttccagctaccccatttggcgctcaatggagtgggacgggtggcccagcaccacagccacttggccagttccaacctgtgggaactgcctccttgcagaatttcaacatcagcaatttgcagaaatccatcagcaaccccccaggctccaacctgcggaccacttagacctagagacattaactgaatagatctgggggcaggagatggaatgctgagggggtgggtgggggtgggaagtagcctatatactaactactagtgctgcatttaactggttatttcttgccagaggggaatgtttttaatactgcattgagccctcagaatggagagtctcccccgctccagttattggaatgggagaggaaggaaagaacagcttttttgtcaaggggcagcttcagaccatgctttcctgtttatctatactcagtaatgaggatgagggctaggaaagtcttgttcataaggaagctggagaactcaatgtaaaatcaaacccatctgtaatttcgagtgggtggagctcttgcttttggtacatgccctgaatccctcactccctcaagaatccgaaccacaggacaaaaaccacctactgggctctctcctaccctgccctcctcccttttttttacccctctcttttttattttttctttgctctttagaacccagtgaaaaataccagggtactggggtgcaactctttcttatgataggtcattagtgctttaagcaaaagatattagcagctttgactgcagcattagcaattaggaaaaaaaaaaaattaagttccctgcggacatgtaactttgccatcagttttgatgtggaaacactgtgatatataaaatgttgttggacaacagtagttttaagagtaaaatatgaaacgtttaaaaagttccaaaaaaagctagctctgtcctttacttattgagacactttaactttttcctttgtatttccattgtattagataaataaatgtgaatgtaaaattgtataaattactgtacttgaatacttctgtttcccagtgttgcttgctggacattttagtgccttggacttctattgcttctgccattagcatcaacttaccagaccccagatcaataaagggcatgtggaaggaaatcgtaggtccatgtgaccccagcagtccagcagtggttatgccaaagggaaattgaaaaagtatttttttaagtcattcaacaactttgtctagagcaggtgtaagatgagtagggtgggaagttaggttggcatcagtggttaaaaacagaaagttctgtttcgggaatagtgaggagggggtgttgtaacaaaattggacaacttaaaagaatggtgtgtgctgggtgaaagacaaagactaaagaatgaggaaacaaacgtgatgcctggccagtgactgtcatataaacctttcttatttgagctaggcttgaacagacgtgacctagaagaaactgaacataaagagaagggggtggggggctagttttcaagttggggaacctgatagtgaaaagtcacagatggagaaaattgctctcagaaaaactgtttggattgctttcctcttgttgcacatgtaccatgcatttctcagcttggggtactacattttgtggaaagttaatctatctatctttccacatctgaattaatcattctaggaaagaatacttattcctactcatttcctttatgatgtccaaatggttgcaggatcataatctattgtgccacctttatttctagaagtacaactaatatgttcacattttcaaataaataatactccccgtaagtaataactgcaaccaatcagtgttattcagtgctatgcctccttgtaatgggtagttattaattattttcagagctttccggaaatactgtcctaactggctatgtttaggatctttgttatctctgaagacaaagaaagaagctaggactcttaattttggggtgcttcttgactcttagttgggaaactgaaaatatttccaaccttttacccacgtcaatggcatattctgggaatcaccaccaccaccaccactaccacagaaagaggctggaggctcctgtaccctgttcattccttaagggccctgcttcccttagtaagtaagtaagttggtctacggccctaaatatgcaaatgagagctgaaggtttttaaaaggtagaaaggaaaagggcaagggcttccacccctgctttaaaatgatttatttattctctgcttgtatttcttgtggagagagtaaggatagaaccaacaaggggctgagtagctgagaaaggggccacccaagagtgaaacatactttataccagaggagcagtggagcctcatgcagcacattatcatttgttatttgggtttaataataattttgacatcttttcactcatacacaaaaaaagtcagaactggtgttatttactgttgatttcatcctcctgtgtatgaaataacaagcctagaggaatgaactagtgctactgaactgtttaaattatttttgtgttaatagtacactttgagtatctttttccacattaaaaactttctgaattataaatgttttccttacattatttaacaatgtacactgttaaaaataaaaataaaaattcaaactttgggggtttctcagcagccgttaattgtacattttgcactaactctgggtgttgcgcttcttgtaagattgcgctttgtgcttcagtttgttacctttgtagacttatttaatgaaaccattcaaataaaccaaacttgcttttgttgagctgtggggtttcatttccagaagattccttcacattctcactggcactattttgagttaagtgcaatttataactggatccctaattcctgggagctcctttgctgtctccttaacttcgaaaggaatagaaacggtcggctgccggctagtactttcagacttccttatctcaggttcacagcttcccaaatgggtctgagccaaaaaataggaagtc

SEQ ID NO: 68216 - DNA, 1034 bp, Homo sapiens
caccccaaaattaagagtcctagcttctttctttgtcttcagagataacaaagatcctaaacatagccagttaggacagtatttccggaaagctctgaaaataattaataactacccattacaaggaggcatagcactgaataacactgattggttgcagttattacttacggggagtattatttatttgaaaatgtgaacatattagttgtacttctagaaataaaggtggcacaatagattatgatcctgcaaccatttggacatcataaaggaaatgagtaggaataagtattctttcctagaatgattaattcagatgtggaaagatagatagattaactttccacaaaatgtagtaccccaagctgagaaatgcatggtacatgtgcaacaagaggaaagcaatccaaacagtttttctgagagcaattttctccatctgtgacttttcactatcaggttccccaacttgaaaactagccccccacccccttctctttatgttcagtttcttctaggtcacgtctgttcaagcctagctcaaataagaaaggtttatatgacagtcactggccaggcatcacgtttgtttcctcattctttagtctttgtctttcacccagcacacaccattcttttaagttgtccaattttgttacaacaccccctcctcactattcccgaaacagaactttctgtttttaaccactgatgccaacctaacttcccaccctactcatcttacacctgctctagacaaagttgttgaatgacttaaaaaaatactttttcaatttccctttggcataaccactgctggactgctggggtcacatggacctacgatttccttccacatgccctttattgatctggggtctggtaagttgatgctaatggcagaagcaatagaagtccaaggcactaaaatgtccagcaagcaacactgggaaacagaagtattcaagtacagtaatttatacaattttacattcacatttatttatctaatacaatggaaatacaaagga

SEQ ID NO: 68217 - DNA, 1631 bp, Homo sapiens
ctcatgttgatgagatgcagagcagccccgttctggaagattccttgcagccttggctggcagccggcgtccgtgcctcccaagggttcttccctctgtcgtttgaagggttcttcgtgatgccacagcgtgcccgaggctccctcagtgacgagcgcgatttgcaggggtggccctggcagaaagggttgggaaggtacagacctccacagagactgtgtgtgctcatttccgtggaaaaaggacaaggaggcagcaaagacagacccagcagcccaggaaagattcaaatgcgattttacagaacatctgccctaagtcaaaaccaaagaaggattcctttttatcaaaacttcactaacacagaacatgaaattgtttggctcctcctgctcatggagttacaggacctagaaggcgtgatggatggaggatgtcaaatgcgattttccaggaatcgcaatctgtgagtcagggagaagcagcggagggcaagagccagttgaaggaatttgtttttcttctttccttctagttgcctcttgaagtggatttaactaaagcgaagagacaagatcttgaaccgtctgtggaggaggcaagatacaacagctgccgaccgaacatggccctgggacacccacagctgcagcaggtgacctccccttccagacccagccatgctgtgataccggcggaccaggactgcagctcccggtatgcggcctaagtcccctcctttcctctgcggcccctcctgtgtcacggggctgcctccactcaggcctccagagccagccagccgtgcgtgtcctcccagcagccgcggctgttgctcaggagcccgtcctcgccgccgccctctcatgcagaagcctgagctcatccgccgtggagagcgaggccacgcaccagcggaagctccggcagaagcagctgcagcagcagttccgggagcggatggagaagcagcaggttcgagtctccacgccgtcagctgagaagagtgagggtgagcgaggggtgggagcagggccctgggaggcgtctgcaggaggaagtgtagccgcagggtcttctgattctctgcggtaaccctgggccggctccaaaccaggcctcgctgggacttctctcaagctacacgcaggagagatgagcccaggaaattcagatatttaaatctgctgtacattttcccgtttctaaagacaatgatttcttttttcccccgtggaactaagtgggccttgataaaatcttctagaattagaaatttcagggtaaagaacttttttttgcttcgaatgctttggccatctctacattagaaagccttggccgggcacggtggctcatgtccgtaatcccagcactttgggaggccaaggtgggcggatcacgtgaggtcaggagtttgagaccagcctggccatcatggcgaaaccccgtctctattaaaaatacataaaaattagccaggtgtggtggtgcatgcctgtggtcccccctactcgggaggctgaggcagaattgcttgaatccagaaggcagaggttgcagtgaaccaagatcgtgccactgcactccagcctgggcaacagagtgagaccctgtctcaaaacaaaaac

SEQ ID NO: 68218 - DNA, 1036 bp, Homo sapiens
atggtgaaaccctgtctctactaaaaatataagaattagctgggcgtggtggcacatgcctgtaatcccagctactcaggaggctgaggcagaagaattgcttgagcctgggaggcagaggctgcagtgagccgagatcatgccactgcactccagtctgggctacagagcgagattccatctcaaaaaataaaaataaaaattggctgggtgtggtggtgcacacctgtaaccccagctactcaggaagctgaggcaggagaattgcttgaacctgggaggtggagcttgcagtgagccgagattgcaccactgcactccagcctgagtcacggcaaaactccgtctcaaaaaaaaaaaaaaaaaaaaaaaaaaaaagtgaaggttttcatagcaacagctgctcggttttacactatgtttacatttagaagtatgagagttgttaaatgtgtattttacacatatttcatcagaaacattaatggaaaaagatcaagaaatgaagtattttggtttaagaatcagtagtacattgattatcagttttcagagacatatagtaaaataaacttagcatacagattatgtggaatataatttgtttttttttcttatttattttttgtgtgtggaatgtaattgaaatctgttgctcaccaagtctttcagtgtactagagtttgggttctggggtcagagtgcctgagttcaaatcctggctttgccatggtatgatgtagggcaaactgcttaatgttgtttatttcctaaccttaacctgtaccttaatttcttcatctgcaaaatagaaataataacagtagtacctaacctcttaagctggtcaaatgaattaattcatgtatttagaacagtttgggcacataattagctggttcactaacatcatttgaagtttaactgtgtatactatttttacttaataagtatatattaaatacatattatgtaccacatattctagatgctggtatcatagtagtgaacagttctcccagcactttgggaggcc

SEQ ID NO: 68219 - DNA, 1029 bp, Homo sapiens
gatctgccctccttggcctcccaaagtgttgggattacaggcatgacctactgtgccctgcctctttttctttctttttttttttttgagacagtcttgctctgttgcccaggctggagtgcagtggcatgatcttggctcactgcaacctctgcctccggagttcaggcaatcctctcacctgagtaactggtactacaggcacacaccaccttgcccaggtaagttttgtattttggtagagacaggaattcaccatgttgtccaggctggtcttgaactcctgacctcaagtgatctgcccacctcagccttttaaagtgctgggattacaagtatgagccaccatgcctggccattgtttttcttttcttttttttaaattaggattgcctgaaagaaattttttttaaacagcagcattgtcttttgtagttgagagatacataaatttattcaactaatctctttggaaatttaagcggtctccttgctggtacaaacaatgcaataattgaatatcattgcacattatgtccttgaacctgtgaaaatatattttatggagaatattttttaaagtgaaacttctagttcaacaatgtgcacattttaaattttgatagattgtgccaaattgtacctcagtgggattttaaatttttggtttattgttcatcttttcacagggagcctaggatagcagcatatttctcgtccctagtaatatttataaccctttaagaaaatgaacaggatctttaaacatgttgaaatacagtattaaaaatatttgactcgttgatgagcataaccccattacatcaggttgtactagtaattttgagatttatgtgagaatttcacatataattatttaaatagctaatgggtggtatattacatcaggttacatcaggttggactagtaattttgagatttatgtcagaatttcacatataatatttaaatagctaatgggtggtatattacatcaggttggactagtaattttgagatttatgtca

SEQ ID NO: 68220 - DNA, 1008 bp, Homo sapiens
tgatccacccgccttggtctcccaaattgctggaattacagatgtaagccactgcaccctgccaggaaagaggtttaatggactctcagttccacatggctggggagacctcacaatcatggcagaaggcgaatgaggagcaaaattatgtcttacatggcgacaggcaagagaacttgtgcaggggaactccaatttataaaactatcagatcccatgagacgcactcactaccaccagaacagtagaggggaaactgcgcccatgattcagttaagtacacctggccccacccttgatacatgaagatgattgcaattcaaggtgagatttgagtggggacacagccaaaccatatcactcactgtttggaaacgttacttttaacatatattaaattcccatatataatttagaccctgttcttgggctagtactatacagttttcgttattatagttttacaaggctacaatactttgtaagaaaccttgcaggtcagatgtggttttgttgtcaggaattttttccagtaatacttagtggacattatgtagtatccagtaatcacacacattgttttcttaatgaaatatatgaagtcacactatgtgggatacatataaacagtaagtaagctcagatcaggtcaaggtttgctgctagatgagttaaaaggaaaatcttattttcagaggtttttggatttttgcagtacaaatgaagaattatggatttgtaatttatgttgctgttgagggctgtcttccttccttgttcatctattttaaattgtttggttactcttgtatctttactctccatttgaattttagagtcagcttgttgagttacttgaaaaatccttcaacacctgtgaaaggaagggatctatagctggttagcaaaatcctgtagagatttttcactgggattgtgctaagtagttggggaagaactaaatcttagcagtgtttgtcttctcatccatgaacacagataactttg

SEQ ID NO: 68221 - DNA, 1643 bp, Homo sapiens
ttgttgagttctgttattctaataacttgtcagttgattatcttgggttttcagttagcaagtcagatattcagacattgagtttaatcttttccttgtcaatctttatacttcttgtttttttttctttttcttttttgtagacagggtcttgctatgtatcccaggttggtcttgaactcctggcctcaagcgatcttcctaccttggcctcccagagcgctgggattataggcatgagccattgcacttggcactttttttgtttgttttccagttgcatggtatgttttcagcgttcagttttgagacatctaaaatatctctaaaatattgtttactatgagtacattatgctgtaatcacattctgaatgcgtgagtacatacatggtagaagggctagatcttctttaagtgggggtaatggaaagtctctgagaagggaaatatttattattggaggatttaatgtgtgatcttttcattacagatatggtgtaagatacttcttcaagattggacagctggggaccttcttctgattaaccttaaaccaacttgtagccatagagacacctcacaaggttcccatttttgttgttgttgttgttgattttctgctcacacctttcctgaccttgcaaccatgtatggaagtgcccgctctgttgggaaggtggagccgagcagccagagccctgggcgttcacccaggcttccacgttcccctcgcttgggtcaccgtcgaaccaacagtacgggagggagttcgggaagcagtgttggaggtggcagtgggaaaaccctttcaatggaaaatatacaatctttaaatgctgcctatgccacctctggccctatgtatctaagtgaccatgaaaatgtgggttcagaaacacctaaaagcaccatgacacttggccgttctgggggacgtctgccttacggtgttcggatgactgctatgggtagtagccccaatatagctagcagtggggttgctagtgacaccatagcatttggagagcatcacctccctcctgtgagtatggcatccactgtacctcactcccttcgtcaggcgagagataacacaatcatggatctgcagacacagctgaaggaagtattaagagaaaatgatctcttgcggaaggatgtggaagtaaaggagagcaaattgagttcttcaatgaatagcatcaagaccttctggagcccagagctgaagaaggaacgagccctgagaaaagatgaagcttccaaaatcaccatttggaaggaacagtacagagttgtacaggaggaaaaccaggtaagttctacgtgtgtttacctttattggctgaattcatgtatataaatgaaatagcctttttttcccctttcctagatttttcccttcgtagtatatgtatcttcctttttcctattgattttactgttttgtgtcctccatttctcagccctttccaaatttggtcctgtaccctgttttcttctagctgcccatgtctccttgctcccattcttgcttggttcttttctctggtttctctttctcttcgtgtctttcctttcagcatatgttatcttttttttttttttccaattcttctgagagtataattttgccacact

SEQ ID NO: 68222 - DNA, 1230 bp, Homo sapiens
ttcaaagacaaaatatttgaatcttctgaatacttcagttccagtgaaacagtccacaggattttcatgccaaaaaacccatatgtgctgaagaatggtgaacaccgccttatctagattccaccccttgccctaattaaacaccagtgctggcagcgatgcattctccgtatacccactgtaattactacacaatcctaaaattgtataactttggtccaaaaaacgaagggtgcaattttaaagtaaagtgaaacactgcaatgagatacagagacagagaatgctaattaatagattatagtcagccagcagtggggcctaattaaactctgcattcattataccctccatagccctcagaggtcaggcatcttccacttgataaagaagattggtttaataggatttacagtaattaaatggtttccccatttcagtttgagactggggatttaggtccattctaaatattggatctgattggaccatagagatcttgttctaggatcctattagatgtaaagacgcatttgcttagaattacttgatatgtgtggttctttattatggagttcttttagaagatgtttctgatataaatactcagcaatttttatgtctcatccttttgttactgaactttcaaatactgctggttggagagttagaatagtatgtaacagggaaggctttttctttttcttttttaaaattgggagtcaggaaggtttttggtgtatgtttgacaaagaatgaaaatctagctgtgagcttggtggaactgcagagctactaagactttggatggggccgggctcagtggctcatgcctataatcccagcactttgggaggctgaggtgggcggatcacgaggtcaggagatcgagaccatcctggctaacacggtgaaaccccgtctctactaaaaatacaaaaaattagctgagtgtggtggcgggcacctgtagtcccagctactcgggaggctgaggcaggagaatggcgtgaacccgagaggcggagcttgcagtgagctgagatcgcaccactgcactccagcctgggagacagagcatgactccgtctcagaaaaaaaaaaatactttggatgattttttttttaaattctaaacagcatttaaccagattatcatcatactttttaaattatgccttgaaataattctgtatgttaaatttagttggaagcttattttaaaaatgt

SEQ ID NO: 68223 - DNA, 1036 bp, Homo sapiens
agacagggtttcatcatattggtcagactggtcttgaactcctgacctcagctgatttgcccaccttggcctcccaaagtgctggaattacacaggtgtgagccaccacgcccggctgttttgatgaaattttttgaaagaatgtattcatattcctgtagatttcccatttcccacattccctcaaatttagtttccgtgttaatatcttctattaattttgaacagtgtctttattgtagtttatgcaaagtgaggagtgagtgccatacttattttgcttcctgttgagaataaactgaagttaaattactgacattttgcatattatctcaatcattttttaaggacctgtaaaacagaataaggtgaatcctaatttgctagatgcagatttcttgtagctatttttgattcctgcaggctgctctgatttgctacttgaggaggaaagctgatttgggggttttctttttgtcttggttctagcacatgcagatgacaatccaggctctccaggatgaattgcggatccagagggacctgaatcagctgtttcagcaggatagtagcagcaggactggcgaaccttgtgtagcagagctgacagaggagaactttcagaggcttcatgctgagcatgagcggcaggccaaagagctgtttcttcttcgaaagacattggaggaaatggagctgcgtattgagactcaaaagcagaccctaaatgctcgggatgaatccattaagaagcttctggaaatgttgcagagcaaaggactttctgccaaggctaccgaggaagaccatgagagaacaagacgactggcagaggcagagatgcacgttcatcacctagaaagccttttggagcagaaggaaaaagagaacagtatgttgagagaggtatgtgactacttttttagttttatgatttgttggttatcttttttttcactgattaatcagcatcttggccccagtgaatctacgtgctctgccgtgctggtggaagagaatttcatcctttgtattt

SEQ ID NO: 68224 - DNA, 1056 bp, Homo sapiens
tttatgtgtttttcatagagatggggattcaccgtgttgcccaggctggtctcgaactactgagctcaagtgatctgcctgccttggtttcccaaagtgtttggattacaggcatgagccactgcacccagtcaggactttttattcaaatggatttttcggttttctttaggaattaggtgatgctcaagaggagaaatcagatgaaataagttgaaaatctaaattgtgtgttattttttaaaaaatgcagttttaatattttcaagtagatacagaaataccaaataaaaatgttgtaaagtataggttataaaattttgttaataaatgaagattgtttacagttagcagagttcattttatttttactcagacaatttaaagttcgacactcatttattgaacaaatactgttaaatatctaccgtgtgcccagtcaatcaccttgtagtgtgcagaacagattcaacatggacaaactaggctgggaggaggctgacgagtttgtcgttttaaggcaggtgagagattattatggcctaaactaattaatgtgttaggtgttgggatggaagaaaacaaataattttaagagattttaaaaactcttttttgatacaatatggaatgcatgtaagaaatagaataaaacaggtgtatagttaagtaaattataaagtaagcaccctcataaccactacctaggtctagaaatagaactttcacagccacccagaagtcctgtacgtgaaccaacccagccagaactctcccttccctctaaaagtaaccagtgttctgggttttatagttatcatgcctttgcttattatacttatcacatctgatccttactatcatagtattgttatcttgtattatatgttaaattaatatcattcctaggtatcatccctaagaattatgtctttgttttgtctgtttttcaaaaatatgctttaaatctcttaattaccgatttgcccttaattcctccttttttttctcgtgcagttggagcatttcttggcttattagctggaatgacaattc

SEQ ID NO: 68225 - DNA, 1042 bp, Homo sapiens
attccagtccactgtggggggaaaaaacctgtgaacttagaaactacctatggctctttgaagagggaatgaggggaacagatttgattgtattatataagttattgttatttctagttaccattctgcctcaaaagtagacaagaagaagacctaagttgacacataagtgaaaaagaataataatgtcgtgacaggtagaacaactgaaggaggaactaagttcgaaagaggctcaatgggaggagctgaaaaagaaagcggctggtcttcaggctgaggtctttgccgtaagatttacctctttgtgtgcagtggtcccacagtgggaccctgctagctctatggcttctgggtggcttaccctttcattctctatggttggcagctttgcccattactagcactaaccagcctgctctgctctttaactgactcctgttcactagtttgacccacatgtcactttgtgtgcagtgagccttcacgtgttctggaagccttgtacctggtactttattgttgcttttgtcactctgtggatggtatttcaaagcctgtttctttctcaaccctttattgttggtttatatgaatggcggccttcttttcttcctaggtacaagaatatatgcagttgttctaggcctatcacctagagtttatttgaatttgaaactcttgagcaaagtgctttaccttatgtagacattatctttaagtctccagtgagtgattttgccacaaatgttactttctttaggacagatgtatagaaagtatttatctagtaaattgaaattactaagagacttatttcaggtatctaaatctagttcaatattctaatgaacttaaaatttcaattcagaacataataataaaataaatacagttggccctccatatctgtggatttgcatctgtgtgtttaaccaactgttttttattttcagggtaaaaaaatggatgttgtgtctgtgctgaacatgtacaggcttttttcccatgtcattattccctaagcaatacagtatgacaa

SEQ ID NO: 68226 - DNA, 1009 bp, Homo sapiens
gctgagttagacatattatcaactccaaattatagacgaggaaactgaggtaacagaatggtgcctaggaaaacacagctagtaagaggcaggatttggttttatacaggcagtcttcttccacatactgcttacaagttctttactgacctatactaggctgtgcacacatttgtcaaagtgtcagcaaaaactgcttctgaaaataattgtggctaagactggaataaaaaaatacagcatttaaaaaaccaaacttgggctacttttgtagatttgctatttatggtccactttatagtatatattaaaaagggaaatattttggtggaaagggtctaatttggtttatggaaaccatatattggctagagggaaggttgatcaataacttcctttttaaaatagctactattagtaatttctgcattgagtcagacaacaggctaagcacatttcacgctttattttactgaatccataaacagtacagtggcattcgtataatttctccttattactaattaggaaactgattaggaaagtaattattcagggacacatagctagcttagttctgataggtgaatgtctgcaaagccttgtgctcctaagctttgtattatatttgcttcccctttataatgtcttcccttctcagtctttaaggaaaatttgtgcttctaaactctgcttttcttttctttttttctttttctttatttttttgagacagagtctttctctgtcgccaggctggagtgcagtggcgagatctcggctcactgcaacctctgactccctggttcaagcgattctcctgcctcagcctcctgagtagctgggattacaggcatgcgccaccatgcccagctgatttttgtatttttagtagagatgggtttcactatgttggccaggatggtcttgatctcctgaccttgtgatccacccgcctcggccttccaaagtgcaatgattacaggcgtgagccactgcacccggccta

SEQ ID NO: 68227 - DNA, 1069 bp, Homo sapiens
gaggtttctaaaaccttttttgttatatctgcactcatcctgcatttgatccatcatgttctgaagaggtctcacctagaaaaatgaaaaccatttcatcagtacagtggtgttcagttgcttactgctgtctcatagtcatctaattgaattggaatttcctttccctccattccctttctaagaggtttcaaagaatatttagaagacacaataaatgaaaactggacatttccctattggttgaataagtttagtggttttttttggctcagggttggggagatccaaggttatgtcatgcaaaaagatgaatatgacctatcacacagttcgtgctgcatttagtttcatattttgtgactcagatctgtgaaagatacagataagaggtgtttgttttatttcttttttccttaaagtgttttacttcttttctagattggccaggtgaaacaggagctgtccagaaaggacacagaactactcgccctgcagacaaagctagaaacactcacaaaccagttctcagatagtaaacagcacattgaagtgttgaaggagtccttgactgctaaggagcagagggctgccatcctgcagactgaggtagaaacaattctgggatttgtggggagttggtttcttggcaccttttcataagcgttacctgtgctgtttttgttatgtttagaattgggaaatatgagtaatgttatgattaattcttcagcagcgtgatcagtcactgtgctaaaatgtaaccatcttatttcagttgttcttagatctaacaagttaaaacaggtgcagtttatgtttttaattctttaaacttttgccaagtctgtacttcaaagtatactctgacagtattaaaaataaaaggataattgtaaaagagaaatcattgatttagaagcttcagttcaacccctggtgaattttctagtcatgaatgacaatgagcttggttacactgtgtttggagtacatttaagtgtctttaagttgtgatattatgaataactgtatataggaaactggaatctgttaaagttctagatag

SEQ ID NO: 68228 - DNA, 1036 bp, Homo sapiens
tttatagctttattttaaaaattttttgtgggtgcatagtaggtatatatatttatggggtatgtgagatatttaatacaggcatacaatgtgaaaataaattatggagaatggcggtatccatcccctcaatcgtgtatcctttgagttacaaacaatccaattacactctttaagttattttaaaatgtaatagctttattaatcgtttttcacttcagtagcttgagtgcatgcaatacagcaaaagggtcagaagagggtgccagtgttctagaggtcagccgcacttccaagtttgctactgtaatagctttggatggaggtggcaggtgtacaaaccagagaaccaagcagttggttaatgataatgcaaacatttaaaagcttgtcacagtctaataaatgacttttcccccttggcaatccatgcttctctttgtacccccctcaaataatattcttattagccaggtctcacccagatgggcttgtgattggtttcttgtaccatagagaatagattgtatttattgtcattcatgaatggtttttagtttttagccattgcaggagtagctgagtctcagtgattatttctgtaagttactagggccactgcgcaaatagaaccatctcatcataaaagataaaagaatgaaagctaactttctttggaatttgggatgattttaagaatgtaatatgtctatttattagcattgcttaaaaaattactctggtggcacttgacaagagtcaccttttccaatgtaacttgccagtgttagagcccagtaaaaggcagtttataccagctctttgaaagttttcatgtgtttctataatttgctcttagttgatttcatcttttctgcagctatcccagacttcgatctaacactcggattactaaattaagtatatatgaaaaaagaacatggagcatggagtttttctttcatttttatttttagagatagaatcttactctgtcacccaagctggagtgcagtggcatgattatattaatagc

SEQ ID NO: 68229 - DNA, 1033 bp, Homo sapiens
agaggaaaataaatctattgtttaaagccacctggtttgtggtcctttgttagggcagtcctaagagagtaaaacagttaggtttttctggatttctagctcatattcaggtcattatcaggtattttcaggtttttatcaaagcatttcaggtattatcagggagactgttaagatataatgtcatgtcagaaataacacaccaaaaataaggttcttattctctctcgaagctaaaacccatttagtcttcttcatcagaaacctgggaacccatgtttgacttatctctcttttatcccttatatacaaccaataaaagtcaagctcctagacatgacactgatgctttccgtggctaaggccttgtcttctgctgcacctcacataacttaccacctattctatgctttagcaattctctattcatagctctctgagaagttaacatcctttctaatcttcattatttgtggtatctctgctcaaaggttcttccattatcttcctcaccagccatcttctgctcatctttacatgctttgaggtatctccaagcaatctgagtgcttcttttctgtacttttagaaaatattctctacacttctgttgcagcactttctataatatatttatgtgatctattttggcaacattcttctccattaggttgtaacttcagcagaagacaggaaatatcttagttatctttgtgtctccagtaaccagcccagtgtaacttttccgatatacaaataccatgactttctcctgcttaaaaatcttcactgacttccatttgcaagtaggataaaatttaagcctcttattttagcaggcaaggatttatgatctactatcttttcaggcttgtctcttgtccttcttctgttactttatgccaagcaataccaaatgaatttacaagtatatcatgctgtttcatgtttctagattttaaagtattctatttcctcttcctagatatccatgcatttctctctgccttcccttttgtatctagtgatgttc

SEQ ID NO: 68230 - DNA, 1045 bp, Homo sapiens
tctaaaaagtagacctttgcttttgctttgtatggatatctaagtgcattatggggttgtttttcataaaagcctcatagcctatgactagactgtattatctgatatagccagtgttatgcttggtgatgctttttttcccttttcctcattttagattttctaaagcaatgtagcttcacttggaaacttgttagaaatactgattttgaaccccaaccctgttgaatcagagactaagggcttgatttagccctccagatgattctgatgtgcatgaagtttgagaaacatagttgtagagattccattgtgtaacggtgagcacactggactctgaatccagagaaacatagatgtagataatactacttttatagaataacaaaactcaacctctttataacctttataacatatctatttgaaaggaattacattcttttctttttaattcatcacttgtaaaactcctacattcttaggtggatgctctccgattgcgtttggaagagaaggaaaccatgttgaataaaaagacaaaacaaattcaggatatggctgaagagaaggggacacaagctggagagatacatgacctcaaggacatgttggatgtgaaggagcggaaggttaatgttcttcagaagaaggtaaggtacaggtgtttcgagttcagtggcccattcctcatacatcttcactcctaccactaagttatttctaaatgctgtcagagtttcttgctcatttttcagtttatatttttgtgattagtaatttggaactcttgttgcggtaggtagattgttaagactgctctatatattcagtttttaaaaatttaaacactgttagtatcttccagtagtgcttttcatgctgtttctcaaaagtgccttgtaaattgccaaagtgtttgaactgacattcttttgccccttctgtcttttattgaaactgtaccaaattggtttagtacatggacttgggatggtacaacttcatttatgtgtttaataagatgacaattttaagccgagac

SEQ ID NO: 68231 - DNA, 1024 bp, Homo sapiens
ttgtttacacaatcatcttttgtgcccctacatcaagctgcctcctattgcctatttcgtcaccttctttcttcgtagatactaagaattttctcagttacttctgcttttgtttgcatcttcaatctcttcgcctttgttgtcccctctctttatgtgtaatatgatcagctttctattgaaatatctcctgatcttggtactccttatggtcttcttccctctctccttttctattagatatatttatagccttctcctgcccatgaaggattgactgctacaggaatttccctcctacaattaacaactcaaaaactgggaaaccacgtgaaacaactgattttagacattggacaacattcagtgcagaacagtgctctcatcttaccttccaaacttatatgatttttgtttcttaaaatatacttcatatgtgtatcaaggttaagggttagggaagcctatatttaagacataaaagatttttttctacacatgtgaagccttaaacaaatgaacttgggaaaggacttatcttaaaagtatagctgttactttcaccaagcgtttaatacaattatataaacatttctcatttactcaaggtactttgcttcagagctttctgaaatatttcctaagaatatatattttctcctttaatattttttcaaaccattttaagggactaaatatattctgttgtctattgaataagaaaaaataaaacgtctaagcttttgtcttctcattaaacacattatacatacatggctttagagattccagaagacagctagggacttgaaaattagtttttaattattgaaactgttttgtattccaaaatgcattaacaatattagttgacttttgtaggatcctgaataaaaatttttttctcagatcttagtgtggttctttcaaaaaaatttttcttaaacaatttttttttccaatagagatggggccttgctgtgttgcccaggctggtcttcaacttatggctgcaagcagtccc

SEQ ID NO: 68232 - DNA, 1038 bp, Homo sapiens
atcttgaaggaggtggaaaatgagaagaatgacaaagataagaagatagctgagttggaaaggtaagaaagtgaagctgattggggcttatgaggttaaagtatggttttaaaagtatgcttttggggacatactttttcagtgtatctaactctgaatttaggttctcgaattcttgctattactgtattagctgccttttttctaggtcagttgtacgttctttgttgaggtgtctgaaaggcaacatagaatgggaataaattgggaagctatgggctgtaacataattgattggcaaaaaagagagtattcattaatttaaaattaaagttttttttactggcaaatcaagagaggacaaatgtctactttttaatttctctatataatgatcaaatgatcctcaagcaaaggagttaatcttttatcactagtttagacctttgttgttgagctaatgctctgttgggctataaatttttagacttttcacagtttttattgttgaaaagcacgctgttacttcagtgcattagatcaaaattaggaggagagacactttgaggacaatttaggagccacggatatgtttttttatgaagctgtctctgacttggaattcttcaaaatattctgtgtttgaacagatctaggcagacaggtctcctataatttttttggtgtgttttcttattattttatgctaaaggtcaagcatgtgcctcttgacctcttcttttacaccacatatttaacataaatgtaaaactgtgcagaaacaactctgccggtagaactttgttaattacctgtattctgaacagccagaaagactgacagtgacagaaaggggtcactaatctacttggccttttgaggactgatccttaagaataatttttttttttttatgatcttgaaggctgagaagtattagagtacttccataaattttttactaagttttaaagttttggggttagtggtagacttgatactgtcctctgaaggtattattttttcctattctatagt

SEQ ID NO: 68233 - DNA, 1025 bp, Homo sapiens
tcactgtttattataatagttgggagcttagcaattgtgaatctaattttaaagcattaatttatttatgaattgctctaatttgtcctcttcctgcttgaagaatggtaaaacatctatgttcactatgaattaaattcagattagttcaggcaaaacagcagttgagagagttttaataaatttactaaaccattaaatccatggcacctcacgataggaatttactaacatctgggttttcttgagaatttagattcaaatcaaactagatgttaatctacttataaggaaaaagaaggaaattcctcatttcacaagttctgttatgtctcagaatgttttttcctaaatatacattccagaaataccctccttttactcttttaacttatatttagatgatactccctcttatatctcttcccagagaaacagtattgaaaaggataataatgaggcaagaaaatcattgtgtgttttcatcttttccagttaattcatgaattcagaactatgcatacattcataaaaccatgtgcatgcacacacacacgtacacagacagacacgcatacacaggacgagaaggtgggggtaggcaagagattgatttaattgtctcacaattttctatacttttcttggttgcctatcatagataaaaccattttatcttgatagtcatcctttagcctatagagtgaaggtgaagaaataatagtggtgaaactaaagataggagatttaaaatatgaaaagaaaatggattaagaaaatcaaagaccaaaaacttaaaagaatcaaagaccaaaaaaatgtgccatactgtactactttgtatatctagtctgatataggcaaacaacctattttgagatacaaccatatctctttttagaaacaacttttaaagaaaattttaaaatattttatgtctgaagtagaaaatttagaaactgtaaaaaaatgataaaaaagaaaaaaaaataggctgggcgctgtagctcactcctgtgatccca

SEQ ID NO: 68234 - DNA, 1218 bp, Homo sapiens
tgtaaactataaatgaacagttcatatatatatatgtagcaaaacaataataaaagcaaagggattttaaacataaattttgagatataggttgttcttattaatggaggatagaccaatagtagagagagacacaatagggagcttcagaagtaaatatgatgttccatttcttaagctaggtttatggatttttatgtcattattttcatatacatctacattatatacagtgtattgaatgtttgaaatatttaataatggtaaaattagagttgttttacaaagctttctttttctatcagccattctaatatttcagtgcgtcgatgtcaaaaatactgcttccgtatttccaaaatctctgacttggtttctttttagtcatttcaaatgatcccgtgcctttcttttgttttatgatttcattgttcttcgtagaatacatgctgaaatacatgttctttatgggaaaacttatttttgtaaacgaatgtgctaccattgagaggaacgaatttggaattgttgaaaaatttcgcagcatgtatttattcgttggttttcagccattccttattgtcactggtgtaagtctctagataaacatatttgtttctatacatacatatgcaaagcttgatttttctccttctgtcattaggcaagtgaaagaccagaataagaaggtagcaaatctgaagcacaaggaacaggtggaaaaaaagaagagtgcacaaatgttagaggaggcgcgacgacgggaggacaatctcaacgacagctctcagcagctacaggttagaacacaaggagaatctgaaaggatcgggtgaagacatttgatccgtaatcgcatgttgtttttctcttcatctttatcctcctcttttttctctttctaaccctgcttgctgccttcctctcagaccaactgtttagcaatgaaggaatggctttaagtagaaaatgcaagttttattccacagctttatgaggacacctcagcataggagaaagttcatcttgcttcaagttgatcacacttaattggtaagttcaatgacagtttaatgagtgggttatattaggcttcagggttgtcagtatacctctttgccagttccattcattaaaatggattgctaatcttggtttgtgtctttcttccttttttctattcttcctttctcttttccttctacctctctaacctcc

SEQ ID NO: 68235 - DNA, 1003 bp, Homo sapiens
gctgcttactgcactttttcatgtaggcttaactgcagggaaagagtgttttgatattcggtcgaattactatctcatcaaagctggctttatgcttagagagtagttcaaaaacaactttgtgcttttaagtaatcaagcccttgccacctctgctgtctaacacagttttgttctctctgttacagagagcaaatttctcacatttgtcttgcttaactaacttgagcctttgctgttaatgatatacttcttcagcctccttctttcctttccttgctttctttattgtgtcctctgtgacgatatcttgttgacctggatttgcttctgatggaaagaacatttaataagcaaacagccctttcttaataaataggctctccctgggttaagtaattaatccacttcacctagtcttccatcattttctaggacagtctccgtaagaaggatgacaggattgaagagctggaagaagcactaagagaaagtgtacagataactgcagagcgggaaatggtgctagcacaagaggaatcagccaggaccaatgctgaaaaacaggtctgctattttatacagttccaagcaatgctgctggttaaccaaaaggtaacacacaaccagtatagtttaggtaaactatacatattgtatgtttatagggtttcaaaaacacttcatagaggagaagtcccaaggagttccttcatagcggtattagatacaaggatgtggtttcttttgtgtcaagtatagaaagaaagaccaactttattagcaaagctgagagagaattgatgaacattttgcagaatgagtgcctttcagtgccctgttcctagataaatgccttgtctactctttcttaaataagaattgaaataaagttgtatgagaattgactcatgttaacacagaagtccctgcattaataacttaggtctgatcccatatatatttatgtagcatgtgctaatgtattggacgagatgaaatg

SEQ ID NO: 68236 - DNA, 1034 bp, Homo sapiens
aaatcctacttcttccataaaaccttttctgaccttccaagtctgagttacatgtctctctcatgtttttgtttttctttttctttttctttttttttttttgagatggagtctctctctgttgcccaggctggagtgcagtggcgtgatctcggctcactgcaacctccgcctcccaggttcaagcaattatccctgcctcagcctcccaagtagctgggattacaggcgcccgccaccatgcccagctaattttttgttatttttagtagagacggggtttcgctatgttgaccaggctggtctcgaactcctgacctcaggtgatctgcccacctcagcctcccaaatgctgggattactggcgtgagccactgtgcccagcctctcatgtttttcaactgcacttgtacttagtcctgttttttttttttaataacactgcattattattacgtatttactacctattgctttaagagactgtctccattttgtctcctagaatgaaagctccttgagggcaggagctgtgtcttatttactgttgtatcctcagcgtctaccattgcacctggtacacaatggcattcaatgaatatttactaagtaattaaattatgagcgaataaatgaaattttgtcctgacttaatgtttgcagcatcactgtacttactaaacaatttaggatttaatggtaattttatcatatttttatacttatctaaacagtgttttgaaatgttttctttgttgcaattgcgtttccactggatttgataaactactttttcatctgaacagaagaacttaaaggtgtcagaattgtagatttaaagaattagaatagatatttatgtgaaagttatttacatttttgtgcttgattttaaagaatggtagccagagtggaaaaatacaatttagaaatcattattatccctgacctgtccttcagtggcaaaacagagggcttatatgtctcaaaaagtgaatgtgcaaaattgtaggcccactgttgttgacctctta

SEQ ID NO: 68237 - DNA, 1041 bp, Homo sapiens
ctgggactgtgaggatgctgttagctgaagacatttaacttgctcacttctggaaggataaaaaaattcaggtgccaaaaaaactaaatgcatttgcttactatcattgtttaacagctgttaccaatcaacgtggaaactttgtttaggtaggaagcactaatttccaagggtcagtgaaacaactttgatttgtcatgctgatttttgactctaggtttctctgttttagtatcacacaaatggggtttatgtaggagtcaatgaatggcaaatgccccacctctacctgccctaccttctacttctgaaaagactggttattaccaagattatttcttggcaattaacaacctaacataaagtcttgtaattgatgcagttggctgtttgattacatttgcttctgaattaaaatgaacaagtttatttaaataattctgatttggtagccacctggaataagtggaaattactgataaagtacttaccttgctctcttagtttcttttccttatgttttagcattttgtctgtcttctctggtggctttttgtttgttgtttttcaggtctgttgctgtcaaggctttttttttttccccatgtcatttttaaagcattctgtctcctttctatctggtatgtacacacacacacacacacacacacacacacacacacacacacacacataactatataggtatatagggatatatttccttcctgcctatataatatatagtatatatataatatatatatatacactgcctatgtagtatataggtatatatatgcctgtatagttatataggtatatagggttatatttccttcctgccttccttaaaaaagaaaccctacctacctggatttagagcaagaaattgtctgattgaattctagcagtttctttaaaaagaaattcttcttaatgatgtaaataggaaaattttagtttagaggactaaaaattattcgtctatgtatacaggaaatctgttatttgccaagtttatgtcttttatttcctaaa

SEQ ID NO: 68238 - DNA, 1093 bp, Homo sapiens
aattcctaaaatcttctggaaagttcaggcaaaatggcgagcttactggggaagagggctgttggttctgaggttgtatgaagactaggcaatttttaaacacattttttattgtaaacatttccaaaggtacacacaggtagagagaatgaacccccatatacctgtctccaagattcagtagttaccattttgccacactggaagccaatttttagaaaattgtcacttttagcagagctttgctatacacattttcctgcttcccccacattttgtaggttgctgagaccataatctgttgtgaagcatgtatacatctgctaatacatagtagatgtttcttttacttctcagtgaccttctgtttaaaacaaacatgtgtcttttgaaaatccagttgtaccctctcatttaccattcctaatccttccccttacctaaagaccctactgctattttactgaaaccaggtctatcctgggatccctcagttaccctcagttaccctcgttctgtgagcagttatctttatttttgttgtcttcttttctgtctcagagaataggtttttttctccttcataaggccagattcttctttctgtcacagatttcaagtccccgcctcagcagcctttcactgtcagttctttctcacgtgacccttgctcacttcttctctgcataaatgcacagtctgtctttggcctaaaataaaattttttcactccaactagtgctttaaactgacatcagtttacttttctgctactttgaactatcagtaaactttgaatacctgaataatagagctgtacagaatcttgccataataccttagcatgaattctcatgggacatgatgattgtgatattgtgactgcaacccaagaatgttgaggtgtcctctgtgctttcacgttcttgggctatagtgcaaggctacgagattctgtccttttagaaaagcattatgagtgatatgtcttggaagtaatgtgtaagtgaagccggaagtggattggcatagggggagaattaagagaggttagagttccgagtagcatcatcagaaaaaagcttgcaggttt

SEQ ID NO: 68239 - DNA, 1030 bp, Homo sapiens
gccccacccccgtaagttatttccacttaaactcatcagctataactgaattctttgttattagcacttctcctgctttggctaaagctcaatacctaattattattttctttttatgcactatttttatgagtttggagcaagaggggagggtcatgttgggttccttcacaatatttatcacaagtacaagttccaatttaagctaatttattttcagtctgttaggatttttttctccttctctcctaatttttgtcaactgttatttttgtaatcattctttttcttcctgaagtcttcaaaatccatcagatggatttgattgttgctttttagatatatatctgttgcaaagtttttgccattgcttatgggatgggatgaattacagctctcttaaacaacagttttctgtggaaaggcagcagaaggcaatgatgaaagatgtacttcctgctcttcatctctatttctgaaatcttattttgtttcctgagtttctgtaagagttacttctgcttaaaacttctgcctttacccaaactttatggtgtcttctggaatagtttatttttccagtatactttaaagaaaaaaaaaccttcggttctcagcctgctcatgacatccagctcctgttgctttggctcagagttccattctacctcatgataaacaccttcgtatctcattatatcttaaattctctaagctctaggagcagacttacagagggagcatactgtactatttaaatgagccatgacaggcctgggagtggaacttactgctgggaagtagaccaggtggtattaaaggggcttgttccatgtggcaattgctccacccgttaatactgaagtagaaaattggaggagtaaaccacgttcagttgctaatttcctgtggagataagacagacacactgtgcttgtgtatttccatctctccatgtaaaactgtattggaaaacatttctttttatttctaggtctgatttttttgttgtagttttattttattggca

SEQ ID NO: 68240 - DNA, 1015 bp, Homo sapiens
tctccaagttaactgccagaaatttactgtgtaattctcagctctttgtaattttgaagaagaggttatggaaaagcatttcctctgtgggagtaattatgtgtcagaaaatgccattcctcaataaagggggaaggttcacaaagcacagaactttgtcctatttattccatgttcctgacttctgaactgatgcttgctttctgctattttatgttctatagtgatactttcttcatttttcatcccttcatctcaagtcagcgtcagttttattgctttaaaagtcaacagtgatactatccagttctgctaagagtgaaactttaagaataaaatttgattttaattcatcccttattatatgtgagtatattttttatattcgctttaaggatagtatttacctctgtttgttagctttctgctttccttcgtataccaaatagaaaaattctcattcactcacccccaaagcatgtgcctgttatcacatgattcagtttgagtttctatattacacaatttctgtttcttacattgctttttcctatttatgtactaagctctctgtatatgcaggatactgttaggtatgatatgagatatttattattttctttcaagtaaataaacaaccattatccatgcatagctggtcagtcccataaattttagtactaaaatatcacttggattattttattagcaagactttattgtaatgatgtatttcagattttgtctttccatttaggctcatatatgttacattttggtatcattattgaaacaaattcatgaattgagttcatcattagaaaatgaaagcctcagaattttggtaattgttttggaccatcacaaaaatgtgcttggcatatttaaattctgtatttttttcccttacctgtaataacttttcaaagtacctaaagctatgatagaaatggaatagcatatagaatacttgtgtgtgtgtttgtatgcaggggggcggcttcttatttttacc

SEQ ID NO: 68241 - DNA, 1766 bp, Homo sapiens
cgccatcgcactccagcctgggcgacaaagagcgaaactctgtctcaaaaaaaaaaaaaacaaaaaaaagataaagcaaaaaatgcagggatagagaaaccatggcaaaaggtgctaagtgctgaatttaagtgtagaacctagactcaatctgagaggacatcatcccatgtctgcctggtattgtacagaccctcctagtcttttagctagctcttaaaggataaatcagagaagagagcgttgcgcgtattcttagttgataaaatagcagatgaaaagtcacagaggtatgaaatattaatattaatgtgtatttgaggaactataagaaatttagtattgctagagcaaagaatgtttgaggagaattttgaggaaaaggctagaagggctttctatgccatgccactaatttaaattgctattctatagcaaggaagtgatgtgatccaatccatatttcaggaagatcgtgctgaccctgtaatccattacatgaatgcagacagtaacactctcaaaatttattaaacacacttaatgaaataaataccagtatctatgttatctgccttttttgcctgtcactcatgcggtcctcacaactccttccagcccctaaactaatcagtccgggcattagagagctttgaaatgtttattaagaaaacagtcctgttttgacagacaggagttagagcacctggacttaaagcaggctttacagctctactggggatctctcatgtaggcaacatgaggccagcagagccctgtgcaaacaggcatcataagcaaatgaccatttcttttccattatagacttcatccttcaaaagggagtgccattcgtcccaactagtattttccccccttttatctgtgtcactaatgctaaattagttcatgggtcattcaaattctagcagctttggtgttagtctttatatttcagttccagtgctccgctgattattttggcatgaaactatcccatacagtcatcatgctgcttttaattcaaaagattcctatgagctgcaccaggaatatcgtatctagtacaaaaactgtatgtctgttcttccctgaagcagattctcttgtaacttgagtttagttatcttagtattgatattgagttatttttagagagttctgtggtggttagtggctcggtgttttcatcagtcgttcacttaactatcctttcggaacatctgtgccacttacgctgtctcacttctcacccaagtcttagatgctttttcattcttcatattactaggaaagattaaacacatcatataatgccagtgactgcaggactttcctttaaagcttctaaactacctgccagtatgctgaaataaggtatattctgaagcttatcgtttaaattgtagatttcatatgtaaaaacattttttttttttaagacagtcttgctctgtcacccaggctggagtgcagtggcgcgatctccgctcactgtaagctccgcctttcaggttcacaccattctcctgcctcagtgtcccgtgtagctgggactacaggcacccaccactgcacccggctaattttttgtatttttagtagagacggggtttcaccgtgttagccaggatggtctcgatctcctgacctcgtgatccccccacttcggcctcccaaagtgctgggattacaggcgtgagccaccgcgcccagcctgtaaaaacattttcatctttgtttataaataaaacatctgattatac

SEQ ID NO: 68242 - DNA, 1005 bp, Homo sapiens
cagtgggtaagtgaagtcagggaaaaacagaaaacaatggagataagaggatgggatgcgttcagtttattctgttgttctcaccacagtaattgactcagaagggactcattctgaatttagtatctagtgttaaaagaacaggcctggggcaggcggaggccagcactgagacacagtggtgggttgagacctattgtattttttaagttgttccaaggctgtccaggtgtcctgatttaaagcctgcttcttaagtcaggaaattgtatcttgttctgaggtttactgtaataaagtacacagtcctaggggatggtacttctggctccatgaatcactttacaggctggctgtactgacccaagcctcatgatttatttatgccataccacagtaggaatggcaaatatgtaagccacacatggtctatgggatgggcctttaactgggaaactgccataaatccgtgaagtcaggtaggacagagccagcaggagctcatgtcgtgtacaagatttcttcctgttttatagggacttacagttctagagctaattaagttcatcctccttagagtgtatctgtcttagtctgttgtgtgttgttataaaagaatatctgcgcctggataatttataatgtaacaaggtttatttagctcatggttctgtgggctaagaagttcaagggcatggccctggcttctggcaagggctttcatgctgcgtcacaaaacagcagagaaggtcaaaggggaaggggacacatgcaaacaggagaacctgagggtccatcctggctttatcacaacccactctcctgggaactaatctgttccctgcaatacctaatgcagtcttgtcagagtgggaactcactcactaccacaagatcagcaccaagccattcctgaaggattcatgcccctgtgacctgaacacctcccatcaggccccacctcccaacaccatcatactgggaatcaaatttcaacatgagttt

SEQ ID NO: 68243 - DNA, 1107 bp, Homo sapiens
aacagtcctttatcaaatgtatcttttgcaagtattttctcccattctgtgtcttattttctcattctcttaatatttgaatatttaaacacatattatttataaattaatggtacattatttataataatggttaaacggttggtaagtaaatcactgctgagtatatactgctttgaagggcccaaggatccattaggcctccagctttaacccagcacagcattctgaaatacccaattctccccagagtttcaagagtcaccaggccttaaccttcttattgcctcaaggactcttagagctcaccaggctcctcctaccacaagccttcatcatatcaccctgttcctgttgcttagggagctttctcaggatagcatttcaagattgagtacccatcctagttttctcagtgttccttgtgagccgtgtcacatagaaggcatttaataaatgtgtgctgaactgagctgaaccagcaagggcaaaagggatttaagagactgccgttttaattgaaaaggagtaaaaagacactgggaaaggcagcatgtattgggggaatatgagaaatttccaaatcactggaccatcaggctggaaaatttaggttggagccaaactgcaaatggtttgaatgtcatcatgtatagtttatgtatttatatatacttacctttctcatagaagggtgaatttttatattataatagctagaatgttcttagaatttatcttcttaattcagaaaacatcacattgagatctgtcagtaaaccccccacacacacaaataatttcttgtcctcattgaccttcggtctgagctcttaatgcagttttctctactacacttgtccatgcacatagtggtcgcagacatttgagagaatgaaaatcatgtgtttaatgagagattgttatcggagactgtagcacttgttttactttattctttctattgctttttctctttttgtttctttcaaagtacatacaaatacatattcattatatcctatgtaagggaatgtgtatttactctagaataggactactttaagtttgagatggctttttgcttttaaaaatatagatgagtgt

SEQ ID NO: 68244 - DNA, 1060 bp, Homo sapiens
atcaaagatagacattactcagaattcatatgattatatgtgcaatatataatcaaaacattttattctcttgactatgaattgcccttcttaggcacctatacatgtagaaatcagtgtcaggagtatacgttgtaaatggaaagcagaaagacatgatgatctgttaggggatttttagaggatgagagccatggtcataggagagaaagtttgattctgtatagtccatagcatattatcattgcttagtaaaaaaaatagcatcaatgaaataaaatctctatttgaattgcataaaaaatacttcaaattatatatcttgttaaaaagacactattccaatggctcagactccaatgccacattcctcaaaactttgaaattagaaatctaagttgtcatctgttatttcatattgtgatttgcaaagttgacattttaccccagaggtgaactgtaccacactagctgtccaagcataccatttatgaaagagtttggaattcagtcaagaagcttcaacaatatggaattatttttactatgtcatattacaatattttccttaagcacaaaataggcctcaagtctgatcgcctttgtattttgcattcagcaaaggtgctggtatttcaatctaattaggtagagtaacttatctgtcattcacctgctgctgcttgcctgctactaaatatgtgattctgactattggtgcacagaaatgtagcacccttattgggaaagcatgctgcctcttccagcttggtcagtctttgagcttcccgaaagggaacagatgaccgcagtcaacaggaaactgcatagttagaccttcttgaactctttcacctttaagctcatttcaccacttaacatatttttttcaagtggtcagtggatatatttagactgtcattatccctttagtgttgactggatcctcgtggtataagttgcctgccatttcttagaattacgtagtgtggggacagtgcgatgagaatcttctctcctcttccagcagcaaaactagtgaaacaaatctttatttcca

SEQ ID NO: 68245 - DNA, 1042 bp, Homo sapiens
ctccatccgtaaagaaccagaaacaaaaaagaaacggtgcgatttgtttcccttttcactgttccaggctgagcatcacctttcggtacacgcggtctttctcccgtcatcccagcactacttccttgagatgagatgacatcaggtgatcccgttggtcttgagaatgatcccatattcttcagtcaagcattttcatacagtagttttctactgtgttatgtgtattttacttgcttaatcctccaaagaccgctttatttccctaatcactaagttcttgatgggaagagtatttcaccgttgccccaagtactttcagtaggtgtggtatgaaaaaatacctgaatcaagtgaataatattttgagtaactgtcttttattaacttccgtccactctctagtgaacagttttcagtctctcttgtggcactgcctatgatacctttgctcttgttgtttcatcggtaaagctgagtactttgacattcactgattaggttgggaaaaccagcctatgctttgaattggccgtttctgcaatctagcagacattctagcacacattcactcatctgtgaacctgcatttgtacatgctttcacacttccccatccctattagaatgccagttaccatgataacacgattcaatgctctgtccacatatcccactcagaaacaatttgtcctataatatggacttgctatctttcaattcatttatttagggttattttactcctttgttgttagcgaaaagaaaatgtatataggttaatgcctttcttattttgactttaaccttttttctcacatgatgtagagctggccattggcccacctttaaatggctgtatatcatctatcttttcctcctcgtggaaaaggctactgtctattatagaagcatggtgtactaattatgaagttgcggttgaaaagacactttatcatcactctagccacttggaactttccaaataaatcattatttggactaaaatttcccagtcttgtttatagtacaaaggtgaatac

SEQ ID NO: 68246 - DNA, 1033 bp, Homo sapiens
aaagacagttcatgaagtgcttgatttggggatattgcctcttccccaaaaatttctgtatcaatttaattgccagtcttagcccaagctgccataataaaatgccattaactggatagcttaatcaaacagaaatttattttctcacagtttggagaaatcaaggtagtgtttgattcagttcctagtgaaggttcttcctggcttgcagaggctgcctaattactggatcctcatatgacagagatataaagagaaatccctctatttttctcttcttcttcttacgaagcccagtcctatcagattaaggccccacccttatgacttcatttaaccttaattacctcctgaagaccctgtctctgggtatggtaacgttggggtttaggggttctacatatgaatttgggggaggcacaattcagcccgtagtattggctaaactctttccagtatcctcagaaatcccatatttagtttattttattgcagacaggattagttttatcctttcttatggaactcttaaaatactcgttactttacagtgtgtcatagaaactttacttaaatttaaccttatgaataatttcttcctagacgcaaaatcgaatgaagctaatggccgacaactacgaggatgaccacttcaaatcctcccattccaatcaaacaaatcacaagccctccccagaccaggtaagatggctctggaatgttttattaaaaaacccacacacttaaattttgaaatgtttttgtactagcatgttgcaaattctgagatataagttagaagaataaaaataaatagctaattcagttctgaaaactctactcttttcaaaaaaatcacagattcagtttctttataggaagaactggatattttaagagcagatacttgaaagatttgaacaataaagaatgcttgaattgggttgagaaaaaaattaacctcagagatacacactaataatatgtaatttttaactgtctttactaatttttaactgtcttggttttcttt

SEQ ID NO: 68247 - DNA, 1049 bp, Homo sapiens
gtcattggcgcacagagtgtgcttgcatttaaagtaattttacctttgaagactgcacctggaatcctttgtaaattttccacaatgagtatactttttgttgttgttgttgttttgagacagagtctcactctgtcgccctggctggagtgcagtggtgtgatctctgctcactgcagcctccgcttcccgggttcaagcgattctccggcctcagcctcccacatagctgggattacaggcgcacgccaccatgcccgactaatttttgtatttttagtagagacagggtttcaccatgttggccaggctgctctcaaaatcctgacctcacgtcatctgcccaccttggcctcccaaagtgctgagtttacaggcatgatccaccatgcccgaccacaagtatacatgtatgcccagaaataaaatacaatatttttgaaaagttggtattgtttgcaaaaaactatccagctcccccactctaaattctctacttgattgaaacactgtcttccttctgtgactggctgtgttgacatgcctgtcataggtaggaaattccagcccagaactggtaccgtaaacctgctgattaggagtctcttacagagcccagcagccttccacagcagaactttggtgtttatcgtttatccttagagagagagagagaattttaaaaacaaaagtaatgctaaattgattaattttctctggtttgtctagccaggctccagcttctgtgtaatatactgtataggcctaaactgaactctgatctttttagcaagctgaagattgttttagccactaagcccttgctctttattctcttttaattatttcctggaaatagtattagaaacaaaggaaatgtgctatatgtattatgcagccatgaaaaacatagtttcggtcatatataatgtagtgaacagtactgacaatataatgttaaatagataatgtatcaagcaaaatgtgaggtgtgatactgttagaagctgatttatataaatttattaaaagacttggcaggaaaattt

SEQ ID NO: 68248 - DNA, 2100 bp, Homo sapiens
gggactacaggcacccgcccagttaattttttgtatttttagtggaaacggggtttcaccatgttagccaggatggtctcgatctcctgatctcatgatctgccctcctcagcctcccaaagtgctggtattacaggcgtgagccaccacacccggccaaataattacttcttgatggaagtgtatgcaaaagtcttatttcctttatatttttcttttttcccccaattttttggagtaaaatatatattgttttcataataaaaacataaaactttatttcttaaaaaaactcttgttgaaaaagaaataaaggaacgtggcaggagcagtcctctgagggggtccaaggaggaatcagtgttactgtggaaagtaataccaggccttgcttctgttgacttgaagattattgagctcccaattcattagttaggccagaggtgtcctgttcatgaaaattgccaggccggtgacatgcaacaggtgcagacctgctgtgtgagccctgggaacacactgagatctgccagcgttttggcggtgcttcgcagtgctcacagctgctgtgtgtcaagcaggggctgctctaatgcttcagtgttctgtgatggtgaggtctggccccactctcttcctcagcactccaggctttgaccagctaccaaatacctggccagactattgtcacgagagctgccaaatgaaatcctggggcaggagtcatcagtcatttagtgtgcttccagaaggaatcaaaggagtagctgttcaagcaggggaaaggaatgagaaaagaaaaaacgtagagcaagtctgttacttaagaaaaacacagaaccaatgttacaactaagaatttcagagtccttggctgtgagtcaggtgtttggtgttatatagggatttatcagtcactggttcagaagaatatcggataacctctgtgaaataaatgagaagagcataagccaggatgagacagaattcgtaatgagttccctcatcacatctcttggccaagaaaaacatgcactttctccagaggcagaatttttcttccattctaggaggtggaggaacacttggagtatatgtagtccaggctttcagatgagcagtttcactagcagttttttgtaatctactcataaataagtgaaaagagaaactgtgaggtaactggagtctttctgtatcaggaatagcatctctgtaaaaacaagttagtcctgtgcttaattcctgcctcgatacagagctgtccgtctggtgtgaatatatgaagccagcgttctcttcctgtctcccagaagggcggctgcgtgtgacagcgtaaatgtgtgacagtatgtgaaaatgtttctgtaatcctgaagatttcagtagtgattagaagagctttagtctttggtcaattttctttgacttggaaagcataaagaatatttgaacctctcatttcagactgaccttgactttcctcattttattttattttattttatttttttgccttagatcatccagcccctcttagaacttgaccaaaatagaagtaaattaaagttgtacattggacacctgacaaccctctgccatgaccgagaccccctgatcctccgtggactcactccaccagcttcctataacttggacgatgaccaggcggcttgggagaatgagctgcagaagatgacccgggggcaggtgagcctctcactcaaactttgaaaagagcctgtgaaaatccagttgctgtgtaggttgatgcagtgggggctaccttggggaatccagttgccgtgtagttgatgcagtgggggctaccttggggaatcccgttgctgtgtaggttcatgcagtgggagctaccttggggaattccatgtttagattcaagatttggggggtggggaggggtttccagatataatttttaaactgatttttaattgattttttactgttttatttttttaattcaccaattaaaaatgtatgtttctcatgtacaacatgtaattttgaaatatgtatacattgtggaatggctaaatagagctaacatatacattccctcacatactttccattttt

SEQ ID NO: 68249 - DNA, 1804 bp, Homo sapiens
ggagatcttagtgtattttagctgccctaattgcttttttcctttgtgttgaacgtattcccatgggagaagaaagttcaccctcctgagtccctgagctcctgcaggaagaattatttaccatcctggaattttaatgagtcttgacaattactgtaatccaggtcattgaacgcgggtctgtcatcgccagtgtcatcttccagagatgatgctcccccaactaagctgagaagaaaatgagtccttgtgaatgccaaagagacatgaatgtgacctgcaccaatgctgcaaacctaaagccagtgggactagaaactgtggaaatgacagtcttccggtccggtcagagcatctgaaataaattgcccacagttttcttccaaacttttaaattgtttacaaaaggtttggtggtaccaatcttactgagacggcctagaaatacaagtaacgtaaatttcttacagagtgtctacaatgctgcatgccagaggcactcagcacacctgaaggatgtgaagctcctgtaggaacagtagctctgtacaacagtaatctctagacaaccaacgtaaatttaaacaaaaaggtgtgagaccacacacccttcttccagtggggcataactgcccaggtgtaaaatcagacaggaaccctgaaatatgaaccatctccagtttgcagacagacattgctgccattctccacttgactcccctgtgcccatgcctgaaagccccgcttcccctagagaggtgggggcagtgtggccacagcctctctccccgcagtaccacctggtcccaaaagtcccagccctccacggcagcactagtgaggcctccttgctgttgctgctgttactccctgagccttctagagaatctcctgcatgccctgtgagaatgtgctgatgctggggccactgccacagtcgcgggttttctcccagacccccttctggtgccaagtaggaaagatgggaccaggctaattctgttgccactgagacaagtgaagacatatcctgatgtctggagttggatctcagaaggcgccttccagtgtataaactgatatgaaatggtggttaggtcctgtggcactgcacaccaacactgtattaccttgctcgggacaccgtaacaaaataccacagaccgcgtggcttaagcaacgtaaattgatttcctcacagttctggaggctggaagtccgagatcaaggggtcggcagggttggtttctcctgaggccccctctccttggtgtatacatggctgcctgctcgctgtgtcctcacgtggtctatcctctctccctgtgctccccagtgtctttctgtatgtccagatttcctcctgttacaaagataccagtcatactggatttggaaccaccctgcctgcctcattttaacttaatcgcctctttaaaggccctgtctccaaatgcagtcacatcattctgaggttctggtgatttaggcttccacctatgaatttggtggggacacagctcagcccaccacagacattatgggtaaaataggctcatggcaacaacttccgaacctaactactgcttgggtaattgttaagggtttcaaaataactgactgtcaaacaagctctggaaactgcattccaaataaactgtggggctctgcctgttaaaaggtaggaggtcctggcgaatctgttatgtccagtaattactgaatactcccttaggggccattcagggtctgctggttacttcaataaagaatgctgtaagaaaagcactgagtctctggccct

SEQ ID NO: 68250 - DNA, 1055 bp, Homo sapiens
gagccctgctgctgctctgatgggtccctttggtaaggagggaaatttttctccatttttataacgacgagcccttaatttgaacgtctctgttcacttcagttaatagatttgtaagaaataatgtgagatattaccaaatcagcttagacaaccagattaaaaatctgcctcactgggaaatctgcttctttgtttagaatactccacactttctcaagcctgcatctgcaaatctttggcctgataaagacttccagagtccatccgtccatctcttgcttcaggactgtacttcgtccaagcattccacacagaagggtaactggcttgttctttgagtgggataccacgtcacagttcctttggtgttccagggacatttctatacaagagatggtcccctgttttcttagtgtatagaggctcatcagaccaatgtaaatctcctgttgagttttatttttttaattcccatttttgtcttttatagtcatgttttctgttctcttgccaaactcccgtgctattcagctcccttcccagcttgttcagaaaaggtataacacccacatcaagataaaacctgctgagcatggtggcacacacccgtagtcccagctgctcaggaggctgaggcaggaggatcgtttaaggccaagagttcaagacccacctgagcaacacagcgagaccctttctctaaaaaattagagaggtataacttttcaggaaagaggataatctggaaagttgctgtaggcacagactatcacgtagaaaaaactgaaattatctcagctagggaagaatgctttaggcaggaagacagccagaattttagaagtgtctagacataagtaagttagaaattaagatatgagtatgttggtgacatctgcgaatacaaaatataatcatcagaaagcaaacatttgttctggattttgtccagataacggtttaaaactgaagtgttgtatctattgtagtgcgtggttccagctcctgctgtacatgaggaggttaatttggagtgacaggtgttagcaaca

SEQ ID NO: 68251 - DNA, 1126 bp, Homo sapiens
atgggagagcagtaacatcttatttacttttggtctaagcaacagcctttccttcctgtaaaaacaaattcatacattgcctggcaagggagttcatcacaaagtaggaaggggagctgggtgtgatggtgcgcacccgtagtcccggctactcagcggtctaaggcaggaagatcacttgagcccaggagttccaggctgcagtgagctgtgatctcgccaccgcactccagcctgggggacagagtgagactctatctcaaaaaaaaaaaaaaaaaaaaggacagggagggagaaggagaagtccccacagcagcctcacagccattaccacttccggcccacttgcacagtctctgcaagtgcagacttgaaaggaaagaggactttggagttaactttaatgagtgggaaataaacataggataaattcttcaagagcaattttagttttccctggtactaagtgctaaagggattctgtagagtcaagaagtgaccagatgcctgtagaaaaatagatccctgggcaaaaaagattgaggtttagagggattgtagagggttagagggattccagatccctctgactgtgtaagttttatgtcttattcaatagatgctcttacggcaaaatacatttccatttattccagttgtgtgaaattccaaactaggaagttattttatgtcttcgtatctcctaagaagcctgcagattcaagttaggggcttgtgggccagacctggccaggacgagcaccatttccacttgatctgtcagctccaaaaggctccgaacatcatgccagattacagctcagacctcatggcctgtgacacatcctgggacttagctgttagaacctcaagtttagattcttgtctgcttaaaccaaactaggcatttctgaataatttcctgccctccaccaaaccatctgcagaaaggaattaatctgagtcactgccaaccacagaggaattcattcactgacccctcttgtaaccgtcccttctttatacccatcaatacatcctccctttcacctcatgctttgtgactatgaatagagttgtttaccttgaaatcaggccaagtccacagaacttttaactgtatttt

SEQ ID NO: 68252 - DNA, 1044 bp, Homo sapiens
cctcatctctgaaatgttcccgctctgctgagcttcctccgttcgtttcttccctgcacagtggtagggtgaggcattctccccttccctctgctgcatacgcttccagcctgtgttgctttgagcattcagattgagttgctcttgcatttgtgattcttggctcaagtccctctagaaatcatattactactctgagttcagggagggctggaacagctactaagaacagaatgcattttaataacattcaacacacaaaaaagccagagaatttctgccagaggccaccttcgtatcctatacttgtcccgtattccatcccttaagaactttaaacacagtggagtgctacactgtatggtttatgtgccctgctgtctaccaaagggcctgtatcatcagattgttttggtttggacatgcttcaaatttgaacttaaatagctctttagaacattatcgaggcctttccccagaattaatatctattcctttatttcattcaccattttcagattgtctgctacgtgcaggccttttgttacgaggcaatattggtatacaaaaaagaattcaccaaggagcttgaagaacagttggggaattaaacataaaaccaactattgaaaggggacaaaatgaatactgtagcagtttacacttctaaccagggatggcattacagagaaaaggggctcaaccgtgaaggataagaaagatagagaagaaagatgtgtaggaagtaagattgtccacattctagaatgagaggaaaggaaaagcaaagacagggaatggcaggtatgtaccaggagatgaaattgaagcagtagctcccatgccaaaaagcttagtcttttattttgtaggaaggaaatcatttaagatgttggaagaggaggagggaactgttccagcctattttagaaagattactcttacaccagggttgaagtagttatgaagctattgcaagatggtagaacatgagagcttgaattaggattgttaacaaggatatcggaaatgaaaaaactaggc

SEQ ID NO: 68253 - DNA, 1058 bp, Homo sapiens
taaacactttgttcattttttcttttttattcacaaactaaatccaccaggaaattataaagttatttaaaaaccgtgctgtgtccttctttgagtgtcacccagctgatcatccaggcaaggtgtgtccccaaatgctagaaaagatggacaaggtctgcagtgcccaagaggccaactccaatggcaggcagcccgagggccaggggtcccaggatttacggtgggtgtgggagtcatcacagccctgacgggcatgagcctcctttcccttcccgcctgatctccgggtttgcagcttttaaagtcaattcccggttccctttttccttctttctaccctcagccccgggccaggttatccgtatcaggtctcactgttccagagcttagagtaggtgcccagcgctgagggatggtgctgctgttgtaccaaggtagaagagccagaagggcggccaccaagggagggctttgcccaggactgggactcaagcttcagcagggcgcgttctgatgcactgactctggggcgtgcaggctgggtcaacagaaagtgtgtgtgccaagagtaaaaggagccgagaaaccctgtgcttggacgcggctgtcatttccagctttgggatttgtcttgggctttatgctcaataagaaattattctggaggatttcttttatgagaattacttttctgcttagccacacttctgtgtctgcccgagagaggaatcaagccagcttgctgcattccttccctctcccgtgtaaattctgccacacgctgggtgttggctcttgggaattgtagcaagagagtccaaactcgttcttcccggtcggccctcccagtgcccaggtcccaccctggcctcgctctctgcagccacagcagctgttgggaagctctgccaggggagacgtgcccgggagacagggcgctgtggacacggctgcagggctgaggttgcttgtactttcatcatatgaagcaggaacaattttactagccgagcatgtattattctgcacaatataaaatcacaaccacaagcaaa

SEQ ID NO: 68254 - DNA, 1158 bp, Homo sapiens
tcttcaaggtcaagaaaggcagaggactaggctggtctgttctaatttttaattctaggatggttctgctgctttctggattgccgcagcctggcttctctagcatggagggaagtttttacgtgtggtgatagtccttgtcttctctgaaatagaaaccagtcagtccaaaaaagctctcgtgtcagcgagagctttttctctctggctccttttcaaaccgcctgccatttatctccttcatcttctaaccaggtcttcagagcccatctttgctccagcgctagtcctggatgcagtcctcagagtgtgtggtcgtggtggtagttactggttgttgggtaactccatcaggtctctgaagacacacaacagcagtagatgtaaaagccctctgggcaatgagagcatgtgggagctccacttacgggcagccttggctggtttctgttgagcgtcttcaccgttatctacgagtccagaaacatccagcagagggattgtgcatcgatattgccatcaagatgaaaagacatgctcattttaaatctgagccaccctttaaagtaaaactaaccttctgtccatctctggggcgcagcctgtgtgctcccccaagcagcatgctggaggaaccctgaaaacggatccgctgtttggtacagttctggctggactgttcccttcagcgagaaatgccccaactctggagagcaggtgactgcacagcccctaccaggccctctccacccctggcccggctctgtttacctggctaaatttaaacctccgccccctccatcccagtttgagccactggcttgcggtctcgccactgggctggctgctgcggcagcatttcctgacttcttcgcccctgtggttgcagtgtggtctctttgtgctgcatgagtcctcttctaggctttctaaagttggtctctctccccgctgcttctccacccatgtggctttcttcccatctctttcctcctgggtgagttggaacctggttcggtactgggggaagatgctctcccctaacccttccagatactgtgcacggagatcacaggaagcctagactcaagctgtcatttaaggtcctcagggggctgtgctgactgtaatcattacccagcctggctgccgggctgt

SEQ ID NO: 68255 - DNA, 1055 bp, Homo sapiens
ggcaggagtgatgtcctccttgtctgggctcctctctcctcactgataatcccaccactcggcgttgctgctgctcagccatattgacacgttaatgagctagtgacttctaaacaggttatcctccccggttcaagaaatccagccataattaccatgtttcatcgatattaagatgcatttcaacatatctgaggtcagaatgcatctcagaatcaatattgtatgacagtttgatgacaagtacttttctttcttggtggtacaaaataatggtgcattctagaatcagtagcatcttaggtttggtgaaataaggtaattgatcactgtttactaaggggacctgttgtcatttcctggtgcctaacttggtgttcacttggaaatgcacttttgtattttgccaaacagaatatttgtttcctgtcaccttcaagttgaacatctattaaccatgttaaaattgagagaggaaattctaggcaaaaactggacgtcccatggaccctggaccctgatgcttgagcctgctgggctgctcgtggccacctgggaatcagcagtccaggatttctgcccttgcattgctgagaatcttgagcaaatgtgctcatcactgccagtctccctcttctcattggtacatggagtcacagtgtaaccccttcctatctcatagaaccgctagggtcaagcgacatggcgtgtagggaagtgctttatacccaacggtaagaacaacgaagtgctgttcctacctgatacgcagaagggaactgtgacccaaagacttgtttaaattcactgacaaagcacagctccaggtgactcagtgttgattcatacctggcacttgtcttcttatttgtctatttctaggagagagactttgaaattatagaaacttgtctggtgagatgaaatagtatcccaaaggatcaaaaagaagttacatcctagaagtagaatgcaagcttttttttttcttttttcattttatgctttcctgtttcactgccttggcactggaaaatatggggtaaaatgttgtt

SEQ ID NO: 68256 - DNA, 1052 bp, Homo sapiens
ggtgcccaaagaatttctgtgaagctgtctcatgctttccaaactttcttaacttaactagatccttttcttcttccaatcagaatctttcaaccagtctgccttcctctcaggccttttctttctcctgctttctgtgttcttctcccattcgtggccctccggccccctgtggacccttcgtcatcatcacatcccttcgtaaagtcatgcccatttccagttttgaggacttctcggaataaatgttagtatatctaaaactcaattatgttttggttactcacgttccagcccagtgacttatactcaagccataaagcagtggattttaatggctgaaaggtcagctggaaatcatctaatcctgcgcttcccaacatctgttcttcctgagaggttaataggcacttggaggaaaaaaaggttgtgtgatcaagtaagtttgagaaatgctggtttccaccaaattaaacacatttttttaaaaccacagaggtttaatgtgttcatatgccgtgtgactccctcaggagcaggagggagtgtatcccatgcttatttgtggaacccttcgtcagagggcaccatcgatctgtcctctgccacgtttagtggacgagcacactcgcacaccctgagcgtctgatgtcagtcactgaggttgctcatcttagataggctctggggactgttttgtagctccagcaggagccattgtgacagtgccagttgctgtgatgtttgtgaatctttaaccatgcgtttagcaaaagttttggctctgctgtgaactggtgccaagggaaaactgctctgaactttcccaaatgaaaaataagaattagacaggcaatctggtgagaccatagccagtgacacgccttttactaaggaacaccgagcagcgcactgtggccccaggaggaagctggactctcactcctgagccgggagttccaagcccttccgattcaattccatttcccacatctctcctggatgagcccggcatcacggccggtcagagccgcctgctgttttcctgagca

SEQ ID NO: 68257 - DNA, 1085 bp, Homo sapiens
ttctccatttccctccctccctccctcccttccttcctgtcttcctgccttcctgtctttttttttttttttttttgagacaaggtcttgatcttttttttttttttttttttttgagacaaggtcttgatctgttgcctaggcaggagtgcagtggtacaatcacaacccactgcagccttgacttcccaggttcaagtgatcctcccacctagcctcctgagtagctgagactacaggcgcacaccaccatggctggctatttttttttttttttgtattttttttgtagaaacagggtttcaccatgttgcccaggctggtctcaaactcctgggctcaagcgatctgcccacctcggcctcccaaagtcctgggattacaggcgtgagccactctgcgtggcccaggctccatttctaaagtccagctcccttctgcttgatgagaagatttagttactcgtcataccttggtttccagtaaggtgaccctcatagaagtgaacggtagctgtttgaacaccgtatgaacaagcttatgccatagggcagtacttcaaagggaataggggtgactcttggtggtatgaaaagttgatccccgccatacctacaggaatgggagaaatgcattgaagaatagaagagctaaaggacatgaattgatagtacactttgcgtggtggtacaaaagttaaaaggcactccagggcagttcttagaataacagaaaaaaacttggttcaggtatttgctgaaacttgagaactgaaaaaacataatgtaaacttcgtgtaaaccttatcatctagaagtaataaacctcaacagaaactgggtagtagtcaaggaacagcttcatttcccttctttttctaagtgtcattgtgtgtagcccttcaatgttcttactggaaagattatctataaatcacctgtggggctcagccaatttctgcagctcccaagctaggcccctaacttgtccaacttaacatttactaaaactaaaagccagtaccagtatatcctaaaaataaactcgaaccgatcatgttctttcatgagtcagatgaacaacaa

SEQ ID NO: 68258 - DNA, 1889 bp, Homo sapiens
gctgcacccgaatcaccaagcgcggcctggagcgcatcacgcagctgccgtgcctcaaggtactcaacctgggactctggcagatgacggacagtgagaaggtcaggtgagggcggcagcaccagctccccttgtcccgccctgttcatcctcccattaccaccgcccccacacactcacacgcacacttacgcacagatcattgcagcggatgagatggggctatgacagaagcctcaggctcgtttcctcctccctcctccagccccctcccggcttccagcccattctctttgcagctggggttcctaccctaccctactcccagctccttttccccgcggatggagagatggactctgctgcttacccacccactcccctgcagggggtggaggactgattcagctactgtatccccactgctgtgactggaaatgggggtggggagtgactggtcttttcaaccctggggagttgaggaaaatgtctgctttcacttcagctttcatttgaatactgtgatctggtttttattttgaaatgtataaaaagcaaacccagctacaaaggccttttcacccttccactttgtaactaatcccagtctcttctcatcactcctcctcttacagtactctgctattcatgctcatttcatgttcttaatcttctttcctgtttaaaaatttttttttggaaaaaatttgaaatcatggtccttttttctgctgaatatattctatatattatatatatataaattatatatatatatatatacatatatatgtctggctacctcgttttagtttactttttttctgaagccctggaattctacaagagagatattttgagactgaaacatgtttgtgcctagactggaaagatgcccttgggtttgtccgtctttttgtgttggcttcttcccagcctccatccgtccagtgtgccccacttccacattctggctataatttcctttttctccttgttcattgggatttgaggacctatttctaaatcttaatttatagcacaaatatgtgggagcaatgagagttgaaccgttgtttttgttggagatgcagattgtgtcttgaaaatgatgattatatatgcaaattctgccctaccctcaccctcttccaagtttccccccaaaaaggtcacacagtgcggcttcctgtgggaaacaggagcagagctggcctgcagagcccctggggctgtgatgaagctcatatcttatctctgttctattaacaaaatgggagtttgtgggttttaaaaaattccgtttctaaatggaggaatagatgactttctttcttttggtgggggttgggacttgtggctttaaagaaatcacttctgagtaggatgtatattttcgttggatttttgttgttatttctttagaaccctccacagcaacatgcaagaccatggagttaaagaaacccagagacctttatcaattaattgtactgtttgtgaatttgtataaataataacaaagatcctcttaaaacgtttatattcttacagtaaaaggttaaactgatatttatataataaaagaggaaatatgaagtatgtttttgaaaaaaaaaaaaaaaacaacagccttgtatctgcgaattatttttaaggcattgtgtgcttgggtacatgccaaggtaggaggtgttgtttgtatactctaagaggacgcaaggtggagtttggtgcatcctatgtgggggtgagtcaactcatgggtagaattttattctgtataaggtttactactgacatgttttgtttctagaaatgtgattagactggagatttatataatgtttggctttaaactttcaacaacgtggaaatttaaagaaatt

SEQ ID NO: 68259 - DNA, 1023 bp, Homo sapiens
tcgcagatacaaggctgttgttttttttttttttttcaaaaacatacttcatatttcctcttttattatataaatatcagtttaaccttttactgtaagaatataaacgttttaagaggatctttgttattatttatacaaattcacaaacagtacaattaattgataaaggtctctgggtttctttaactccatggtcttgcatgttgctgtggagggttctaaagaaataacaacaaaaatccaacgaaaatatacatcctactcagaagtgatttctttaaagccacaagtcccaacccccaccaaaagaaagaaagtcatctattcctccatttagaaacggaattttttaaaacccacaaactcccattttgttaatagaacagagataagatatgagcttcatcacagccccaggggctctgcaggccagctctgctcctgtttcccacaggaagccgcactgtgtgacctttttggggggaaacttggaagagggtgagggtagggcagaatttgcatatataatcatcattttcaagacacaatctgcatctccaacaaaaacaacggttcaactctcattgctcccacatatttgtgctataaattaagatttagaaataggtcctcaaatcccaatgaacaaggagaaaaaggaaattatagccagaatgtggaagtggggcacactggacggatggaggctgggaagaagccaacacaaaaagacggacaaacccaagggcatctttccagtctaggcacaaacatgtttcagtctcaaaatatctctcttgtagaattccagggcttcagaaaaaaagtaaactaaaacgaggtagccagacatatatatgtatatatatatatatataatttatatatatataatatatagaatatattcagcagaaaaaaggaccatgatttcaaattttttccaaaaaaaaatttttaaacaggaaagaagattaagaacatgaaatgagcatgaatagcagagtactgtaagaggag

SEQ ID NO: 68260 - DNA, 2007 bp, Homo sapiens
cctcccccctcccctcagcggtggctcccaagaagtccgagacacgcggtgaggcggcgacgggctccgggtgagggtctctggagtgtgggcgccgtttcctgggcgcagagggagagcttggggtcggggggaggtgagagctgaggggcgaatgtccctggcgcgggcgggagagcgcgctctcggcccggcccgcaacttgattcctaactctgacctgccgcccggcgcgccttggcctgagggtcggccgtgtggggacctggagccgccctccttgcgaccgctgtcggaggagtccggcgcccgctgttcccctcgcctcgcctttcgcggcggagggtcggagcctgctgccctctgctcaccttcgggtgcagttgctccagctccctgcccgcggagaggatctgcccgcccctcttcgtctcttgtctgtttttatcacttctaggaatttgtttggtggaggcttgggatgggctctctcagcgctactttcacagtgactggggtggggaagagttccctcacctttttcaggtggcgcgtcaggcagcctgcttggtacctggagtcctgttttcccaagcccccgtccgtcagtgttcgcttcttctaaaattaccgatgacagggttataaatcagtttttagggggctcggagagagtttgggttggaaactgttagctcttttttcctcctggcttttgatcttgatttaagcgtttgcctctgaaattttgacaacttcataagatggtccaaaagtgaattttggtagaaagatttaaatgcacagttgggattttatgggggtacggtgacttcattgcaggttgttgactttttttttaaaataagatgttcttttaattttttgactctgggtttctgagccttggttattgtcccccatttctgttccaaaagcagactttttttttttttatcaccccttcccctcacccagagaatccctttaaacgccaagaaagctgtcataacatttagcattatttgatcacagaacttttccaaatgaaatgctaaaaattccttcagaaaaaagcatccatctacccatagcattattttttggggggaggctatacgtcttgtcagttctgaaagtttgaagtgacctcttatcaaaggccacccttatgtctccttaaacgactcttaggtaattcctagatgttttcatccgttctgataaatttgttgtcagagtgttgattgtgatgatctgcaactaaaattatttcatcagtaaagatttccacacatgtggcagctgcttgttggtgaattatgaaatttgaaaaaattgcaaattaaatgtgaaaggcatatttcttttaacttctgattgtaactgtctgtcctccagtatacgttcctatctagactttggtctgcttagcagatttcctcttttcacttgacactaggaatgggagtaggatttccagagcctaaaagagagtttgttttttttttctatccctaggctccttgtatgaatttataaataaatggttttttctatcaatagtatcaatttagctggtgcactttttttttttagtataaatcacattttgtttcctaaaatgaaaataattttgttttattctttatttcagggattgacagattttaaagcctgcaggcccagtcctgccagttgcctctttttgtaaataaagatttgattaggcctggtgcgatcgctcacgctggtaatcccagcactttgggaggtcgaggcgggcagataacctgagatcaggagtttgagaccagcttggccaacatggtgaaaccccgtccctattaaaactacaaaaattagccgggtgtggtggcgcactcttgttatcccagctgcccgggaggctgaggcaggagaatcgtttaaacccgggaggtagaggttgcagtgagccaagattgcaccattgcactccagtctggacaacaagagcgaaactcc

SEQ ID NO: 68261 - DNA, 2095 bp, Homo sapiens
tagaaacagggttttgccatgttgtccaggctggtcttgaactcctggcctcgagcgatcctcctccctcagcctcttgaatagctggatttaacaggcaggagccattgtccctggccatattcttgcactgttgattttactggggcctctgtcagcttaccctggaattctgcatcatctgaggatttggaagaactgaatcacagttatagtagacagcatcatattcttatccttgtgtgttttatactgggacaggtcttgaggaagttcttctgtcatggctaggggacattgagctattacctcttatagcactgatttggactgtcatgtcttccctaaagttcttgtccataacataatggatggtcacagtcatgagcaataactgagtgatctctgggactaacaggtgatgaaatgcatgtttagcaaacagtgatttctgttacttctctgtggtgcagcagcagaaacttttgcccaaaggcatagaagttagagggcttatgaatttctgccaatctggagataagatttatgagcatcatgttaactcaaacctctgcttagagatttctagctgtgtgcttcaggagtgttttggtaaaactttgaggatcatgaataaagctaatagcttaaaagttaaacactgtgagttttttcttcttttgtttcctgggcacttttcataaccttttcagtgttttgtgtttggagccactcttcccagtgacatactgcacttgtaggtctcttgtcactttatcctcagattctgagtctgtcctatttgtttctcttcttcatcttatcctaggaagaatgtcaaggtggcaaccaatatctcaaaacatgcagttgtgatgacattgacagttttggcatcagtccggatgtttcttgtagagttcagtcatcacatccaaagatatcttggctgcagttacattgctgtctcttaacacgatgtatatgaaattctgcagtactatatccactttattcttgtgttttacagttatattcttgctatcagtcacaacatgagtatgtaaagtctcaaaagcttattatggcaacttggaagttcaaaaaagagctctagcaaacttgatggatggatatgatacttctcagcaagatcaaagctttgtaaaatgttattagatgattttgattcaagacagtacagtataattgtaggaaagtagatcttttagctcttgaggaaagttacttagatgttctgggtaacagtgaccaatctgtgccataaatatcaccagctctgtcaattctttgccaggtttattggttttaatttgagaatctccatattggatttgtagtgtatatagtactgctgtagtaaccctttaatgtcagccagtggctccactttattagattctataactgctgcttgttactgggcagctagtttctgcaggacatgttggctgtagactggatccacagtgagtagttctcagagaacccgtactgctgacatttgcaaacccatttcagctgtggtgtggagctgtggcgttgtacttctggatgtgaccagaaacagtgtttgggagctcagcaggtggtgctgtcttggctgattgtgtgtgtgtgtgtgtgtgtgtgtgtgtgtgtattttatttaatttctgagacagggtcttgctctgtcacccaggctggagtgccatggcacaatcacggctcactgccctctcgaactcaaacagtcctcccaactgagactcccacgtagctgggactatagatgcacgccaggctaatttttgcatttttaatggagacgaggttttgccatgttgcccaggccggccttgaactcctggactcaagtgatcctctttgccttagcttctcaaagtgctgggattataggcttgagccaccatgacaggccctgtgtgtgtgtttttaaaattaatatttgtggcttactttacatctgcatctactctcttctttttagtagttctctagtgtagtattattaaatggatatgctataacttaatactgctcttactgatggatatttagattatataaa

SEQ ID NO: 68262 - DNA, 1030 bp, Homo sapiens
ttcttagcactcaagagcattgagatattatcaaatattcattaaacatttgtgtgcgtagcactttctgggaacccagatggatgtaaaacgtgtatgctttggtcctgagtttcttccttccagggtagtctagttagagttcagaataactcaaaaaagttgaaatgtaagacattaagccttttgaatacaaaatattatggataatatgtgcttataaatttgaagactttgtcctgtttattttttataaagtatggtgaattttgttttcctttacctgtgaactagaaataaaaataccctgtggggtcattgtgatgtttaaatgagattggatatgtaaagcccagttataatatataaacttacatatattctttctaatacatacaattagtatttagaattctaatttctaattgtatactattttttaaattaaacaagtaatatgatacatggttaaaaaaaatgcaggcagaacaaagtaagtattcttctcacttcagacccgaggttcttccatatgttcttctgtaccaagagtatggttttaaatatttttcattaattattctagaacatatgcacttacatatacttacatatttttataacatataagtgggaacatattattcatgttgtcttgtatcctgtgtttttcatttaaaaagagatttttggctatattccctgtcaacaaatatagcttttaagtacattattcttttattattgattgctgagtattctgtcgtttggatatgtgataatataactgatattttccccagcactcctttaatgcattttttcaaaactttcatcttcttaggatcaactcactatcctgaaggtccattctcccaagaagaggggacagaaagacagatctatttgtaagaaaggcttgggtatcccatgaacgagccaacagaaaaccgattggggtgcagcaggactccagagccagatataaggctcagaaaagggcaccaactggatggtacacgaagaggtg

SEQ ID NO: 68263 - DNA, 1041 bp, Homo sapiens
tgtcgccaggctggagtgcagtggtgcgatctcagctcactgcaacctctaccttccaggttcaagtgattatcctgcctcagcctcccgagtagctgggattacaggcacctgccaccacgcctggctactttttgtatttttagtagagatggagtttcaccatgttggccaggatggtctccatctcaacctccttatccacctgcctcaacctcccagagtgctgggattatagacgtgaacgactgcgcccggcctctgctgactcttaaaagcgtacttaacctgctttatcttgttgaagggagaagacgtggtctatgggtaccatataatctaatttaaccatactttagctatgacgttatctgttatttttggagaaattcgaattgcgtgttagagctacttttccagaaattgtttacctccagtgtataccttgggagtcagtagagttctgaaagctgaagcagattttattctttcatttcctagagaaaagagcaacctttaggcaactatacctatagagcagaagtatcagaaagtcattgttacagacattttgctatgtgctttggaacttccaaattatatagcatgtgtttaatgttttattactagtacagtgtttctcaaactttgggttgtacctattagtgggttttgaaattaattgtattataaagtgttaaaaattaaagatcaaaatagaataaaaacattgaagtgtgtatatagtaagtaatacacatttaaattgttttagttttatatagttatgtatataaatatgaataataatatgaaatacatttcttactacgggttgtggttaacattttgaaagcttctactgggaacagcagctgggggaagagtgtttcaaggtagaggaaacaagctagtgccaaggtccaaaggtgggaatatgcttatcttccttgccttcccctcctgcctcccaccaccacctgcgcctgcttgtatcatctttctcttctttcatcttctcctttattttattattataat

SEQ ID NO: 68264 - DNA, 1041 bp, Homo sapiens
aaattcagtatcttggtctctctctgacactaaaagaagcagactgcagaggttgacagacttccagcagttccaacagaagggatactggatccctgatcccctttctctttctctccataaagtcctgtggaagatctcatacagctacttttgtaagtggtagtactattagcagcagatgttaaaaatatagattagtcttttggcattattttattttattgtatgttagaagcaagcatagaatggccacattagcaccagtaaccacagaccccacgttttgagttggaaagtgagggaggagaggttttgtatggctgggggcaggaagagtagggaagaggcagggggctagtttggttagagtgttaagagggacacatctgttcttaaattgttagtcctcacttcctttggatgtggagatgttacacagaggattagttcttttacaaatatctgtaaggaagtaagagagcagagaacaagaaacaggttgtggagcaaaaggaatgggcacagtagctggtgagtaagtggcagtctttccatagagtagagagagagccaagtttccatggcttacccatattgtcacaagaccctgtagtgggtagggtggaggtcattgtctgaaggtgaatcttgctgatttgcagcctggattcttgctttatagggtaatagactggaagaactgctgagcccacattagctggaagataaaccatgtgcctgccatttttccttacatctttctgtctagcagaagcaagttagtcaagattaagtgatccttgtggtgtgagctctcggggctatgagacattaaaagaagcagagtgcagaggttgacagacttcctacagaggggatatcggattcctgatcccttttcctctagaatctgatgcgggagggaccatgaggaaacgggaggaaagggctctgagggactgaaagggtggttagggctgagcttctttaccatctctctgcagcatgagaaggaagatggattagtcactaactgtc

SEQ ID NO: 68265 - DNA, 1447 bp, Homo sapiens
gaaagctgtatttcttggcagggtttaggggtattggaattcattgtaaaaacaaaagcaaaagcacaatggacctttgaaagctggactatgaggtatgtgccaaaaactgtataaatgaaactattctacatctagaggtagaagtggcttcattatatcttctaagaagtagcagcagtgtctgatttctttttagattatgcccttagataagtttttatattctgtatattcagtttatgaagctgaagtatttctgataccaacaatgttggaagtaaaccacaattttggataggcttcagttatttggaagatttttctcattgaacttttgattcagatattgttgtaatgcagaaggattgaaaacagaatcagttataatactgtctcttctaaagggtgatattttatctattttctgtgctctttttcctaggttgtgtattcttcctgtgcctggggatcttttatatgtttcgcccaaatatctcctttgtggcccctctgcaagagaaggtggtctttggattatttttcttaggagccattctctgcctttctttttcatggctcttccacacagtctactgccactcagagggggtctctcggctcttctctaagtaagtatctgtaaagtccgtattttggccaatgatttagaggtagtgcgttagggaaaaacattcagcagagttggcagaattcttaatatcatctcatgcaaacttttttttttttaaaaattaaagagcaacccagtttggctcttaggtgtcgttgatggcttatgtcatgagggattaattggaacctgtagtggccagtagtttttaaattactgcattaaatggattttttttttctgtcatagactggattactctggtattgctcttctgattatgggaagttttgttccttggctttattattctttctactgtaatccacaaccttgcttcatctacttgattgtcatctgtgtgctgggcattgcagccattatagtctcccagtgggacatgtttgccacccctcagtatcggggagtaagagcaggtaagagcacggggaggttctacattcgacattcatttattcactagttaaattcactatttattaaagttctaccatttgccaaacattatgctgtgtatttgtgatgccaagatgaagaaatcatagttcctattgttgggggtttttttatgtagtagtcgtagtagttgttgttgttagtagtgtttattaattgtcttaaagcattagggttgaggggtcatggtgagtatgaggtgatataatttgggactgttacttacttgaatttatggctaaacaccatccagaaagcggtagtctataacttttgtaaacaatgatttctcttactcattgtggagtgtactttttgtagtgattctttttttgt

SEQ ID NO: 68266 - DNA, 2052 bp, Homo sapiens
acgccttgaatttgagctctgtcacatccattccctgccttctgctcagcataaaccaggattaaacgatcctaagaatctttagcagtcttaataatgtatgggtttctctacccccttctcttcttttttcccctccagtttcactctcatcagctgtttcatatctttgtggttgctggagcttttgttcacttccatggtgtctcaaacctccaggagtttcgtttcatgatcggcgggggctgcagtgaagaggatgcactgtgatacctaccagtctccagggactatgaccctaaaccagggcctgcggcacttgcgggcctccctgctggctactgatgccagtaccagaggagccccaaaactttgacagcctcgtgggctttgtgacggcccagtggctctgcgtggtacatgactgagaagagaaaaacaaaaataaatcatacctcaaaggatggagtgcatcaattgggagaaaaggagacatagcccaaaccctggcttattcttgggatctactgattgcgggctctgcaagacccttggcaaactggcttctgatccatatcatatttatttgtagaagatggcgaaacagtttagctggtggttctttcttctccctttctctctctctatgacaataatacaaaccaatttaagtgaacatttatatccgataaggggtgggagtgtgattttaaatgctcttttgggagaacaaagaaattaatgtaaataagatttctaactgtttaaataagactttatataaatgtttaaaacataggggtaagggagggagggagaatttttgtatagaatgaaacatgcaagtaccacacactgtttgaattttgcacaaaaagtgactgtaggatcaggtgatagccccggaatgtacagtgtcttggtgcaccaagatgccttctaaaggctgacataccttggaccctaatggggcagagagtatagccctagcccagtggtgacatgaccactccctttgggaggcctgaggtagaggggagtggtatgtgttttctcagtggaagcagcacatgagtgggtgacaggatgttagataaaggctctagttagggtgtcattgtcatttgagagactgacacactcctagcagctggtaaaggggtgctggaggccatggaggagctctagaaacattagcatgggctgatctgattacttcctggcatcccgctcacttttatgggaagtcttattagagggatgggacagttttccatatccttgctgtggagctctggaacactctctaaatttccctctattaaaaatcactgccctaactacacttcctccttgagggaatagaaatggacctttctctgacatagttcttggcatgggagccagccacaaatgagattctgacgtgtccaggtttctcctgagctcatctacatagattggtagacccttcctttggattaggaaagatgagttttacctctggtacactgtcttggtaagcctggatgtgacagacacctcggctctccttgaataagaaagccagcagaactcttaaagccagttgtagtacggagttgtcagcactcactgaacctcactttacagggataagagtggtgtggcattttaaatacaatggtatgttattgccagggagtgaggtacaagacgatggctcatgtcacaggcctacctgatacggtgtcagagaaagtggtggggaaaggatctggttcatggaattctgatcttggcccataggtgaaccaccaaaatagtgctcgagtcttaggttactgtcatcaaagacttgggatgactccattatatcctggggttgtgggtattagaactaaatatggaggtcctgagcatggggactggcgtcctcagtaggtgtttgggaatatgggaagggtctcctatttattcaatagagttttctcagttattttcctcccttgcccttgcaatctccagcaaaaggtgggatctaggaagaaagaatccagtgtagaagttgag

SEQ ID NO: 68267 - DNA, 1033 bp, Homo sapiens
gacagaagcccacttagtttcttgggagcaacagcacgtatcagaagccagacttgctcttcggtcatgcactttgggatacagcgtataggtgcagccctgtcacaacaccaacagaagtagcagcctctgggtgcagtcacccacaccccaaagctggaaggatctggttcaacatagcacaaacccttaggaaaaatgaaattaacatcactgatgtgtaatccagtaaaatctccctttttcgggtgtgtatgtgggcatgtgcccatttctatgtgtgtgtctacgtgcagctcactaccaacagcctcatgtgcacttgacctgacagtgctcgctgagaactctcaccaggttggcgcctgaatgccttactctcagcagtcagaggcttgcttgctctgtgcagatttttaattttcttttttggccctaggctggttgggacctctacagcttcattctttcaccattaaatagtggcctttttcagtattttccctcttcccctttataaattatgctaaagccacaaagcacatttttggggatcatagaaggttggggttccagaaaggcatctgtgtgatggttccattgatgtgggatttccctacttgctgtattctcagtttctaataaaaagaaccaaatgaaatatgacctgtcgtgtgtttttttattgccgttcagcttacctccccttggcttttggcacttctctgaagctctaatttagacactgtgatttaagaaatttttggaaacttccccttcgggatgcagaaatcaaagtgcttatgcccaactcctgtttcctaactcaagctttcctcgtaagttgcaccaggtttagaatggaggggagagcagctctaaggggcagttcttatttattattgaagtttataaaaatagtctctaatgccaagggcaataggctctaccataaagcctgggtgtgtagtaggctgtaccatctaggtttgtgtaagtgcattctatgatgtttgcgtgacaacgaaatcaa

SEQ ID NO: 68268 - DNA, 1019 bp, Homo sapiens
cacagcctgcccacagaagcagaggcaccggccggcgagcgtgaggcgagccatgggcacggtgatcattgcaggggtcgtgtgcggcgtcgtctgcatcatgatggtggtggccgctgcctatggctgcatctacgcctccctcatggccaagtaccaccgggagctcaaaaagcgccagcccctgatgggggaccccgagggcgagcacgaggaccagaagcagatctcttctgtggcctgagcgcccatccccacccggccaggtaggaagggcggggagagcacacggcattgctcagccacagctcccaccttgacccggcgctggccactgcctccccgagtccaccctcctccccgccctccagcagacaagccacaccgggttctctccctgcactttcgaggctccctgaaagccaccgtgctgggggctcctgctgatgctcctgtctgggccagtaaatctttggaacatgtgggggatctccctaagctctggccacagcaaagcaaggaggtgtgtgcaagaggaggcttccggactgggcattcccctgtcgcccttcctgccctggggtggccatagctggtgactcttcctaccttgctggtcccacctcacctgcattgaggggacggggagggagggatctgagggatgaaggtagatttctgagactctctcctaagccagaaagacgttcttaacacccctgcagtgtgaaagctggtccagctctacaactgttggtaccaatgtgcaaacacaccagccctgccatctggacccagcactcagaaacaccatacacccctggccgacgccatcatgcccctggatctgctataggccacactgaccacatgctcctggattcgctaattcactcacacacccattgcatcaccagtgcggtcacatggattgaaagaattaatacacacacacacacacacacactcacacggtcacacggagaccgaggctatgagcgctcgaacagcagagacat

SEQ ID NO: 68269 - DNA, 1048 bp, Homo sapiens
ctcctcgaaatgtcatgtagggacaagttaaaagaaacagcctgccttcctctaggccaacttttgctcaaagagacgctaagggattgattataaaattacagcaacttctagcttgctggcctccttgcctccctcttaggagttctttcggggagttcggaggctgataaataacattctttttcttccctgagttagaagcaaatgatagctgtaggagtcagtcagataaggatcaaaatgtcacttgcataactgaaagggctgttagaaaacttggtttcaggtctgtttgccaagggagttagactcagcagacaggctctggcagggctgagcaacaggccgcccgggtcagcccaaacacatcagctgcggaagctgaagatgagggctctctgcaggcaggcagatcctgtcagggaaggacccagaaggggtggacccacacatcactctccctccccacgagaagtgagtgaggccgcaggaggggcggggagttgctctcacagcgcctcctgtgctccggggtcaggaggggaaatggggaggcccctaacaagggtggcagctcacataggttgtgagacctttaggtcagggtcatggacaaccaggtctaaggaaaaggtcagtagtcctaaatgcacttgccaaatactggtagcctgaaaaataagctgtcacccagaggccaagctgcatatgcagtggaaagaatagtccccacagcagacgataccagagctgctcagtgatgctgaaggaaggtgcatggagcagtggagcaagaatcagtttcccataaacttttctcagctaggaaagctgtggacagggaatgcttagaccacccgtatctgccgctgcaagctatcatgccgtgagctgctcctgaaccccgctctctgtgtgtatttgctgtgagcaggtcatctcacctcagcgcatccctgctacagcagctccgtctctgcttatgtcccccatggtgttcgcacaacccacctccgtcccgccaaaggaaagggagagcggcctc

SEQ ID NO: 68270 - DNA, 1031 bp, Homo sapiens
acacagacatgggagaaaaccgtaatttttgactgtaggaacttagtatggtctgccttgaaatcaatctggaatgccaagcaactgacctcctcttgtttttcagtccacagtaaattattcacttatttagtaaatatttttgagcacttactacatgtcaggcattgtctacatgtgggtacataatgatgaagaaaacagactccttacccacagcccatgctgtaggttcttgaaataaacaaaaaacagcctatttcctcctgaaaggtgcagccagtttttatctttctctgtatcgtcagtatagcctactgtagatcaggagaggtatgcatgccacccacctccaccccccacacaaactgccagagagggaaaatatgacagtttttagaaagattctctcctttagagaagatgcttttccatgtccatcactgacttgggacagtgaggaaaccacaagctattgatcatctgcctgtgggtaacatctggagatctgacattgaattgttttccctttggattggaacacattcattgaaagtacattgggtttaaaaattggaaagttctccctgtgtatcacatatatcatcactggccctttgtcatgttttgttatgtacctttttttgttttttgagacagagtttcactcttgtcgcccaggctggagtacaatggtgcgatctcggctcactgcaacctccacctcccgggttcaggcgattctgctgcctcagcctcctgagtagcagggattacaggcacctgccaccacacctggctaattttttgtatttttttagtagagacgaggtgtcacgatgttggcctggctggtctcgaacttctgacctcaggtgatccacccacctcgggctctcagagtgctgggattacagtcgtgagccactgcacctggcctgttatgtaacttataacagtttctcaaaaatcttgaacttttggctgggcatggtgactcgtgcctgtaatcccagcactttggaggttaa

SEQ ID NO: 68271 - DNA, 1042 bp, Homo sapiens
ttcctaccaaggtggttcccaatctgtgaaaccccaggcccttgaagatcttatacctgttttatcggtcaacagatattaaaatataataactgttttgggggtgcaaggggagcatgctgtgaaaatttttgacattaaaaaggggatctcatttttcaagtttattattattatttttcattctctctaatcaatcctttgtaaatagaataagtcatcagataagttatgtttcatagcacttcctcatataaccaaattgtttgtagactcatgtcagatatctttattttttccagaccttagaccctgaaccccaacacttatccttgacagctctgtttgggaagcaggacaaagctacatgtcaggaaactgtggagcctccgcagactctccaccagcagcagcagcagcagcagcagcagcaagagaagcttccaattaggcagggggttgtacgctccctgtcctatgaggaacccagaagacactcaccccccattgagaagcagctctgtccagccattcagaaactcatggtcaggagcgcagacctccacccattgtcagagctgcctgaaaaccggccttgtgaaaatggcagtacccattctgcgggagaattttttacaggacctgtccagccagggtctcctcacaacattggaacttctcgtggtgtacaaaatgcttccagaactcagaacctgttcgagaaacttcagagtaccccaggggcagcaaacaagtgtgaccctagtacaccagcacctgccagctcagctgccctgaaccgcagcagagctcccacttctgtcacccctgtggctccaggaaagggtctggctcagccaccacaggcctatttcaatggctcccttccacctcagacagtaggacatcaggctcatggaagagaacagtccacactcccaagacaaacactccccatctctggtagtcagactggcagctctggagtgatctcccctcaagagttactgaagaagcttcagattgtacagcaggagcagca

SEQ ID NO: 68272 - DNA, 1026 bp, Homo sapiens
gtgcaggtaggtaagataaaagatttctggtacactgataattgcaaaaccaaagtttaaagccctattgccaccttttggcaagtgagtaattcagattcataggttcctctttaagatacctgcttaaaatagcactataaagacatttcttgtaccttttgatatatgaatcattactgacaagaagcagaaattccatgcccagacattggtcaggtaagaggggaaaaaagatgtagttagaatatcatagctgttttaacagcaaaatactattaatataattacgtgtttagaaagtttgaatttaaagtcttttttcccttgtaaaaacatgttttgttggttttcattgccctatcgtaatattgctgctgttttcagtgaagatgttttaaatgtgtgtgtagttaatgcattacttagatgattaatgccatcagatcctcaactagatatttataaatgtcttctggagctgcttcagcctttgctataaaaatgatatagataggcacatactaaagtatacaacttatttgaacattattgaatgaatcaatagcaggtatattatgtcacagtttctttcattactaaatgaggaaatcatagtcatatctaatctttcagcagttatacattttctgtaccattttgaagccagaagtttattattaaattttattttttccagtggcctctccctaacttacagcttacaaagccactttctcagttaacatgttcctgagagaaggagaaggggagggaggcttctaggcataatttgagtatcaggtttctgaatatttaaaaataaacatgaaatgtgtttatgaaatgtgcaaatggagtgtagaaacaatgctatctcgcagccaggaagtatagaaattgtgatttcattttccgtctgtattcatttgcttcagaggattttgccgagtgcctgttgtgttcaggtgccatgttttcacgcggagcacagtttcttcaatgtgtgtgggtgcgcgtctttgc

SEQ ID NO: 68273 - DNA, 1012 bp, Homo sapiens
agttaaaaggaaagtaaaagattggtgtttcattatgtaaaggcagtattgcattgcctgttgcctcaaacatcactttttttcaattgagaatttccaaagaacggcataaaccaggatagtgcagttacaggcaaaattttacaacggtgtgtggtaaatcctgattaaatatggagagatgagttcttagagtgaggaagtcacattctaggtatcattaggatatttagagtaaatttcaacatgttcttcctactctttatttcactttagggtttcttacctccaggagagatgtagaaatagttgagttgagcttcatgcaccaaagtacccttaaacttgacctccgtgttggcagacaggtggctgggaagcggctggtatgcaggcgtaccaggctgaacaaaggctcgaagcattgtgaatttccagatgtatattaattggttgatttttaaagctaaataattatcctgctcatgatctcttataattttttaaaacccagaagctattcctgcagtaacatttcagtgccacaaaagttgacatggccgtatcgtatcgctgcaagtttaagttacagtaaaattccttttaagttttagaattctaaaaaacaaaacaaaacaccttcttacttgattcttttcaaccttgtattttcgtcttccctgctctgctccctgcctatgtagggatgggcctctcagccagtggctttacgggaaaacttggattgaaatgtgaacttcatggtttctgtcagcctgtcagctcatcacctccctaaggcatggtgatctctggtttttatatatctccacagactgctttgatagaccctcttgtgtggaagagtgataggtttgtccaggggttggtagaccttagggctaagaggcaggaaacttggaatgcatacttccatggaattcacagcctctttcccaggggaatgcactcaagttgcaaaactattttagggagaagaaagttaggccca

SEQ ID NO: 68274 - DNA, 1122 bp, Homo sapiens
tcccatcaacactacttaagcataagaaggtaaagtgtttgaagcaaaataaactctcagtgaaggttgaaggagaacaaaagcggtgatatgaggagactgtccatgctgaaatttctggtagaaggtgtaatcaattgatagagaattctagcatatctagtccacatgttgaattattccaggaagtgataattattgatattagcaattacaagggttattgatggtagaagagcttgaagtcttagatttcatttcaactcagcaagtatttgttgaatgtctgcacatgctgtttgctgtactgggtgttttaacaaagtcctcccctccaggagcttatagtctagtggagggaacagatttataaatgcttaatttattaccttttttactacaaggatatacaaaactacaggagcaaagaaaaagttgggactgtttattcctagaggagtgagaaagcctgggtcttcaaggacgagtagagagaaggaaaagatgtattagggactccctgcatgatatttgtggccaaggagattttgaaatttttcagcaagattatgaacaaatgaaaatataaatttaagtggccaacaaagcagaataagttgtttctatttatatttgttgtaaactatggacttttctgcttcctaatttttaaaagtttatttactctgttatatctcttagattaaaggaacaaataaaactaggaaattagtatacgatgaaaaagattccatatgacctttggtaaacctgagggtagtagatgacctcaaggttcccagtttaggaagatgatgatctctgggaagattaggaagattgaatgatataacatgaatccattataaattaaaactttctaaaagattaaatctgtcttttactgggaaagtaataaattctcatttatagttggagagtacatattaatttaatccaaattagtataatgctttaattcagagagttttgtttgtttttaatggcattaactttctaataacattaatttatttagaaaggggaggtttgtttctactgtttcccccaaaatgttcatgagtattagtcacccataaaatagaaactgcttctcatctg

SEQ ID NO: 68275 - DNA, 1001 bp, Homo sapiens
atacctcttaaacgttttaatagaattcaaatatgttatataataattatgtatggtttacatgttctttggtggcatatagattggttggcctttctttgggcaaggaactcagctttactcaggattgtttttgtaagactatttcctcaagatattctgtatagtcaagaatctctctgtctggtctttgcatttcacattggcttatgtatgtcataggccatatttgggcatttcaaatagacaaaggtagaattgatagaggtttgtggtgaggttttttagattcattaggagagaaaaaaaaaatccctttcttgaattggatgaatgtagaagagcaaaataaagaaatgaaaatcccaaactctcttcatttaatcagccaaaaaaagatgcttgataaatagagtaacttcattcaaacacaaaatagattactttattacagaaaagggtttatacattgtttaaagggtttaaacattgttaaaatggggtttgacctgtatgaactttaaaagtaagtaagatagctgttaaagttagggcaaacatttcattcattcatttattcaacaaacatttactgtctgccaaacactatgttcaggttttatatgggttatcccataactttttcttgaaaatactgttattcctgttttataaatgagaatactaaggttaaagggattaagtgatacgctgtggtccatgactattttgagatggaaacaccacttgaaccaagaaaccttaacttcgagacccaaggcccaagcagtgaagtactagcagtaaataatgcatttgagccaagtttatcatttacaaacacttagttattttagagtacgctccaaggtttaaaaagcaagtttttttagccttgagattcaagcatatatcagttattagagagattagtttttaccagattaaaaactaatttaacaaaaagctgaattagaccacttcttttgtaatattcccat

SEQ ID NO: 68276 - DNA, 1048 bp, Homo sapiens
caccagtgatgtctgcagctttctctatacccagtgtggtggaaggagaaaaaggcagcactcttctttctaattaaatccgcatagcacacttattttctcattgtttcagctaagggtatgctgctatccctgtatttggtaaagagagataatgatgatttgttttataaatgacaaaagaaagactgcttcctgctgcctaatctgcagaggcacaatgatgacatagaacttgctttctccttttcctgagaataactcctcatgttgggtatatttggcccattgaagttatatataattcctattctatgagaatttgttttatacctttgtgaattgaagagaacatacatgtcttgtgtgttttgtttttattgtttaggagaaaactgatgtggaaggaaccttatttgtttatacaaggtaagagtgtttcacttttataaagaaactaatcttcaaaataatattttagctccgttgtgtcactcttcttcaagtgcatgcagttttatttcaaaaagaagtaaaagaattaaatctcagttttgaaattattagttgacacgaagaagggaataccaaataatgtcacctggtatatcgtgatgaatactaatttcagaatataatttaaacttcaatgtagatgaacttaaatcattgactgggcactgtttaaaatagattaaatattctttgattcaagtgaatggcacaaagttcttgaatataatgcattggcaaggagctagaagaacactatcagaaatactagattgttcagttaatatttggaaaagggtttcattgatcatttttcttttttttgagatggagtctcgctctgtcaccaaggctggagtgcagtggcacgatcacagctcttggcttgctgcaacctctgcctcctgagttcaagtgattctcctgcctcagccttctgagtagctgggattacaggcatgcgccaccacgcccagctaatttttagtagcaacggaggtttcaccatgttggtcaggctggtctcaaactcctg

SEQ ID NO: 68277 - DNA, 1049 bp, Homo sapiens
gttgactcatattgagtcgtagcctactaaaatccctagggtccttgtcatataaattgctgataaggcaagccagggttccacctaccctatgtttatgcagtgaattttttcatctaagtatagtcctttacattgtgcttattctatttcatctcgttagtgtggaccatagtttcagcttgttgaggtcatttttattctgactgaaacttccaatttactagctattcctcccagatttgtgtcagcagcacatttggcaaatttgtcttcatccaactttttaatttagtgttcaaaaggctagagccaaagacagagccttgggtcacatcagtagagacctcccagggtaaatgtatcagtgagtcaatccctaggcatctgtgcatagaatcagtgcacctatgaatgtgtcaatcatcagtgcatctctggatcagccaactgcagaccctcctgagtgtattaatcacactggtgatgtgagttctattttcagactcttctacttctcattttttaaggcaatgtcaaccttttccattattgaaccaccattggtaggattatgactttcaaatttaccttttcagcccagatatctgtctcttttacatttttaattttttaattgaatagctgcagaatgttttaatttttcaaagtaaatgcactatctccacgtcctctgaaaccttcttctctttctgtgatcaacttggtgccaccaagttggccaagccaggtacctggaagccattctcagtgcttttgctttcttctcactccacagctaattcaattgagtggggtaattataaatacccttagctgttctaagagattctacctccttaatacctcataatacacccctcggactctgatccgtcttgcctatacaactgtaagaaccttctaactagattctgtactcctggcctgactccttctagccctcatcctgtactgtgtcaccaggaaacaaaagcctcactcagattatgtcagtgtactgcactgaggcctttgctagcaccctg

SEQ ID NO: 68278 - DNA, 1113 bp, Homo sapiens
gagatgaaagatttttttcacttggtgaatcctggcattgtgggaagactctcctaacacagacataattctcttgcaatcccacaggcgcacacatacacagaggcgtcacacacacacagaggcacacccctggtgtgtcatgggcgttgttttgcgtggagaacgtggagcgtgaagacacattttctatgacagtggttcccttggtgtgggattgatggacctgtggacaacaggagttttgttagtgctcttcagggtcccggagatcatgtactagaacacctttcctccacagaggaagagactgcaacccagagagctttgtcacttagacacacaattttactttgcttgggcttcagtttccctatatgaaaagaaaaaaaaaatagaattgccccaaaggatcttaaggactttttcagaattccgtacataatgagtttttattgtcattttctcaccattctttggcctttgtggaactgactagaatagctcaattgtttgttaaggaatttctgacctcaatcagttttccttatataaggagttaccagttttagagcctcatgtcacttggggctgtgtctcacttaaaagtgctgtgagagcatattggattgctgaaaggagaaactgaccacctcttagaagacatcaccaattcaaatgagggtgtctcctttcctagcgaaaacgggcacttagactagtttagagccaccggaggtgggaggatgagccagatgtccctggaaagccagtttaggggtgcttttctcatgttttccagggtttaattatgctccgtgcttgagagaaatatttttgaacctgaggattttttatcttaacgttgaacaaattatttatctttctttttctgtcccctccatagttccccaatgactctaatttttattattgttataaagcatttttccttaaagagtaaagacgcaaataaaaaaaatctgcagcttagacacaagaacaagagtgaatctgacagacctaaggttgagtgaaagaaacatggcaaaggggtgtgttcagcaggactccattcctgttaagctaaaaatgggccaaatgaagctatct

SEQ ID NO: 68279 - DNA, 1050 bp, Homo sapiens
gggtcagggtctgtgagacaaactgagatgtgctggagacattgcttatggatttattgatccctgacttgttcataccatgtgcctggaattcagcacttacacgtttccatagcacaatggacatcagtttaatcataatgggatttcttaagtgattactatatgccaggtactatgctaagtcagttatcaacacgacctcctttaatcctttcgacaatccgatggggaagctctcattagccccacttgccagaagaggaaactgaggctcagagtaggttacatgactaaaagagcaggggctctgcattcaggtctgcctgacccagagtgtattatcttaaacatatgtgacacttcttgcttgccttcctggtgctgcaccatctgtttttccctgtgaggtcccctttccccacaaactggctgtgagcacacccgacccctttcctgtcctgctgcccccttgcctgtcctgctgcccccatccctcggtgctcagcttgttgccagcagagtcaaacacacagactcatggtaaaacgttatcttacatttgtgtaccttttcatgttttcagaaccttttccaggcagtatctaatttaatttttaccatcattctgtgagtgaatattttctgtcttatggttggggaaactgaggtcagagaggttaaatgattgcctggggtggcactgcctagcctctgtgtggtggagctaggacccagtcgaggctcggagttctaatccaccagtctaccctggtaggaacctctgtgcaaagccagcccccatagcagcctctctgtcttgggccaaagatacaaatcagcaacggccaggaaatgatttgcatgaggaactgaggtggggcggtgggcaggagagaggctgaggcagcaagggacagagtgggcacacagaaacttccctctggaggcctcagcctcttcccaaggctgagcatctgcgcagggcttagtttgttcattcctgggagctccaggtaagtctccctctcagagggaaaagctgattct

SEQ ID NO: 68280 - DNA, 1081 bp, Homo sapiens
atgaagatacatggaatcctatctctcataacggcctccagccatgcccattttacagatgagaaactgaggctgagagggagaaagaacccgaagctcagctccagccagagagagttcaggtaaaagaacagaataataagaagggcaaatgaatttccagagttccttcatcccagagtaggatgctcagccttgccaggcagctgcactcagcttcccgccctctctgagcaggggggttggaatgtgtctgcggagggcagcgaggaaggagcctgctggaattccttccctgtggcacatctgggaggggtattccccctggtgatacttgggaaatcatgctggcctcgccagtccttttttccactgttcttttggtctcggagcacccgccaaacatctgacactgttcaggatcgattgcacataaaatgaagaatgggtatttaaaaaacaggtttttttgtgtgtttttccccctgttgtcatctaagaagcaggtttttaggttctttgattctctcccagaataacaaccatatggggcctccacttacactgagcagcctgtgccttgtgccagggactggtttgtttccattgtcagcaaaccttgactggctccaaacattttcacttcaggtggtttctgaaagagggaaagactgaggggaaagtgatgatgtggtccctctgaagagggtttagctttcaagggtatggcaggggtggggtcgacagccagaggggtgtgactttgagaagccaactcaccggcaggatccagcgagatccaggctcggtggctggaacaaagaatgttttgaaccacacggggctctggcatgtttgttgatcgacttatccaaggcctgggccagctgctcttgttccagaagatttcatggattaactccctgggctttggaaaattgtgtcttttttaagaaagggaagttttgaaaagcaaatgctcctgggcaggctgggggtgtggggagtgttggctggagtgggaggtcacattcgccccatggtgggatggccaagggctcccagcgagggaacagttgga

SEQ ID NO: 68281 - DNA, 1036 bp, Homo sapiens
tgggtagcaaaccaatatcagtcacagaattctactgaaaatgcagggtatggaagcatctgaagtcacaaggttgggctggacaaattagagccttcacctccatgagggaagaccatggaccccttactctatatccacactcagcctgcagggacagggcattattgccacgagccagtctgtcctgtatactcactggattagggattccactttcagaattttatcaccttagcacccagcacagtgcccggtacacagcaggtacccaatacgtgtctattacactgaaatgtttattggcacatggtctaaagacagtgccagggaatcctgtgaaaatgcagtgctgattcgggagatccaggatggggatccaagatgatgcatttggaacaagctcccagaggatgctgccgtctggtccgaatcctgggccccactttcaatagaaagggcctaggacatgcagagtaaagtccttcctcctgagttagcagcagctacttgtgcttcattcatgcaggcatgaagctgcttgcaaggatgttagcagatattagatatggctggtggggaggagtaaggagggccttggctatgcctttttccaagatccgggagctggatgctcagagatctcatccctggcttccttgtccactgaaaacaaaacagcagtatacccgggtgaggagagagaccagccaagcacgtctttcaacaactcttaacttgcttggctccagccacgaaacaggaacccgccatccccctagctcgtccctggccctcaggaagtgctgaggctctgccgggctgcatgagtgaggggccgatgtctttcagatgttggggcttcagcgggggagtggggtaagctggggagagggagcatttttttgtgaatattttacccacggaaaaagctgaattctctagaacagacctctagatttttttttttttttttggtagtgggaagtgagttactggaatttcttctgaattcgaagccaaacaaagtttcttg

SEQ ID NO: 68282 - DNA, 1055 bp, Homo sapiens
caggtaatcctcaagacctgtttgttaagagtacaaagccataattgggaaaacagtgaggtcccgattgtcatccagaatgaattaatttacatgcacttatggagtgcctcctgtttgctcagctttgtgcttggtggcatcacatataaaaaggaccaggccgggcacggcgggcggctcatgcctgtaatcccagcactttggaaggctgattgcaggtggatcacttgaatctaggagtttgagaccagcctgggcaacatggtgaaatcctgtctctactaaaaataaaaaaaaaaaattagctgggcgtggtggcatgcacctgttgttctagctacttgggaggctgaggtgggagaatgacctgagcctggaaagtggaggctgcaatgagctgtgatcgcaccactgcactccagcctggtgacagagtgagaccttctctaaaaaaataataataatacatgaaaaggactggattcctttctttcagggaattggccgtctggtctgggaagtacaattagctccctttgaagaacaggagcaggacgagaggatgtgtaattaagtgctaaattgtgtcactaggactctccagggctagatgattcaaggatggcaacacaatgagccatggaggtggctgggggagcctgttgggagagtagggagggatctggagcaggaaactacaagcaaatccaaagagatatccaaggagggtcctgggacaagagtgacggctgagatggggatgacgagcagctgccctacctggatggaaggtgagggtccctgttgtcctggagctgcacagccacttataactggggtcatctgggtctgtggccccctgacagctggtggtagtctgcaggcatacactccgtgtcctgtcgtgagccggtcctcagggcggcatctgcccaggaagccacaggcacacttagcacggcccaagagcactatctgcaggaggcgcttggccccagggctgagctgatggtggttgggtggggtgtaggcgacaggagagcaggtggcct

SEQ ID NO: 68283 - DNA, 1086 bp, Homo sapiens
tgctttctctacccagggtctgagaaaagtttctttggcaaaagcatttcattgccaaaaagaaaatctgaaagctgctgatgtagtttaacctcctttatttaacagttgaggcaaattaaggctccaagatgctgagacctgtacaggatcacacagctccttggaagcagctgagccaggactagcacccagctccctgcttcccagtactcatggtctttcggctgcatagctctacttctctgcaaagggtgctggggccgagattcatggcctttaactatggttcttaaatgttactgtgccgcagacccacccagggcactttgtaaaaattacagaatcatccatcttgaagggccagggtcttgggaaagttgcttcatcttttgaggctctagatggagtgttctttctgcgctgctgaacctggagcactgagaagcttttcctgctctcaggtgcatttgaatttgcatggtctgttttacagggcaggaggtgcaaattcctattgcttaagcccacttacataacaaactggccacaccttcaattccaaaaggcaatgcggctgcccactattgcagactatgaaaagtaaggtagaaacaaactctgggagccacagaggctactcttcatggacttatttaaaaggaagacctctggctctttccccagagattatgatttaggaggtctggggtggaagacaagaatctgcattttaaccagcacaccctcttcccacctccacccatgtggttttgatgcagttcatccttggactacacttggagaaatactgacttacatagtaaagaaccaaaactgtgtaattataggaatcactcaaacacccacatgctaggatatgaggctagaaattcaggtttatgattgtccaagtgggttagagaaagaagcaaggcatcttgatttttaatgtggataacatgtagcacaatgatatcatcctgataatctttttaaaattttttttgttattgagatgtatgaatatattatatattttggatattaaccccttatcagatatatggcttgcaaatattttct

SEQ ID NO: 68284 - DNA, 1029 bp, Homo sapiens
tagtcgccacctttcttgattaggaagctgtgttgtcagtgtgctgacttattagggagaagaatgggctctagcaggcctttaaccatcacagttctcattcaggaaagaaacgaaggcaggtgttgtacgccccgtgcctcccacagagtcccgcaagctgtgagtgtcctcaaaccatccatccatcctcccttgaagggcttgggggaaggggtgtaaaagggaagaaaaaaccctattaattgtacgcacattaagttctaggcactattttaggtgcgtgtgtacaatttccggagcaaatgagtgaatgaatgattagttttaaaatacaattaagagttttgctggcttccccagaacagaaattttctgagacttttcctagatcacttttagcagtaagagtgccctaagaataatggctttttggtcaaagtctcttaatgtcactgaagcttgggaacatgttctcatcgggcaagagaacaacaacagaaaggaactgcattccagttccttgtgtataaaggtgctcctgacctctttggccccaactctaagggtaagaataaccataagttattgccagagggcagcaccttcatggacagagagcaggtgtttgagggtcccatgctccacccaggaagctgctggctccactaagagaatgggctttgggcctgttcagtttctaccaatgtggggcaggcccccaaagctgaacatagatggagacacagaagggcagaacagttaaaaatttaattccacctttgccatctcttatctgtatggtcttgagaaagtgcctgtgtttctgtgagaccttggtttccacatctgtaaaatggggagaatcatacctcccttattgggttgttatgaggattaaatcagtcagtgtatgtaatgtgcagggcatgtggtaaacgttcaagagtgtaggctttttgttattggagaaaacatttgtcaggtatctactgtatgcagacagaggccagacatgccttcaggtac

SEQ ID NO: 68285 - DNA, 1101 bp, Homo sapiens
caactcccaaccttctttctagtttggtactggtaatctgccacaaagcttgttaaaattgggcgcaaaatgaccaggtgaaggtttaagagtctctcctttggagacagtgtttgagatttagtgcctgggttttgtggcctctctctatttggctgttcacaacctttttcttctctctgtctgaagtgtaagcaaggaggaagggtaacagatcgaattgccagatttaacaaaaaacaaaacaaagaaacaacagaacaaaaccaaacacaagatgcccagctggatttgaatttcagatagacaacaaataattttttgtaagtatatcctaactgttacatggagcatacttatactgaaaaaaaaattatttgttgtttatctgaaattcaaatctagctgggtgtcctgtattttatctgtagccctaataccaggactgtggctgggtgggcagtgtctgatctgtaatgacagcagagtcttcagtaagagtgggggctgggaaaataaattaatgggttgcagaatgtatagtgttaattagataatgcttcctggaaaagacggatcttgagctattatttacagggcagtagggaaatgatgtggccgctagctgcagaaagagcaactcatatgaaaaagaatggcagaccggagaggccaaggctcagagacacatgcacacaccaaataagggtctgtttactttgactgtaaaagtgtattactttttgactgcaacaatgtttcatctcctgcctaacataatgaccagtttggttcctgtcctggaaatagagaaaacggtgccaccttccccacacacttgagttgatctgacattgatagtttgaaaactttggttcccccaggcagtaaatttaaggagcaaccctgtcttgaaaacggaattaggttaccaaagacttccggcagttgagaatttcttgaaatccagaatatcatattttcccaataatgccttcttgcgatctcacacatcatgcttttaaggccgattgctactactgttaggaaatttacctgtgatggtctcaggtaatagaagttgtggataagttgaaaatt

SEQ ID NO: 68286 - DNA, 1030 bp, Homo sapiens
ctcctcaccaccttctgctgtcctttgctgaattgccaagaacactctgcaaagggacctgattccatataaatggaggggtttttgtttttgttttaaaatgagttcctttgatctgaagagcccaactcggatgtaagtgccttaaaacacactgtggtcccagcgcctggaaactcctggagaaagttcacagcagtcactcagccacatgaatcctacataaaggaagtggccatctgagccaccctggaggccctgggatggggatttaaatacattttgtagcagaagagccaggtggctaatctccgaggctccagagcactttagccaatgagattatctctactttctgtgtttttccaaagaacaatcaggaaagcatcagtggatgttctaaaagttctgttttgacctttctcccagccctctcctcccttcctgtcaaatggggcagcccaggcctcaggagccctactggaaataccacgcctgtcattgtgagaacttatttttcccaaagagaggaggatattccgctctctgaatcaggggaagggtttggagaggtattgcctatccggatgtcagtcacatggacaatgcctcttctgccacttctccagaagcctggcccattatgggtgcaccccaggtactgaacacagtggcttcaggccccctgggaaggcgcaagcaaaccccagcccaaggtgctcctgggagctcagtccactttagaactcctttctactcttccctcttcagtttgtggtatctgagaacaattctggactcatttgcttaaattttgctttcagttcagctccagtagatttggcccatgactcaagacataggagacccctcagactaggctaggaccagatgagtttggagatggtgtaagggacaggaagacagaggacctccgaatgcacagcctctcctacccatggcatgcactgagcacttggttaccggtgtgctgctgggtggtatcatctggagtcatgaaaccgtggaa

SEQ ID NO: 68287 - DNA, 1030 bp, Homo sapiens
tgttctagatacagcaggtaaaaagtcctcatggcaaagaatgcctgcagtcacacaggaacgtcacatgtgtgctaaggcacacacacattcctccagtcacgaactggtctctttttgatttgagaacaaaatgtaggaggcagtgataaatgttagggttacctccaactacaagcaatattcagcatccgttcaaggccttcagactcaaagagcttgattagctgatgaatcggcccagtggtctagaaacacagggacgttatccctaatttagagataggcaaatccaggctatctagttcagactgttttccagtcgggataactccctccaggacttggtttctgttgtttggaagagaacacagcttcctgagccgaggggaatcacattgcttctgggctgtagggcgccctgcctggctctagagattgagagtagttcatagtttgcctgttgccttatttatgtttcaagagttgtgagccccttgggtggcaggacctgatggcaaatagtattgttgtcacctcaggaattgtgatggggtgggaggcactccggcctgccggtgaggagaccagggatctaagtctggccagctgtgtgaccttgtcatttaacctctgaccctcagcctcctcacctgcaaaatgggagggtacaactgtattcgccctagagtattagcctttagatgcctgccgtgctcacctttcaccatggcagttgccctctgaatcatgcgtaattttcagtcagctgacttcttgagcaccctcttgcatgttagttagtttagttttgttttgttttgttttttaatatttggcttgggaacgtttcagagccaccaaggttgttgccatttctgttgggggtaccccagtagactatgtggtgtatgaccccaaggatatacagaatcacatcgggaggggaaaaacttgttggtatatatatacatatatacaaacattagccaggagaaatggttctgtgcctctcacaaaaagctcacaa

SEQ ID NO: 68288 - DNA, 1012 bp, Homo sapiens
cattcgctggagtcagagtccctgctgggaagaggggcccaggacacagctgcagaagcctgtcctctcaaatactctgcaatcaggagcttgctgtcccttcgttcccaaacctgccgtctgatcacaagccaggacccactctgtcactcttagcacaacacgatgccgctgctatcaagcccttgtccacccacagagtgggcagtgcagacaaggagggaaaatacgcgagaacccagacatgtctgtgcagccgtggagtagaagaccaaatacttgcaggctttgaaaccaacccctgagtgttttggagagttttatataaactttggaatgggtggtttaatttttttctttctttctttctttctttttttaaaatttcagactttggattgaattaccctattttccgcaaatttagattacacaaaagtgctttgtgagcctttgttgtaatttttgatgagatttacatcaaattctttttatagtccaatattatttcacagactgtgaattttatgtatctctagatttcaaaatacgtttgattttgagccatgtttccaataaaatccataaagaaagttatggaattgtccaggtgagccatgttctacctctagactgcccttccagggagcagccccggtgaaggcggtctcagaagaggcggcgtttccctaatcccggaggcatctgcaaggcgccttctcagctcctcaacagacacatcaccatatgccgataccttttgtttccggttgtcccatctgtttgatggtgcactgagccaggtcactctgaatagcttcccaatcacagtaattacccctgagactggcacagagctggttggctaaaacctagaaatgaaatcatcttcattctatttactccttaaagttgagttttaaaaaagtaattgatttttgtcttcagtgatttctccttggaatcactaactggagctctcccaggattgcatgtttgtgttggtattaac

SEQ ID NO: 68289 - DNA, 1058 bp, Homo sapiens
agtgggcagtcagagggtgggggaacagcggccgtgaacccttccctgacacctccctttctcctcctccccatggtcttggggtcacatacgcatcttgatggaatggttgatgaagagcgtctttgatttcttccaggtcttgcctgagaaacaaggcatgagcttttcaccctaacgagtcccctcccccacccgccagccttaggggaaggtcatttttccagtgcgtcccacagtgcaaaaccctggtgtgcaggcatggatgagctggccaggctggcacaagggttccgttcaactcctcctcccatgcagagttccttctgccctcatccttttcttgcctctttcctcaaaagggagctagaaggcagaattatgtattcttagggcagaagagaagaagtcctgatcttctaaaaagaagttatataaagaaaccatttttattgaattgtgtagcattgtgacatgctattcaatttttactttttattttactcttaccttaacatattagaatagtccatcagacaaatgcattggcagcatttttactattccccaaacatgctgctggtcatgtgatgcctatttagaaatacactttttttttttaatttttattttactttaggttctgggatacatgtgtagaacgtgcaggtttgctgcataggtatacatgagacatggtggtttgttgcacccatccacccgtcatctattaagccccacatacattaggtagagaaataccacttctcgagagccacccaatcaatagcaaatcttcgtttaccttaaagttgccccttttattacccagtagccaacactactttgctgcgctttgagcctctgaagtgccagatttttgtacagcctaccccacaggcaaatccacactccatatttgagctgtctcgattctggcaaagtccattattaggaaaaactccagaaaatttattcttcatagtgtctccaacttcagcctgagaaatgacttgccagaatccagtgttgttctccagaatttgggcgaataaagc

SEQ ID NO: 68290 - DNA, 1092 bp, Homo sapiens
atcctgaagctcattgccttcaaacccaaggtaggcctctgagaaagacctttgattcccaggcatcaggggtggacagaacggggaggtggggtgcaggtattgaaggcagaatgaggggaagagggaaaaaggcatcggtgaaggaccatccctgctccgatggtcagtgccccaactcctacacctgcccagagctgaaccaggccaactccaggaaacactctcagctctcagtgttgaccctggctggcatgcacaagctgcagattcctcgctgagctgaacctctgagcctctcctaggagaggcaggtgatggtctttctcctatgtcccatcctctagtacataacctgttaatagaagaaactatgctcatagactggcagaccaaacctctccaggcccagccccccagatccactcaggcctctgttccaccctcctcccatttcatcagccacacagaccaacctcatataaaacattcagccagggctggatttgctcagggctcaggactgagggctccagcccatgggcactcctgttccctgcctaagaggctatggcattgctccttacatgctctggggcaggaagaacaattaccagcaaatttctctgctttgttccttgtgtaagggcaagaagattaggcctgctgctgaatgaggcagggtcagaattcctgttctttggatcatctgtgcccttcctagccagtcacccccattgtcctcagtggtggaggagcagacactggtatgagccacaccttccaccctgggcctctgtagatgggtcagaatcacgggtatccactggccgggattcaccaccaggacagctgcttctgagggaggctataagagcaactgagcagcccccaggctaccataacaccttttggagaaggatgagaaggaacgagttctaggagcatcatgcagttacagacttgagacaatctctccagcttactgagccttcccctccctcctttggtagttttcccagaggcaacacagatcaacaggaggccaagagcaagaatccctggccatatcttctattttcattcaagttt

SEQ ID NO: 68291 - DNA, 1074 bp, Homo sapiens
aaagacagttaagacaaatgtttaaaaatcccaaatgaaggattctgaatgtttaagaagtaaaacaggttttttttggttttgttttgttttgtttttgtttttttgatgcctagaggttggttcaattaggccaggcaagccaagtacctgggtgcgttgtcagaattatctccattttggtcctgttcaggctgggattgacccagaagaccttcaagcatttgcccagggttcttagaagtgatgagcagctgtgatggttttcaggatggatccaagaggccagcaatggctcaagcttcctgggagctctgcccaacactcaggagttaacatggtgtaggttacctccctctggacctccctccctgccccactgaagcctgagaaacacagaactccttgtccatgagcaagggagctcaagcactgggccaggagcggggcagaaaggtgccagtggatagctagacctgaccatcctgggcaactatcacacaccagagcaaaaggggtttaggtgctttgccaagaaatttcttctgtgcatgcctgtatgagagagagagagagaaagagagagagagagagagagagtgtgtgtgtgcgcgtgtgtgtgtctgcctatgtttgtctctgtgttcaatctcagtctgctagccaaatcctagggaccccacaccctgcaatcacaaggactgacctggcaggtggaatcttcatgaagcagaagctgagatctagagatccagatttagagtgttctgtaaagcctagagaagtgtccctttctttctcctccctcacctcaccctatatctccaccatcccctaaaagggcatcctaccaactagctatgaaaaaaaaaagaatttgctgagaaatctgttacccaagaaatattttcaggctgcaagcaaatgtctagttgtgcacatttccatccttcaaaaattccataacacattttccttgtttgtaccttaaaaacagaaatacaagagcaaccatctgaaagtggagagtaaaagccaagtcctgactttctagaaagagttagcagctcagat

SEQ ID NO: 68292 - DNA, 1035 bp, Homo sapiens
ctttcacttgtttccttttgccctcttctgccactgtgttgctcccgtgtcagccaagacctagaataccgggcatcttcatgggagactcattacagcttatctctatctgcctttctttaaagccagctgaacatacccaatgctctccctctatggtaagaccaaccctcccgaccatgctcccggcttccgtgtccccctctaacacccccactctccccaccccgaactccagagtccctgggagccctgcctggctctcactgcatgtggccactgtgtctgccgtgtgccttgcctgcctgttcccttctcgtgtgagctgtgaagatgctgtttgtgcagtggtggtgttttacccctgagctttccttggggtggtaattcactgtgatcttgactatctaacaagccactgggagagaatgggacccgaggtccatttcctgttaaacaccctgaggactccaccggccaaagcctctaaccttaatctgataggagaaatttgcagagggtacctatgagagccatggtagggctccagggtaaggagggaagacaggtgctctaggcaggagatggaagggtggacgatgattcctgttaatcagtgtctgtggctcctagcttccctgtgcttcaagtgaaaggccaccataaaaggtttcagctgggatttgttactgagcgcgtgattgaatttccagtcactccaaccttgctatcccttgcatttttctaaattcctgaagtccgttaaaattaggctgcagccactgttccgcagcaagctggaagcagaaaaacaagctccgttgattggaccactcctgttgtaggagtctctgattcgcgttggttgaagtgataaaagagacgccattcagtgtgaccttgaagcctccttggcccagccgcctccaaaaggctgccgttatgcatttctaaccgggccaagtatgagtttttagaaggaccagtggggttgattgaccaagccaccaagtctgcaggccgaggcaagcttgg

SEQ ID NO: 68293 - DNA, 1023 bp, Homo sapiens
tgcacaagaatttactggacaaaggggttttgtggtaaggaacaaacctgaaaaacacgggcctggacaacctggtgaccgctatggcccttcgagttcagcatttccagaatctggccatcgccctcctccccgtaggcgtttcagcagcatctgctgacagcacctgtcatgtcctcggccagagtcgcaggaccctggtgtcctccgctcggctagagaggcccttcgaatgggcccaggactgcctggccatgtgatcagttcctccgctcagccattgttttcccattaaaacagagtgacaatcagcccctgccagctcggaggagtctttgtaggtttgaagttaaggagaagcaaagcgcttgggtcacttgacttcccccagatgagcgcagaacccgtgaaggcggtttcatgcttccctgggctggcggaacgcaggcttctctccccccatggaggggccgctctcagcctttccaagacgagaatctgtcagggaagatggtctttgtgtgccccaccctggccagtccctgcccggggacagggcatgcctgggcctggtccaggtgaggaaagatgcccgtccccgctctgcccccagcagcctcctgccagggactgaccatccaaggctctcgagggagctcccaatggccaggctgacccctgcctagtgatgagctggggctcctgcactctgagcccagctcagcccaggctctggggattcggaatagtagacaccagcggaagcaggactgccgctgactctgtacttgggtgcacgcggaacccacggctgtgagttgccatactctccctgcccccccgacatctcctggggctgggaagaggcacagaccgggtgactgcgagggcctgatggcggcgcaggcgttcgggccaggcagctggcgcctgctctgacggcaccctctagtgaccggtggccacggctgaagcggcgcccgggaacacgggctgggcctcccatcctggggaccatggcct

SEQ ID NO: 68294 - DNA, 1003 bp, Homo sapiens
ctgggaaatccactcaaaggaacaaggcaatgtctctcattctatttcccagttccaaattccaggtgcttgtctggagtgaagctacccgttactttctcccagcttttctccacccagcatgtctcctgcccatgcagctgaagacagtggggcaacctcaggagaagcagacctttccatgcccaagttcatctcctgagcaacagtgacacctagaaaatgaggactttggaagtcacccaaaagatggtggctactttatggagtcctgaagatacacagccaccactcctaaaggcaaagaaagaaaacacgaatgtaggtcagggatagagtggaaccctggtcatcggggtttttagcctcatcgtgggaaaggtggtaaaggaggatgatggcatctccatccctagaggccaagaattgaaatatcattgtcaaggattagaaacaattcagcaaagaggccacaaaaagggcctgctgactcccagaagacctctttaaaccccaggggaggcaaatacttgctgatggagtctgggccgtttccatattttaaagaagacctgcctctggggcaaatgtcagcacagagaggactgggaggagaatggaggcaagaaaagggcatattttgactccctctgtgcctcttcccagttcatggaaggatgtgttcagcttacccacccacagtgaccagtgtggtggagccgctgacatctcaaggatctatttgggaaggtgagaagagtactcattccatctgggggtgttgttccagccacatcagcctacctggtgggatgtgggggtgtctgccaccctgtcccccctctgctgatgtccctcccctcaggctgtccaggtgccacctgacacaggctgctgtgcaaagacaggcggggaagcccaaacctcactcccagggaggccctcagccgccagagtccaggttctccagaggctacgatttgaggaggttgagggggaagac

SEQ ID NO: 68295 - DNA, 1161 bp, Homo sapiens
gtcagtgggctggtaggataggttcgaggtggacacaagctgtcacaagcagaaaccattttctcaggaccaagctcagggaggaatggtttatcacagtctgttaactctttcggtcactcttttttttttttttctaccgttctgtaactatattgatctctgtctccccttctcctcatcacctcccaacaccttactcccccttcaaaggtggactgtcttgcatcttaaactcttttgttcagggtcacgtgatcttttacagttcttagacctggtagcacttaatacaaccaggtacctcaccttctggtcccatttctaaaggatgtccagcttccccatgagtgtggtgcagtaactcttcaggagcactgtttgagcccagaatcagaaccctgctaaggcggtcctgtttgcttctgtacctgcaggggaggtcatcaaggcttgggacattgccatagccaccatgaaggtgggggaggtgtgccacatcacctgcaaaccagaatatgcctacggttcagcaggcagtcctccaaagattccccccaatgccacgcttgtatttgaggtgagtgtttggtcactgagatccaggctaagagccaggccttatctcagcccaatgcctggctgccctccagcccttcctgcttcttggagacaatgtagccaaggctgagggtctggccttatgggaggagaaatgcagagggctctgctgctgctagtaatggaagtaatagaagcttcgggtgggaagaggcaggcacaagcccctctccagactcaaagcatggtcagggttaaggcatctttatctccagagcggtacccagaagaatactgaaaggagtcgggatgtcagaaactatgtcccgttataaatggcagtacagaatattggtgctctagagaccagaagagggagcagtagctcccctgtgggtcaagggctgagaaaaggcttcactgaggagatagaacttgacattgttcaatctgaaaatggttgagccaatccgtgggcccttgaatactgagaaactgctgagagatgttgggtaatcatttctaatacctaccaggttgggcttatcaggtagtgtgaattaggattatctgggacgcgtcctgatatgtccgtgttag

SEQ ID NO: 68296 - DNA, 3001 bp, Homo sapiens
gcccatgagttagcatgggaaggaattgtgtcacatcttgtcccacaggtggagttgtttgagtttaagggagaagatctgacggaagaggaagatggcggaatcattcgcagaatacagactcgcggtgaaggctatgctaagcccaatgagggtgctatcgtggagggtgagacagtacagtctgggctttcaattctcattctgatatttaggccttgtgtggctttgggcaagacacttccgttctccgagcctatcttcttgtccataaaatgaggggttggaccatattctcttcatatcactccagatttgagaacacaggagaatcttgggatgatgggggtgatgcagggaggctgatggcatccttcctcagtcacctgccctcttacaactctggtacactgcctctctttcatgccagttgcactggaagggtactacaaggacaagctctttgaccagcgggagctccgctttgagattggcgagggggagaacctggatctgccttatggtctggagagggccattcagcgcatggagaaaggagaacattccatcgtgtacctcaagcccaggtgaggggtgggcacttcgtagggtaggcaggcaggcaaaccaagatcaaagatataaaatgaattgtagaaccagctgtttgtatcctttttaactctggccacaccaaacatacaccattatgatatcctcagtgtacttagaagtatggcccaattgtctacatctccttggatctaagcccagtcttttcagtcatagttgctacagattctctcctctgccatcaagattttcctctcccattaattcatttcagtcattactgaaacagctactacatgccaggcactgctgaaaattcctatagggcttcagagactaatagaacattgtttctgccttctaattctagctcattgtttagtgaggtgctatttaaattagtaatcacactgctgcctggctgtaagttattagaagggtatgaaggatgctgagggaccatctgacagtgtgaagaggccagggaagatttgccaaacatttgaaccaagtctcaagggatgggaaggtactttccaggaaatggacaggaagccttttcagcctggagcaggttaagtgttgccaagatgatacatagtgtttttcacccctccagctatgcttttggcagtgttgggaaggaaaagttccaaatcccaccaaatgctgagctgaaatatgaattacacctcaagagttttgaaaaggtaagtttgctcagggtcttcccatctaaagtcaagttccaccctgtacgtgactctggggtagctgacaactttgtttctctcctggggtgtggcaggccaaggagtcttgggagatgaattcagaagagaagctggaacagagcaccatagtgaaagagcggggcactgtgtacttcaaggtgagccaacagtcattgtcctaaggacactcccaggaagagttgctctgagcctccccttcccttggtgactgagatcattttctgccaagaagtggacaggttggcacctgccatcttcacttcatatatgtgagcttgctggccttgccagtgggaagggtgggagcaggaacctcttgtggccatgtgtcactgatgtctgcagggtataagagcctagtaccactgaaactgtgccaggtgcctgagcctctctcccattccaggaaggtaaatacaagcaagctttactacagtataagaagatcgtgtcttggctggaatatgagtctagtttttccaatgaggaagcacagaaagcacaggcccttcgactggcctctcacctcaacctggccatgtgtcatctgaaactacaggccttctctgctgccattgaaagctgtaacaaggtgaggccccctcagaggtcatggaagcagcattcacaggcagagttgggtgagctgccagcatgtctgaaacttccccttggtgactagggcagggatagcagggtggatcagtgggagctctgaggttacagaccaaaggcacggatgcaagtattcatagcaagaaccttagctttggtgggaagcagttggcaagaaggaggaggacacggaatgggaagaatcacataaagagttttcttccaccttggttcttagcctctccgcttacctacttgctttattctaaagtgaatgttaatgtctgaagtctttatttcatccaaagacctgctgtcttccctctctgcctgttggattaaatgaggtccctggattgttccatttaatgcctcaggccttgttcttcctggggtgcagccagccacttgcattcctcctcatcctcctgaggggtacctttggaacccagtctaggccagatgagctacaagccctgagctcccacaatgtggcttcctctctgcattctttaggccctagaactggacagcaacaacgagaagggcctcttccgccggggagaggcccacctggccgtgaatgactttgaactggcacgggctgatttccagaaggtcctgcagctctaccccaacaacaaagccgccaagacccagctggctgtgtgccagcagcggatccgaaggcagcttgcccgggagaagaagctctatgccaatatgtttgagaggctggctgaggaggagaacaaggtgaggattggggtggggaacagttggaatagcatccctccacttaacctggctactgtgggctctttgtgcctttggttgtctgtgccaatcccggaaaccagaagttgccttttccctggagcattaaggagcacgtgttcctgctgttggggccagtgttctgtgatcagtgcgggaaacctacccacaagccccagaagttgggttggttgccctgagtgtaattcccgatttatgttttcttgtgggccaggcgccgtggctcacacctgcaatcccagcactttgcagagccaaag

SEQ ID NO: 68297 - DNA, 1413 bp, Homo sapiens
aagtgatcctcttgtctcagcctcccgagtagctgggactacaggtgcatgccaccacgcccaggtaatttttgtaatttttgttgagatgaggtttcaccatgttgcccaggctgatctcaaacttctgggctcaagcaatctgaccacctcagcctcccaaagtgctgggattacaggcataagccaccaggcttggcctatacaggtatagctttaggacagatgtaggagaatgggtgtatctgtgtaattctgctggaaattaagtgtgtgttttttcacttgggaagtcagcccgtttgctgttcatcttccttgcaggccaaggcagaggcttcctcaggagaccatcccactgacacagagatgaaggaggagcagaagagcaacacggcagggagccagtctcaggtggagacagaagcatagcccctctccaccagccctactcctgcggctgcctgccccccagtctccccactccaccctgttagttttgtaaaaactgaagaattttgagtgaattagacctttatttttctatctggttggatggtggctttaggggaagggggaaaggtgtaggctgggggattgaggtggggaatcattttagctggtgtcagcccctcttcccttcctccattgcacatgaacatatgtccatccatatatattcatcagaatgttaatttattttgctccctctgttaggtccattttctaagggtagaagaggcaagtggtagggatgaggtctgataagaacccagggtggagagggagactcctgggcagccgttttcctcatcctttccctctcccagtccatttccaaatgtggcctccatgtgggtgctagggacatgggaaaaaccactgctatgccatttcttctctctgttcccttcctcacccccgacggtgtggctgatgatgtcttctggtgtcatggtgaccaccccctgttccctgttctggtatttcccctgtcagtttcccctctcggccaggttgtgtcccaaaatcccctcagcctcttctctgcacgttgctgaaggtccaggcttgcctcaagttccatgcttgagcaataaagtggaaacaataaaacctgggtgtcagacaaccctttctgttcagccttggagtggtgggtatgggtgggtacataatgggtagtagcacaatcaaggggtcacccacttagttccagttgagcttaaataagtgagcatctcatgtagatgccatagttgggcaggaagcagccccaccatgcatggcttcctgagcactgcacaggctgccgctgggatttgtgtctatggcttcgcccaaggttcccagcactccctccctccagcaacctggcagttttagtgcctctggttttcttccctgacactt

SEQ ID NO: 68298 - DNA, 1221 bp, Homo sapiens
aaggatgcagagaactgtgactgtgccactgcacgccagcctgggcaagagagtgagaccatctcttttttaaaaaagtccctgtgtaactgctttcttactgggcttacctcacatcacagccctgtgtttgtggtttgtgtctgggtcctcttggtatttcaaaagtagtagattcttacgcctgcagccaacaataatcactaactcaagcatttatggagtaagcctagcactgtactgacagcatcacatgagtgaaactgaatccttgcaaccatcctacaaagaaggtataactttaataaccctatttacagataagaaaaccaagactcagaagttaaatggaaaggtgaggtctctgaactaatccagactctcccatgaggttcctttggcaagtcctgggcttctgtcctcatctgcaaaatcgaaagcattcctgaggtttcttccagctctgcatcctgtaggattccaagaatgtaaaactgcatgtaaccgtggaacatctagagataagtcttagtttatgtaacattaaaactgtctagtgaggatgttttgttaaaatgcctacaagtctttcagcctaaaaataatcctgccacatactcaagtctgccctgggtcagtgctacaagttcatttcccagtcagttgtccctgcctaccgacacttaaatctttctatatgcagagaaatgtgcctgaagaaagaaaagttagtagcaagcagtactgtgagcttttaacaagctttgcaagtggtctctagaaaaatttaaaatagggtttatcttgccctagtgctggttctaacatcgagttccatgaattttatctcccaagtatttctactccctccatactagtaccgctccctcccatcaccatgcactccagcctgctctcctgcaaatcccaggctcctatctgggattccctcctgcccctcctgcagttcactctgtactgcatcccaatcgtgtccctccgagtacttaaatcactttcaatgattacccatcccatttaggctaaagaatccttatcatggcccacaaaaccctgcaaggcttggcaaagtgcacttaacacttgccctcactctatgccagcttcgccaccctgagggtgaatggaggactgtattccatttccattggagaaaaaatatgtgaaaggcactttatgcaggactagtaaagtgtagta

SEQ ID NO: 68299 - DNA, 1042 bp, Homo sapiens
aggctgaggcaggagaactgcttgaacctgggaggcagaggttgcagtgagccgagattgcgccactgcactacagcctgggcaacagagcgagactctgtctcaaaaaaaaataaaaataaaaataaaaaaaaaaaagataaaaaggaacagcccctggtccaaaatcccagataaggtagaatcattttttttttttttttgaaacaccaagtgcgagtcagcctgggtttttagacctaaatctaaaaatgtattgaacacctgtatgatttcataaatattgccctgattgacgaggcaccccaaagaaaggcagaactggattcaacatggaaagaaagtatcccaagaagccagccatgagagtgacagtcccatctgtgctacaagagtaaggctactgaggttgagatgcaagagctttgtgctggggggccacaagacagagcagatccggaatccaggcaaccttcacttccagcctgaagactctcctacgaactatgatagtaaatgatggagaggccctagggtttgggatcaaacaattctggtttgagcacgcaccccgccccacaatccttccttctgccattttacttaatcttgctgaacctgttttcctcagccaaaaaaaaaaaaagctcgcatagtggctgaactaattatgtgaaatatgtgaaatgtgctttgcagcaggtggcttttaaactattgaccagaaaacacatacactgaaaaaaaaaattttttttacattataagccagtatacacatataagtatatacaattgaaacaagagtttcacaaaaactgtacttaccttactacctgggagtcacttggtatattactattgtatttaattttttatatgctgattgcaactcactacattgttttcactcctaatgggtagttttttaaaaacacttttcaaaaccatgcaattatcagttattacgaagattagtaagattctcaggaatggtctgatggctaggaatcttcattgccagggaaacaaaggaaaaagg

SEQ ID NO: 68300 - DNA, 3360 bp, Homo sapiens
ttaaagtatagtcaaaaatgggggcaataatttgagtaagtctagaaatgtgatagcctagctctattaaatacagagtttctattttattttaagtgcaggttgtcttaaccgcctcaggtcttcatgttgctgtctgggtaaaccaaacctacagcacagtaacgccgttaataaagaccatcaccatggttcatatggcgaaagtcttcagtgagcgatggtgattagaaaacctgcccgctcctcctgcttcacagagatcagggagtactggtctcccttagcgtctccctgagcctccctttctctcttacagctgacttgcgttggggttggagacgtgtgtaataaaggaaaggtaagaactataggggaccttccttggttcttagctcacagtggaaatcagttgaaggttaaaggcttcagctctgacctctgtgatctgatgatcaggcttgtttccaaaactccctccccagtccatctctactatacctctgtttgtcctagaacctgttggtggcagtgagtgctgaaggctggtttcatttgtttgacctgacacctgccaaggtgttggatgcttctgggcaccacgagacactaatcggagaggagcagcgtccagtcttcaagcagcacatccctgccaacaccaaggtcatgctgatcagcgacatcggtgggcatgcctacctttgcaggcagccaggagagtaggagtcagtggatactagagcatatcccaagggattggggtgagagggagaatccgtattcatgtatgcatttgttatgtgctgagctcccatgataagccaggcatcactcaaggcactggaattgccatagtgaataaatagacaaaaattgctgccctcctgggccttattatgaagaaacagaaaagaaacaatataggctaggtgtgctgcctctcgcctgtgataccaacgctttgggaggctgagatgggaggatcacttgaggccaggagttccaggctgtagtgagctatgatctcaccactgcactccactccagcgtgggaccctgtctctatttaaaaaaggaaaagaaaagaaaaactatacattttgtaagataattaagtagtatattagaaggtagtaagtacacggccagacgtgatggctcatccctataatcccacgactttgggaggccaaggcaggcagatcacttgagttcaggagtttgagaccagcctggcccacacggtgaaactctgtccctactaaaaatacaaaaagtagccaggcatggtggcaggcacctgttatcccagctactcaggagactgaggcaggagaatcgcttgaacccgggagacggatgttgcagtgacccaggatcatgccactgcactctagcctaggcaacagactccgtctccaaaaaaaaaaagaaaataagtgcagccgaccacggtggttcacgcctgtaatcccagcacttcgagagcactttgagaggctaaggcaggcggatcccttaagctcaggtgttcgagaccagcctgaccaacatagtgaaaccccgtctccagtaaaaatacaaaaattgggctgggcacggtggctcacgcctgtaatcccaacactttgggaagccgaggagggcagaccacaaggtcaggagaccgagaccatcctggctaacacagtgaaaccccgtctctactaaaaatacaaaaaaaaaattaaccgggcatggtggtgggcacctgtagtcccagctccttgggaggctgaggcaggagaatggcatgaacccaggaggcagagcttgcagtaagccgaaatcgcgccactgcactccagcctaggcgagagagcgagactccgtctcaaaaaaaaaaaaaatgagctgagcgtggtggcatatgcctgtaatcccagctactctagaggccgaggcaggagaattgcttgagcccggaaggtggaggttacagtgagccaagattgtgccactgcactccagcctgggtgacaaagactctgtctcaaaaaaaaaaaaatatatagtaagtgcaatggagaaaataattcacagaaagagctagagtgtcgaggtagaggtagcaattttaaatggagatgttagggaaatcctcactgagaaggtaacatttggtgaaaaaaaaaaaaagtggcaagcaagggaaccatccagatagggggcttgtaggtggtgggagatacgtgggatgaattgggacactttgagttgcatgtttgagaagtaatatgaaggcagagagcggataggagctgcggaacagatggaccaaatggacgggcaagatgccgcaaacacaggcaggggcgggggcagactgagggtgaagtgagtagcaccgcagatcgggtgtgaagccgcactggctggaaggtgccactgttagcagaggagcgggggctgctcgtgggactccagagcccatcttgtctttcatgcccacagatggagatgggtgtcgtgagctggtggtgggctacacagaccgtgtggtgcgagctttccgctgggaggagctaggtgagggtcctgaacatctgacagggcagctggtgtccctcaagaaatggatgctggagggtcaggtaagaagctgactctggggaacaaggccccagggagctgggaggaaggtctcctggaggaggtagtgggagagcagtcatgggacagggccagggtggggagaagtgaaaagtcaccttgtcaagagagatccaaagaccatttcaaatcaggggcttaggggaaattgctagtaacaggcaaagagaagggcatgttgggctaagaatgaggagtgtgaaggtaggtgtggagtgggccgcatcaggacctagaccccagctgggacatgcacaggggaaagcatgtggtctgtgtggagaggacggtgccaggcaggagccctggaaactcgaaatccttcctcctgctgctacccttgaagcccagagggctgttcccaggactgctgccctgcccctgcccccgcccccgcccacccaccgccccctgccgttctctgcagggacccacttccttctctctccgtctccctttaatcccattccctggtgcaggtggacagcctctcagtgactctggggccactgggtcttcctgaactgatggtgtctcagccaggttgtgcgtatgcaattctactgtgtacctggaaaaaggacactgggtcccctcctgcctctgaagggcccacggatggtagtaggtaagggggtacaggccagtggatggtgtgggggtgcatggaagcaggatgggctcccagatgccacatggtagtaa

SEQ ID NO: 68301 - DNA, 1023 bp, Homo sapiens
gtatctgtggtattggcaggatagggaatatgcattacagaaatgcaggatttgactctgggcatgaaagatggcagcagccctagggtgaccgtgaactatagacctcgcagtcttttcggtgaaagaagagacaagttgaccctctgcccatttccttatggacctcacccatcatgccagcagggtcataggaccctggccttgttccaaatcatctgggacatgacccactccccactgtcactgtgttgaaaacagagacttgtttgtgtggccccaacacccataaggaaaccaggctttaggcccaggggagcagtggaggtaagggctccaccccatcttaagctctgtcttccgtggcacaattccaagttcttgacgttagtaattgttaaaggaatggcaaactgttttgttttgaaggatctttctacagtctggtcttacccatgttcctagcaaccctgagatgattttcttccatttaccaaagcagccgggtcagtgctttctcacgttgccgtattcttcaggtattagtcagcttcagaagccctgctcccatttttccacccacccattcccccataaaacagcttattgtctccaagacaatagacatttaaaatgtgatgcgggtttatgatccagaccacaatcagaattatatcttgggtcatttatgtgccgtctgttcttgattctctatgctctaaatcggtgtttttcaaactgtggttgcagtcctttggtggattatggccagcattttttaaataggtagaatagaataaagtaaaatagaaaatagcagagtacattgctctcagtgtaggtaagtattgttttgttagtcatatgtgcatgtgtgtactgagtgccatgtaaaatgtattcctgctgtggtaagctgtggtcgaggagtttgaaagccattgctttcaaattcctctcaattatactgaccctagtcagatgggtcagcctgggcaagggcccacatttacatttcctttc

SEQ ID NO: 68302 - DNA, 1076 bp, Homo sapiens
aacaaaaggaccggaaaagtcgaggggtgcggtggctcacgcctgtaatcccagcactttgggaggccgaggtggatggatcacctgaggtcaggagtttgagaccagcctgaccaacctggagaaaccccatctctactaaaaatacaaaattagccaagtgtggtagtgtgggcctatagtcccagctacttaggaggctgaggcaggagaatcgcttgaacccaggaggcagaggctgcagtgacacaagatcatgccactgcactccagcctgggtgacagagcgagactctgtctcaaaaaaaatttttttttttaaaaaaaggacgtgagtaacatgccttagaggttgggagggaggaaaggctgtttcctactggggaaatcagaaaaggtttcaaggaggaggtaacatctgagctgggcttttgcttgcagaatgcggacccagaatgattggagagcaagaagagcaatccacatagaagaagcacagagcaaagacggtggccgaggaccagtgggaatttattgcgaatgttcaatagtgactgagtggttaagtggttccagagattacagggccaatgccttagaacacatgagttttttccagaattacgttatccatgcacacacaccatttgtctgtgtagagcacactgaggagtacttacttaatttaagtattgtattttgaccaaggaaggggggcagagtaatggtggtgacagatggagttgcaccgaggagacatggcttggggcagggaggaaggaggtagaggatcctggttaggtccaggctagggagagaggtgccctttctccctccctccctctcccatcagggcagagcagaaaggagagcaggtgaagtgagtgcaggcagggttgttaatgaaagtgtgtccctgggaggcctctcaccttgcagttgaccagaagagctggaatctctgtcctgctggtcttcctcctgctctcctggccatgaatcaggtcctgcatccggggaggctccccctgaagccaattcgggtttccctccaccaggcgtctttggatcacact

SEQ ID NO: 68303 - DNA, 1061 bp, Homo sapiens
tagtatgcttgggggaagttttgtctcaaacttacatttttttttaactaggagggttttttttttcttcccctctgacctcatccttcaatgggcttcagatcccagggttgatggtatgatgaaaaacagtaagaaactcaagaactaggccaggcgtggtggctcacatctgtactcccagcactttgggaggccgaggtgggtggatcacttgaggtcaggagttcgagaccagcctggccaacatggtgaaaccctatttctactaaaaatacaaaaattagctagatgtattggcatgtgcctgtagtcccagctactcgggaggctgaagtgtgatagtcacctgaacctagaaggcagaggttgcaatgagccaagatcacaccactgcactccagtctggttgacagagcaagactctgtctcaaaaaaaaaaaccaaacaaaaaaaactcttaagaactaggatgctgggagtcatctttgacctgtccctcatctacaaccactcccattccatccagtcacttcccaaattctataagttttgcctcctgtgtagaatcaatctgtccctcctttccttctctctcttctttcttttctttctttttcttttctttcaagatgggatcttgctatgctgcccagactggactctaattccttggctcaaggcattctctagcctcagcctcctgagcagctgggaccaaaagcatatgccacagtacctggcctccatccttcctttctgttactgcctgtgttccagactccccacagctctctcggatccttggaacaccttcttaagttcataacctgtctccagacctgttacctttcaaatacatctgcttggagcttcagcctggaagctaaaaaccttgctactccaaaatgtggtcctcagatcagcaactttaacatcatttcgaagcctcttaaaaatgcactctcatacctaccgaatcagatgtttcattgtgacaagatccccaggtgattcatgtgcaggttaaagtttgagaagcaccaaagtaaaacatgaaa

SEQ ID NO: 68304 - DNA, 1050 bp, Homo sapiens
caagtgatccctagccaccaattctttcttttttattttttatttttctgagacagagtctcactcaggctggagtgtagtggcgcaatgttggctcactgcagccttcgtctcccgggttcgagcaattctcctgtctcagcctcctgagtagctgggactacaggcgtgtgccaccacacccagctaattttgtatttttagtagagacgaggtttcaccatgttggccaggctggtcttgaactcctgacctcaggagatccacccgcctcgccctcccaaagtgctaggattacaggtgtgagccactgcacccggcctgctagccaccaattctgatggacacacctgggcatctgatgaggcagctaagtggggtgttggattattttccctctagcagatggtgaggcagcaggctgcactatcaacaatagcctatccaacatccagtggcttcgaaagatgagttctgatggactgggctcccgcagcatcaagcaagagatggaggaaaaggagaattgtcacctggagcagcgacaggttaaggtgaattgttccgtccctcactaaagaaatcagatccagtgtagggaattcctaggtagggaaatggatcaagtggcctgatggaccagaatttccaagttctggtattagctctccacttcatgctattctgcataacttttgagctatttttctgcctgggatcttttctctcccatctgtgaaatttccttgagggcagagtcccttggtcactctgtattccagccagcactgggtttagtattttgtccttagtaggtattcaggaaatgattaagaggtcttcattttgggaatccacctgaactttaaagatgcttcccaacagtatgaacagtatgaattgaatagaatacaacaagttaattttattagaagatataatattaatagcagataaagtcagttatatatatacacgtatatatattttttttttttaagacagcgtcttgctctgttgcccaggctggagcgcaatggtgcagtcatg

SEQ ID NO: 68305 - DNA, 1570 bp, Homo sapiens
cggggaggggccggaggggtccccgccgcgtgggtgggcgagccgagggagagtttggggacgcgcggaagcggcgtgacaggcccgggtccctgggcccgcttttcctgccgcgctggtcacgccaggcgacacgcccccgcttcccctcaggctcctctgctccccttttcaaagctcggctttagttgatttcctcactgggggaaatcgtaccccattttcccacagtgaacgatcgtctgctccccccgattagactaagttcctttgagggctgcgtattatctccgctttcttccatcttgaaaaaaaatgtcggcaccatgaaccctacctcagcgcgaaacctgtcttttgcccctcccgaagccaagccttcggatataatagaccgtagtgctttatttattgacttagtcaaccagtctagttgagcaactgctgtgcgccaggcaccgctaggccctgaagatacaatggcagacaaggttctttccttcccctgggctcacagcccaatcctggaagaggggcacagacattttaatcaaataaacaaatgtgggctgggcatagtggctcacgcctgtaatcccagcactttaggaggccgaggcgggtggatcacttgaggtcacgagttcgagaccagcctggcaacatagcgaaaccgcttctctactaaaaattagccgggcgtggtggtgcgtgcctgtagtcccagctactctggaggctgaggtggaaggatcacctgaggccgagaggtggaggctatggtaagccatgatcacaccactgcactccagcctgggcgacagagggagacaccgtctccaaaacaaacaaatgttgaattattgctgtaaattgaaacattagaggttaatgatactttgagtatttacaataacgagatcttgagaggtaggacaggaaaggcttttgtaatgagagcttggtgtgagatctgatgccttttacaaagaaaggagggaactcctctaagcagagggaatcaggcgtgcaaaggctggatggcaggaggaagcacagtgagtacaaaggctgagaaatatctgaggggtttgagctaatcgacctgaatggagtgtggtgtgagttgaagctggagccggaggaagcagagccttagccataccgagaagttttgtgcttatccaagaattaaaggaaaccagtcataagctttaagcagaagtgaatccaggtcagatttgcattttaaaaggtccctctatagcggggattgctagagtggattagggcagaacagttggatgttgcaatactccaggcaagaactgctggagcttgaaaaagggtggcagggagagagagagaggaagagaaagaaggagacagagagagtaaaaaaggggcattaagaaaacatgtttaagaggtaaagttgacagggcttgatggtgggttggatgggaggtagaagtgtcaagattttcagctgcataactgaaggaataatgacactattccctgaccaagggccctggaagataatcactttggccaagggacgggcggg

SEQ ID NO: 68306 - DNA, 1271 bp, Homo sapiens
tttgtttgtttgtttgagacagagtctagctctgctgcccaggctggagtgcagttgcgcaatctcagctcattgcaacctccatctcctgggttcaagtgatcctcagcctcctgagtagctgggactacaggcatgtgccaccacgcccagctagtttttgtatttttagtagaggtgggattttgccatgttggccaggctggccttgaactcctggcctaaagtgatcagcctgcctcagcctcccaaagtgctgggattagaggcgtgagccaccactcccagcctaacttttgtatttttagtagagacgaggtttcaccatgttggccagcctggtctcaaactcctgacctcaggtgatccgcctgcctcagcctcccaaagtgctgggattacaggcgtaagccccctcacccagccatgtcacctatttttttttttaacctcagcctgacaccatgtttatcctgagttcttgccatttatcttctcatactgtgtccagatacattgaatttgtaattcccagaattcacaatactccgtctcgtctccatgcctttgtgtacactgttcctcaggctggagtgccctccttgcttttttgtttcttctatgcctttcatacctaggtcaggtatctccctttccagaaagcctcctttggaatgaatggaaccatactgtattctcatacagtgttgtaaatgtctgtttccctttgctagactttcagctcctcgaaacagggatgacctctgtatcactacaagtgctttgcactcagttaatgattgttgaataaatggttattcatctttaaattcccagcacccagcatgacacttagcacatactcaataaatgttcgttagatgaatgttgaatatgaatattgtgttttgcttggtggttgtaggtataggaggctgtgctccccaaagccttgaagtttatggtagaattggctggcagaggatcaggaagaactggggaatcatctgaattatttgctcccagcttttgtttcttctctacaggcatgggttggaattggagcctatcccccaacccgaaggctaacagcatcatgtggttactaactgttcctcattcaccggttgatgcctcccagaaaaaaacgccgccagccttcccagaaagccccgctgctgttccaccaacaaccactggagggccccaaacacagctgtgcatctacacagcttcccatcactcacactcgacaggtgcccagcaagccc

SEQ ID NO: 68307 - DNA, 1065 bp, Homo sapiens
acccccgaggacaagtatggaataaaggtcacatggaggagacgacagcacctgcttgcttacctcagggagagagggaagctgagcagaagccaattccttgtgaaaagctgactgccatcagtaatctcaatagaaaagagatatgttttctggagtcataaaggaattcaattcctagggtttttgtttttgtttttgagatgtaatattgctctgttgcccaggctggagtgcagtggtatgatctcaccttactgcaaccaccacttcctgggttcaagcgattctcctgcctcagcctccccagtagctgggattacaggcaccagccaccatgcctggctaatttttttgtatttttagtagagatgtggtttctccatgttggccaggctggtctcaaaatcctgacctcaagtcatctgctggccttgacctcacaaagtgctggcccagccgagatttgttttctaagatactttgtgtcatgaacagttcagtttagtgtcatgaactattcacttcatatttttcttgtattaactgtttaaatttttaaaatatcttgtagtaactctttaaaatgtatgtaagtaaatggctgcagaaagtttttttagagaatcctgcttccatcagtaatacagcaatattaccccatccactaatggtctttgtttccttaaccactactcattaatccttaatcacctcattcaaactaattcattctgcatttttgagtaccaactcttgtcaggctcagtggcagcttctacgacctgatggatggaaaaaaatcaaactctgtgactctatggttgactgccacctctgcaaccttgactcatctgctgaaaaggcaagaagaagaaagggcagcaagccctgttttagggactacataagatgaggggagataagggggacatagatgagttctttaggattgcgtgtgttttgagtttttgtttctaactgaagaaatctgtcaatattaaatagggtgggaaaatggtttcttagaataactgttcaactgtgtgtaaataaggaaagttt

SEQ ID NO: 68308 - DNA, 1079 bp, Homo sapiens
atgaccccaataaaggttcctggcagctctagcctgcggagtttatgacattcccagcaagctgctctctattctacagaaacctggtgattaactggcctatttggaggattctttctgtatcataaataggatcccagcactttgggaggccgaggcaggagaatcacttgagcctaggtgtttgagaccagcttgagcaacatagtgagaccctatcttcacaaaaagtaaaatattagccaggcgtggtggcgcttgcctgtagtcccagctactcaggaggctgaggtgggaggatcacttgagcctgggacgggaggtcaaggctgcagtgagctgtggtcattccactaggctccagccagggcgacagagcaaaaccccatctaagaaaaggaagaaaaagaaaaagatttccctgagtgcaaccacattatattctaacatgttgatttctttctgtttctagctgattatatagtcatgcagtttggacgtgtggcagatgacgtgttcacactggattacaactacccactttgtgcagtacaggcctttggcatcggtctttctagctttgacagtaagctggcgtgtgaatgagagaacagtcaggcagggagcccttctccccacagagctttcaggagcagacagtggcctccccttcccctccctgccccaggacttaaagagcaatagtttgccccttttggaatgatctctgaatatataaaacacacacacaaagagcaatagtttgccccttttggaacgacccctgaatatataaaacacacacacgaagagcaatagtttgccccttttggaacgacccctgaatatataaaacacacacgaagagcaatagtttgccccttttggaacgacccctgaatatataaaacacacacacgaagagcaatagtttgccccttttggaacgacccctgaatatataaaacacacacacaccccgcgcactctcactccttttccaggtttcatagacttggtgagggatcacagcttagcatgggtgagagatgatttaaagcacagggagattcttgtca

SEQ ID NO: 68309 - DNA, 1634 bp, Homo sapiens
gggaggaggctgggaagcagacctctggctggcctgggaggaggagagggaggggtggatttcttcagcagacacgctgtgtctgtggacccgccacgaaacccaggggagtcggcaggggcgggagtaggaggccaaggcccatcgggaccactgaaatccagaccaccaggacctaccacacagaccactggacccagtgcagggatccggggcggtggcctgcccgaggctgacacctcccctcctctctctcccgcagtgtgaagcctttctctcagcaaacctatgctgtccagcctccgctgcctctgccaggtgggtgggcgctgcgtggccccctttctatcgcagccatgtggctcctgcctctgggtccaggcccccggcagccgaacgcctgcgtgtccctgttagatgctgccccgtcatgcacactgaccacacgtcctagtccctggccacaccccattcctttcccccagcatgcacacctcagccgtgtgccaagccccttcatgcccctcgggttgccttgctcctgtcccctcaaagctgtgctcagggcttgtggggcacgtgcagttccaagggcagtgcccgtgccctggcggctgccccacttggccggccttgttactgcagtgtgcctcacacacctggtcctgggagggccgaggggtgtctagctcaccagcctggagcccctcccgagaagagggacccttgtgggagaagacctggtggaggcagccagcggtgctgacaggagcccccaccccgccctctcactgacaggctctgctctgtcctcgtctctttctcaggaggggccctcaccacctcccactctgtaggacaagaccagctcctcactcttaaactgccctttctggtgtggagtctgcctgcccggccccttggctttccctgccaccaagagcagccctgctgccttctgtcccccaggtcctgaaggctgctttctctcgttcacacatcaaaacaaagtcacagcgtcaggtcccgtccaccctctgtctcatgccagtcttctgtccacactgaccatgtcttcactccaggcctgctggcttttgcctgcgttcctgcagcagcctctccaccggctcgctgtcccgtctcacctcctctcgtcaccctgtcactcaccagagcttcagtctcacggtgttgcttccaggtttatggtgccttcctggccccctggtgccttcaggacacgatctaaactacagtaggactggagtaggttcatctgttagcaacgctggattgaggggctcttctgggccaggccctgttctgggagcgggggagacacatgtgatgcaaacaggaaacgtccccgtctctccgggatgatgccatattgtaatagtggattcatctggttatttccccgactggaacagaagttgcttgagggcaggaacttaacagtgcctgttctggaagcctctcggtcctgcagggccccagctgccctccagaatccagtcttgctcggcggttccatgcagagtgctgagtggcccgagttgtaccaggcgagcccctccccaccagggcagctccaggatgccctggcccaagcctggcactccctccac

SEQ ID NO: 68310 - DNA, 2722 bp, Homo sapiens
ggagtctgtgtgtgggtagcagccatggcatgccccttctggggccttattaacccttgtctttttctctcccacaggtggtcaccaacagagacacacaggagaccttgctgtgcattgcctatgtctttgaggtgtcagccagtgagcacggggctcagcaccacatctacaggctggtgaaagaatgagagactcggggagcagggaggggggaagagacgtgtgtgcaggaaacggggacgtggggaggggacctgcaggggcagccccctgaagtgccaagagagctgagaggagcagttgtgactctacccaggaacaaactgtgcctgaacctgaggtgcccaaccccaaataaacccaagatgctgtgtattttcagaggacctggtctggctgtgtgagcctcgggagggactgggggagcaagggggccgtctgggaggcaggccggaagcagtgctcagagacgtaccccgggcagttctgaagccagcgtcccaatggactcagccaggaacatcgccggaccctggaactgaagatgtgacagtccctgtgctacctctcaagcccctgcactgtggtgctggccacgccgtgaggcccgatgaatgcatgggccacgcacccacagccacgtgcgcccctgctgcactcccaggacggttcacacagagaggccccatcccctggggggtgggttttaggtgtggcggtgacagttgttggacggggacactgtcagaactctctggatagtttccgtccatctcaatggatgtggattccatgaccatcttccgtgaccacgttgggggcactggtttcaaatcaaaggaccctgaagcggggagggcaggaggcggcagggctgaggccggcctgaggagtctcggcgggaggttgggtgcaccagtgtcctcttggctgtggccaggaggttgatgagaggtctctggtgctccgctggtccccgagagccattggtgcttgtgaggcttgttcaaactctgtcccagccagggtgcctgttaggtggaggcctcctcagagccagcctgcaccatctaacttcttccctgaggggtagtttctgtgctccccgggggtggaggaggggagtggaccccaccctgagcctagacttagatatgcagctgaaggggttcctgggtttatttctcctgagaactggcatgggctctgagttttgccattcctggcttcggtcctagcattctaagctgcctgaccttgggcatttgtcaacctgtctgaaccttagtatcctttcctctctgtagagtgggaagagatggagtctgtgaagcgcctggtgcaagctgtactaatacacctaacaatgagctcctccctccctgcctccttgcctccctgcctccctccctcccatggggaggccagaatctggctgcttgctgccacctagtggctctttggggtcatcttccctcataggaaccacagatccagtagcctagagcagaaagggaaggaagattcaacctaggggtgtttatgtttaccgtgtgtctggcactcgtggagatagtgcatgggactacataagtaagacagcatcgaagaggtgtcttggagtgtggttaggagcgagggctctggagtcagacaagctacagactagctgagtgaccttggggcaagttatttcatttcactgtgcctcagtttccccatctgtaaaatttgtataacgataacctacctcgcgtatctacagtgcctagcatagtgccccacataaatgtgttcactaaatgtacgtcgttattaatcataggagcttgcagtctcactagggccgactggaaaactattaagtgatcctcaaagccacaggcgctcagagactggagagatcaaggtgcagaagactcagggaagggtagtcttgagggcagctgcccttaaagggtgggcagcatttagtgaagcagatggagggaagttgaccggcatcccagatgtggggaagaggccagcagcctagtctcctccacggcccagcccccactgtcttaccaaagaacagctttaaccaaacccctctgggcatcaggaccaccgctacacctcttgccaggctgcagagctatgcagtctggaggcccagctctcgtcagaagctggggcatgggctctaggggaacctggggtcggatgagcccctgagcaggtggcaggtgcctacatgtcccagtgtgggttcgtgtttgtgtaaggctctcctgcccccacccccaggcaccagcacagcctttgccttcactctctcccctcccctgtccctgggggattgaataagggaagctggggttggccgtccttctagcttgattggcagcaccagcgctgtgacggaaggatgtgttgtgccagcagcctcttggccgcaggacaaatgcacatttaaagagataacctttttgtgtcctggctgggaaagaggtcagtgcagatgtttttgggtccaggtgttggctgtgagttttcctttcctctatgaactgacctcagcagcctagtggacagtcacctccttacaggtgtaaaatccaagccagtcaaccatagcaggtggcagacttagctgccttccctgtggtgtggtgcagaccatgacccttgaggcaaatgggtgagctggccccacctcgcctgcagcctcctctga

SEQ ID NO: 68311 - DNA, 1100 bp, Homo sapiens
tgcgggcgcggtgagtgcggcccgggcggcgggcggcgaggcgggtctcgagagcgtgcggagtcgcgcggccttgagccggcgccgggcgggctgggcacccccaggccgagacccgagaagggggagcggccgggggcgcccacgggaggcagtgtgggcagggcggcggtgggacgagaggacgaggaacagagtaggcgccgtgcgggaagcgggccgggaaggggagggtgggtgcggggcccgggcaccgagcgaagtggggtcctccaggggatggctccgaggaagaccgtttcagaaagggagtaacccggggccggcaagggtttccgactgtgtgaccccgtgcaccgcttgggacagtccatacaaggaccccagagagggccagggggccttcgggcagggctgggatatggcctgcagccccccggcacccgcgaccgctccctgggccactgctggaagatcagcactccgagtgacaggactctggcacatcccgaagttggagatctagcccatctgtgcattcaagtttgggacttcaaaaaactttcttgtggtttttaaaaaaagatccaaacaagaaaccggcttgttgttgtaagagcaatatttgtacttgtacatcttggaactggagtcttggatctcctccctctttgaaaaatatacgagtcactgcttcatcttcccccaaatgcctgttttgtctggggaagcttgggctagtatgggatcccctgagctacctttttctcgcatcaccaaaacggggggtaagaaggcaggggcttacctgccttacctggtaactcttagttcagagacccagtctctcattatgtgcgcgtgcccttctgacctgcagctgtccttttccctggggtgactcaggtatttcctcctccaggaagctttcctggactagtggagaaaactgaagactcatgcgaggatccctatatatacctgccagctcccttctctttactgaaaatagccacagagaatgttgaatatatgctttgctatagagatacgcagccagcttgccatcataagtaatggggaggggaggagagggatta

SEQ ID NO: 68312 - DNA, 1053 bp, Homo sapiens
gcctcccaaagtgctgggattacaggcatgaaccaccgtacttagccccttcttctattttttttttttttttttagagacagggtcttgctttgttgcctgggctggagcacagggacacaagcagctcactgcagcctccaactcctgggctcaagtgatcctcccaccttagcctcccgagtagctgggactataggtacaggccccatgctcagataattaaaaaaattttttttttttttttggtagagacagggttgtgctatgttgcccaggctggtctctggtcttgaactcctggcctcaagcaattctcctaccttggcctcccaaagtgttgggattacaggcgtgagccaccacgcccagcccctttcctctatgttgagccttgtcttcacctggcaccacctatttgtgcaaccttgggcaatttacctcctctttccaactctctgttttggtggtatattggattagaaatattctagagtctcttccagcatcagataattaacagtgtaagatattggcagccactcaatcaattaggaagtgtgctttatataaaaaattctaaaattgtggttaaaaaaacactgaatgtaaaatcttttttttgttgttgttgtttttgagatggagtctcactctgtcgcccaggctggagtgcagtggcataatcacagctcactgcaacctccgcctcccgggttcaagcaattctctgcctcagcctccccagtagctgggactacaggcgcccgccatcaccctcggctaaattttgtattttttttagtagagacggggtttcaccatgttggccaggctggtcttgaactcctgacctcatgatccaccctcctcggccccaaaaagtgctgggattacaagcatgagccaccgcgcctggcaaatgtaaaatcttaagtgtacattttaaccattcttaaatgtacagttcagtagcattaagtctatttacattgttgtgcgacagctccagaaattaccttgtaaaactgaagctttaatattcttgaaaca

SEQ ID NO: 68313 - DNA, 1320 bp, Homo sapiens
tcccagctactcaggaggctgaggcaggaggattgcttaagcccagaaagttgaggctgtagtgagccatgatcgtaccactgcactccgggctgggtgacagagtgagaccctgtctcaagaagaaaagggtccgggcatggtgactcacacctgtaatgccagcgctttggaaagccaaggcaggcaaatcatgaggtcgagagttcgagatcagcttggccaacatggtgaaaccccatctctactaaaaatacaaaaattagccgggcttggtggtgcgcacctgtaataccagatactcgggaggctgaggcaggagaattgcttgaatctgggaggcggaggttgcagtgagccaatattggccactgcactccagcctgggcaacagagccaagactccatcttggaaaaaaaaaaatgtcagtatatacctgtgatgtgagtgccttccccttagatggcagggtaaaacctggacacggtacctgggaaccctgctgacggcctctcccctggccacctgccagtgtggagactgaggcttaggggcccaaagctctccgacaagccctgagggtggcagtgccagggacagtaggagaagatcctgcctcagcaagtccccagccccgtctcagggccaggctctacaggagggctcagaggggcagggtgcccagctgagtttgaatgaactgtgtctttccgggtgtgtgaacatgcaggatgacatgttttgttttagagaaaatgaggtagaggtctgggcttgcaattttccacttgtcttaatcctgggagattctaaacagctttgtttaaaaactggacatgcagattgcaaagacctgagtgaggaagagccattgggtcccccaggaaaacaattaggtttgaagccagagtttggatttgttcgaccattttgagtgctgtctgcagcatgtgggacctggaggcgcttacagcatcacccatggtgtgagtcactccaaattagcagccatttcaaattggcttccactgacttgctgctggggatgggtggggctgggggggaagctccaggcctggctgtcacccatcatccaggctgtggccggcagagaggggagggggctggaacaacctgtcttggctcagcctgcccccactgttggccagagaagctggagctggtggtctgtgaaggtctcctggacggagcagttcgtgcccgcagtgcagggagaacactggagaccatgcaattcagggcagggttggtggaactttttcttggcatccatttgagaaactcagaggggatcaggc

SEQ ID NO: 68314 - DNA, 2842 bp, Homo sapiens
tctttctcccttccccagagtcaggcagagaagcccctttcactcagtgcacatgagggagacatgtgagcacctcctccgtggaagttcaggagctcagtgatgccggggtctgtctttgcccctgaggagctagtgtggacgtgtggagacacgcatgtgtagatgtgcaccgatgcaggacgtcggccagagtgcagagtgcagagtgcagccggatgtgacaggcagagcgggtcagtgggaagagctgcccagtaggagtcagggcccccagctggcctggggcaagtcatgtcatttcttggtgcctcagatttttccatctgtcaagtgaggggtttatgatgcctgaagtcctttctggcttaagagttacctgattccaggagttgcagggagaagagccttaaagatgggtagaatgttttcattgcctctgtctttgttccaaattgggtctacccttggacccatctcagctgggttgttcccatgaagagggggcaggctgagggctcaggtgttacactcggatcccagacctcgcttctgttctctggaccctcctgttaggaaaactgccaaatttgcctttaggttcagaaaatcagttgcacctgtctagaacaaggtggttcatccttggcctgcaagggagggctgagtgactgcctgagacccacagagcctgctggggactgacatctgctcccatccagcctcgttctttgcttagagtcactttgtccgtattgtttctgtaatgccaaattacttgtagctctttcttcctttcccagtcatgaggtttcatttttcattgttctcagtgtgatctaccttgcttgaaatgcttcccggatatggcattgtttttttttttctctctctctcttttttttttttgggatggagtctcactctgttgcccagcctggagtgcagtggagtgatcccgcctctctgcaaccgcagcctcctgggttcaagtgattcttgctcctcaacctcctgagtagccatgtgactatgggtgtgcatcaccacgcccggctaatttttgtgtttttagtaaagatggggtttcaccatgttggccaggctggtctcgaactcctgacctcaggtgatccacctgccttggctctccaaagtgctgggtttacaggtgtgagccatggtgcctggcctattttatctcttaactgcattgttttagcaaatttgaaaatttgctcagctgttgtttaagtatttttccatctccacttccctctcctttctttctggtaccccaattatatggatatttgactgtttgatattgtcctgtaggttgctgatgttattttttcagtattttttccttctgtgcttcattttgaatagtttctattgctatgtcttcaagcgcacggatcttctgcagtgggtaatctcatgttcaataattccctctggtgtatttttcatttctgacattgtatttcccatttctagacattccatttgagtgtttgttgtatctttgtctcatcatgttgatgttttcctctgcattcttgagctttggagcgtacttacaatacttgtttatttcatctttatctactagtttcatcatctctgttatttttgggtttgttctgttgactgatttttctgtttatgatttttctcctccatatttttctgcttctttgaatgtctactgatttttaattggatgccagatcctgtaaatttaatgttgatgggtattgggttttgttatatttccttgagtggtattgggctttattctggcattcatttaaattgcttgggctcagtttcatacatttgaggtttgctgttaagctttgttggggtagacccagaccagcctttagtctagggctcacttagcctcactgctaaggcaacacccttcagaggattctaccgaataccctgtgtttttgaggtctgtccactctttttttttttttttttttgggacggagtcttgctctgtcgcccaggctggagtgcagtggcacaatctcagctcactgcaagctctgcctcccgggttcatgccattctcctgcctcagcctcccgagttgctgggactacaggtgcctgccaccatgcctggctaattttttgtatttttagtagagacggggtttcaccatgttagccgggatggtctcgatctcctgacctcatggtgatccgcccgcctcggcctcccaaagtgctgggattacaggcttgagccaccgcgcccggccaaggtctgtccactcttgctggtgggaatgtgaactctgtctggccctgtgtgtgctccacagattgttgggcctgttgctttccagtggttcttttctcagtcttgtggatttcaccccactggtgtgcagatcagccagagagtctgggtactcttctcgaagtctcttcgcactctctgctctcctctcctctctggtattctgccctaagaatcttagctgcatgaactctaattcctgtctcctcaacttggtgagacctctggactccatttggattcctgttgtctgaactgctgcgtggaagctgcctccaggaagtaagctggacaatcagaggacttgcctgttttgttccattcgtctgtcagggattgcagtcctgtgttgcctgttgcccgatgtctgaagtagtttcgtgtgttctgtccaatttttcagttgttttaggtgggacggtaagtccagaccttgtggctttaccagggctgtccccgggagtcctgcattatttgaagactcaccccaggcatcacctcatttcctggtgtcatc

SEQ ID NO: 68315 - DNA, 1071 bp, Homo sapiens
attggaggggggcataataacagttttccaacatgtgtaggattgaggactgaacttaggactcttggtgaaggattctaggccattagatttgggtctaggtccaggaagaactttctgaaaattgaaccatccagcagagaaatgggtaccttgaagatagtgagctccctgttgctgctgggatttaagccaaacccacgtctgttgcttagggatgctgtgtttggagttgtaaagttaaccaagatgttgcatgagatatctcttagatgccactctacacaattttggatcttactcctcctctgagccccatgattcatcctctggcagcctcccatccccagcctacacacacatccagaaaacacacctggaatgtgctccttactactgttttatgaaacaagcaccccttgtttcctgcctaaagtggattcttctcgggcctcacggactggctgctaccacccctgggcggtgtctgtgctcatctccatccttctgacttcggcctgactggcaccccattgatctgggtcagccccttctgtcagcaccttgtcccattgtctcctgtgtctggagacacagtgcctttgagacagaggatggctctgattagcccgttgttttccctgctccctggtggctgggaggctcccagcgaagcctggcggccttgctgcagccattccactgctcaggaatatggctctgaatggatactgtcacccttgatctgttcatccgctcctttctctgggtctcatgtctcttcccctagggtctttcttttcctcggactggaagctcctgaggaggtgtcaccccactgggtcaaggatggtttgctgcacattgtagaggctcagttagtagtggtgctggcagaactcttgagagaatcttgcacgcacctgctctttccccctgcctttttttctttttctttttttttgagttgggacctcattctgttgctcaggctggactactgtagtgtgatcatgactcactgcaacttctgactcctgggttcaagcgatccttctgcctcaccctcct

SEQ ID NO: 68316 - DNA, 1210 bp, Homo sapiens
acagcagtgagaaaaacgaagttaccgccctcataagcttacattctaatgtaagagcccatcaagggaatacatgtctgttgggtagcgggaagtgtggtggagaaagggatggggtaaaggcctaggggctgtaaaagagggcatgtgtggtggggagggagagcatctccagtcagtcacatctgatggaccctgcaaaggatggagagagcatcctggtggatgcctggggaggctcattccaggcactgggaacacaagtgcaattatgtttgagtagtgggacccggctctgatcaggtcctgaggccatgatgagaaattgggcttgtttcttcaacttgctctttcctgttgaagtcaaaagatggcttctttcttattttgtgtcctgtactatattgggtaaataaagtgatgtgtactttgttaagtgatcaatagatacttttttggttgatgaactcttccatcttctatcatcttaggctgcctggtgtggggttgtactaggtgtatccgatggttctcagtccccttcccacattctccagtgacacagacctggagctgtgaaccccgggagaccctcaggggtgtgccagttcgagagtgccagctgccatgcatgccctgcccttcactctgccctgcagcctcagtgtccttttactcttctattgggccttgcgccctccctctttgaggttttgcaaatgtggctccctccatgtccccaggtccagaggcaagtccttctgcagggacgctgtctttgacccttggcctgggcaggtccccttgttccacgtgctcactgggcagtaggttcttcccctcccagcagcatttccccccatttatcattgtgtactcacttgtgtgatcctcagaccctgactgtcatcctcagtgggccataaaccccacgaggacttaatcatcccttctcctctcctgcatctctgacatctagctctgtgatcagccagtttcatctgtcaaggacctgactgtaaacatgttaggctttgcagaccatatggtctctgctgcagcttctcaaccctgtccttgcagcatagaagtggctgcagacactacgtaaatgaatgcagctgtgttccaaaaaatgtatttacggacattgaaatttaaatttcatgtcatttccacaccatgaatattctgcttttgattttttttc

SEQ ID NO: 68317 - DNA, 1016 bp, Homo sapiens
agagtgagactctatctcaaaaaaaaaaaggagatagagtcttgctctgtcacccaggctggtgtgcagtagcacaatcatagctcactgcagcgttgatcggctgagtagctaggacttcaggcacacaccaccatgcttggcaaattaaaattttttttgtttgtatgttgtccaggctggtctcaaactggtctccttctgtcttggcctcctaaagtgctgggattacaggtgtgagataccacacctggccctgagttatttctaaatcctagcagggattttgaatcttttgtctgagcctaggagaccatagataaggaagttggcaagaacccctcttaacagagaggtttgagtccccgcatctgtctgaatgtgctcctgcagggaggtggcgtccacttttggatgttgctcatgttttagtccagagaaaaactgtcctcttgctacacagtatgtcctttctgaattaattaaatgtcattgttttttctctaccacttgttttcctacaccttggtttctatttactggcaggttgaaagcaggtgaccccgcctccttgcccctaggagggctgccaaaatgccaaacagagagcttgcgttttgccccaggcacttggaggcaggaaacagggatgtctgtttggacagtggatgcttcagggttggtcaggggtccctgggggagaggcaggcaggatgctaggcctcccaaacagggaggcggccccacagggagccctggtggagcttgaggcttcctgcatttagtgttggtctgtccagctgtttcctcctgatagagtggctggacaatgccacagtgactcaactccagccccgtcgacgaacaacaggagatttgtccagggttagctcgggagtggcgtctgcatccctcacctgcatccaagctgctagttgggaggaacctgttgctccttgaaccgcttccctgcttactcttggtgccctagagccctgtcccagttggattgattc

SEQ ID NO: 68318 - DNA, 1005 bp, Homo sapiens
gtctcaacccctgccccaacaaaagccccacgaaaggctgaattacccatagccccccaagaaataccttcctggctttatggtgagtcaggcacccctgcactctgcacgaggctgcctgggtaaccactctgttcctcactaaaaggaaagactaaacactttgagattcagcacctcatcacatcaccatcattatattttggaattttttattgtgaaatatacgcaacataaaattgaccatttcaaccatttttaactgacattaagtacatatacattattgtgcaatcatcacactatctcttttcacaactttttcatcatcccacactgacactgtgcacccattagatgataacttcccattctccccctacttccagcccctggttatcatcatccattttctggctatgaattggattattccaggtacctcatgtaagtggaatcatgcaatattgaacctttcgtgactggcttacttcacttagcattgtaccctcaaggttcatccatgctgtagcctgtgtcagatttcctccctttttatggctgagtaatattccattgtgtgtatatgccacatttttttgcccttttacccagtgatggacatttgggtgtttctaccttttggctattgtgcagcatcgtattttaaaatcgagtgcccactcttctcctctccagtcactccagtggctccccactgcctgcacacccacccacaggactttgcacaaccgaaatggatgcacgtgttagtaatgtgacatgtgttttccgaggtagtttttctatgcattggatccgtctatccatcccctttatgaagctgtaaatgctcaaaggttaggagctaagattaatagttccttctactacctcctgagagtctgtttcaggaagtggtaaaggatgttggttaggagtgtgggttgtgaggtcagaccacatgggtttgcatcctaattccaccacacacaagctcgtcat

SEQ ID NO: 68319 - DNA, 1005 bp, Homo sapiens
ttcagttcccgcattcctgttttctcctgacccggtttgagtctctcccactgttctgttcatgcttctcaacatgtggccccatttgtctagatcctgtttaaaacaccaggccccagggcaggcctccagctaggttgggcgaagcctggcgtggacgactcccacttccctggttccagatatttgactttttcctattcagtctcctctgaaaggcgccacccctccccagcccatgaagcttcccaggctcaggttctcccatccctagtggaccggtggctctcagcctcatcgtccccaccgcccgcctgtcaggtaggtcagggtgaggacaggcgccaccctgaggccgccacagagctcctccccgtcacctttggggccattaggaagcggtcaggtcctgcctcctccagattgtctcgagaggcgttgtaagagcctcactccccaacaccagcaagcttgctcccttggagtatgacttgaaggcaccattttatgtcttttgggtgggtttacggtttcaggcctatttctaactggaatcaaagactgtccctcggtgaaggaatttcaggcacgaatgagcagatgcgtgaggtattttgggggcagagagtttgtccctgtgctccagaaaccactccaccatctgcctccgtgcacaggccccacccatcccggaaaaagaggggtcctctcctcccacttcagggctctgtcccgggaggcctggtctgtctcaccaggcacttcctacaagtacacagtttggtcatctgccagcagtctgtctgtctaaagtgtttatttactttaaaataagactcaattattatataatttttttttgctgtaaaaaataaaataacataaaagtatcagtaaaatgtgaggccccattcctatgcccctctcccagccccagggaccctcccaggggaaatcacaggagagccttggtatgtattcagaatccttccaggcctttcattc

SEQ ID NO: 68320 - DNA, 1253 bp, Homo sapiens
ctggtggcatctccaccgacgcgacgggaagtggcctctccctccttcaggatcgcccccaccttccctgcccacttccagattcagtttgagccacctagggcctgttctgcccccgaagagagagaaccagccagcccagtgctgcaacgatggaagtgttctgttctgtaccgcccagtacagtagccaccggctacatgtggccgttgagcattgaaaatgggactgaaaatgccccaaggagctggattttaaattttattcagttttaacttaaaatggaaatgtaggtggccacatgttgctagtggctgccacgtcggacggtactgttctagaccagtagttttcacctgcagtgttggctcacactggtgggtgccctttggtgagaggtgcgttgtgagtgccttgttcttagtaagagattactaagctgtgtgagtggtgtacacatatgtggagtcgggtgggtcggggggcacagcttggcagataaaggatgggctcctgcaagtctaatctgggtacatttggagattgagtggagggtctggataggggagaaggaggagagaagtctcaagcacttcattcatcctggagacaaagcgcaaaactagggaaggaattttgagcagtgattcctttgaaagaaagggaggaagggcatacatcccagggccattggctaaagcactgtatggattctataggggctggaggagacctgaggcactagtgtgtagcctgctcattttacagataaggaaactgaggcccatcatacattggaccagaatctgagaactaccctgtaaagtaaattatctgcctcattttgcagcagataattgcagagaaactggaaatcaaagccattgggcattttagtggaaccaagttttggtcccaagtcagtccagagtcacaagctgaatttctcagactctcaggccaacacccacactgccagctcatggcatcctttccagcagctcgggctgggttcaggatgctggggttcctccttcagcacctgcggcctgtgaggtggccagcggtggggctgtggctggcagggtatggaacgtgggcagggagcgtggccgtggttgtgtggggctgtctgctccagggcctagagcgtgcacatgaccacactgccaagtggccctgctctttgtggaatccagagacgactgcctgaaagggaccaggagggacaagggagcaaggtcagagtggag

SEQ ID NO: 68321 - DNA, 1049 bp, Homo sapiens
caggggtcacaagctggtacccccagaccaaatccagcccacgcacaggttttatttggtccgcatcacgttttaatttttttttaattagctgccaatagttaaaaattaggagattttacccaaaaatcagaagttcaaattttccttgaaaaatggaagatctagggaaccaagagaaccatgtagaatgcttaactgttacagaccactgccctttgagaaattccagttgtctctgtcctagctagatcatgtctgtagggggctggagaagtcgctagaaaaggggctcactgtgatcacgttcaaccactggcaccctaatgccatgtagtgatgactgggcatgcaggcagtcatggaatcatggcaggtccatgtgagaggcagctcagctgctcaggcctggagtgcagatgctcacaggaccgaagtcaggctaagtatttacttaaaacaaaagaatcatgtctcccatttgtacttaagcactagctcctcttttgcacggctgaacatgtgcatcatgttctatgctggtcaacctgctgcaaaacaatgaaagcaggacgctgaggaaaagggagggaaggaagagagggaggaagggaggaacacgctgatgggcccacaaccctgggctgttatcgctcatctgagtttgcaggcttgcataaagttgattgaatataattgaatgggtgagcccacggtcatttcagactgcaagttccctaagggtgcgagcgagacctatttctcttgctttgaatggggtcagatggggagtgcacttaggaattattgaatgagtgaagcaacatacgcaaaatctatgtaccaggccagcgggcttcgaagctggagataggataaaaatgcagagtgaacagcctttaaagcaggacctctgctacctgactgccttcccaagggcagtgtgtgaaaacagacttgggccaagatctcagctaaaccctgtggctgctctcaggcacctgacttccggctggtatttaataacccagaatgagatacctcattgc

SEQ ID NO: 68322 - DNA, 1002 bp, Homo sapiens
ccacctcggcctcccaaagtgctaggattacaggcgtgagccactgcacccagcctgaatgtggtgtattttaagaatgtgggtttttgaagctagacacatgtgggttcaagcttagccctctgaccttgacgaacctcattagcctctgaatctcagtttctccatctgtaaaatggggagaccaatgcttgcctcactgggtattttgtaagggatgaaaacctaaaatagtctttggcatatagtagacattgaatagtgaatagcagctgctactgctgtcagtgtaaactaagaaacagacctacagaggtcatctgtcctgctggaggtcacaagggaaacagccaggactggaaccacggtcccagaccttgtaggccgtgttcttccattcccgggacacttctttccccttccctgatcaggtgggcgctgggcagacgctggcaggcaggcaccaccgctgtccaggacgcatttatgcctgaattgtaagttgtgggctgtgcctggcctcagacatgattatagggtgctgacaaaaacagcaccccctgattaagacgatgagcgaaaacgcacccgggcttttgttcactgagcaactccattgtgtctttctccccttttccacccctccctttatctactaaaaaaaaagaaatggaaaagatgaaggactgtcagcaccagatcacaacacgggctccaggagttggcggcttttcagtgcctgcggggtttcctcttcttgctttcctcgaccaagtctaattgagataaatctgagggctcccctcggagcacagggcttcctgcttccctgtgtcccggaggagcatcccctggggcttgctttgtcagcactctcccctgccccatggatgcctcctacaagatctgtggaagtggctgttcagtctgtctgctgcctgtggatggagctacctttccccagcaccccacaggtcatgtcacactcccttttcctatctc

SEQ ID NO: 68323 - DNA, 1043 bp, Homo sapiens
ttagatgagctttctctttcctaaggtgctttcgtatgagtttttgctttctattatcaaaacagtcctgggaggtggtttatctctgttttcagacatagggtctacaaagcagaaaagaaggtgatgcacagcagaaatgaaagaggagtttgctttacactctgtggtacgtagcattgatcagggagccaccatggctggcatgcagtgggcatttgatatgtgtttgtccaataaatgaatagcaggcactcaacaaatcatccttgatttgaaataaaagtttttctggattttgcttccagctcactctggtcttctttactctctggctgtttcttctcttccctgttgggttagctcctctccctggcccttgcacttgtcccaggcctgcgaggggagattgacacccagaggttgctggatcgtggtgatgcagaggcatcttgcggtgactcctgggagccagcagtgtcgtggtaggttggcaagtgccggctgcaaaaccctcctcctttgctgcaggtggatattgctacttgatcacagcactgttaactctgcaaccagactgagcctgctgagccttctcggtatagcactccaggttgctgccaccaatgggccacagtggcatttcggatggcaaggaggtcctgtcttgggtagagtaaagagcattagggtgagggtcagaggacctagctctgaatcctggcctctccatttctgctttgtgaccttgggataatccctggacatttcagagccttgaacgtgcgggcttctcaggtcccttcaagccctgaaattctaggattctgtggttcctttggttgggaggaaagaggctctcgtctggtggcctggccgtagaggggtaggattaacctctggggtcagcaagcttgcagagctcaggaaatgcctctctgtgatctgtatttggtccagagacaggtggtggagctagaggaggggaagttcactcacagccctaggctgggggaagggaggcctaactcagctgctgtttt

SEQ ID NO: 68324 - DNA, 1065 bp, Homo sapiens
ctaatttgctaattctggttactgatggagggtggggggcttcagggttttggaggtaggaaggctgttgctgcgcccacccgaggctgcctggggcccacagcctcctctgagctgatggccttgttcttggcctaaggtgagggagctcttttctctttctcttcctatgactttcttccctcttcctacctttttttttttcactagataccaccagaaaagttggccgggctgcagttcattcattcgtctgcccattcattcattcaacagtgctattgagcaactggcacacgactaggttgtgggagatgctaaaggtaactcagcaggaatacaactggcaccccattctcttgcagctgacaggtctgtccgcaaagagagacctgcccctcaggctgtcagccaggccatgtgattgagaggcagtgagggggagaaagtgggaggaagttgtgtgttgggaccaccaggcggggatctgtgactgggccatcagcctgagaagcctccatgccaagggaggggaggctaattggagcctagaattggggcaggcagagaggtgagccaggccacgcagccctccctgaggctgcaacagccagtcaggagctgagcacaacacagagtggcggagacagggtcagggccgcatggtcggagacagatgcccgaggcaggttgagagctgtctccgggactgaggctcggaatactggggatctgctctgtcggctttgctggggttagggcgtacctgaaagtgaacagtcaaaggcagagctagcgccattgctgatgacacatgcaagtaggagcacccgcggtggccaagtgctcagagaaggcttctggaggggtgggggccccagggtgccataaagaaaggccactctggagtgatttcatgctgcttcttcctttcctttctcttccactgcatccctctgtgctaggcacatctggaatatgggcttgggctgaacagagggatttaggcagatctgagatctgtcccctctcaaagtggggaggggagattttggccaggatttt

SEQ ID NO: 68325 - DNA, 1161 bp, Homo sapiens
gatggctgattcgagggtgtgagttgtgactattttcacctcaagtaccttgaaatgagaaaagatgcctccaggtttcagacgggctggatgcctttaggaggccccttcagtgggaggcaccttgaatgacagccccatagctatgggccagcctgatggggaggagggaagagagatggagtgagacgacagccagtgctcctgtcttactttacagagcagccgatggcagttcagaggccacaagtgacttaatgcactgcgggccttcgagccataagacagccattagggatgcccaagtctgtccctgccacccatccagacacctctcactctatcagcgagagtggaacatgcacaggctccctcccatgagggctgcagagcagtgtggaatctggggcgctggttcttctccatcttcttcactttacagcacccccaagtgctgctcacacactgccttcttccacattggctctagtaccagccccgtagagggagagtgggccgagggaggcagcaggcagcagctcctgaaatcagcagaagggtcccagctgcacagtcaggctggatgtgaggttgcagagcgccgtcccagctggcaagtcagcaccctctgtggagtggtttaggaatattggatttgctgggtcagtccatttccactggtgcatggtaataagtcgcaggcttcatcacacttccgtgtgcccggcggtctgccttatctcatcctccccgcagccacctgccttccttgataagtactaataacaaatgccttctttctcctgttttccaggagcagtgggctcagtgtgtgcatatgtgtatgggcaggtacatctgtctgtccagcacagtggctcttactccaggcccttttgaggatctgacagggatgctgattggccttaggatgaaagatgggctgctttggaactttcctgcaaaacagggcctgagagcccagagtgggtgactctttgtccaggcagactatcagccccgttcttctagggcccaatctctgctgccccctcttatctggtaaaccttctctaagaggagatgcctgtcctgcaggagtggccattctaactctttttgtaaagcttgccctgctccaagcaaaggctgatttttcta

SEQ ID NO: 68326 - DNA, 1079 bp, Homo sapiens
cacaggctcttttgggtggcagtcagcgctttgtgtctaacctgaaccctggctttgtgggaggctgccttgtttgaggcttaaaggcacagggtgcctcacaagctgtaccttgtgtcaaatgtgggaatattcagcatgggtcagaaaggggctgtgggctggcccattggttctgattgtgtgtgggtgagggagagaccaaagactgagccctgtctcatgctgccagcctgaggaattcacagagaggcagagagagcttggcatttactccaaagcccacatctccccagttgccaaccagcagagatgtggcatgttgatttcatttattcacttttcttcttcccctctgagaatgctgtagttacttcactttttttgttaaaaaaaaaataaaagaaaagtgaagtcaggctgccttgttcacatgctcagagagccccctgaagggcagcctgcacctgccagcttgcctgggtggcaagctgagaatgatcgggagctgccagagggatgatgtctcacagcaccatttctatctgattgttccatctgtacccccaatctaaggaactgaggcagccacagccactggtcttttcatctcttgcctctcctccaccccgatgccagtgccaggcccagcttcctagggcaccggttaatcatgggccccactgcttgggaccctgcaggatgcagcccaggcttttcatatgccatgcaaggcttcacagggtagctcactttgacctctaagcaccttctcttgcttcagtcaggcctgtcccctccctgcctcccgaaggtaccacactcacgcctttctagggtggccacccacttcagagagcccttctgcaagggacagctcggtgcccatcctgccacggtctgtgctctgtgcatcagtctgctttgggcttctctagctgcagtcgtgagtgggggtagaaggtgggtcgcttcagctagatctgagctccttgaggcccacgccttgtcttactcagctcagctttgtgtcttccgtgggtccttgttccgcgtcctcttatcttgaacaaaccagc

SEQ ID NO: 68327 - DNA, 1167 bp, Homo sapiens
taggaggctggcaaagtttggcaccacctccttcccctataagaaaacccaggctggaagtgcctccgactgggcagcctgcagtaatggctgtgggctcagaatttgtaacagctgtgagcctgagttggagataggcacaagtgaggatgtatttctgagtttcttcttgtattcctcctgaatgcacaagaatacaatctgcagcattttatgggagtgggttggaggggggcggggtgtagaggccacatgttcccactcctttcggtgaatcctaggaaaaagaggaggagcccctggctcaagccgatggacctgcttgctagtcctcagatatgctcccgagttggggcctgggtgggaaaggaggggtgtgggggcatgctgccatcgggtggctggctgctgcttttgagggattgcagtggaccgggcagggagctggctggccacgtgcttccaggttctgggagccccagtggccggaagggacaaagggagacaagcagggtgcccctgtccttggtgagaggcacttttgtagagaaggtatgaatgggtagggcagctgggaattgctctctgtcctctgtgtgactctggaggctgtgcgcacatatgtgcacgtgcataagaaatactggttaggaacatttgaaaacttcttaaattcatctcgaatcgttccttcatcccaattgccgtctctgcctttcttcacccaagccccgacgtagcacagatgtttggctcagtcccagagtctgtcctgccctctggaggctgtcagctgcccactgcccgtggtccaggaggagcactgggggcaggagaaagtcattcagagtgaagttgggaagaagcagttgtgccgaagaggcattcagcttttgtgtggagtgatccacattagccgaaacactttttagggtgggggtgtgtgtggaggggtgacttttcccatagaatgacaagcgcaggaagaagactgggctctagtcttggttctgcattagcttcttgtgtgaccttgggcaaatcacttggtccctgaaggactgggcttcctttccagtccaataggggctgtcgtgatggtctccctgcttgtcctcacgtcactagttacatgccatctggggtgggggcaggcatcctcatctt

SEQ ID NO: 68328 - DNA, 1504 bp, Homo sapiens
gcccccctccctgcctggggtgtgggctgcttttccaaggagactggtttgaagtgacttgagttggattcccctagttgtcaccatgggttgggccctccagccaccctagtaggaagttacctgtcatgtgcctagagttttatggaagctggggcagatagtctcattctttttctggtggcaagcaccactggaatgtctctggctgccttgtgggccagtgcctcctggtcctgtgacccatctgccagcatctgtcagccaagtactggtgtgtgcttccctggtgcctttggattcacacgaatgctgtccttttcattgttcacagcttccttctccattcttttttgtagtctcaacttacctttttgttttgtcccaccctgcctatattaagccttattaggaagacagaccctggggcttgtaaccccactcagctgcgctcactcctccccacccccaccctgccacctgctggccggagttggtataactgcctgcggtgcctttcttctccaggatgagcccaacgtggtttggtgacctcctcactggctagtacagtgatctgtaccctgcacgttgtaggccctcattatatgtttgtgaatgaatgcatggagggccagagctgtaaatccacaacatgttgtcatgtggtagtggttcctgagttccacttgatggggaagagaagttagatctcacacttgcctctgataaaggctctccgagcgccatagctatgggatgacaagcaattcttcccatcttcccttaaaaccttggcagaggttaatgagctagttggtggaatatattttcgttacggttgatagcgagagaacttgctgtcgcttcctaattagaaggtactgattacattctctttaccaggcaaggagttgttctctcctggattctgacttttctgattacttaatatttccagaattcccatgacatgctgtaagcagggaaaaattgaatctccaagacccacttcttgtatgctagtagcaaatgagatgattaaataagacatagaccttaggtaagatggggaatttagcagaagacaagttcatgcttgtgtgtaagagtgtttgccactgtgtttatcgggaggtggaggagcaggtgcaggagggtgttggccaggatgtgggggctgtgggtcactgtgctccactcaaatgaaggcttcctgcaggctggtgcttggcctgatactggggaaggagcagaggaaagagcagaatgggaagggaaaacatcaaaggcaggtggggtgttgatgagtcagggtccctgggaggcctctgttgctgtcttgtgcaggggggcagggggagcatgcaggctgggtcaagcccagccctctgggaccgggtgcaattgttaggaattttgtagccttaacttgttgtagtcttgtggctcagatccaaaaaggaggcttttctgaaggattagagttgaacctgagggctgc

SEQ ID NO: 68329 - DNA, 2085 bp, Homo sapiens
tgtcttttcctgaaaattcttccaataagcatttattgaacttttactatgctcaaggcacagggcttggtcctgctggcatgcagaagggggggacgtggccacagctgccctgggaagaggggggcatgtggaggggatccccatttcctatacacagggccctggctccgtcacagatgaggcctggttggtcttgggtccataacttgtactttcagagtcaggaagcagatgctggcaggcttggaaacctcgtccaggttggacggtggtggtagcagagggatgagcagcaagtgcttcctgggcatttatcagcacacgtctccaggcgtaagaccttctgtctgccaggctaatgggccacccctggcaccccatggcactgcatctggatggatttacaggggtcttggctctcagcctcatctctgttccttaaacccggctgcctctctggatgctgcccagaggtgacgctgatcagattgtgtggggaagcctgtgtgatggatggctcattttgtgtcctgggtctgcagcccacattcctgccaagagcatacctgatgcagggccctttctgcagtggtcctcaagaaatattaactggtaatgaggaccagagactgaggttcacccgtgctggcttcttcaggtccttgttctaccatgactaatagccctctccttaaaccaccccccaggtcccaccctgggatgaaagaccagctgaccctgatcctcacagcaggtttgtcctatggcggagatcccgagggggccctaagtcacagctttggccatccagacccggggagccatcactggaaagtgcctatcaggctaaggcagaggggtggggtgtgggcgggctgtgccagcccaccgggcaggtgagggacctgcaggagccgagtgcctgagctgtcctcccctgtctattaactccccattagcatgcatcagtgccgttgcctctatcagtttgatttatgccactgcggttttgcttacaaattagaagccgctattgtgctaggtcggctttaaaatcgatgcagagtaattgcagtacatgggtagttggatgacattaacatgagaaatgtgctgtagtcgtcatccttggaacaaacacgtccaattacagtgaaattctgtgccccttacccggctaatttgaacacagctcaccgccaaggcctcctccagcatggccagccctgggcagagatcgtcacgaatggatttgacgggaatggggctggggactgtcatgttgaagcccggtggagatgtgggacagggacctcgtttgttccagagcctgttccaaccctccctggcttttgtggcatgttttctatgccgtttgctgcaaggatgcgttgggcatggagtaacagccccaagaccgtcctgcagtactgcacgtgtgcgtgtctgtgctttggtttgtctgtgtgtctaccttgttttagagtaaaaaagtgaatctgaggccagatcatcagtctgcacctgcctctccagcagtccctgcatttcctcacctataaaatgggaaggggaacactccttatggagctggttcaagtattgagcgagagaccgggactacaagtgttttctaacacaggggcatgaattcagccgtggcggcggcagcttgttaggagagcgatcagcctaggggctgatggggtggccaggcgtcgggatggcatccagtcttctctgtctgcatgctggagtcatgtgagagatttataacagaatagggatgctgggttccatctcctgaaattctgtgtcattggtctgaggagtgtcctgggcatctggacacgggaaagctccccagcagggtctcctgtgcagccaaggttgaagctgcttcctagtccatttcttgctcttcagatggatttgtgcttctttaggtaggactcatcctagtaaaaaaaaaaattttttttctgaattgataagcaggaagttcctccttccatcaagtcagaatccttaccgcctcagacatagcctactccttcttttgttagctgagacatgggtagg

SEQ ID NO: 68330 - DNA, 1034 bp, Homo sapiens
gacagcactccaggctggacctggccccagcccgaacagtcctgcatcagccccgcgtcactacggagagatgccgtcggcagagactgagagggagctagtcagatccagccatcccagcctgaccatcccatgccccatgccagcccaccctaaagaggtcaacctcaaggggcagaggactgagccagcaggggcggggtgggtggaaattcacatggaattggccagtccccatgccagggcaacagatgttcgctttggagcctggatggggttcgctccaggttgtgggcgggcggcgccttcagatgatctcccggctcgggttacttgttggctctgggcagggcctttcactttgggggctgtctggcctccaggattcctcccacctctgccttttcacccgctgtcgcgtgcatgcccagccagcagagctggccaccttgctcctgacgctctgagctccctgtgcctgggcctggctctcagtggggctgtctcaggccagggcagcgtctcccctctccctggaagtaccctgcttatcctgattgcagcagtacggttatttgtgcccttggagggattaagagtctgtagggccttcaccacgggcctcttccagaggtcccttctgtctggttaggaactgcagtcctggatttttctttttggtatgattcttatgggcctgaggatggcaaactttggaatttaagtgggcatagaattcccagctaccaaggtgcccttatgaccaagtacccgttcctcctatatggtaaatcctgagaaatgtgtatagttttctcttaaaaatatctcctctcttgatcgctggcttctgttatgttttttttttttcctacagtgagatatgtttatttttaagaatgcttccaataaccagaggatatgaaaccagtttaattttttaccccactaagagataaggaggagtcagagggagggatatggacacagcaagaaggatttgggtgggatcatcagggtaactgaggaccaaa

SEQ ID NO: 68331 - DNA, 1703 bp, Homo sapiens
gtccagtcttgtcacctctgtctacatactctctattccttctcaggcttttcaggtgcctttgctgatcacaggtgtggggaggaaagccacccaggaatggggacagagaacttgagactttgctggctaggtcaaaccgattttttccctccagggccacctgtcgtctcattcctttctgtctcttttggtagcttcagcttgaagctaccaaagcttgaattctcaagcttccaggattatgtaaattagtaaggttacaagcatgtaaaattattaagtggtatttgataaatacaaaagaatacatgtaagttacaaagttgtaagaaacactgtggaatccaccacctagctgaatgtggattgtcacaacacatcacctctagccctgctccgtccctgtcccatcccctggcggagggcacccttctcctgagggcatttttatcagccttttgcctttttatgtaatgttgcccctcagatgtttccctaaacgatgcattctatagttgcatgtgcttctgagctgtgtaaaatggtattgtgctacatgtagctttctgtagcttgcattgcttctactaaatattgtgtttctaagattcatccatgtaatgtttgtacttgtagttcattcattttccctgctttttaatatttcattgtgtgttcattgttaccagttttttgctgtcacgagcaaagctgctgtgagcatctttgactgtgtacatttctttcatgcacatgaataatagttcctctatggcatacactggtgaaatcctgcatcacggggcaaggagttttcctcttttgagaaatgcatcagatctcaaagaaaagagcagtcctgttggcaggggttgtgggctatagaggtgtgtctgtcctagcctgagtagcagccaggtctctgcagggaatatttcccaagctgagtagcaagagccaggttccttccagcactcccatctcggagcccccacaggctgcagagaatagcagagttactttacacagagcggggatgaatggagcttgtgtaaacgtgggtgtgtagggctgagacgtcctcgaagatctaatttactgccctgctttcccatcctggaacctctgccaagtgcctataaaaaagatgaaatatttagccaagatcagggaaggaagaatcaaggcagactttcacattggccatgctgttgagaaggtggtttgggcagttttcttctacaccatcccagatttaaatcctggccatcctttgattgtctagttgaaattccatggtctgaatgaaatctttttgtcctcacatgcaggcgtcttaccttcctctgaatttctcaggtgcacttaacagctatgttgtagttgagactatggccttgagggcagggcctttgtttcttactctttcatgaccccctccctctgctccggccaccctgcagcactgacatagtagtaggtactcattaaatgcaagcattgattgacctgcctgcaaactgggtgacaggctactttatcatctttcccgttccttacctccaaaagtaacatcccaagagctgtatttctgggaggctgagacacctgttttgaaaaaggctttcaggtgcactgtgcagtgaggggcacattctaggccaggcctgcagtcagagtggaagcgtggagtggtctgt

SEQ ID NO: 68332 - DNA, 1078 bp, Homo sapiens
cttccgcagggctaggggcaggctctgctgttgtttctgttcctttagcgtcctctgcaagcctgtggtgtttggagaagaacagtgcacctgaagtcagaaggccttggtttgaaccccctgctctgcctcctgagcagcagctctgtgactctgagccagttgcttaatgtctctgagcgtcatcttcctcactggtggagagaagacaataatctctaccttgagggaatggtgcaataatttaatgttaattaccatttatctagtactttctgggagtgacaaacacttggtaaacactttacaggcatgatttccacagcaaacctgagaggaaggtgttatgcccttttacagatgaggcagctggagctcagagaggttaggtaacttgccctgggctgtacagctggtaggttgcagagcctgttcacttcagctgcctgcctctgaggcccgtgcccttcgctgccaccaggatgcttcctccagtagataagatgatatgtaaagaacgcccggcatgctgttggccggatctgagtctcacccagcccgtggaatttgctgagagactgcggctttctggggactggaaaaaatggaggcgggggtagagaagagacgagtaagcctgggtctgtgcttcccagcctttgtaggggaatcatctgagagtccaggcggtggggtatttttggtagcaggctcatgactcttctccaggttcagcaggagggagagggtgggtagtgacgtacagggatatagctcattctgcaagttcatgaaaagctctgcaggctcagatcctgtcatcactgggcaccctctgggttcctagtactgtagggcacatttgagcaatgtcatacagatgtggccctgcccttagggagcacctggttgtcagatagaaacgagcacacatgtgaaatgactgcgagcagcagccaaggcagtgagcagtgcggtgtgaggatttgtgggaggggccattgctttgaatgactcatcagggagggcctcctggagtaggtggggcggcagctgaagcatgggtagaatgtgtcca

SEQ ID NO: 68333 - DNA, 1055 bp, Homo sapiens
tttcttccccgacattccgtgagtgcccttatcccagtcatggtcagcatggtgggtgtgggctctgagccgtgacaggcgctgaccttgggtggaggtcccggccttgccagtgtgcccagtggggctggggaggcggctgggcacagcgagcctgggctccggtgtgtgtcactgggctcagtatagaatggaatgctgctcactggggccgtgtcctggccgaagatcagtggagggcaaagtcctctcccctgccccctccccaccgtctctgccatgcagctgcttcggagttggggctccagcacacagggggccactcgccctagagaaagagaagtccactagttctcccaaagaccgagaattcttccttttcctctgagtggggtcagcgaatcgggggagagaacattcttgctccccgcccaccctgccacctctaatgttcctgaggccagcatcaggggtctcccggttagggcttccttggacccctgggggtgacattattcttaactttgttcccagcagggagaagcctgtgtgtgtagttggtccaagcatctagaagctgctctttcaaagtcatgagctgggttgggatggggttgagctgcttcagggcaaggaggcccttgccagcagcctgggagtggctctgccacccgccctgctctaggctggtgtgggtgtggcccaggccctggacatgccttctgcccgatgcctggagccctgggatgccacccagccagccccacctcccacctctagccaacagcaagcacagctcccattctgtagatgaagagcaatagcctggacatgtgacacggccagtccaagctcccacagtgagttctgaacagagcccagagtagaaactgggtcccctggtggccaggtgtttctttcccctttgcctgccagctccccgaggatggggactgtccctgctatcctctgcggagcccagctgacagctcagggctgcgtgtggaggatgtaatggacaagcaaggggctccagcggtcaccgggcgtgactc

SEQ ID NO: 68334 - DNA, 1005 bp, Homo sapiens
gcataaattaaagtcattcacaatgccatcatctagagataaccaccgttctgcttctggtgaatttctagggctgtatgtgtgggaagaggttcttttgttgcaaaggacatctttagttttaagggacagagggacacacaggacggtgggttccagcacctctggctgcctgggcctccttcctctgactgttggcaccagctgtcagcccctggaggaatgggcagcctgtcggcaccggcttgagctcagagctgggataggagtgttatgctggaaaggggacccggctcccagggagcccctagtgtagtggagaaatacggagccagaaggggctgggaccaacagctcacatgacagcccctgcctgaagcagagtcctggcagggggccactgggcttccacccagacttctcatggtggggacctcatggttaagccaccacatcggccagctctgggtccctgcgtgagtgagggtgaggggtcgttttttactttgtagcttctagcacctggtccctgttctgccccactagagtctcatggggcagaccccatgaaccatggagcgccccccgcacttaaaactctgcatacctccatgttcagagttgccgtgtccctcaagttctctaagaccagacgcctctagttcctacccagttcctgtggggaatatgatttccacactccctggtgctggtgtggccagggagaggtgtagcctctggccaggcttcgtggagcaggtgagactggaatggcgtttagagggtatggtgatggcagcgagatggggaagcccattccaggccagggaatggcacgcaggaatgttcatccgtggcaggtgtgtgcacaggcctgtgtgagcgggtgctctctccggggccagggagaaatcccagcccctgggctccccccagccccatgcccttatatagccgtccctgcactcccagagctccgggggtggggacggagccccctcctac

SEQ ID NO: 68335 - DNA, 1042 bp, Homo sapiens
aataagcaaaagcaagagcaaatgtattcctcggatctcatatgaaaatgtgtagtaatcgtttctttttgctattttcaatatatttctgttctgttcattgaactttgttctcggtgcctcttgccagctcactatttatcacataggtcatccctccaccctgccgtttgccctttatgaaatggcatctttccccctccaggtcttggtggtgggaatgcttatccttaccgtgtaggggtgggaggagcggagggagggcctgctgggatctgacttaagagcctcccccagcctgtaattggtcagaggccgcgcacagctccgctcgttccaggtgagtaaagcgcctggactcagacgtaattgattctgactgatatccaggttggggtgtaattagcagtcttgatttaatggcattgtggcctgagactgccatctcctcccttgtatttaaatggccatttccctcggcaggcaggaaattggcatcagacctcgatggtgggaccctgagtaagtcgcatctccgagcctcggtttccttaaccagggcctttgaccatgatgtcgtctcacaagggggcgagcagtaaatggcagcacgtctcaggcccagctcacgtgacacttggacatcacttcctgccactcttagggaggcagatgtgctgggttccagcctcctggctctgtgggcaagtcacttagcctcggaggcctctgcctgctcacctgtgaaatggactcatagcagttgccttacctgtctcatacagccagggagaggactaagcagaagcacagtcataggttcttagggctggagagggctttggatattattagtttcaaccttttgttttataggtgggaaaaccaaggctcagaggagtgagtgacacccaggatgacctggcccgttggcagcacatagtcagtgagccgtgttgtttgggcttcatgacatcgcttcgtctaaaggcttacctgtctgtcagctcataagcatatgcggagaggcgcacctctccac

SEQ ID NO: 68336 - DNA, 1050 bp, Homo sapiens
gtagatgctgctgttcaacatcgggtagaacagcggtgagggaggtgaaggtcacatgacctgtcttcctccctctagttcccagggtgtgttttgagaggggcagtctgtggggaagctgtgtagtggggggcgggggtggcagagtggcctgtgtgtgtggctggtcctgggatgggggagtggaggcacgtggtgtgtttttttgcctctgggtgttacagccctggccctgagtttagctctgccgggaggcggtgggtgcaccagggcctgctgtattctgaaactgggagtgtgtgcctaaccccgcacctctgttgggccagcagaggcccccaccccagtgggcagggccttccagaccagctgccttccctgccttcctcactcctcatctgtcacccaccatcctgggtgacctgaggtgggctggagagacgagctgcgtcctggttccaaccgtctcactgtgtccctccgcctggcaggtgaacgagaacgccaagaaggacctgaaggaaggcctgctgctgtaccacaccgagaacaacgtggggctgaagaacgcctggaacatcatccaggctgaggtgcgggctgggccgccctggtggggccaggcagggaggaggggtggcggccggtacttctagctgccttccccggtgacctggccgggcacctgtgctttctggattttagccgggagtggagtggtacccacgggggcatttgcctgaactgctgagtcagatgtgatacagcaaggtacagccagggagggatgaggatacaggaggggcaggcctgagagagctgtggctgagctttgggatgaatgactgaatttattttagcaacagatttgcctccatgatggggcttggcttaggtgaggaggccctggctctaggaggagaacaagtccatagtcccagatgctcccattttaagccctggggaggggccggcagggggttgggtggcagtcagcttgggacggtttacagaaagagcagaggtgctggtgggcaagcacagggctga

SEQ ID NO: 68337 - DNA, 1050 bp, Homo sapiens
ccgctgctgcatggagaactcccagggctgcgggcgcaacgccaccacgcctttgtggagaacggtgaggctggggatggaccgcttgggtccaagagcccgtgtgtggatgccccggcacggggagccctataggggaggctgggcccgggacactaagaggttggctgaatgtggcggtggggggctcacaaaaataaagccaaaagacaggtggaaaatggggggtggggctggacccacagttgggagagtcagagggcgaggggttgaatggggtctgaggctctgcagctggccttgcgggtggggcggaggctgcgccaagggatggggacagggctgaggccagggagggctgggaggtaagagcgaggacgaggtggaaggagagagtgagctgggggctgggctgcagggagcgcatgcttgggctgggaccctaacctcgtgggcctcgctccccagggctgctatgaaaaggtgaagatgtggttcgatgacaataagcacgtgctgggcacggtggggatgtgcatcctcatcatgcaggtaagaggggcgtccccagcagcctcacccaccctgctggcctcagcctcagagggaaggaagcacagagaagtgaaagcagtgttggtacacggcggagggtctggaattcatcacagctattcaagcttagcagctgtgcctgccaccgtttccgcagagctctgatatgagagcacgtgtctactcagcactgagagtggtgctcagggctgcctgtggccaggcccaggctgggatattgaagctggagtcaacccccgtgggttcccccagttctgcccaaaccttgagctcagagagccatgcaagacacacacggtgtcccccggtcaccatctttacagcctgtgcacatggcacactctctgtggtgaccgtgagaccacaccgggcttccttctgcctcctgcactcctctgggtccccggctcctttgaggattcaggagggaaggggcacaaacgagtagtgacgtggtcctgagcacacatcact

SEQ ID NO: 68338 - DNA, 1051 bp, Homo sapiens
gagctttgtgtcacctgcctgcgctctccagatatgacccctgcacccaccccccacagcctgccctaccccacctaccctgcctcagcctcggacttctcagtgggtggagtgccagggaggaggaggcacacggagacctggggctcggggcccctggattcctgcatctgcatatgcgtatttgccaaagacgacagggtgggctggggtgcgctccggaggaacccccggcactgatgggcttctgcccctgcccttcctcacactgacactttgtccccacatggggtggggagcagagtgcccgccccgtggagataccgccccagcgggggctgcgacatccatggccaccatggggcacctggcggggcgggggtctgccggcctctgggcaaggcccctggagcatctcgcccaggctttttataccttacaatgtaacttttttattttattttactctatgattattcaggaatattatctctcagataagtttagggttagatttctgatttgtaactttttactgtgttgatttctttaatggtttgactttttttccctgagggtgagggatgggtgggaagagaggacatctgtccagtctcaatcaggacagaccaccgtgcgacacccaggaggctctcggatggggcgcgcctgcgccctcagaacgtgtgggaaggagggggcgtggacaggacacgggaccttgccaggcctggtgtctgaggacaggagcctgggagaggcgggtggagcgtgaagcaggctggaggtgcccctgcacgggaggtggcgtttgctaaccaatcgagctggaaatgccagggcaggggggccccacggtgctgtggcagagctagaggggtccttagacttttcactgatgagcagttgttggttttttctttctcccttcctcccgctctctgctggcacgcgaggcttccccttccaccccatgtgggtattcccacaacaggttctgcacaccccagttatttcacagacattcctgctagaaactgtcagacaaata

SEQ ID NO: 68339 - DNA, 1055 bp, Homo sapiens
ttcgcctccttccctggggccacggacatcagcagtgggttgggtggcgattatatcatctgtgatcccaaggagaagaaatacagaaaacccaagagaggtcagactggctcttgttaccggagccacgggaagaaagcagccggagtcacgcacgtgcagagctgggcatgggagagaaacgggctggggagtgaggccaggagtgggattcagctgcagcagggcgccccctccaaactgcagctggtctggcttactgttttgccgttcaaaaaggtcgcgaatccgtgggactgagcacggggacctcacccgctagccagcgtctgctgcacttgatcaggtggggccttggtgggcggctgcctttcctatacagtttgtcttgtcaccctggtttcccactggggccaggtctcttctccagcctccacctgcctgtctgatccaagagctgagacacggccacccagcaccagtcactcctctgttcaccttaagtaacacacaaatcgggaacaggaggacagaaccgttggcattatcaggattcgtgttttgtgggggtgggagtggagagtagggtggtcttgtgagttgtgcagggtgaagaccgcttccctgagacaggggcagtggtgctgatggaatgtgggggaggcccacatttgagcaaagctgccctgcccttgtcccctggcctggcttcctggtaaggagtttcagccgcctccgcaggaacccccaaagtgcagattccggagcagacacatccgggcggagagactcagcagacaagtgctgcagttgcacggtgggacccggggcctcgtgcgttttttgctgtgggtggggtgggtgggttggtttatgcctatcaatgcaatttttaatttttgttaatatcaacagcaaaagcctagtgcattgggagatgtgcaacctccctgaaaatcttttctgtttctggagtacttcaggggtggcctctggccccagagcctttgccacagtgctcccaccagcccccacctcatccgtctgtttgcaga

SEQ ID NO: 68340 - DNA, 1102 bp, Homo sapiens
gaccagctgggatgataggcaggcaccaccacacctggctaattttttaaactttttgtagagatggggtctccctatgttgcccaggctggcctcaaattcctgggctcaagccatcctcccaccctggcctcctatagtactggggttacagatgtgagccacttcgcccagctgaggcatgcctggtttcaaaactatcttcagctcttaatgttggtgggtgtaaaactcatcccagcgtggactaaatcacaggccctgcagagttggagggctgagaaggggcagctctgaatacaggggatctgcccgaacctcacttttcctggggcccctctccccaaccctggggccaccaccgtgttgcttccagagggtctcgctctccttccctttttccgcccgtcccaggctggatagagtcccttcctttggtcctgtcttgcatctgtcttgaattaggcagggagttttcaggaagaactttcccaaatactaagggagaacagagaggaaatcctatgaaatacagagtattcatgctggcagtctcatgaagggtaggtatcaacttttgcgacaaccataggtacccccctaaatggctattacaagtgggcaccttgagcataacacgggaaccccacgcctggcctccatacctcccaggtcctgcacttctccccagaggtgggccctcttccccctaaagcacagcgccttgtgatgcgaaggccgaggctgggagaggtcacacctggtctctccacatgttccagctcccagcctgctgagcacagcccttgctgacctgggctggccctgaggaggggtgtgcttgctcccgtacacaggagtgacctgaaggcccctcactgtggtcacaaacacagccctaaactgtccagaaactgtatcctcagagcgggaagtgcccacgtggacagagagaaagccagcctctcggggcagattgccgcctctactgtgaggattctccaggggctaccgagaggctgggctggtttatctcctctgcctagaaaggcctggggtggccaatgtgaactcattaaaaggaaaaccagctttcccagaa

SEQ ID NO: 68341 - DNA, 1080 bp, Homo sapiens
cctgtctctcacttttcctattgcaagataattggctttttgtgtgtctatttatatgtctattagataatgcacttttttttgaatttgtgggcctgacacacaataagtaataaatgttaataaatgttgactgaattgatgtatgtgattgtgaacaaactcttgagcctaatgggctttagtcactcatggcttcctggaaattgggattcctatctcccaccccacctgtctgctgtacttagttgctgtgaacctttgaaactcaaaatgggtaaatattctgggaatcaaggtgctgaagccagtcaaatcatgggtacattttggttattcatgtacttattcaatattcagtaattatcgactcttactatggagtgctcatctgaatagcagataaatggattaatcacaatgcccaattatgaaccatgggggataatggaccctcctgagctactgcttgctttactgatacttggtgaaagtctgatgcatgatgcattatttatggcgatgactccctgattagggttttatcacctcaaaggagagcccccaggagttgggaaacagttttagcaaagagtcactttggaaactgatatatatatatatattttttttttttttttttttttttttgaatgttctgttgacttgctggcccagggagagggaataattacaggttggaaaaaatcctacaatgtgacaatgagattaggggttgcagtgagttatggggataactgagctgacttcttgcatggtgtatcttggtggttttggctaatagatctttctcctcaggaagttactttcagctgaagaatgtggtcccattattacaggggttagggaattgaggaagaggaggaaccaggcatagttctctgaggatggtcttcatctatgtctgtttctgcagagtgtgtacactaactagtaggctatggagacagacttcctggttttcaatccagttctggacctagtagatgtgttgctacattgagcaagttgcttaatgtctctgggccttttaagattgttgtgaagatgaaaagggtt

SEQ ID NO: 68342 - DNA, 1063 bp, Homo sapiens
tctatgggctgaatcagtcagtcagcgtctctgaaccatggcatcattacctgcagagagggcttgtactacacgggtgcaaagagatggttggaaaatgtctaacaaatacacttagatctgtatttgaagccacttgtagtgtgtggaattatggatgcttaataaatgcattctatgtttgcaagatatgttcttctcctagaaatctccttatctcccaggagataagacacttcttggtaaagacattttgagtaccactgaaccctccaaagagtattgagtattattgagattctgatgattattattcccaattttgcttttcttctgccacctctctgccctctcaagggaagtgaatgctctctgatcacatggtgggaaagggcctccttcactcgactataataataaatttatgaagggcaacattcacccagttgaagtgtaagtgtaccattatcacatctttcttatctagctttatactaagtattaagagggaaacacagacatataaaatctggttactagtctgaaagaatttacttcttgttgtagaagtaacacctacaattgtgagataatcttcaggagacaatttgccagcaaaataaataggaacatagcccatagtttcagataagcagatgccataggaggtcaaaataggagcaggagagacccaagcatcagcggctggagaaaatgactgattttcaatgatggctaccttcctaaagatatcaatcccataatgcccagaaagctcagaggacgaagggcagaaccaaaggcttgagagtgcacaatgtgtaagggaggggccagggccaagcagccagcagaacagggctctacgggcagccaaagccactgtgtcctgtgccacgaaaggcccagagagcatctaaagatagcaccctggcacagagtcatacggcgagagcgggaagcctggtactcctgtaccacacgctcgaatttcctctgaatatttacacgctcagcgtcttccagtcatcaccatagccccacaaaagaggcgggacagaaa

SEQ ID NO: 68343 - DNA, 1123 bp, Homo sapiens
attttaaagcttgggctggtgccagcaggagccatttatagcccaaagggcttaggttcactttggctgcctggtgcagagagtgctggcttccctctcccctctgcaggctgccttcccccttcagatgtccagcaccttcactctccttccttaaagcttctttttcctctcctctaccacctctttcctattctcttggaggttccagttccagatccacctccggacctagattcccctaggtgagcctaaacaaattcctttccttctgtgggcctcagtctctccatctgcaccctgacacctattgtctgctctctttaaactctgtcaccttggagaggtgcctgcctgtgcctacctccactgaagcgctctcctctgtctagttattgcctgttgactctctttctgccctcaacactgggcttcctgcctgggccagctgtgttacccttttctgagcacagggcctggctcctggcagtagctcagttaagcttggttgggccgaactgagctaaccatggcatcagtttcaagagcacaggttttggcataaaacagatactggttgacatcttggctgtgctgcttgctatctctgggccctggcaaatgactggactttgtgagctttagtttcctcatctgtaaatgtcagttactatgaggatttcacgagatggtgtctatctataaagtgcttggcgcagcgcctggggcgcagtgggcccttagtcaatgttaggtctcatcaccatcatcatcctctgccatctacctgcattttcaagggatgtgggttaggtcaaacatgctcccccaaatccccacccctgcttgtggaaatccgacccacccttcaaggacgagctcacaagctcacatgccccttcttcaggaagccagcttcctcctgtctccagctctgctgcgtccataacctttcatctctgcatttagtgggcccgaggcctgttcaccccagtagagtgggtagactaagacaatcgcactttatttattagggagaaaaactgtgctgaagctgccctgggtaaggccagtctgggggcggaacactgtgttgggggagtcctgatcagccgctggcgtg

SEQ ID NO: 68344 - DNA, 1031 bp, Homo sapiens
cagatcagacattggaaaggactttgggcaagtttactttctgcgccttgggctcaggcagctcctttctgccattgacatcctgtgacattgagtcattttcccacattaaagaagcttcttggtgcatagtcctcaattctccaaaaggcctatgaattctctagagaatataattccaaacttacagctagaaaaattatatcccagaaaggacgaccagccacttagccattggtcagtgagatgggaagcaggattccattccctttccaaaagcaccaggaaaactctggtgagaggccagtccctgccatttgtaccctcagctccctgtgttcccaagccccatccttggtcatagtgcccaccctacttctcactatttgcctgaatgtcttctcactgaggctgtatgatcgggggaggaggggacaaagtggtgttcatcccgtttgctgttccccaattctacagccatacccggcctgtggcaggcatcctaagtggaagtctgtggaatggtgaatgaatgcactgcactaggaatgctgcaggcagtactggtcatgctcacttcaaaatgtagaagaaaagctgcctaaagcctagaatcagagagactgtgatggggaagggaactgtgggagggagaaaaggggtatgtggggccagaatgctaagagcagggaggcatcttcagaatggggaaggctgaaagccagttgtacaatctggatggtcatagatggggttggggcaggggaagggaaagctttcctccctgacaaggagaactctagatgttgtccacaaccctttcctgagcgcccacccttgtgcacggtgacattctggatgttttccaagacattctccaccagtagagagaggcggcatatctttgcagaccagagccatagttgatggactaataaaatcatataccactctaatgaccaaagacttgcctgatgcaatggcttagtaagtccctaacatgggcctaatatgttttaggtagggtggcc

SEQ ID NO: 68345 - DNA, 1003 bp, Homo sapiens
ttggtgaactccccagggctcccgtgggctctgccactggacagaaggcctccagctcctccgctctgccctggtagcccttcacgaaggctttgtgttgccaacaaagagcgacctggcgtgctgtggctgggccccgagggtggaaacgtattcgcgtctccccgtctcctccttaactgtgactctccgggtcttctgagttttgcatgctgcgggtgtctaggacagattgcttccactagaacctggagacatagcatctttgatagcataagccagattatctgtgtgtgcggtggtgtgcgtgtgcgtgcatgtgtgaatgtgagcagcatagttgatatttacccacaaacacctgtatatgcgtgcatatacaaccaagtgggtagacctaggtgttctctcagaggggtgtgtgtgtgtgtgcgtgcgcgtgtgcctagaatatatattactctcagaggagattctgttgcttttgaataggaatttgttttgtgattagttcgccccttccccaccccttaccagatgttaagcagctatgaaacattctctgtactagttctggtctccttttgactggactgtggctctgaaccttgagcatagtaccacggactccgtgggcgctcaataaacacacatgagaacaaactggtgggatggctggttcctggtgctgtgaagtgggagggctggggggaagccagaggccatgatggagtggagactcaagggcagcagcacctacgtgggttcacgtttgctccccagcagggaggtcagggctggtctaagagcatctcccccatggactctgaggggtcctaccttagagggtaaggaggtcatggagctggggtgggggacaggagctaaccaagagtgtgccagaatggcaggccatgcatagcctggagactgcttaggataatgtccagccttggtccgggcgtggtaacagcggaatctgtgaaggatggaaatgcaatgt

SEQ ID NO: 68346 - DNA, 1016 bp, Homo sapiens
aactagaaaccaatagtttgtaccttttaataaactgtcttttaaataactctcagatgcattaaattataaaaaccaacattatagattatttagcctacatcctgattgaagatttaaaatgtcaatgaaacttggaaggtcattgaaacactgcatgaccaactgaaacctattagcatagtgacaggctggaaagatggactagaaatagcaaacacaaaatctaacagcattacatttgagatgttgctgtgtgttcaaaacgccaatggcagaagcacaaagtggaggagatatgattcagtagtactatctttaaaacaaaaatgatcacacagacataaaatttagagattttagttgacgaatgggttccacatacgtcaactgtaatgtggctgccaagaaaagttaatgaggttttaggctgtatgaatagatatgcagcatctagaacaagagaggtaatagtcagctctaatctgcacaagtccaactcatacactgggcattcagtttggcactgccgtggcttgagaaagatcattacggcccatctgaagaagcatgaagggaattgtaaagggatttgtaaaaaatccatgtgagacacagttggaggaagtggagaggcttgaccggaacccaaggcaactccttgaagtcttgatgccattctgaaatacatgaaaggcttttatgcagaagaagagtaaggtcatggaaagacagatttctgtgagccagaatatcccaaagatgaaataactgcttagagaaacagcaagttctctgtcactgggggtattctaacctagtctgggtaagtccttgacgtggtattgtcgcaagaattttaacactggaaaaacaggtagttagatcagacaaaccttccaaatctgaagttctttaactcccatggtatctagtattccctcgaaatggtccatgagcttctgagttcggtacccaaaattgtaaattgagtttttacaggtttttggcattaa

SEQ ID NO: 68347 - DNA, 1017 bp, Homo sapiens
agttgtctcttcactggagatccttaaaccattttcaatatgctggcttagttgtgattctccctgtgtgttgggaactagaacaggtgattagtaagtttccctcgcccctccattccctgtctctatgaccacagtaccacctctgtggccaagtcattaatgtgaacagctggtaaatgaaactttctggtttgtcttaaagccggataccaacagtcagtgttcagttagcagtgaagatatcgaaaaaagcttcaaaacaaacccttgtggctccatttcttttactacttccaaattcagctacaagatagactttgcaggtatgtttttttccctaatagttgtgtgtttttagtatattgatatgataaaatctacagctctgaaggtcaggattagttgatatatttgcaaacagtgaagtatatcttttttgttatatacaaaaatacctctataaaaattcaagttttaaaatcttgagcaacattgccttttataaaaggtgtgtttatatgtttgtatatattaatgtatgtgaagattgtcttatatattaagtgcatttaatacttgtcttctaaggaacacaaaacaccgtatcagttgttttattcatcccatcagtcttttgaaatagataagaacatttaagaacatttttactttttttttttttttttttgagacgtctcactgtgttgcccaggctggtgtgcagtggcatgatctcggctcactgcagcctccgcctcccgggttcaagcaattctctgcctcagcctcccgagtagctgggattacaggcacccgcccccacacccggctaatttttttgtatttttagtagagacagcgtttcatcatgttgacaaggctggtcttgaactcctgacctcctgatccacccgcctccacctcccaaagtgctgggattacaggcgtgagccaccttgcctggccagaacttttttactttaaggatcaaacagatgttaagtgagaaagtca

SEQ ID NO: 68348 - DNA, 1045 bp, Homo sapiens
ccaaatttaaaacatgaagaaaaaaatgggaaataatcataaagcattgcttgagtttccaaacatatataaaaaataacaaacccccttcattgaggtcaggcactgttataaatgaacttgtctcgttcatttataacattgtctcattcatttataacaacatcccaatgaggaaggagtctatcatttttcattttgtgaagagccaactgtggcctagacaaggcaattgaaacttattccaggttgctacagcttctaaaaataggatggacattttaaatgatgaaattaaaaggcaaatattttctaaattacccagtagtacatattctttgttaaaaaaatcaatgatacaggaaatcaaatttttaacaaatcatcaataactctatatgtttttatgtgtgtataattatacacacacaaacagagtgagagagagagagagatctgaaagatatgcagtgaaattatagcattggctaaccctggagaagaaaagtgagaaggtaccaggaatggaagtgatggttaaaaaagtctttagctttattttgaaagttctgattttttgcaagaagaatattttttatgtagtagttgtataaacttaataatttaaaaaccctcaaagaatgaggacaggaagccaaattccagattgagtttaattttctttgaccagcctctttgtctcctttctagagacttcttcattacaatacccaaccaagaatgtttaaaacttttcaaagataatgcatatgtgagttaattggtatagctaaaattatgaaatcattgataatgaagtataagacagtatatgacggcggctaagtgcgtagaccctgaagccaggatgttgggtttgaatcttgacttccttgttgtatgacctctctatgccttagtttcctcatttataaatttggggtactgatagtacctgtctctaggttgttgtgagacctaaatgaattttcatctgtgtagtccttagaacagtagctggcacgtagtaagtaatataaaggtt

SEQ ID NO: 68349 - DNA, 1115 bp, Homo sapiens
cgacctgtgaggatgccagttgggccgaaagagagagacgcgtccataatctggtctcttcttctttctggttgtttttgttctttgtgttttagggtgaaacttaaaaaaaaaattctgcccccacctagatcatatttaaagatcttttagaagtgagagaaaaaggtcctacgaaaacggaataataaaaagcatttggtgcctatttgaagtacagcataagggaatcccttgtatatgcgaacagttattgtttgattatgtaaaagtaatagtaaaatgcttacaggaaaacctgcagagtagttagagaatatgtatgcctgcaatatgggaacaaattagaggagacttttttttttcatgttatgagctagcacatacacccccttgtagtataatttcaaggaactgtgtacgccatttatggcatgattagattgcaaagcaatgaactcaagaaggaattgaaataaggagggacatgatggggaaggagtacaaaacaatctctcaacatgattgaaccatttgggatggagaagcacctttgctctcagccacctgttactaagtcaggagtgtagttggatctctacattaatgtcctcttgctgtctacagtagctgctacctaaaaaaagatgttttattttgccagttggacacaggtgattggctcctgggtttcatgttctgtgacatcctgcttcttcttccaaatgcagttcattgcagacaccaccatattgctatctaatggggaaatgtagctatgggccataaccaaaactcacatgaaacggaggcagatggagaccaagggtgggatccagaatggagtcttttctgttattgtatttaaaagggtaatgtggccttggcatttcttcttagaaaaaaactaatttttggtgctgattggcatgtctggttcacagtttagcattgttataaaccattccattcgaaaagcactttgaaaaattgttcccgagcgatagatgggatggtttatgcaagtcatgctgaatactcctcccctcttctcttttgccccctcccttcctgcccccagtctgggttactcttcgcttctggtatctggcgtt

SEQ ID NO: 68350 - DNA, 1009 bp, Homo sapiens
tgtcttttgacaggtgcctgtccttgaaaaacaaagtttctatttttatttttaattggtttagttcttaactgctggccaactcttacatccccagcaaatcatcgggccattggattttttccattatgttcatcacccttatatcatgtacctcagatctctctctctctcctctctctcagttatgtagtttcttgtcttggacttttttttttcttttctttttctttttttttttgctttaaaacaagtgtgatgccatatcaagtccatgttattctctcacagtgtactctataagaggtgtgggtgtctgtttggtcaggatgttagaaagtgctgataagtagcatgatcagtgtatgcgaaaaggtttttaggaagtatggcaaaaatgttgtattggctatgatggtgacatgatatagtcagctgccttttaagaggtcttatctgttcagtgttaagtgatttaaaaaaataataacctgttttctgactagtttaaagatggatttgaaaatggttttgaatgcaattaggttatgctatttggacaataaactcaccttgacctaaattatctggccgtttttgacttatttataaaccagcagtcctcagaatggaatacacttgtctcatgtcagaactgtttcatgccgctgcaacatttggcagtggcataaaagacacattctaacctggaatggaatctacatgtgcctctgtgttatggcggtacaagtcattgttgacattgctaggggacgaggggtgcctatgcagccagcttataagctagaagcctcagtccaccttcagaaggtgggtacatcacagacactatgactggtcctcagaggatcgtccctgattgttgccagctactcattctgggctgtgaggaagcatctcctggcatgagaggtaccagaagcctgcggtgccatctccagagtctagggagtctctgggaaccctgcccctgcagctttcctggctc

SEQ ID NO: 68351 - DNA, 1043 bp, Homo sapiens
atttaaaaaataagtcttaataaatgattatttgccaggcactgttgtaattaaaatctgacagtttagtgagttaaggactgatatcctcatttttcacatgaggcagctgagacagagacgccttgtaacttgcttaaagtcacatggcaagttgaggaagtaggagtttaaccaaagcaactttaccactcaccgtcttttgtttcctacttaatttgttaaaacccggtatttgtagattacttgaacatcaccagccatttttgaggctactttttagtctcttaatataattgtgtggagttatgacaatagtttattttgttctgttttatgtgtaggaagatggagtgagagggctggttcaatgctttccggtctggatcctcctgcttcttgccttcagagttctcaaaaccaaaacctggtgattctttcaggaaaagaagtgatttttaaatttgactcattatcaccatagttaaatgtaatgactttttgaagagttagataattttattggacttacctcttcagataatgcaaaaaaatctttaaagcaatttaagttcaacagaacctgttaggaatcttgtgctgttcctgtatgtggtttatctttcttcatactttgaaatgaaagtaccagtgtgtatcatttctggaacagactgcccaagattccagaattcaagtctatcatcattgtcagactataacttctcatgagcttatggcacagcattgttgaaaactccaacacgtgtaggttggcattaccatcacctatccagcactactgaagggtctggttccttggaatgttgtaggtgtttgcagtgagtccccggcaaaaccatccatttaacttcctttttttttttttttttggaaatatgtgtgcctttattagctgagccactacttgagggggatgaagcgggaggagtgggtggccccgatgccgggccggcagtgcttcaccagcttataggtgatggagaactcgcccaggtagtgactgatcatctccggcttga

SEQ ID NO: 68352 - DNA, 1043 bp, Homo sapiens
ccattcacttctgtagcctcagtcatacctaatatggtatcaagagagatggacaaacatttttttccctactgtagctttataaagttttagttccatcaggaatttttagctattgttaaatcatcatcactaactagtctatctataaaagggtctttggggagtaacaaagtttatgatgaattcctaccacaagaaattcatccaaacattcctgcagctggactcctggttagccagtttataaaaatggttatatgtaggtgggaaacagcctcaaaaacagtgtttccaaaagtcactaagttcagattttcttccagacatctgatactactagcattccctctcccacaatgttacaaaagttacatgttttaaattgggaaggccagctgcagaacattaagtttgtttccaaagtgtccaatttaattcacaaaagtatattgagctatgattctcccatttgttgtatttaaacatccattcaggtcaagaagtttactctataaactcagacaacactacacaggatatagaggtaatattgttttagctttggtgcaagcatcccgaagcattttcaggtgtcattttcctcttctaacagaattgttagacactcagttaccatgttttagtgtgtgcaagaaaatgaagatgactgaaacagcccatgtcctatgtcagataaaagagctatagaaattaattgcagtttaaaaagaataaaggaaaaataacctatcagcaagaagaaagacgtatcagttttatctcaatagatctttgtgatctgaagatactgtcttattggagtcagtcttatggaatgaggagctgcaagccaagaatactgaattctcaacttccttttatttttgctgttaacttgttgaataatttggggcttaccaaattatttagttttgtaactgttggttactaatgaagattttgttgtttgtttttaacttctttattggagtataacacacgtatagaaaggtacacataggtacgcagctcaacttttc

SEQ ID NO: 68353 - DNA, 1070 bp, Homo sapiens
gacattccattatttttcttactatggttgttatattaacatcttcatatttctgtggtccatgataaaaagccaaaaatgtttatacacatttatatacatttaaaaaaaataaaactagccatcttcttactattactaaacaaggtattgccatgaaaacatggaaagggaaatggactatgaactgttctctctcgtttacttaacagagattctatttgttcatactccatgtgaacaagattagagtccttctttattgttccttataatctatgctacgattagacatctattcaaagcctatcaaatcacatggctctatattagaaacgataattcattaaatatggattctagcatcaaagccttctatctctctgactcttgatttataaaatatgtgcatttacaaagtacagtgttataaatcaatttatcaaagtcactggataaaaatattgttacttttattcagatctcttttaaaactataatattttgatatttgctgtttacttgtttgaaggtctgttttcatgtgattttctgatgctaaaggccattccaaaatagattccaaaatagtttttaattggaataaatatgcaatctcttaaagatagctactttgaaggctaatattcagtttgcatttgtgagttctgatggaattcttataaactttagatgtctcttttattaaaatatatatgtaaaataatttgcattcagtctttataatgtatattcaatcataatgtttattttatttattcttctaagaaatagcgtgccttcaaaaaagaagaaaaactgttaaatatctgaaaaaaaagctgtttcatttgaaacagtttcacctatctgttataattgtatatagcgtcaggtaagaaataaattttaggaatggggtgaatatacagtgattcctggtcccactagccatttatttgtagccctgaacaagttatatcaacaacagtgactcagattctaaaaataaagatggccacaccacaactatctaatgaagttattttatatgtggttaacttggtgcc

SEQ ID NO: 68354 - DNA, 1038 bp, Homo sapiens
aaatacacacctttttatgtcatatctttgactgtcttaagtagcatgaagtcagttaaatgaattatttttggttcttttaaaaaaaaatcactgtatccttgaatgactgctttttctatatttatccataacataacattctttctatttaggaaatttacaggaaaaaattttttaatttattgagatgtatttgataattaaagattgtatatatttgaggtatacaatttgacgattcaatgtacacagatattgtaaaataattacttcaaacgaattagcatatttattacctcagatagttaccacttttctgtgtccgtggtgagaacacttaagatctgtcctcttaatgaatttcaagtatacactagaatattgttaaatataatcacattgtcatacattagatttccagaactaaccatctgtgtggctgaaactttgtaccccttgaccaaaatctccccatttccccccgccccagccctggtaagcaccttctactctatcagtgtgagttcaactattttaggttccatgtataagtgagatgatataatatttgtttttctgtgtctggcttacttcacttagcatcctccaggatgcttagtgtcctccaggtcaatccatgttgttacaaatggcaggattttcttgtttaaggctgaataatattcctttgtgtgtctgtttgtgtatgtgtgtacatttaggtgtgtttttagtatcttgattattgtgactaatgccaaaatgaagtctttaagaaactaatttcatttccttcggatatatacactaaagtggagttgccggatcataagatagttctgtttttaattttttaagaaacctccatcctggaaatggtttttaaagctattgaaaaagttaatggcatctttcttcagaagctttctatctacacataggaagaggattaagggaaggcaggtaaaagaaaaatttctggctcaaatcgcagagtaattcagctgttttttaattgaaaaatgaaagtttatt

SEQ ID NO: 68355 - DNA, 1044 bp, Homo sapiens
tcttaaatttgctaggtaaaattctaccttccctcttagtacaattcactttttatgattatttctaaatttgtaaatatataaaatgtagaatatataaaatatatgaaacgtatacttgtttttgaaagaagcttaaatagaatttatttcccctcataaatataagaaccttcttatattttgtagcaccttttggggtggattatgatgaaagtattatttaaagaagacctggaattacattaacaaagaaatgtcaatataattaactcttttgagtgttagagaggttaagtctctaatcaaaacaaaattgctgtgccctaacttaaggcataattatttaaaagacaagtataagaaatcttattaagaaaaataagtattattttctttttctactaaatctcattgtaagtaaatactaaatatttgatagttcgcatttagaagtttgtaaatgttttgggtcccttagattttgccacagtttgccaagaatgcactgacttccatttcccccgaattgaagagcaattagaagttgtccaacaggtggtactttatgctagaacccagcgcaggagtaaattgaaagaatcacttggtgggtaaaactcacttttattatattctgtctataatcactgtaatagtatgtggatcagtattaagatcatatagaaaattatgttggtggaagataggaaattaaaaacaaaattaagatttttttaagttttttctatttagaaagaacatcaaaatgtatttttggttttttggggttttttttccttcaacttttactttaagttccagggtgcatgtacaggatgcgcaggtttgttacataggtaaacgtgtgccatggcggtttgctgcacagatcaacccatcgcctaggtattaagcccatcgtctattacctattcttcctgatgttcttcccttctcctaacaagcccgagtgtgtgttgttccccacaatgcgtccgtgtgttctgatcattcagctcccatttataagtgagagcatgt

SEQ ID NO: 68356 - DNA, 1387 bp, Homo sapiens
acatcaaaagagaattatcatgaattacatttaaaatggaggcactgaaattcatctctctcttttaagacattgtagaatgtataaggggagttccttagaagtattaatattataccatttcttattaaataatgcaccttatagcattggaatttaatagtaccaattattatgtcttaaagtcctcttagaatgctttgggtcattttaaggttattataacgattggagagttcttaacgttagtaaaagcatggatttgcctacacagaattgatagtttattgaccatttcctgtatattaggcacaataataagcaattcctatgtgagatccacatttggtcttctgtaataccactgggtaagacactatttttatctccacattatagatgaggaaattcagtcttaggataagcaacttgcccatggtcatatagccagtttacatggtagagcctgaatttaaacatgttagatttcagagcccagacttctaaccatatgttaacctctctgaataaaattattgtgccagttggagtttgggatcatttatttatatctaaatgctattacattttagtactaattttcctatatctagacattgattaagatatatctgaattttctttcttattccttatatttaggcattgaaaaacatggcagtagtaaaatagaaacaatgaataagtctcctcatatctctaattgcagtgtagccagtgattatttaggtaagttttttatattaataatttttctcatcaacaatgctgtttctctgacttttgtttaaattgctgaaattgtggctagaagcaagttctttaaatttgtcaagactctcttgatgtcatggcctttatttctttgtgttttagtctcattctgtcgtactgcagacacacattcttccctgaagggtcataactacccgtggcttctagttggagcaactgacctttgaagaaaggggctgcatattcccaattctagtttgaaaattttgggggaaagattatctctgtttgggtcttggatttatccctaaaactagaggtgttcccagggcactgatgtaccatggttgacccagattgggctaatagtctattactggaagcatgggagggatgaacctgggcaaataaaaacaatagctgtaatagagtctggtctgcagttcttgaaatatcagttgtcacagaaagttttccattgatttttatgcctctcctgaagatttggataagattactgtggaagatgatgttggtggtgttcaagggaaaagaaaagcagcatctaaagctgcagcacagcagaggaagattcttctggaaggcagtgatggtgatagtgctaatgaca

SEQ ID NO: 68357 - DNA, 1052 bp, Homo sapiens
atatatattaactcatttaatccacgcaacaaccctttgatggaggtttacagttatccccattttctaggtgaggaaactgaggctcagtgaagttagtgacctgtctgaggatgcaaacccaggcacccacaatggcaaccactgcagtgttctgctactggaaacagtgcagcacaaaggtgcataagaatctgaaagctgtggataaagttaaggcaacagaatcctcactttttagagcaaagatgaactatataatcttctgttttaggtgaagattctgaggatgattctgatttttgtgagagtgaggataatgacgaagacttctctatgagaaaaagtaaagttaaagaaattaaaaagaaagaagtgaaggtaaaatccccagtagaaaagaaagagaagaaatctaaatccaaatgtaatgctttgggtaagcttggtccaaaacacttaattttataaaggaaatgtatgtggtttgtttgccgtatttttcttatttttgcctttgttctctttaacattttcctaacgtccatttcttgttaaaatatgtaaaaggaaggtggggtggggaagggagaaaagcggacaagaatgctgactccactacgtatgctagcacttactgtatatgacctcactttggtactcatggctgccgtctgtggttagctgttgtcacctgcattctacagtgaaaaactgagtgtcagagaggttaaataatttgttggaaatcttacatctaataggtgaagggctagaatttgaacccatgtttgtccattcagagtctaagctgtatcttggaccatattttctccagacaaaacaaggaagtttgcataattctaattttttgcttttgtgctttacttagtctgatttgagagctcttttgccacatgtttagggccctttttttttttttatttccccaaaacaaattccattagaaactacttttatgataaaacgtttaaaatttatggtgactcgaacatggaatacctgtttcttgtgtaaaagaagttaggata

SEQ ID NO: 68358 - DNA, 1516 bp, Homo sapiens
tggattatttcttcatctccattgctgcctcccacctatttttgccaaaacatatctaatgtgctgttttccttctattctccaccttagcaggcccccatttcctcttacctgattaccataataaccttctaagtagcctacttctcctacactaccaccagaaagatgtttttaaaatacaaatcactcctgagaaaaatatgtgcatgactgtgactagccagactcttgtacatggtctgcaaagctcttcataagtgatctacacccagtgtctatctctcacatttcctacccttgagatttctgctccagccgtacactgaaccagtcagtactactgattctggaacttggtgcatcctccatctttgcacactgtactccctctgcctggaaagcttctctcaattcacctttactcttcaatcttgatttggttcagaccatcctcactcacctccttctaactttaaaacacatacccccagattgcagtttccttttctacttggcatacctttagagtctgccatatcccttaccacactgcattttacacatctttactttcctgttcttcccactgaagtctagtgactaaaccttaaagtccttgggagcaggagccatgtttctaaccctagagcctgacacataatctcactgacacatactcacgagacactattgtgtaatggttagttacaaggatgggattttggaggaaaatctggtttctaagcttagatgcttactagctgtcagactacaggcagattgcttaacgtctctgtttccttctctgagagtggggatagtaatatctgtattggagttgttgtaaagagttagaggtaatgtgtgtgatatgcctaccacactgcctggcatattaatgctcataaaagatggctattcttaggctctcaataaatgtttgttgattaataagtttattttttatatgattatgtaactttataatttttacacatatatgctagacttactttttcttcctgcatgacaaacatttttacgtatatttttcaaataagtgacttcggtggactctgctccagctgccgtcaaatcagaatctcagtccttgccaaaaaaggtttctctgtcttcagataccactaggaaaccattagaaatacgcagtccttcagctgaaagcaagaaacctaaatgggtcccaccaggtatggcatatttatcatcaaggacaggagcttggaaaattatcactggtaaatttttttcctagttacaaacatcatgtgtgagcatttccccatattattacatattcttcaaaaccaaagttcctggttgctgcatatattcatttatttaaccattccttattattggacatccaggtttattattttttcagtgctataaataagattgcaataagtgcaaatgtccttattttagaaatctctgggcatattactgattattttcctaggataaaatttctagtaggaaaattaca

SEQ ID NO: 68359 - DNA, 1046 bp, Homo sapiens
atatggcaaactgggatttgcattcctgtctgtttgactccaaagccactgtttagactgtgtcttttaacccactttctatcatcagtcctaactggttcttcctgctggggcttcatctttttgttcttgaatctgattttatagtttgttttctctttcctaaattaaacagacatcctagttctctctctttctctttcatccccactttctttctcttttcccttcttgctctgtctccttcctattgcactgactcatgcatgtgcacttattatttggtgctaagaaattcttattacttgttatcttccattgaaatgcttatagaaacctgcccttggctcaccctgaagttttaggtagttctctttgactcttgtttttatgttgttaatggagaaattactagatctggggttataaaagaggaaagaattaaaaagaaataagaaaatagtcatgaatggccccaactaacactagtctttaaaagacactcttcctatcttcagtctgtaagtggttgctgtcaagaagggaaagtctatctccctaatgatccttgcttctttgtctgtatttcaggattggagacttggtttcctgggtttcttttcaaacttagtaaggagtagttgggtggacaaaaactaatatgctccattaaaaatcaatagcctcctttttagctctgtcatttgattacctgagtaaagtgtactgttacctgtttgtctcggaaagagtgagggaatcagcagggagtctgagatgtcatttctgttgtaataaatggagcttggatgaaatggcactatattatgactacagcagatggcccattttgaaacttgcattgaggaggctgcagaagtgttgagtgctgaggtatacccctatgttttcatccgattgctttctgctattataggaatgggacgcgagagataaagattctatccgacgagtagtacaacacagcaatgtggtcatcaatcttattggacgagactgggaaaccaagtaagtctttgactctt

SEQ ID NO: 68360 - DNA, 1028 bp, Homo sapiens
aaaatcactattactattactgtttttgaaaatcaaaatggtagaatattagcaattccatgtggttaagcctaatagcttgtgatggttaataagagagttgggaatggtaagagatgagcttggcaagttgtgggcaaaagcaaatcagaggggcctcaagctatctgaaggtaagtgcattcctactacagaaaatacttggatgagccttggattatgcgtacttggaaaatacttggatagcggtgattatttgagctcttgagaaggctcattcttttaagaagctttctgggaatagataatgccattattttaacttcacattttctttgttgagatcagtgtggccttcctcctttctccttccttccttccttcctttttctcttctttcctttctttctatctctccatctcccattctgtctctttttcaacaattacttagacatatattataatttcttacaggtcgtagatgtatccaaaggaattgttaatgcagttaaggatcctgatgccaatgggaaatcctttgctttcgttgggtaagtgcttagagtttgaattttaaattgtgctattataatgaaggaatcaatatctaaattagttactaacagatttatttgttgcacttttacaatatcaaaatctcctcattgcttgcattaaatcagaatttgagggaacctggaatctactttaatgaatgattcttctgttaccaaggtctgagaaccactgccctagactattacatatacttagtccagtgacccttagggatggttttgtactactccagtgatgtttttaatatataaaaggatattgctgtaaattctaaaacacaaacaaaacacttttagggagtaagtatggttataaaaccacattaattttgatggagtatcacaatgcctccagaggctgaaaaacgggtggtttatagcacaattactagtgctgtgcgagattgattatttcttttatgctctttgctaaaatttgctttcaga

SEQ ID NO: 68361 - DNA, 1049 bp, Homo sapiens
cctctttgtgtgttctgcttttatagtgatttgcatgaatcgaaaattgccacatattctttgaaagcaattaagtctcaataataggactcatgccagcttgaatgtttaagtgcctgctaggatagcactttgttctcagccagttttcagcattgtctgtggtcctttgtttatccaaagatgcacatcacagacatgaaattgcctcacctgcctggcttagaagaccttggtattcaggcaacaccactggaactcaaggccattgaggtgctgcggcgtcatcgcacttaccgctggctgtctgctgaaattgaggatgtgaagccggccaagaccgtcaacatttagtgcctcctgagcagctcttggttttggcgtcttttgggtcggcccatgtggtttgagcacccagccaggcggtctctttagaggatcctgtacacagttccactattaaaacatttcaggttgaattctgcagtattttcttccttgatttacaaaatgagaaatgtagtcacttagaacttgagcatgatttttgttaaacatatttaataatgatatatatactatttattctctgaaatgccagagagtttgaattttcctatgacaaaccacttctagcatacgttctagaagacaaggaccctttttaatgtcaaagtattgtaaagaccccaagtgatatgtgattgttttttaatttccattaaatgagagagcatacagtatcccctaacctgaatgtgtttacactgaaggtgtttttaaaatttattttaataatgtccatatgccttttaaaaatagtagtacatatatagaaaaacattgtccatagattctcaaaccccttgcagtaattccacagtcttcttggatctgagctatctgaggccagcccgatgcccttagtaccacatctggattatttcagacacataggtggagatagattctcttcacatgcaaaggagatgcttcagcttctatgccagcagtgccagcacttaggaattatgaccttctaatgaagt

SEQ ID NO: 68362 - DNA, 1050 bp, Homo sapiens
aggctccggtagacagtgttgaagggagatagaaagtctggggtatttcccctagggagagtgtgtgggattttgtgttggtgaggactggagtgtagctggacttagagggtttggttgtgtgtgaatgggatatgcttatctatggagtgagattgtgaccattgagtgagtggtcagggagggatggggatgtttttccaaagtgtgtgtgtgtgtgtgtgtgtgtgtgtgtgtgtaggggaaggtggcaaaagagctggagtcctatccctctttggtgcctgggaggtgtgtgtttctggggagtctgtcggatgggcatctgtgtgcttagcgggagacaagagcttgcaggaacataggtgtagctaatgcgaaatctgtgcctatgaagggtgtcagagcaggaggagaggtgcagcctgttgaagacagatggcttgtgcatgcctgcacaaacacatggagtgggtgtggtgtaggagggcggctgtgtgtgtgagggaaaggtggatgcatgtggaaggttgggcgcctgaggattaccaaagggatgtgtgtggggggtgggggaagattatctgaggagcacggggtttgaacttcatgagggtgcactgggaaatttggctggaatggcactggggcatgtagggggtagaaaagtgtgagctcagatcctctttatggaaagacaaagcatttgcagggaaggacaccgggttggtgttggtgtttgcctcccccctccttcctccccagagagaagagaattggaggaggcttagaatgagggatgtacatttaaggggaaaagtccttgtgcattggcactgggtgggaacaggaagagatgtgtgcataagactgaagtaagtagaggaatgcactatctgtgcctggtgtcagggatgcatgttgtataatgttttgtaatgggtttcttatgtaataggagaattcactatcaccagttcatattgataatcaattaaagctaatggagtgcctactggatgctcagcccattgctgggtactggggcat

SEQ ID NO: 68363 - DNA, 1040 bp, Homo sapiens
ttcttgacttatcattaattaaattgtgagaattgggagctagtagaaaaatctggacaaatgcgtggatggagaaggggatacctcaaatggcctaaatatagagggaaatgttctgtacaagtgatacgtttattcttgaatcggagatagcattggaggatatattctgtacaaatattgtgcttcaaatgcttacccctccatcatcatcaatgatattaaaatcattgcttaacctgggatatttgcttaacctgggaagcctccctgcatttccccagagagcctaaggctcccttcccagcctcctgatgccacttagcagcctgtgtttaatttgcattcctagaatgtgacttcacagagaaagggatctgttgttttcatttttgtgtcccccaccttgaatagcgacagccacaggaatgtgttgagtgaatgaatgcgtgaccagccattgtgagctcagaatgtgcagcagcgatttgacagtgccaggaacttggctcagagaggcagtgcaccttgccagggcttcaaaacagtgttacctttatcccccttttggcctgtcccaaggctaaggtcatgaatgctcagcgcttggtggccagaaaaggctgttcttactcccttttagagacctttcttccccacatcttagcctgcttagttctcctgcaaattggggctcttggtcacagggaatcgggtgtcattgcatacgcattaggataactcctcgttagacactcggaaagcaactcaaaacacacgtgtacagattattcattaagcagtctgttggtggtcacgtgctaaatgttggggaagatgcagagatgaatgtagtgctgctggccttggggtctggaaactggtgaaggaggcagtcaggttacaatcatagtgctccagggagaacaagggaagcaaggaagatggaatacagggttcccacttcaggtgttgttttttagtacaaaccatgattgagaatcctcttggttcaggagcaagctggagggtccaggaat

SEQ ID NO: 68364 - DNA, 1116 bp, Homo sapiens
tagaaacactacagcatttttagtagtaaactgaaataaatcttcaaataaacgactttaacattttgcacattggtccaggggcagaagagctcgtctgttgccttttaggagggctctaatctttttctgtttcagctcatcgggtcctcattgtcccctactgtatgtgcccagcacaatgtcagggcacatttctacacaatgttggattccagctgatcctccgtgttaatccattcgttagtgccaaattgcagggttccttgccaagcccgtcagcacaatcagagcttctgaagtcaggtacctcaattacattagttcagttgtctcattagcccccatgcatcatccaaactcatcatcaaacgtgttttccttcattattgttgtcattttcttaataccagtcttgttgaaaaaggattgttttagatacaattttgcctaacttgtttcatctccagaatacaatcctaaatagagccaagatttgccggagagaggagatagcggttgaggctggtgaagcttccctccggttagaattagagagaagtggatgcagaacttgggccagtaatggacccatccatctccctagtcaagaggacattcttgcagccagaggtggttccgctttggaaatgatctactttgtgtaaaccggtgcatcacagatactgttagagtatctcacagatactgatacagcatggtctgcattttgtagatatgagggctctcccttaggtttacagccggataaaggagctccacttacctggtgatcacaggcatgtggtccaccctgctgggctctaggactttgaacatagagaaggctatcttttaggaagactgcaggatcaggagtcgggaagcagggattctgcttgtagttttacatctagcagtaacaacttttagcccatccctcacctactctgtgccctggatttcttggctttaacatagcaaaagcctctctttatagttttcctaactccatctctccccaaaaagctggagatgtaagttttaaattccagtccttggcacatagtaggtgctcaatctctcatccttctgtccctcaagatagccgatggc

SEQ ID NO: 68365 - DNA, 1048 bp, Homo sapiens
acaaaaacattgacttgggcagctattatctgaggtcaaagttattctttaattccagctgtaccttcagctgcctatgtcgctgaagcaacttccccttgtgtgttttcacacttagagattggagtaatccagacacagaaaatgataccaaaattgaaatgtttctgaacgttaaatgattcaataatttgaaaatagtttcaaatttttcaaaattcaaaaatttgaaaatagttcgactagagcccatcctcacctcaggtagttacgtggtgtgtgtgtgtgtgtgtgtgtgtgtgtgtgtgtgtgtgtaggcacacaaacccatgcatgcacacatgtatgcacagtggtggatgagtgtgagttaccaaaacaaataccactaaatgcaggataacaccatgatggctagtagctggattgactcagattttctctgcagatccttcctagtccaccctccttccatgacatgggagtttgtgatatgcaaaggataaagtaaacctgagtttcctggggcttgtgtcggcataccaagctcctttaagatctctctttgccaagatggggctaagccagaggcttccttggcctggggaataactgtcctaccttcctccctggagcggctggcgcacactgttttgacgtgtgccatgccttccatcttttacggcctcggggccagaggagggtatgctttgaacaatgtgaaattcctctcctaacagctgtgcaaaggaaactcacagctttctatctccatctcggtccacttagctttcttttggggtataggtttcttgtctgttcaggggtccctgttcctcactttctggccttcagaaggaccagtttcagtacttcctttcttagggaggcaagtcagtcttctgaggttctctgttttattttattttatcctagagtatgccttcactgttgaccgtgtcttgcctcatttctgctaagaagccagcatcttctgaaaattgagtgtcttgtcctgtttcagatcttgggccgaggattgaccatg

SEQ ID NO: 68366 - DNA, 1006 bp, Homo sapiens
catgctttgccaaggtagagtgaaccatgcgtctttgcaggctcaagggatgtttaaagaagcggtaggacatcgtccacccacaagcagagaccgcaggataaagcagacatccaatgtaaatacaacccgtgcaaaaagcagagtcggcagacctggagtgcattcgcagtatctcccgggggtgggggaaagaaatcacctcttcagaatgtccagaggggagttgccttgcttacctggggggcggtaccctctctcgtgccctcacagggctactcagcctcaggtagctggtgccagaataacacagactcagctgccagagcctgctcttaacacctgtgtttccttttcagatcttacaggtgaacaaggtgatgtccatcttgttttatgtgatatttctcgcttatctccgtggcatccaaggtaacaacatggatcaaaggagtttgccagaagactcgctcaattccctcattattaagctgatccaggcagatattttgaaaaacaagctctccaagcagatggtggacgttaaggaaaattaccagagcaccctgcccaaagctgaggctccccgagagccggagcggggagggcccgccaagtcagcattccagccggtgattgcaatggacaccgaactgctgcgacaacagagacgctacaactcaccgcgggtcctgctgagcgacagcacccccttggagcccccgcccttgtatctcatggaggattacgtgggcagccccgtggtggcgaacagaacatcacggcggaaacggtacgcggagcataagagtcaccgaggggagtactcggtatgtgacagtgagagtctgtgggtgaccgacaagtcatcggccatcgacattcggggacaccaggtcacggtgctgggggagatcaaaacgggcaactctcccgtcaaacaatatttttatgaaacgcgatgtaaggaagccaggccggtcaaaaacggttgcaggggtattga

SEQ ID NO: 68367 - DNA, 1023 bp, Homo sapiens
cgcccagctaatttttgtatttttagtagagtcaaggtttcaccatgttggtcaggctggccttgaactcctgactcaggtgatctacccacctcggcctcccaaagtgctgggattacaggtgtgagccaccatgcccgaccatagtgcagttgtctcttatctgctgcatgtatgtgtgtacacacatgtggacatgggcttgtacatggacatatgtgactacagaagtctgtgtacacacacagccatgcacacatacatgctgctgtgtaacaccaccaatgtgggagagactggttgaaaacatggatctcaattctctttctatctatgcagtgattttcggtctctgaggactccaaaggatacttacattccctggtttggtggaaatcctgggcatctgagttggaagagtgaggacaggggaggagttggggacattgagactgttggaacgtcttggaaacaatgacccactcagtgtctgaattcattttctgtcataactgccctgaaaaagtccagtgtgtttagaggcgtgttttggggatgaggaagggttggaactggttgaactggatttggaatcagagtctaggccctattgtcctgcatacctgccccatagcactgcagtgaggcagctgcagggcctgatgtatttccccattctctttgctgaattgaggcaaagaaagacagtgaccagcacatatgtgtgtttgtgtttttgtaaaagcacccacatgctcatgaggctaagagtgggttgtgaggacagatgggtggctgagcagggaggtaggcagagggacagagggaatgttcttctggaaaatcctcaggctcattgtgttctgcagaaggccagcagcactgcattattcaactcttcttgctggaatgcagattagaaactaagaatcttgccttcccactcattccctctttgagaccattgagctacatttctccttctacctggacccccttatccttaaattgaccatcagaaca

SEQ ID NO: 68368 - DNA, 1273 bp, Homo sapiens
gttatgatcgcaccactgcactctgacctggccaacagagaaagaccctgtgtgtgtgtgtgtgtgtgtgtgtgtgtgtgtgtgtatacatatatatatatataaagtagatggtcctgttggaagaggagttatgagaaacagtgaaaggaattagcatctatatttcaggagcagtgtaggcatggggaccctagaagtgctactattttgggtccaatgagccaactcatgttttgagttgtagaaatgtcatatgaaagaggagcagagacaacagtaaggacgaaagggacgagcacataatgcagccgttgtgccctccccattcctccagctctgggatgtcttggggagccacaggctaggggctgggacaactgggtctgggtccttactggcaactttcccgtgaggtaccagttatgggaccttgaacccttcacgtaacccctttgcacttcagtttcttccttagcatttgctatttagaaattggggaaagtaatgaggagtgaatgagatgctgcttgtgaatattctttgcttgtccaccagtgttagaaatgatgcattatcagtatgtggcagcatccgcaggatttcttaatttaggacattctcctggaatgctaagggcccactgaaatattctttaatctgtcatgaacagccattcttaacctccactgaacagaacaggggaaatgggctgatgcttcagtagtggggataagattcagttaaagaatgtcttgactcctgaggcattacgatagggtagaaagggtggtaggaaggagctttccctggagactgttaaggacaagaggggtctgtctctgtgggtttatgtgacaagagactgggctgaccagatggccttgggctgtccctttgtacccaaggcagttgggtaagtctcctgggttcttgccccaatcttttcttgacttggagaagagctcaggctcagctgtcccctctacccacttccactttctcttccagagaaatgaacagagctccctaaaccagtgaatctattcgtaagaagaggtcacatcaattggagacactcagggagcacagacttaccatgtagctactttgtgggatggtgtgaggagattgatgagaagcacacacattttttttcctcttgcaaattggttgtgctccctttgggaagacaggaccacaggctttctgaaggcaaggaccagggctggccatctctgcctccctgggcctagcatagcccctggcatgc

SEQ ID NO: 68369 - DNA, 1007 bp, Homo sapiens
gcagtgagccaagatcgcatttctgcactccagcccgggcgacagagcaagaccgtgtctctccaaaaaaaaaaaaaaaaaattccatagtccccgtccttcgaccttcccagtctactgcagcagcagcttacaaactcagcgttagatgattgtaagataaatggacttgggggtgggggtggcatttgcagatttctctgcgtgaccttgcagccctctattagcagcactgggctatttccaggggagtgttgaccgggagggcgtggcccccactcctccccaccacatcccaggctcgctcctctcgccccacagccaggttctccgaggaggcgtgcgcggtcctgacgtcccccacattcgaggcctgccatcgtgccgtcagcccgctgccctacctgcggaactgccgctacgacgtgtgctcctgctcggacggccgcgagtgcctgtgcggcgccctggccagctatgccgcggcctgcgcggggagaggcgtgcgcgtcgcgtggcgcgagccaggccgctgtggtgcgtgccctccctgcccgcagccctccgggccgccccccaaatccgtccacgtgtgcttttcgaagccctttctctgcgttgtttcctgtggaaagagggcgtagggcattgtgacaaacacgggtggggaggacggttcatttgcacccacttttcccttccacctcccagcaggacaggcggtggggaccggctgatgattcgggcctgttccaggaagacaggttggctcctcctacctggaggcctagaacgtgggggtccctgcaaagcttgggtttcccgtggccgctgccacctagtgttcgttcagcacagaaggtcaggctgtggagcgaatgggtcccagatcccactgggtctccgcctcccttaagagtccgatgaaggcaagggaaattcacatacaaaccctttgcttgtaactccaggcaaaccaccgatggacaaaacctctggcgttgtat

SEQ ID NO: 68370 - DNA, 1036 bp, Homo sapiens
tgtgattaagatgggccacaattgggcctgcacaccaacccaggcatggtgaggtcatggctggatgggctggggcagctgctctcccgcagctcctggcacggccgacaggagttgaaagaagacaggagtagctgatgcagggccttggagccagggagatgctggaagtgtgcaaattagctggcccttgttttgcatccctgccagaatggtttagcagagaactgaggagccagtaccgattgcaggcaaatgagaatagttataagcatttgatttcctggtgtcatctcatttgatttcattttgcagaaaccatctagggtaggtccaagtactgctgtctgtgtcagttaggagtaggttcagctgtgagtgacaggacttatacaatctaagtttatttatctctcatgtaaagaagtttggggtaggatgtccagggccatgcaagatctcatggtgttgggatccagggtccctctgtcttatttctctgttgtccccagtgggggcttctaccttgtgcaccaaaacgccggctcaagcttcaggcatcacaactacattcccgcagtagaaagagaagggactaaggaagaagcagtcccttattttgaggacacttggtggaggttgcacaagacccctctgcttatagcctactgggtattgcttagtcatatggctgcccccagctgcaagggaggctgagaaatggaatcttattcctagcagctctgtgccccgtgggggtgggaaattgaaaactgaggattctgtgactaagaaggggagaatagctcctggacaactttcaacctcttccacttttcccctctttcacaggtagggaaatgaggatgcagagaggcaagataattttccttttcttttttgttttttgcgacggagtctcgctctcttgcccaggctggagtgccgtggtgcaatcttggctcactgcaacctctgcctcccaggctcaagtgatcctcccacctcagcctctctagtagctgagactacaggc

SEQ ID NO: 68371 - DNA, 3222 bp, Homo sapiens
gccaggcggcttccctttaaatcctcgcaaagcagaagggcccctcactctggcagcaggccttggccaaggggcctttagccctgacgacccggggaagagtctcccaaagcagaacgcccggtccggcgcccagaccaaacgcgggggaaccggaagggcgaggcctccacgtaagtccgcggtaaaagtggcagggagtggctgcctgcaaagaccccaagacggcttgaagaaggagtgggtggcgggtgggggttagggcgactaggcggggaaacagggagagggtcgggctccgcggggcagctggggccggggctcgccgacctgggcgggggcggggggcggggggggtgcggcccgggcggggccggtggggcgggaggcgtggccggcggggggagtgggggcggcttttcccggcacatgcgcaccgcagcgggtcgcgcgccctaaggagtggcactttttaaaagtgcagccggagaccagcctacagccgcctgcatctgtatccagcgccaggtcccgccagtcccagctgcgcgcgccccccagtcccgcacccgttcggcccaggctaagttagccctcaccatgccggtcaaaggaggcaccaagtgcatcaaatacctgctgttcggatttaacttcatcttctgggtgagtgagcgcgactgccgcgcgctcctctcagggcccacctgttcgcgggccccggacactggccgcggccgcgagtgccggcagctggcactgcccgcaccgggcaggcaccgggcgggaagagagagcgccctgcggctgccagctggctccaaggccgggtccagagccgggcgggacggccgcgacgggcgcattcgggtgggggctcatcaccgcccagccggcgtggggagccgggccctcttgagatgaggcgtgcgggagggtcctgagcactttagctcgcctaggatttgagctggggtgtgtgtctgctcccagctcaagtccctccgagtgccagagaggaaggcagggagaagcggagcacccctctttgggccaaggccaaggaggactgtggtgagcagtatggcttgtgaccgggtggggtctcccaggtagtagggggcgccaggaagggagggtgcgggcacggcgagagctcagccaagagcggctctcacttttacgcaggagcggcaggggtgcctcggccgcgggtccggccccgggacccagtccctgagagtcgggggcccctccacccttgaggaggaacctcgcaggcccccgttccctcagactttgattctgagccaccgtgagagcgccgaactccctggtagctccctgaaagactagcttgtcttgatttctttcaaggacgataagtatcttcactggagagaactcagagttcgggagaggagggggcagatacctatctgcgcctctagtgggatgagtcctgtgtgtgcatttccgggagagatcaggtgccagccagctgcccgcccaggagagccttggccttgccctctcccctccccgccagcccaggcggcccacccaaggccaggcagggcgcagagcggacgttcatctggagaggccagcggggccaggagctccagagacacctgctgcaggccactcagcctctacaaatgggaaggctgagaggcgacagaagcaaggaataggaaacccttgtgtccttgtttctatagccacattccctgcacacacatgacaatacttgccgctctgcaggcaggaagagagtctctatgccactctcaagatagatggatgtagaaacaggtgcatgccaccagagtcttgtaacaaaaaagtgcacttggccaggcacagtggctcatgcctgtaatcccagcactttgggaggctgaggcaggaggatcgctttcatccaggttcaagaccagcctgggtaacatagtgagacccccatctccacaaaaaaataaaaaattagctgggcgtgttggcatgcacctgtgatcgcagctactcaggaggctgagatgagaggatggcatgagcctgggaggtcaaggctgcggtgagtcatgattgcaccactgcacttagcctgggtgacctagtgagccctgtctcaaaaaaagtagaaaagaaacaaatgcacttattccccctggagctggtcactgaggtccccacaagcctccttagggaaatcttctaagattcactcctccccagagctgaaggggtggttgaacagtttttccaatttgcagagactgacttcccccagtgcatcagtcaccataacacacaccccagtgaggacggcatataggtgtgctccttcccaacccttgacttgctttaaaaagaccctgctggccgtgggcacccctcctcctgtgttgccacccaccccagcaaccacccagctgccacgcttagcttctttctttcaccaatccctggcagcagaaaagtatgcgggaaggcagctggcctcacccacccttgaactttgggagttttcctctcccctcccaggtacagtctctcccggctggtgtgttggttagtcctcagctgtctgcctagactgcatccaggtttgggactgcagggaaacacagactgccacagtgtgcctccctacccccatctgccccatggcatatgcaggaagctgatgcgaggctcacagggccactggtatctactctgtctgtggcctgctggcctgcaatctgtccgtactgtcctcagcctgccaccccactcgtattcagaaccccctatgcctggccccagcctaggtgcagctgatgacctatgtagtctgaaacagaaatcactcacactggaaatgtttggaatgacttttgaagatcatgcagtccagctctcttattcatagtgaggcagcagaggaagagagatggggtgatttacccaggatcgcagagacagagccagtattacaattcctggggcccctactttacttctgtcctcttccatcttcatcagaggcaggaagatgggcagtagctatgttttcctgaattactgttcatttgtcctgtatctgggtccctgtggagatgaagccctcatccctaggagatgatgtaatgaaaaggaagactgtggtcggtccacttgtgcagagtgttagtctttagagcctttcttgttctagtcccatgatgtagccaa

SEQ ID NO: 68372 - DNA, 1066 bp, Homo sapiens
ccctggcctgatctcatccctgtgggtcactccctgatggccacagccaaaccagcaaatcagtctgttcttccaccacctccagaaccggccctcctagctctattttgattgtttctacatttccttcagacctccctgcccgcctgcccaccccccaaaaaacagttgagagggaaaacatcttgctgatgtccatgtggtagacacacaagtatttctccagctgaaatggggaaccagggttagggccagtccagtctgacacatgcatgtctgccctctttctggtcagagaaggggaggaactccttagggcaaaagagggaaaggtttggctatactgacagagcccaatcccctccccacctccctcagcccctttgcttactgtctctcatgcctcgctcactgatggaaacagcagtgtggggctgggaggtctctttcccaagaaaccatatcccctagacctaggggaggctggtgcgaaacacagagacctacactgggaattcagagacctggatgtgagcccagctctgtcctcaactcactttgaaaccttgggttggtcacttctgtgctctaagcctcagtttcctcatctgtaaaacaatagcttggaacaaatggtctcaaaaggtcctttcaagctcagtctatgaacccaacacccctacacataccacatacaacaatagaactctcctacacaacccaaaataggaaccaatattgggtacgatgtatactatgttggtgatggtcacattaaaagcccagacttcaccatgtgtaacaaaactacattcgtgtcccctaaatctataaataataatataataaacaaaatacaagccctgaattggaaatgggagatggataccaaggcttgagtcctcagaacttagcttttcttggcctttacctctggagcaagagcccagctggtgcttttctttgctgttgcttctcagttccctctcctcaccctgggtggggtctctctcaggggtgttcattgcccgtataccttagtacttggcctagtgatcaaagcacc

SEQ ID NO: 68373 - DNA, 1470 bp, Homo sapiens
gactttgtgaaaggcattagaaatgataaattccctagtgatcaagtgcagctcagatgggacagctggcctcccacccatccctctgactctcagcttaatcattgcctaaggagtggttttcactcggttaatttaatgagtgctctgtatttctagtacacacgaaaaatgcaactgtatgatcttccagccaggttgggcctcttggcttagcttttcccagagcttggtgcttcatctttgttcaggaagaaaggaggtctgtctctcttctccttccctccaaatgcagacggaaagtctcgtcctctgaggacttgcagaaaggaggaatgtctcaggagggatcatttggggagctgcactcccaaggagttgagaagcagcctggttgagtaactgggaaaggcaaagcagcctgacttggagaggggcccggattaatgtgattccagaggaggtcccggtagagagaagtttggggactactgacttggagaaaaatcagaaacccgggtcttaagagcccttcctcttcaatccttaagccaggcattgtgcctgagggaagaaatagtggctcttatgagctctgctagaaaagtaacccttcaggccaggcgcggtggctcacgcctataatcccagcattttgggaggccgagacaggcggatcacctgaggttgggagtttgagaccagcctggccaacatggaaaaaccccctctctactaaaaatgcaaaattagccagtcatggtggcaggtgcctgtaatcccagctacttgggaggctgaggcaggagaattgcttgaacctgggaggcggcggttgcagtgagctgaaatcgtgccattgcactccagcctgggcgacaagagtgaaactccatctcaaaaaaaaaaaaaaaagaaaagaaaagtaacccttcacagcttacccaatgcacatccaagtttccagtgacacctctgagcaggctaagcagctggtggctcctgccaagccctctcctcggaactgagcttcacagcttcaggtgccagtcccttgctgacactcccagtctaagctgtgtgttagtctccaagttcagaaacaacacaatacatgggtcataggagaagaacctcgactgaggctaaaaataccataaagttaatcaggcagttttattaattatgaatttattaattcaaaacctattcaaggattttagttttttttgtttgtttgtttgtttttgttcttttttttttgaggtggagtttcactcttgttgcccaggctggagtgtaatggtgcgatcgcagctcaccgcaacctccgcctcctgagttcaagccattctcctgcctcagcctcctgagtagttgggattacaggggtgtgccaccatgcccggctaatttttagtagagacggggtttctccatgttgatcaggccggtcttgaactcctgacc

SEQ ID NO: 68374 - DNA, 1941 bp, Homo sapiens
ttcttaaacttgagcgtgatgagagtcacctggggaggtgttggaaaacagagtgccggcccagtcccactccagtttcactgagtgagtctaggagggaactgcgaatttgcatgtccaggttcctgggtcatcctgctgctggtctggggtcatttcgagagctgctggactggcatagagaagagtttcctgggttgcctttgaagataagaatttctgaaggtttgagcactgccttcagacagtggctcggtagaagtcccaagagcagaagttgtctggagaggagagatggcccccaggatgcgcctgaccaaccagtcatacctacaaaagggagttctggttctctagggctgtgatctctggggcttttcaacttggctgtagtaaaactaaagttagtaatatgccctgttgtcatctagaaattccgccatgagctattacagtagtttagttgggacgcttaaggagagcaagtcgtggcaatttcttctgctgattacagcggagttttggttttcttgttcccggtgtttactgtgtggtggagctggataagggagcaccccaaagcctctagtcctgcccaagtggctttgcccttccaaagacaacagccccagccttcatttggaggtgggagaggaggacacagagagggttggaggaggctgtgggcatcgggatcctgtttgttcttgctggcactgcctggcccggcttcctgaggagtgaatcagcccatccaaggcttggcatgcagtagtgagccaagggttgccatggagatgggcgaggcccagagcccacaggtctgggtggcctgacttgtttttaaatgttgaagtctgtgcgaagagggagggcctatctccacttctgtggctttcttaaagcgtgactggtattttggggcctggaaaactgctggtgtgggaaacttgcatccccagtatttggtgtgttgcttacttcctgggtgctatggacaactatgactaatgctctcccaagtttagtagatgacaaaaacaaaaaccagggctgacaagcatcttattgaaggagggtgataaagaggccaaggtttcctctcctgcccaacccaggaaaatcccctctctctctgttatctgctgctgtaataactcctttcagcagggttaatttgcccacggaagcagtttgtgatccaaggaaggacagaagcctaaaatctgagccaacagtctccctttagccttccttccccactttcctttggccattcccatccagtcttagtggagctctggatggcagtttgcaggtgtgaagcagataagtttatccattttcctccactacccagcgctcacacagactcccacacaaaccaggaaacagaaccccagtgtcctaaattcccccgctgccacccagccgccttctccgatcacaggaggacacaacagccgtccacagagggcccatgaattgacccagtgtcacctcacgtctttctcagggtttattattattgtcattttttttccctatggaatccggctggctgtaacacttcacagttttcagaatgttttacatgcatcactttatttaatcctctccttcaacctacgttgaaggcaggacaggtatcatactgttttttttccacaaacgaggactgtaacgttcagagaagctgaggaaagtgtgtagtgtcagagagctcctaggtagcagtgccagaattagagcccaagtttatatccatcacagtccagtcattctcaacagaggcgtgcaatagaatccctgggagcacaaagagtcccctgggattgctgaggcaggtgcatgtttagaaatcccccaggtaggctgggtgccatggctcacacctgtaatcccaagctttgggaggccaaggtgggtggattgcttgag

SEQ ID NO: 68375 - DNA, 1075 bp, Homo sapiens
aagctctctttttttcttgctcctggcccctcccatttagtttctcctattattaaagtagctgaagctgggcgcagtggctcacacctgtaatccaagtgctttgggaggctgaggcaggaggattgcttgaggccaggaatttaagaccagcctgagcaacatagcgagacccctggctctacaaaaaaaaaaaaaaaaaaaagggtttaaaatattagccaggattagcggcatgcacctgtaatcccagctactcaggaggctgaggtggaagaatggcttgagcccaggagtccaaggctacagtgagctatgattgcaccactgcactccagcctgggtgacgagagcaagaccctgtctcaaaaaataaagcagctggggtgaaagccggatggggacaggggagcccctctatgccacaccagaaagtgagttctcctagaaaatacttcagagcgccttagatagcgctgcctgacaaccatgaaaggcattattgggtggcactggttatacaagttttgtgaccctgtgaccccaagccattgtgactcagccaactggagcaatgtctccaacagcgttacagaaaatggggcagctgatggttcacatagcatcccccccggccggtgaactcagtcattctgtcagaaaaggcagcagggttcactcctgatttttgtccaagtgttcccagtcatgcccctggccctcccttttctctgggttacttgaacctttctcctctcttattgtgagttgttaagcctgtgagaccgagacctatggcagcttttcccatttctccagagccagctgcttttccttcctggttgtagtgaaatgttgtagctttgacaaccaagccgcatgatgtaaggtttaaggtggggtccgaatgcgggggactcccgactccgggcttggcctggcccttggccaagataagagacctgagatgcttccttttccctcgtggttccagttctccagcccagcatccttcttaccacctgtgcacagagaccggatcaatgactggacttaacatattggctcagggtcc

SEQ ID NO: 68376 - DNA, 1101 bp, Homo sapiens
cctgagcataatttcctcctccacctaaacatcaccactcacctgataacaatgcttttcctttatcatttataggcacatgtaagcgtctagctctgtgtgcatccctaaacagcatagcgtttttaactacatggaatcatattgtgtgtgtgcctgtggctctggcttcttggtttagcattgtgagatgcactcatggtgttgcgtgtagctagagttactcgttttcactgctgtatagtgttctgttgcctataaaataccccttcagccaatgggcggcaggtaggtcactgtttattcctcgcttgctggtatttttagtacctgcatgaatcaaacacaccccgtaatggcatctacaactaccaggcgtatatgaggggcagagaccaagggtggtcacaaagtcctttgcaagtctcacccttaagcgcgtggggactgtgttgttgctggcagccagaattaatgctgatgtcctgtatgtcttgcagcttgccgggattgctgtccttgccattggactatggctccgattcgactctcagaccaagagcatcttcgagcaagaaactaataataataattccagcttctacacaggtgagggacggggaaggctcagtgaattcagaccctggctccaacaaagttcctgcaactttggaggccccatgttgacccagggacttgggcttgggaaagacttttgctctagccacgctggccagtcgtgtccctttcaagttgtgcagtttttgtgtgtgtcgttgtgcctgggaatttgcgtttaactgatgtggtttcttttcctgatggccaagtcaggcatgttgatggttctctgatgtgatgtagcctctgccaaagttgtactcattcttgagggtttacgaacctctgttctcatctctgatgctctctcctgattgtcttcttatcctgcatcatttccttaattcaaaaagctttgtcctggggatctgcagtgctggaagaagatatagacagctttcctcttcactgttcagatagggactctgagactgggaaaaacatcagcctcctggaaaacacagcaacaataggagagac

SEQ ID NO: 68377 - DNA, 1013 bp, Homo sapiens
tttattgttagctggggttttttggggtgtgtctctctattatcggaaagaaagtgagagaaagcacaatgtatgtttagaaaaaaaactacacatacacacagagtttttggggaacaggtttctatagcgccctgacttgttttggcaacagaccattttttgggagtctgtgacaggcttagaatgctgtcctgcagagcaggagggaggagccgggtgcgggtgctggggaagactctccacactccacgccgtgttccagaagggagccctgtgctgggggagcaggtctgccggcaggagcaggcacagtcaggcctgctttcctaagcaaaagccctgtggccggcgcgtgtgtctccaaagagagactcagtcctcccttgtcctggctgcttctaacaacccactttttcttttctgttacccaaagcctctatggctgattctttatatttttagatgtgggagttaagaatctcatgggtaagaggatggaactgggaggaagacactaacatttttattttttattttttttattttttttttgagacgaagtttcaatcttgttgcccaggctggagtgcaatgacacaatctcggctcaccgcaacctctgcctcccaggttcaagcgattctcctgcctcagcctcctgagtagctgggattacaggcatgtgccaccatgcccagctgattttgtatttttagtacagacggggtttctccatgttggtcaggctcgtctccaactcccgacctcaggtgatcctcccgtcttggcttcccgaagtgatgggatgacaggcgtgagccacctcgcccggctggaagacactaacatttttgagcccccttctttgtgtgtcattcattgtcttgtgtgtattatataatttaatccccttagctctacgaggagtgtggagtgattctcatctcacaagtgcagaaaccgaggcctagagagctgaaataacttgtctaagcttatattccctcaag

SEQ ID NO: 68378 - DNA, 1044 bp, Homo sapiens
taaactgagagccctggtgaacagtgaaaaacactgttccatttcttgtgtaaaggacacgctggcatatgctactgctgctacaccagcctttcttttttttttttttttctgggcctgtaatgtcagcctgaaaaaagcagaataaacaacccttaagcaaattaataccgtaatcctagagaaggctctgtgatggataactttttccatgagtcagacagcaagctaacattcgcttgttttataaaggggaacactttgtcatttatcaacagcagccttggctaacaagcttggggtgtaagcgatgagtagcttctccaaagggaagcactgaatagcccttgtaaaaaccagcccgagccctgcagtggttccgtgacttccatggggcctgcttccagatgagctgtcctgtagcttgccggctgctgctgagtccccgaacacagctgccaggggatcgcttcccttttcccgtgactagagagggctaaagctaggcactgcagatccgtagccatccacgcaagatttaaagcccacaaaacccgtgatcctaaaatcttcctctgctgagccctagcatgaatatttaatattaaccacaagccccattaggagcatgttctctttctctgcgtgggaaatactttctctttagtagctcacttgcagctaatccaattcccttggcctctgccaggaccgccaggttcaagaactgggatctggacttagagaaaacatgtctgcctgttcgttcccactccacggtatttcatgtgtttgtaaatccttttgatctcttaatacctcctgtttattcagcccctgctatggagctcaaaggagtgacctcatccttccttgacttgcccccattagatggggagaaactggggcctttctactgtccccatgtgagagaaccaaaggaggctgccctcttacccagtgctccatgcatggggctgcacagcctccccaagcccagcttgtggcctcaacagcgtttgactgcccaggaagatgcgacct

SEQ ID NO: 68379 - DNA, 3866 bp, Homo sapiens
ccctgggtaggggggtgcctaggtgtgcacggccccttcctgctggaaatctgctctgacagcgtcctctgtaaggcagggtcccagaagttagccagagtgtggaaggtatatgctaactagcttgagtggattcatcttgctggaaagagctgacagactggaccagtttgcattccgaatgtagggattcccgtggatattctctgtcctggattgagggctaatgggcaccttccagaagggctgagggtaaggtaggagcgtgagcttgatgaagcagagtcatgcaagagaggctggtgggaaggagacctggggcagaggtggaagaggaggctgtattttaaggaaagggaacttcttccctgagatgaggggaataaggaggtggggaggcaggagttaggcagagggaaacaggaattgccggagatgcctgggcctctgaactgatgtctccacgcgtgtgtgcttcctctgtcctcccgcaggagtctatattctgatcggagccggcgccctcatgatgctggtgggcttcctgggctgctgcggggctgtgcaggagtcccagtgcatgctgggactggtgagtatcccctcggcatccccacagccaccctgactcccaccaacaaaaacctcagcaggcccagacccagaccacagaacagatggagggggatggggtcaggaaggtacccaaagggcatgagctgtcctcagcctgggcccctccccgatgtgaggcgtcgcccctcttcctttctggagcctgtcttatcgcttcccctaggcaactaaaaggactatgtttcccccttttctcgaggaccacgtttgctttttttccctgaatccacaggtacctttgccttctccttcttgtttcaaaatctgttttggtcttttccgaactccacggagtggattcgctccctttacttgcccaaatctcttgtcttttgtgaacaatagtagttgcctgctcactgactcttaactaacgccttgtaaatgctagttctgggctcagctgtgctcagctctttcctcatgtccgggcaccttgcctcactgtggcctctgtcctgggcttggttaactgcctgttctgtgaacttcttccctgcccctgctaggctattcatttgtgtcaccagatgcctgttcccagggagttgtccttcttccttgtcccaaaataccctttgattttcctggctggttggctgggactgttctcaccccgtcccctcgttgccttccagttcttcggcttcctcttggtgatattcgccattgaaatagctgcggccatctggggatattcccacaaggatgaggtaggtttttcccatgagatctcttgggtttgggagttgggggatgggggacagtgaagcagggggcaagtcctggctgggcactttgttcagctttcagctgttgaccaggcctcttatctcatcgcgtccctgtgtgccagcgaatgtgccctcctcggggcagggaatgtcagtgcgcttactgtcctgtccgagattgtgccagccatggtgttgactcatagtagatgttcagaaactacccattgggcctgtgcgtgtgtctgtctgtccatctcacacctcagcagcccttccccacaacttttagaaagattactcaggaaatacaggctttctgtgggctggacacccttgcctcctcctctgatctataaataacatgttcaagtgctgcccccatgagccaagtgctgcccccaagcctgtgcagggtccacagatgtttgaactatgggccccacatccggagacttggccatctagtatggggaaaagacatgaaattgataagggtcatagaggtgatttatatccaaagtactatgggatttgaaaaggtggggctgggaagggaatctcttttggcttcatagagaagggagccgtgacctaaaccttgaatgagagatgcgttcaggaggaaagttagtggaggcaggggacttccagtcaaaggggctgagcatggctgagcttgggcttacgtggggagccctgcagagttttggaccaggatgggccatatcagagtagtgtttttggaagggctgccttgtcatgttcagcaggaagggggaaggaagagagatgctgagatgctggaggcaggaaccctattgttttgttttgttcttgagactagtcaagcgcggtagtgagaaacagggaagagtagaacaaggacttccatctgtaactgacgtgagcaatccattgagataactcactacttttagcccagccaagggaactctgtttaaaaaaaaaaaaaaaacatgtctgtaagcaataacagctacagccatagaaataggaggggatcattgtgaaaaatgtcagacagatgctgaaggaaaaatgctggctgttggtctgttaactggatgtggtgagcatcaaaggggcagacagacattaaattgggatgcgccaggcgcaggcacataataatacatcccctatattatgatacaatagctggcacgtgctccagatttactctgtactggacatagtggtaaaggcttaacatgcaatatttcatttaaattctcacaaataatctatgagctgtagggacaaatgtggaaactccatacagagaggcttagtaatttgccaaaactcatacctaagtgaagagaaaaacaagatggaagcctgagaaaatagtcaggtcaggagtagtatttcaattattatcatcctctagatcatagagattcaatttaggagccaagttaggagccaagtagagctgaaggactgaccaaagtgtaagggacagggagaaacagcccgagtgggtttctggaggatgtgggaggagatgggaagtgcccaaaggccctgagagaaggcagtgctagcagctgccatctgcccagtgacgttgtccaagcacaggcatctggtggctgagagcttagagagaacaagatggaacgcataacatttgttcgtggaggaagatgtgaaaatgccgtctctgcccctctctcgtctgcccattgtaggtgattaaggaagtccaggagttttacaaggacacctacaacaagctgaaaaccaaggatgagccccagcgggaaacgctgaaagccatccactatgcggtatgtcgccttggcaaagacaccctcctgcgctttctccggattgtgtctgcacacagggtgctgactgcaccagaccagtgcaaacattctaatcgtcttcttacaatttgtttctctcatccccatccctgccttctcgctgtagttgaactgctgtggtttggctgggggcgtggaacagtttatctcagacatctgccccaagaaggacgtactcgaaaccttcaccgtgaaggtaaactcagaccaggatcctggtgtccctgcccccattgctctggacaaaccctgcaagcatgaaagtgacagcagccaagtgctgcttcagcaagacccgttctgcctgtgaaagggccccagggcacccatctctttctctcccactttgggccctctgtttactcaagggcaataaaacaaaggccggaccaggggaatgacaagtgttctggcaccgcccactgctgccagcccggaagctctcaagggcaggcgtgcttctgagtcttggactcccactctgactttgtcagtggctcctgtctgtaagccagagttaatgtccaactccagaatagtaaaaggtgaccttacaaccatgtcagaaatagacccccaagcagggcctgtccctcctccttccctgacgtcctgcccagattttagggatcca

SEQ ID NO: 68380 - DNA, 1376 bp, Homo sapiens
atagaatattaacattttgggaggccgaggcaggcggatcgcaccacagcactctagcctaagcaacagagcaagactccatctcaaaagaaaaaaaaaagagtattaaataacatacacacaaagacaaatgcaaaagtactaacctgtatggactaggactataggaaaacctggaatttgagcattaaatttggctctgagcttactttcccaccctgaaagttctccaaggaaaatgcttgtgcagctgactgccaacccccccagattcctcacgtcccgcacccttctcattatctggcctgcatctctcctgcttcagcaccttctgactcgtttggcctcctggatgccattctccttgtcatttttcttggactgggtgacccatgtctctccctttccctcagccttccttcagatcaaaccaccctgatcctcatgtttcttcctatctcctagatatttggcatgatcttcagtatgatcttgtgctgtgctatccgcaggaaccgcgagatggtctagagtcagcttacatccctgagcaggaaagtttacccatgaagattggtgggattttttgtttgtttgttttgttttgtttgttgtttgttgtttgtttttttgccactaattttagtattcattctgcattgctagataaaagctgaagttactttatgtttgtcttttaatgcttcattcaatattgacatttgtagttgagcggggggtttggtttgctttggtttatattttttcagttgtttgtttttgcttgttatattaagcagaaatcctgcaatgaaaggtactatatttgctagactctagacaagatattgtacataaaagaatttttttgtctttaaatagatacaaatgtctatcaactttaatcaagttgtaacttatattgaagacaatttgatacataataaaaaattatgacaatgtcctggactggtttttgttttgtttaattattttgagagctatttggtttgcaaatgtctttcaactcctattaactccacctgcatttttttttttttttaagacggagtttcgctcttgttgcccaggctggagtgcaatggcccgatcttggctcaccacagcctccacctcctgggttcaaacaattctcctgcctcagcttcctgagtagctgggattacaggcatgcaccaccacacccggctaattttgtatttttagtagagacggggtttctccgtgttggtcaggctggtctcgaactcccaacctcagttgatccgcccgcctcagcctcccaaagtgctgggattacaggcgtgagccaccgtgcccggccccacctgcatttatatgagaagtagattggg

SEQ ID NO: 68381 - DNA, 1134 bp, Homo sapiens
gtgcgtgggctggatcctgttccgtcggtgcatggactggattctgttccgtcggtgtgtggacgggattctattcccgttggtgtgtggactagatcctcttccgtcggcgcgtggactggatcctgttccgtcggtgtgtggactggattctattcccgtccgtgtgtggactggattctattcccgtccgtgtgtggactggattctgttctgtcggcgtgtggactggatcctcttccgtcggcgcgtggactggatcctgttccgtcggtgtgtggactggatcctcttccgtcggcgtgtggactggatcctgttccgtcggtgtgtggactggatcctgttccgtcggtgtgtggactggattctattcccgtcggtgtgtggactggatcctgtcccgtcggtgtgtggactggattctattcccgtcggtgtgtggactggatcctcttccgtcggtgcgtgggctggatcctgttccgtcggtgcatggactggattctgttccgtcggtgtgtggacgggattctattcccgttggtgtgtggactagatcctcttccgtcggcgcgtggactggatcctgttccgtcggtgtgtggactggattctattcccgtccgtgtgtggactggattctattcccgtccgtgtgtggactggattctgttctgtcggcgtgtggactggatcctcttccgtcggcgcgtggactggatcctgttccgtcggtgtgtggactggatcctcttccgtcggcgtgtggactggatcctgttccgtcggtgtgtggactggatcctgttccgtcggtgtgtggactggattctattcccgtccgtgtgtggactggattctgttctgtcggtgtgtggactggattctattcccgtcggtgcgtggactggatcctgttccgtcggtgcatggactggattctgttccgtcggtgtgtggacgggattctattcccgttggcgtgtggactagatcctcttccgtcggcgcgtggactggatcctgttccgtcggtgtgtggactggatcctgttccgtcggtgtgtggactggattctattcccgtccgtgtgtggactggattctgttctgtcggtgtgtggactggat

SEQ ID NO: 68382 - DNA, 1122 bp, Homo sapiens
ttttttggtttttagtcacagaacaacagccagactctcaccttctccctttcagaatcccaagagctactgaaaattacgggtattttactatgcaaaacaactcagtcccctggtagtctcactccaggctaacaggaaagatctgtcaagatctataaccaagatatgcaccaaggctccctggccttccttagcaaaacaaagaaaactgaaactttgaaatgacttttcctgctattgtctcacaccagattattagggaatcctctctagagccatcagtctttatacactgaagagggcagtagaaactctgttggtccctttcatagagcaatccccagggggcagactattgttttctcaccctggcagaaacgttgacttgcagatttattcctagcgggtctagctgtgatgactcacacttttagagaaagtaagcttctccagggagaagagactgaatcttggggaatgcccagggactgagaagaggaaaaggaacagagacaggaacagaaagagccgtcagagatggcgaccaagaaattaaagcagggagactgaaggaggcagccgaggctaagagccagggtctgaaggagaggcccgagcagctgtcagggagttacttcacctcttggggagttgcagtgcacgcaggacagacagtccgcaagtggccaggcacaaggcccagcactgtatgggcactccataaatgtttgccgttgtcatcattagaagaaaggggtggtctttggggcctgggtagggcctgctgctgactggggaaacgcatccgcatctgttgctcaggaagtcagtgggcacgtttcagagttcggttttagtccggcactggggagttctgggaggagagtgggtgaatctaggagccaccccagagacagcagggaaaggaggcatttcctctccatgggtacaaaggaagaagaatcctgctaggggccctcccttcctcttctcagttttgtaggggggtcacattctggcttaagcgccaatttccttttcctttcccgtcccctctgcccccatgtgtctctcctcttaaccaagccgagaaaattctcccagggttgctggagaggc

SEQ ID NO: 68383 - DNA, 1066 bp, Homo sapiens
gttatctcccttagttgctagatcatggggatgggggaagtggttgaggcccaggcagcagccattcccttaccagcatggaagacttcaatattttaacaaggatatggccataccagcaagtcctgatatcagtgctgcccacagcagccaccagtacctcccttttgccaaggcttgcctccgcctccaacctcagctctgccaccttctcttccctctccctccccctccccctccccaagccaacaaccgaccttctgtaactctttacccttcaaggctgtccttgaaagtgttgcagtgactgaactaggactcaaagagcaaggccctgtcccagctctgcttctccatacctgtggcaccttgagcaagtcacttcacctctctaggtctaggtttcttgtctgtaaaatgggctaacattcatgttctccacaccacagggcaatgatgtgtatcaaatgaccacatgtgcaaaagtgctttgaaaattttttctcaggtggcgctatttccttttgatggtacctgtatgaaatcgctgagggagggagaaggcagataatataatgcgtcctctcctcagccttctaggaactttcctccctctgaaggacagcagagtcctcagcctgggacaaagcccacctctgcccacgttctgccctcctgctcctcccagcttcagggcagaggcccaggtggtaggagagggatgctcttgaaggagcaaccagtaccaattcagaacacttattctaccatcaccaccaaccagggagggcttcctgaaggagggggaagacctgataacaggtctgccaatgggacatgagaagcaggaagacctgtacaggtaggaaaagggccattctgttcaccccactcacccccaacactagctccagagtttggtgccaccaaatcccggcaccaccccactttcttatggtaagaagtaccccctcagacagttacttaaccttagagtctccatgtctcagtagtaaggtggggtaaaaatatctggttcatggggtttttgtaaagattaaataag

SEQ ID NO: 68384 - DNA, 1041 bp, Homo sapiens
aactagatatgtaaacacactataacctacctttatagcaatcacagagttttggccaatgaaaggcagcccacttgtcaaaccttgtccaaataaggcaaacgccgggggtgtaaccaatccgggtgtttctgtaccttacttccgttttctgtgggtcactttccttttcctgtccacgaatattatcgaatcatgcagcagcccccagagtcactgtgaatctattctggttgggggcggggggcactcgattcgaggttcattgtttgctcagtgaaactcaagttaaatttaatttgtttaaagtttttcttttaacaattaaataatgtacattctaataccacagtgcctggctcataataagtgctcgataaacgctagctatgcttgccattcttttaattataaataacgagcaagtctcttagaatgccaaacacaccttcaaccagagctacattttctcctgtgagaagttcaggggctgccagagctgatgcctaaggcccagccagctagacttttctggtagagatggaaatagagctgaatggaagaggaagtgaagatctggactagacggtggttaatgtagctgcacgttaggaccacgtgggggctctttcaaacaaccttgttctggctccagcccagacccattaaatctgaatctggcaagtaagaccctgcactggtatttttttctttaagtgaggcataattgatgtacaataaaatgaacaaatcttgagtgcccactcaggtttgacagtcgagatgttgaacactcccattacccggtgccccctttccatcaattcctcttcctctcccactgtcattttctgaatgctatctctatcaactggttttgtctgttcatagaattcgtataaatgggatcatacagtatgtattttcttgtatgtgtgtctgacttattttgcttaatgtttctggaattcttccctgtgttttttgcacgtatcagttcctttttattgctgagtggttttgatgagcctattctggttg

SEQ ID NO: 68385 - DNA, 1063 bp, Homo sapiens
ctggctcccagcgctccctgtccccgccccgcggccagctcgctccactcccacttcctgagctccgccatgggagccctggaggcccggcctggccgctcccggccctggggtgcacatcggccctgagtcccgtcccaggctctgggctcgggcagccgccgccaccgctgcccaggacgtcgggcctcctgccttcctcccaggcccccacgttgctggccgcctggccgagtggccgccatgctcctgccttgggccacctctgcccccggcctggcctgggggcctctggtgctgggcctcttcgggctcctggcagcatcgcagccccaggcggtgaggaaggggcctggtaggagtgggcgagggtgggcaagagggatctgggcagccgtcgctccattccctctgccctcccaagctgacccctgactaattcttctctcctcttctccatctccctttgaaggtgcctccatatgcgtcggagaaccagacctgcagggaccaggaaaaggaatactatgagccccagcaccgcatctgctgctcccgctgcccgccaggtgagaggcaatggcaggacgaacctgggcctcggaagtgggtcacgggggctccagccccctcgcggcctcagagggaaggtgggcactgtcccccaggaaaactggctgctggagacgagcgtgggaaaccctggacatcacgtggaggagatgggactggccctccccactgggcctcctctttccttacctcactgagagggagccggagggccactggcaggatgatggggggccagagagaccgagggaaaggccagggtcacactacaggcagcggaggtgagggtggagcctcgtctcctgaggctctactgctccactcacgttctaggcacctatgtctcagctaaatgtagccgcatccgggacacagtttgtgccacatgtgccgagaattcctacaacgagcactggaactacctgaccatctgccagctgtgccgcccctgtgacccaggtgagtggggatgtgcctgcgggggggctgg

SEQ ID NO: 68386 - DNA, 1086 bp, Homo sapiens
ccagacaggactcaaactcctgggctcaagcaatcctcctgcctcagtctcctgagtagctggactacaggtgtgcaccaccatgccctggactttatagttgagactattatcatatcaattaaaaaatatctaaaagtatgaagatctgtggcatactaggcagtcgtgtggggagatagggacagtctgccctagcagagaggagtattttatcactgataatattcagaattgccagtgtcgggagatggtgagactataaagccatctgacttttagctgattttatttttgttctgaaatattttacagtctgcactcccttattgcctgcgctacgggtagactacttccccactttggtttgtttctgacatgatggctttgtaactatgaaggattacatccttgtccttcattgtaaactaatacatgctatggatgtatttggggtttaaacatgcgtttcggggttcaaacatgcgtttggggttcaagtgttatcttctgcaacttactctcagttcagaggaaaatacacacgtacacatatacacacatgaggagtcgggggagagagaatgtggcaaattgttaacaactggtggatctaggtgtagggtatataggtgttcattatattattatttcacctttttttgtaggtttggaataaaaagagagaaatacctacgcatgccaggagtatggtagacactggacagacatgaagacctttttctaatgggtcaggatagatttaggttggaccacagagaggttagagtgttctggggttttccaaggataggacggttgcccctaattttctctggacttggctgtttcttcttggagactcaaagaagcagggcacagagtattggattaatgggctctggggaaccctgtcatcatgttctcaatttcttgtgccctcgaggatgtgctgagctggagagggcaagtactgggtttactaataagatcatgaacaaatgatgcatccctgagctttacccctgaagcaccagagcagcctagcatttcactgggagaaaaccgggttttggctcgataaga

SEQ ID NO: 68387 - DNA, 4570 bp, Homo sapiens
ttcagcctcttgagtagctgggactacaggtgtgtgctaccacgcccagctcctttcttgtcttggtcactttgtgtactctgcacatgtctttccacaggtctgctccagctcagccacctgctgaagggacagaagggactgccccaggtgggggtccccctggccctcctcctaacatgaccagtaacagacgactacagcaaacccaggcacaagtggaggaggtaggtagatagctgtttctctgaaagtttccaaatctaggagtttggaaacaaaagggaacttcttatcttttctccttttttcgtaggagaatagtcaaaggccctgagaggcaaagcaccctttagagttgcacagggccagacttgtgattctctggttgttgtcctttcctctgtctctggcaggaagcttagctgctttgtttctgtgccctcctcaggtggtggacatcatacgtgtgaacgtggacaaggtcctggagagggaccagaagctgtcagagctggatgaccgagctgatgccttgcaggcaggagcatcacaatttgagagcagtgctgccaagctaaagaggaagtattggtggaaaaactgcaaggtgaattttcttgtcccctcctccatcttttcctgggcttccactggtagaaggcaagaaaaccctcagcttctacatttcttccctctaatggtgcaggatctctctgaccagcataacgcttgggaggaaatctggaaagcctcctcttgagattgcattacccagaattggccaccagggtaggctagagtatttagaaccgctatcagggaaaaagtgataccctgaggagtttggaatggttagttaaggagctttaccccaaaggagttgcctgcaaaaaatttcacctgtctcatcctcagacacacccaacatcagcacaatggctcaggcatatatacatacacacacacacacacacacacacactatatatacacatatgtatatatacatatatatacatttatatatatatatacatatatatacatttatatatatatatacatatatatacatttatatatatatatacttttttctttttcttttaaatcagctttctcagattgaaatatatatttttaaataactgcaacttttgagaatgagctgaacacttcacagtgaaaattgaactaattggttaaatatccagagtctgtatctctattggaatgccttctaaagccccaagacaccaggaactaagcaaaaaggagctcaatgcaggtcctgtgatgaatctgaaaagctacagacatactgtggttatgatcccctgggaagcagaagggtagggcctctctaagaggcctgcaggtctcctgggtgatgggtggttttttccattgtcccaaggatggaaggaattctgtttcccactagagatgtggctcttttcctcattcctgaaatccaagggctcattttttgtccatgtttcctcagatgatgatcatgctgggagccatctgtgccatcatcgtggtagttattgtaagtaagtatcgctgaagttgctggtggggtgaagaggtgggaaggtcctggagtcttctccctgcctgcctgcctgcctggggagtggggctgctctgactgaggtatggagaccgctgctatgggatcgtcacctggttcgggacgggggaagggcagagacaagggatttctttgatggacaagccttccccctgcaacgcattgcagggagatggcgcctcctgttctgaggaagtggggctatgctgtgtgtcactggcttgggttggagggagaccatggggatggggcacttaacaatggagagacctgaatgtctggtaacttggtgtaattcaccctcttgttttctcctgtctctttctcttttccgtctgggacttcctgattcctgtgtccagtctacttttttacttgagaatgtaccaccccttccctgttgtccattgccatccacattcatgtcctctgccctctgtttgctctctcaacacacttccccacccaccgtcctccattccagcccaggcttctccatcacccattcctcctttttcgttgcgttcatttgcactctgtccctcaacactagaaatgctgctcgtggcacaatctaagtcattacccgaagagcaacagctggcgcctcctccctgcctgctttttctgtactctcaagttcccccaaagccccaaagagttggaggccaagggaaggggcagggaggggagtggctgaggcgaagtacccatgaagctgcccagacttgggaggagaagagtatcggtgcccatggtgacttctagaaaacctggccactggtaggagctagggaggggctgggaagatggcagctcactcagtactgcctggtcatgtggagctttccttcctggaccaggcctgaagagggtcctgggggtggaccaaagtccaacttggtttcagtgcagtacccttttcgaaagtaaaaacttgttttttgtagttatttctaatctgttcgtccaggattttccgtgtctttggggatcttacaactttactttgttctccagaggcctggagaacacttagggattgtgaaaatagcaggacttgtttccatcctagaagcagtcccatgtgcttctagctggaaggagctttctcttctttacattttctacagcattctgtatgagggcaccaaataaatccatctagctggtagttttatctagccaaataatttaacctagctcccagttaattgttggcataaagagagagattgcctgttagttatagagaaacagtgagtcaagtgcttaatttgaaagtaacaagctcagaggaagccactccttgccctcgttaaagagggtcctgttcctctcttcctgttgatgaaggagcgtgagggtgttagcagtgtgagatctttggacacccatggaatcctttcctccacaccacccgtgcacttgccaaagacagggatgaggcaagtggttcttcctggggcccggccgatcctcaggatgcagagaagtcatgtagacccaccagccccaccttggggggaggcgtgccagcctgtgtcaggtgtgcttgtgtattgctgtgctgtcatggggccctctccttgagagccgcctctctgttcttcctgtagtatattcccctttgaaccaccctttcctgtctgaattctactttgcctcctttctcttcctcctctttgcatggtttgtgtgtatagacagtggaacctgaggatgggatctgctcagcctatcttcggggcaattgctgagcttcaggatgggctattaatgtgggataagcccaggtgcaaggggaggagggcaggctgggaacagagcggagaatgcccatggccctttattccttcttccctcggtccacgaacaggaagaggctgaggccatgctgggcagggtctggatgcccactttccatgcagcagcatttcattgctcaaaaccatccttcctttcctttcgcccttgtttcccacattcccttcgtcctgcccaagggcgggactgaagagctggaagaaagcagtcagtaccctcccaacggcccccctcgaaggtctccactctcctctgggctcctccttgcctaatgcagggggtcaccgctggagaagaaccaccactgtcctcgatgtgtcccaagcctggagcgaatccgtcctcttggctctcccagccctatcacaggaatcattcctgggtttctgtccctctgaggctcaccaggtgtagttggccttgttctttgggggtattagcccttctactttctttctcacccaccctgtaccctcttctgtgtgtctctgctatccccctttcctcccaccacccatgtgcatgagcaaatgtgcaacaaaaccctgggactttgcagtcaaatgaagctgagcttcccacatcccgttcttcggtttgccatgagacgatgtggggtttccactgtgtgtctgtcatcacctctttgtctttttttcctaaccctgatctcatacttgtatagagtaataacaacagttgtacttccaccaaaggcatgtggcatatttaccaatgtcatgtattctgaacaaaggcaaaaaatacaaattcctaccattaaactggcttggttgttgtttgggttggagtagctgtgggggcttggggaagggtgtcgtttctttctagtagtctcatgtcgctttaggtcagctgggctggcttacacgcgctgtgcggtcttcatggagatgggagctctgtgtgtcagcacaggaagtggtctcccagcgttcagcctgaagcagcccaagtcctgtaggtgctggtaagaggaagtgaagacaggaagttgcgtgggcatctcacactggcaaacaagcacaggttccctcaggcctcttccatctgcctcctgtgctccttcctaggtccttggcctgcttgtcctgtcccaggggatgtgcccagataagg

SEQ ID NO: 68388 - DNA, 1710 bp, Homo sapiens
tccggcaggcggaccggaagcactgaggcgggaagggtggtagaggcccctcctgccggaacccggggggcggggctcgtggctgttgcggatggggcgtaggtgggcggtgcgcccacagctgcctgggtaaggcccaagatggctgtcttcgccttagtactcgtgtgaagttggcggggacggttcctgtcatcttcttgggcttatttggtgtgctgttgaaggggggagactagagaaatggcagggaacctcttatccggggcaggtaggcgcctgtgggactgggtgcctctggcgtgcagaagcttctctcttggtaagtggctgatgtaggcaccccgataactgcttcgtagtataataggcggctcagattaattccctcccttccccatccccaggtgtgcctagattgatcggtataaggctcactctcccgccccccaaagtggttgatcgttggaacgagaaaagggccatgttcggagtgtatgacaacatcgggatcctgggtaagacttgaccttcgacgtggtacacaatttcagaatggcaattaggctgtaacgactatcttttcctcctgtgtagagagtggtactgtgctcaatagtaagagcaaacacttatgtagctgtttacattgtgtttggcactgttctgagtcccctcgtataatttttacttcataagtaaaaataaacagtttttccaaagttaataaatggcagcatcagaattttaaccccaagcagtctggctccagagtctgtgctattgttctgtactgtaatgttccttgtctataggtgctgctcagcaagatgcaaccgtgggttgaaagcttagctggtgtaggatgagttctcttgtcttggatctaatgtgttctctcacattacacaggaaactttgaaaagcaccccaaagaactgatcagggggcccatatggcttcgaggttggaaagggaatgaattgcaacgttgtatccgaaagaggaaaatggttggaagtagaatgttcgctgatgacctgcacaaccttaataaacgcatccgctatctctacaaacactttaaccgacatgggaagtttcgatagaagagaaagctgagaacttcggaaaaggctcatctgtcaccctggagaagggaaactgtacttttccctgtgaggaaacggctttgtattttctctgtaataaaatggggcttctttggaatttgatagccacatacttttgttttcctctagatgctgcctctactcatgtagactatgaagtcttgactcatcctagatcttaggatcttaggtttgggcttcacaccacttgccttttacagtctagctatacctaattcctttaaaaagaaaagttggtgagaatgttattggcgctttttgacataatgctgttatgttaatagtgtttctaaagagccttccacactgaaatgaaatataagagaaaaatggagtcatacttctgtactactctcataaaatatttattaggcatattctctgagtaggaactataggaaaaacaaaaaagtgtgaggtgtcctttccatttaaatatgaaacattaagtaccatatgaatggtagagatggcggatactaagcctgactggtcatcagttttctgggtgttttaacatttcaaaagcctagtcctaacccctaaagattgatca

SEQ ID NO: 68389 - DNA, 1063 bp, Homo sapiens
ttttggcctcagacgagatcagaccattctctctatacttaaggagctttgcacataaaaatggaaataatagtactttgcacattaatatgccactttatagttctttaaacaccttcgtactgcttgatttgtttgatcatcagagcaactttgtgaagtaatcagagtttagtaaccctgtttttacagataaagcccagaggtttaagtgtcaagaccaagtgccaaagtcactactagaattagtttctagtccagggtcaatctcagatcccgtaagataatgttactagcttgctataaaactaaaaaccattatatatgttgggggtggggaactaacaaaaccagatgatgttactagcttgctataaaactaaaagccattatatatgttggggatgggaaagtaatagaaccagatacgaagacaggtcttgaatatagaccctgactttttcactgtttggtttctagccctgtgagcctgtaggagtagaatggctccccaaatgtatgagttccatctgccattatccccagaggagttgttgaaaagtggaggggtgaatcagtatgttgtgcaagaggtactgtccatcaaacatcttccaccacagcttagaggtaagagtccatagctgtcactgtacctagctctttcaaaggaccatctcacatggaattgctacattgtcatttctgttccactacaccaggaagcatcataagagcaagaaacatgtttttcctattttgctgttttatcctaaaattgcatgggatgcatgacccaaagagtacattcattaacttccttttctggattagtcaaaaacagtcttggtgtatgtgattactctttggggaaaagttattttccatctttaccccttactgtgtgtcaaaattaagtcctggtggatttaagagttataggagtggatcgctttttcagaatgtctcggacttaactcgacctgtttttggtaatacctttttggagtctttttggatgtgcaattatggggacaaaaacccataatatatatgtaccact

SEQ ID NO: 68390 - DNA, 1461 bp, Homo sapiens
caggctgcctttcgagctcaggggcccctggctatgctgcagcactttgatactatctacagcattttgcagtaagtgaaacacccaactggtactttaaaaagaactggtgactgtttgtcctaactgtgcatgttagtcctgaaattccaagttataggttcactgataaatgcctctggatattgatatctctactgatgagcatgtacccagcttgccaccgtatttattcagttgaacaatttcacgtgtatttttaaacattcgattccacgggttagatctgatctgttagaaggggctctgcaggctccttcctgtctcacccccacactttctttccctcatagtcactttcgaagtatagatcctggcctcaaagaagatactctgcaattcctgataaaaggtgtttatgggtcagggggtaggggatggaaggtgtttgttatcgtttgtttgtttgtctgtttgtttgtttttcctacattttgtcagccacatgatgatatcaaggctgttgtgattcagttggtttggctaagcccagggacctttggcctgttaaaggtctgtaatcttggtgggcgatacagagttatgtgtgttcactgtaagggcagaccaacaagaactttttcctacttttgagctacctctttttaataggggtgattcttccagttgctggagagaaattgtggtaactggagtgagagagtaggaacagggcatgttcagggtatcagggccaagggtcctaaaggacttagcttgtgttatggccactgagagatgaaacacagatctttggtaatctgatggctgcaagtgctgggtgttttgaagttggggtatatgaaagaagtgagtgaaactgactccaagattctgcccctcacagtggtatcccgccactcccaggagcttccagctatcctggatgatacaactttgagtggatcagatagaaacgcccatctaaatgccctcaaaatgaactgttatgctctgatacgtctcctggaatcctttgagaccatggccagccagacaaaccttgtggacctggaccttggtgggaaggtaatttggagttttgggctcacgttatatggggtctggggagataggggaatagatggaaaagaagggaatccaatgatccacaaatcctttctgtcctcattgagaatttaggagaaagaactcaaaagtgtcacacgttttcttcctggacaagtagcgctgtggaacttgtaatatttcttccgtattaccttctatgttgtcttggtactagattgtttgggcactcagactgacagatcttgacccacttttttcccttattttttcctcaatgtatacatgatcctttttagggtaagaaagctcggaccaaggcagcccatggctttgactgggaagaagagaggcaaccaattcttcagcttt

SEQ ID NO: 68391 - DNA, 1894 bp, Homo sapiens
gtgaatacctaggcagttaatggaaaaagttatggccaagcacaagcaagcttcgccttgactaaaggtttgacccctctatgcttctctctcttagaattacatgatgcgtaatgctgtgctggcagccatggcggagatggtgctgcaggttctcagtggcgatcaactggaagcagcagcccgagacaccagagaccagttcttggatactttacaagcccatggccatgatgtcaactcctttgtgcggagccgtgttttgcagctcttcacccgaattgtccagcagaaggtaaccaacttctatgtggcaaaaacatatggtacctctccatataccagtgtaaagaggaatccagtgttgaagataaatatctgccccaaagaggtctagaattcacatttttattatcagtagtaaaagtcttcctctaccaaggacgaggatatctggctccctttaaggactgtaatgtgtcttaccactacaaggagtactcctaatctatattctgtagaaagggtttttagagtgagtgggtagctcagtttagagtatacttaaagatcatcttgaacaaaatggatgatgtgggacttgagcagattcttctcttcctaccctacacaggctctccccctgacacgtttccaggcagtggtggctttagctgtgggacgtctggcagacaagtcagtgctagtatgtaaaaatgccatccagctgctggccagttttctagccaataatcctttctcctgcaaggtaagtagacttggtccaccaaaagagaaggaattaaatggaaacagggatgaaattatgtcatttactgaccctgctattcattttacctgatagcttagtgatgctgaccttgccggaccactgcagaaggagacccagaaattacaagagatgagggcccagaggcgaactgcagcagcttgtaagtagttactgccttggagtcctaatgccagacaggcttctccttgcagtcagaaactctagtgaaagagactaagtgacactctcatttagctgcagtgctggacccagaggaggagtgggaagccatgctgccagagttgaagtctaccctgcagcagcttctacagcttccccagggagaggaggagattcctgagcaaattgccaatacagagacaactgaagatgtgaaaggacgcatctatcaactgcttgccaaagctagttacaagtaggcaaaagaatgggatattcttcgtgatctgtttatgtttagagttaacctttgagaaacttacataatgtgtcttttaaattaactgcacacagatatgctgccaccaggtgatggtagatgttttcatgtagtaatggtctgaccataggcctagtccacaattaagcatgtgtttctactttataaatgtttaaaaaaactactgaaacaattaaatgttaacagtattataatcaaacatgagtcctccttcaattgaagaagagcacctataaataagttctagttgtatgatcttgaataagttgcttaactttctgtgcctcggtttcattatctataaaataagaaattgattagatcttatgatctctaaggactttctaattctaaatttcatgaactaataatatcaaacatgcttaatactaccttaatcttcaaacctagtatgaatcctgatcttagagaaaagatttctcctagtgtttttgtgactctagaacttaacaacaaaagcccttacagccgtcaacaagttttttttttttttttttttttttttttttgagatggagtctcactcactctgttgcccaggctgcagtacagtgacacgatcttggctcactgcaacctctgcctcccaggttcaagca

SEQ ID NO: 68392 - DNA, 1230 bp, Homo sapiens
ggggtgcaacagaagggacgtggggaagcagaggctgaggagaccaacccatgggaaggaaggcccgtggaggctgctgcagtgggcagtaacgaggggctggacttgaggattggagaaatcactgcagaatgggcttaatggaagacaaatttttaaaggaaaaatagtgactgatttgtaaaaaaattagatgaccgaaattttaagcacatattactgatagagtgttgataccactggcaaaatgaaaaggcaaggaaggatgatggcttccatgttggacatgttgagtttgtggtaacggcaagaaaacctgttagaaatctccagacttagaactatggacccacgtggaactcaaaaggtcagtttcgatatgtcacttgaataaaatagttttgaaggcatgagagtagaaaagtagagaatggaaagcctctcaagaccctgctgtacattttgaacctcctcttttctttttctcttcctaagtattacttttgtctacttcaggttcgcaatatcatcttcagaaaagcagaccaaagatcaaggaattgttcatttttggcttgagccctttttcttttctctttagctctgtgagtttgtgcagaaggatgagttgaaaccagcagtgacccagctgctgtgggagcgggccaccgagaaggtcgcctgctgtcctctggagcgctgttcctctgtcatgcttcttggcatgatggcacggtgaggctcaaatctagcaggcaatggggtgggagagcaaaggaaggttctgagagggctccttttccttcagtgacattgtcacagtgaggcccaactgagctctgctgtgagttataacgccacctaaatggaaaagcaaatagtgagaggaccagccctcctgcctagtagtagtgggattcagtaaagcaacaggacccaagaggctggccctgcggcagagccacgctatagtgctccacggctctagacaccacatgaggtgctggtacctacccctattggccctttctcccccgatgagtccaatccatgactgcctttaactctgtggcttccttcccctagaggaaagccagaaattgtgggaagcaatttagacacactggtgagcatagggctggatgagaagtttccacaggactacaggctggcccagcaggtgtgccatgccattgccaacatctcggacaggagaaaggtatgtggggg

SEQ ID NO: 68393 - DNA, 1083 bp, Homo sapiens
cccattcaaagaggtggcagtgaccctcatttaccaactggcagagggccccgaagtgatctgtgcccagatattgcagggctgtgcaaaacaggccctggagaagctagaagagaagagaaccagtcaggaggacccgagtaagtgggcaggggttgacccactgcggcagccagcttctgttctccctgcagggccaggagccactgccaccaccactatctgcaacaacccttagtgtacactgtgtcgtttttgtctaagttgaagttgggccagttcccacccccaactcttactacttcactagtttgaatagcacgtgagcaaggggaagatcagtaaaaatcggattcaggtttgatgggacttaaaaatgtctctttgccccaccttccctctccctctcctccagaggagtcccccgcaatgctccccactttcctgttgatgaacctgctgtccctggctggggatgtggctctgcagcagctggtccacttggagcaggcagtgagtggagagctctgccggcgccgagttctccgggaagaacaggagcacaagaccaaagatcccaaggagaaggtgtgtgaatgtcctcagcacttcccagatttatttcatacctcagctcagaactgagctgatccccttccggcaatctctgctcctctgctattacatgaagcgaagagtttctgcctctctgtggctactaccgtaggaaaggttcgtgtgaacaatgacgaaactgtcagtgatcacccaggaaggaaagatttaggtaaatgcagagtgtggagttagagacctcagcataaaacagaggctttgtgtctgaggcagggtttgttagaacacgcacgtacccgccggccttttccatcagcttccattgctggcctggccccggatggggccctgtgttccctccactagaggcaatgatgtcttgcagacaaataagacacagagccttgcagcgctggagaaaagtctgacctctgtgactttgaaccattgtctggcgtgatccatctgtttaccatatataggaaacgatgtcttccatgaggaaga

SEQ ID NO: 68394 - DNA, 1034 bp, Homo sapiens
gcactcactccctagcagctgctcctgttaatttccattcacagtgaaaattcctgagccgggggcggggtggggtccctctctgctgaatgggacagggcaaggggagtggtgaggcagacaggggccgtggcagagaacatcagagaagacgagtgctgggggagggtccagggttggtcttagtggatggcagagctggccctgggccatcgaacatcctcatctccccttcctgcagacagctcctctcctacatcaccaaggacaagcagacagagagcctggtggaaaagctgtgtcagcggttccgcacatcccggtatgctgccctccctgagggttctttgtgctgagcggggccctgcaggggagaaaggcccatccctcaccccttcaatgcccccactgtggcatccctgggactggggaggctgatggggaaggttgagcctttactagctggatctcccagttcctcacaaagcccttcctatctgcagaactgagcggcagcagcgagacctggcctactgtgtgtcacagctgcccctcacagagcgaggcctccgtaagatgcttgacaattttgactgttttggagacaaactgtcagatgagtccatcttcagtgcttttttgtcagttgtaggcaagctgcgacgtggggccaagcctgagggcaaggtgagcagcacaggacacttcaatgcctgttgggttctgggctggctaagacatctgccggccctgggcagcatacggctcttgcagtcaccttcccgtcctccttatccccagctgggttgcaaccaaattgccagagtgacctaagaccagatctttgtctccagttctttttttattactccaaaaacacaaccaaagcagcatctcatccaattcttgtttgtttgtttttaatagtttttatttttcagagcagttttaggttcaaagcaaaattgagcagaaagtacagggagttcccttctaccccttgcccctacacatcacagccttccccaccttca

SEQ ID NO: 68395 - DNA, 1612 bp, Homo sapiens
taaggcagcctgtgcgggcgagaccagactgggccctcccctcctgcagtgatttgtttcttcttcttttttaaatcacgttttcctgccttttctaggttctaggtaccagcctctggcttctacagcctcagacaatgactttgtcacaccagagccccgccgtactacccgtcggcatccaaacacccagcagcgagcttccaaaaagaaacccaaagttgtcttctcaagtgatgagtccagtgaggaaggtatgatgctcccgcctgttcccggccgagaaggcacacagctagggtgcagagggctggtttccataggacctgctgcgggggcctgagtgtagatgctctgccccactgccgcagaagggcctctcctgtacagcttggattttatttcttctgtgcggtgtgggattgtctcacttgttctctgatatctattttttcaccatctttgtgactcagctttttcttattcctttaattctttgcatagatctttcagcagagatgacagaagacgagacacccaagaaaacaactcccattctcagagcatcggctcgcaggcacagatcctaggaagtctgttcctgtcctccctgtgcagggtatcctgtagggtgacctggaattcgaattctgtttcccttgtaaaatatttgtctgtctcttttttttaaaaaaaaaaaaggccgggcactgtggctcacgcctgtaatcccagcactttgcgataccaaggcgggtggataacctgaggtagggagttcgagaccagcctgaccaacatggagaaaccccatctctactaaaaataaaaaattagccgggcgtattggcgtgcgcctgtaatcccagctactcaagaggctgaggcaggagaatcgcctgaacccagaggcggaggttgtagtgagccgaaatcacaccattgcactccagcttgggcaacaatagcgaacctccatctcaaattaaaaaaaaaatgcctacacgctctttaaaatgcaaggctttctcttaaattagcctaactgaactgcgttgagctgcttcaactttggaatatatgtttgccaatctccttgttttctaatgaataaatgtttttatatacttttagacattttttcctaagcttgtctttgtttcatctttcacattagcccagtttcatgcagcagagagagggttatcagtgcagagagagatgagtgagcccagagtcctagggcctgtcccgggatggcagatgagcttcctgccccgtcactgccacctttcccctctcaacctctggaccctgcacagtgaccagacagcctctctggggagaattatgcagtgcctaggctccagatcagtgcttctgaaccgggggcaattttgtctgccagaggacatctgacaacacctggggcctgttttgttgtcatagcctataggggaagaatgctaccagcatttgtgggaagaggccagggatgtggctcaacatcctgcagtgcacaggatggcccctcaacaaagaatcacacggcccacaatgtcaatagcgtcacagttgagaaaacctgctctagaccaagggttgctttctg

SEQ ID NO: 68396 - DNA, 1235 bp, Homo sapiens
ctacgtcggggcccacacgctcggtgcgtgcccagttgaaccaggcggctgcggaaaaaaaaaagcggggagaaagtagggcccggctactagcggttttacgggcgcacgtagctcaggcctcaagaccttgggctgggactggctgagcctggcgggaggcggggtccgagtcaccgcctgccgccgcgcccccggtttctataaattgagcccgcagcctcccgcttcgctctctgctcctcctgttcgacagtcagccgcatcttcttttgcgtcgccaggtgaagacgggcggagagaaacccgggaggctagggacggcctgaaggcggcaggggcgggcgcaggccggatgtgttcgcgccgctgcggggtgggcccgggcggcctccgcattgcaggggcgggcggaggacgtgatgcggcgcgggctgggcatggaggcctggtgggggaggggaggggaggcgtgtgtgtcggccggggccactaggcgctcactgttctctccctccgcgcagccgagccacatcgctcagacaccatggggaaggtgaaggtcggagtcaacgggtgagttcgcgggtggctggggggccctgggctgcgaccgcccccgaaccgcgtctacgagccttgcgggctccgggtctttgcagtcgtatgggggcagggtagctgttccccgcaaggagagctcaaggtcagcgctcggacctggcggagccccgcacccaggctgtggcgccctgtgcagctccgcccttgcggcgccatctgcccggagcctccttcccctagtccccagaaacaggaggtccctactcccgcccgagatcccgacccggacccctaggtgggggacgctttctttcctttcgcgctctgcggggtcacgtgtcgcagaggagcccctcccccacggcctccggcaccgcaggccccgggatgctagtgcgcagcgggtgcatccctgtccggatgctgcgcctgcggtagagcggccgccatgttgcaaccgggaaggaaatgaatgggcagccgttaggaaagcctgccggtgactaaccctgcgctcctgcctcgatgggtggagtcgcgtgtggcggggaagtcaggtggagcgaggctagctggcccgatttctcctccgggtgatgcttttcctagattattctctggtaaatcaaagaagtgggtttatggaggtcctcttgtgtcccctccccgca

SEQ ID NO: 68397 - DNA, 1007 bp, Homo sapiens
acacacatgcacttacctgtgctcccactcctgatttctggaaaagagctaggaaggacaggcaacttggcaaatcaaagccctgggactagggggttaaaatacagcttcccctcttcccacccgccccagtctctgtcccttttgtaggagggacttagagaaggggtgggcttgccctgtccagttaatttctgacctttactcctgccctttgagtttgatgatgctgagtgtacaagcgttttctccctaaagggtgcagctgagctaggcagcagcaagcattcctggggtggcatagtggggtggtgaataccatgtacaaagcttgtgcccagactgtgggtggcagtgccccacatggccgcttctcctggaagggcttcgtatgactgggggtgttgggcagccctggagccttcagttgcagccatgccttaagccaggccagcctggcagggaagctcaagggagataaaattcaacctcttgggccctcctgggggtaaggagatgctgcattcgccctcttaatggggaggtggcctagggctgctcacatattctggaggagcctcccctcctcatgccttcttgcctcttgtctcttagatttggtcgtattgggcgcctggtcaccagggctgcttttaactctggtaaagtggatattgttgccatcaatgaccccttcattgacctcaactacatggtgagtgctacatggtgagccccaaagctggtgtgggaggagccacctggctgatgggcagccccttcataccctcacgtattcccccaggtttacatgttccaatatgattccacccatggcaaattccatggcaccgtcaaggctgagaacgggaagcttgtcatcaatggaaatcccatcaccatcttccaggagtgagtggaagacagaatggaagaaatgtgctttggggaggcaactaggatggtgtggctcccttgggtatatggtaaccttgtgtccctcaata

SEQ ID NO: 68398 - DNA, 1032 bp, Homo sapiens
atcaggccactcagaacagcgtgcaatttaaaacttaggaattgtttatttctggaatatttcatttaatattttcagatcaaggttcaccttgggtacctgaagccgtggaaagtgaaaccagtggataaggagagagtgactttattcttttcatttatttatttatttatttatttttttgagacgtagtctcgctgtgtcgcccaggctggagtgcagtggcgcgatctcagctcactgcaagctccacctcccaggttcacgccattctcctgcctcagcctccagagtagctgggactacaggcgcctgccactacgcccggctaattttttgtattttttagtagagacggggtttcaccatgttagccaggatggtctcgatctcctgacctcgtgatccacccgcctcggccttccaaagtgctgggattacaggcgtgagccaccgcgcccggccttgactttattcttattgctgtcacattggaggtgtttgagaaggaagtcgagaaattattttcctatatactcattctcccaacacacatcaaactgtcctgctcctgcatcaaacctggttttcttggccaggtagatgaggtttcctggatttgtgctgctagctaaagacatggcaagggaaaccagtactccccaccctcccgtctaccgcggctcactgtttcctcctcctgcctgacctgattcttgtctccctcttttggatggtggatttaaggtttgtgttttcactgtgccttcaaccaactaggggcctttgtgcggccatcttcgtgagaagagatctcgggctgccatctctccctagtcttccctggacctcaagtgcccagtgtaaaacatgatctgaaagaacgaaaataatatcttaaatggaatcatgccttttaagctatttttggctgggcgtggtggctctcgcctgtaatcccagcactttgggaggccaacgcgggcagatcacttgaggtcaggagtgtgagaccagcctggccaccaacat

SEQ ID NO: 68399 - DNA, 1526 bp, Homo sapiens
gtctgcttcctctcctctcttcctctcatcttctctcttgcttcctccacagaagaagctggttagtttgatctcacgcaagcttattaatgtcccagtcccagtttctaagctgcctaggcctcctggccctcagtttgggcccgctgggctcttgagcacggatttttttctgccctttcccttttccttgctcttccccctttttctctctatctcttgttctcttgactgcatttctttctctcccttctcccccggctttccagatctggatgtgattcaggttctcttttgtacacattgcacactcatcctccttgcgtcctaaagcttttttttttttagttgagtcatttaatcaaaaagactttttttagaaaaaaatttcctcttgagccatcatgcacatctgactgcagccccagcgagcccttccttccttgtctgactgctcttcttctcgatttcttcttgttctgccttctcggtttgcagccctgacccccgctgtgtgtctggcccttggtgactgtccgtgtttctgttcctgtcattgtaactgtgacttttctctctgtctgcccccccttcctactggttcatgcttctcccccattcccaccctctctgcccggcctcccgctcccgccctttctcctcatgcacccggcctcgtctctgtagtctctgcacttgtctcccattaaggtcccatccatgggggggcggaagcgggagcgcaaggctgccgtcgaggaggacacctccctgtcggagagtgaggggccccgccagcccgatggggatgaggaggagagcacagccctcagcatcaacgaggagatgcagcgcatgctcaaccagctgtgagtccgcaggccgtgctcccgcagcaccgacgccacagcagcccaggaggccggagctccccagtcccccgccaggacgaggccccgcccgccctgacacccgggttccctgtctctaggagggagtatgattttgaggacgactgtgacagcctgacttgggaggagactgaggagaccctgctgctttgggaggatttctcaggctatgccatggcagctgcagaggcccagggagaggtaacctctgctcccggcctcagggccctctggctctgcctctccagcctgaagcccactcccccgctcctctccttgctctgtccccccatgtggctgtcatcctctacctgcgtctcccctcttcctttatccttttgcttttctttctccagtttctttaaccagacttcctctctctctctctccctgacttggccctttggaatgcgtcccatcccatccctccttggctggcctcccccgcttccctttctactccagcagcaggaagatagcctggagaaggtgattaaagatacggagtccctgttcaaaacccgggagaaggagtatcaggagaccattgaccagatagaggtaagggcaggagcggaagccaggggcgtggtgtcccagagggttttgagtggg

SEQ ID NO: 68400 - DNA, 1058 bp, Homo sapiens
gggaggggcagtcgaggtgatgtggaggagttattattaggaatactgcagtgcggctgtgaatgaggagatgggacccagaggctgacacaggaaggaagatggagggaaggggaagaaagggcttcacccaaggcttcagaagctgcccactcagattttaattttcttgctgtcttcttggccccttcctaaccacctttcttgtgttgaagtttctctcttggtgcagttcccctcccttctcgggttgacagaagtgatgagctcacaggaacaggatttgagatgtgctgctacgccagctagactgcagggccctggaatgccgggcgggtcctaagcagcacgttgccctggcttccatctctgtgatggaatagaatatgcactgcctgccatggctgatgagacatgacaaagctggctctgggaagcatgccctacctaggaccctgccctgtggcccagggtgtcgtccggcccacttgcagtcttaatctctgaattctgggccctggaacaggctgtgtctagttctcatttgccgtactcaccgggcccctttacatactctactttctctttccctctgggtttgagtgctagtaaccccaggctcgtgtgtccactgctgtcatgctgctgtgggacttccggcctctgagccagtctggtcacctctctgtgactcccttagaggaggctctgggtgggtagtttctggagctagtggggaaggactttgagtgtctcctaccaggctcttgacccactctgttgatacactatgtgtcctgcagatgcttttacagggttaaatgataccacaagaggcagggcagcgggctcgacgagctctgttctggtgcgggcaggaggcgggagcccggatctgtgcgactgaaggtgggagactgggccgggtggacctggtggtctggtgtgggcaggaggtgggcaatgaggccagccggacagctggctgagctggggcctgagcagggatgggcatcacggaggaccggagcctcagcacttgcccaaacagagctcct

SEQ ID NO: 68401 - DNA, 1696 bp, Homo sapiens
tttttttttttttttttttgagacggtgtcttgctttgtcgctcaggctggactgcagtggtgcaatctcagctcattgcaacctccaccttccaggttcaagcgattcttgtgcctcagactcccaagtagctaggattacaggtgtgtaccaccatccctggctaatttttgtatttttagtagagatggtttcaccatgtgggctaggctggtcttgaactcctggcctcaagcaatccacttgccttggcctcccaaagtgctggaattacaggtgtgagccaccacgcctggcctataggcagtgatcttttaatacaaggttcaactaggacttgagtaaaggccaagttatattaagtaatgggaatttaggtaatctgctcttaggcactgacctaattgtgtggagctcctgcccaggaaatggcaattctcatattttaatatgagaatattaaaatatggtgataaggcccattttctgacaccatctgtttaattttaaccccaggaaattctgaaacagccacacctacaaatgtagacttgcctcaggtcatccccaagtctgagaacagcagccagccagccaagaaagccaagggggctgcaaagacaaagcagcagctgcagaaacagcaacatcccaagaaggcctccttccagaagctgaatggcatctccaaaggggcagactcagaattgtccactgtaccttctgtcacaaagacccaagcttcctccagcttccaggatagcagtcagccagctggaaaagccgaagggatcagggagccaaaggtgactgggaagctaaagcaacgatcacctaaattacagtcctccaagaaagttgctttcctcaggcagaatgcccctcccaagggcacagacacacaaacaccggctgtgttatccccatccaagactcaggccaccctgaaacctaaggaccatcatcagccccttggaagggccaagggggttgagaagcagcagttgccagagcagccttttgagaaagctgccttccagaaacagaatgatacccccaaggggcctcagcctcccactgtgtctcccatccgttccagccgccccccaccagcaaagaggaagaaatctcagtccaggggcaacagccagctgctgctatcttagatggttgaaaactagacgggtggctcactgccattgtcaccaggttggaactcttgcctctgtgaggatgccttctctactgtgcatacccatgaaatttaatacacattttaaaacctctggccactgagtatttttgagggaactgggtgctgcctttgccgctttaagggtaaagatgggaggtgggactgggatcttctgaggagagggaatggttgggtgctactgagaaataaggtcagttttaggctcctgcatccttgggttttcccaggaagggaaagccctggagtcagagctaggggtgattgaactccggggagaggagggcaatagaagtgtaggggaaggcggggcacactagctcatgcctgtaatcccagcactttctgggaggccaaggcgggtggatcacctgaggtcaggtgttcgagaccagcctggctaacatggcgaaacctcgtctctactaaaaatacaaaaaatcagccgggtgtggtggcgggtgcctgtaatcccagctact

SEQ ID NO: 68402 - DNA, 3319 bp, Homo sapiens
ataggatggagtgggagagagaaactgctcaatgactccatgatgactgtgtttggagtaagcactataggagttgtggggtatgggccatgtttttatgaagcatgtgtttaatgtcttcatctgtcttctgggtagagtagcctatgaggttattaaaatcttcatccctaccgggcgcggtgactcaacgcctgtaatcccagcactttgggaggccgaggcgggcagatcacctgaggtcaggagttagagaccagcctggccaacatggtgaaaccccatcctatgaaaaatacaaaaattagccaggcatggtggtacatgcccgttgtcccagctactcaggaggctgaggcacgagagaatcgcttgaatctgggaggtggaggttgctgtgagccgagattgcgccacctcactctagcctgggcaacagagtgagactccatctcaaaaaaaaaaaaaaaaaatcttcatcccttttcaggctctaatcaatcgtggggttaacctggatcccctgggcaagtggtcaaagactggactagtggtgtatgattcttctgtgcccattggtaagtctcccccacccaagagcccttctacctctgtccctgtccctaccgcatgtcacagggtggtccttctccacaggtgctacccccgagtacctggctgggcactacatgctgcagggagcctccagcatgttgcccgtcatggccttggcaccccaggaacatgagcggatcctggacatgtgttgtgcccctggaggaaagaccagctacatgggtatgagaggggcaggcaggtgggattcatcgggctgtcttgcttttgaaagtagatggggttgctggggttgctgactcactagtgctcatggaacacaatgtgcaggtagctagcagggtggtgaggaccagtttctggagtcggcctgggttccagtgtgccacttactacccatctgactatggattctcttttgtcatccataaaatgggatggtaattgtgcttgggttggcccttgtattacgcttggattgtgagggttaaaatgatgcgtttagaagtccttggcagtgttcagcacatagtcagcagccataacttttattaagctgctgtcacttaaaagaagtaatttagtatgtaggaccacataggtgtttggtaaaaatgggaaaaccacatcggtagacttgccgatcaccaggggctagtgcagagtggatcagcctatacagtaggcaggcttgttgggagcgaagttgccttgaggtgatgacacttctcatgtggattcctggacaggagggtgggagcaagtgtggagacagtggaactggctgatcagcactgttactgccctctctttagcccagctgatgaagaacacgggtgtgatccttgccaatgacgccaatgctgagcggctcaagagtgttgtgggcaacttgcatcggctgggagtcaccaacaccattatcagccactatgatgggcgccagttccccaaggtgagactcgagctgtgtgtcttctgaggcttcttccggttgaccttctcccttcctgacctcaatgtttagactcgaccctagtaaatattgccctgctggttgcagaagagacatatgattcatctgtatcttttctccaggtggtggggggctttgaccgagtactgctggatgctccctgcagtggcactggggtcatctccaaggatccagccgtgaagactaacaaggtgaggagtcaggtggtgggcccctgagaggccttggctgggtctcgtagagctggaaactgagatggggacaccctctgggctcccctctcctcctgaggctgcctttgggtctctttttgggacaggatgagaaggacatcctgcgctgtgctcacctccagaaggagttgctcctgagtgctattgactctgtcaatgcgacctccaagacaggaggctacctggtttactgcacctgttctatcacagtgagacctctgccatggcagagcaggggaggctgggctggggggctctttgccccttagagctcccttcagctccagctctgctttttcctccgttctttgtcttccccccacatccaggtagaagagaatgagtgggtggtagactatgctctgaaaaagaggaatgtgcgactggtgcccacgggcctagactttggccaggaaggttttacccgctttcgagaaaggcgcttccaccccagtctgcgttctacccgacgcttctaccctcatacccacaatatggatgggttcttcattgccaagttcaagaaattttccaattctatccctcagtcccagacaggtaagtaatctttttcttcccttcgtcaccacctttgctctttccacctttcaggaggctttatggtgtgacaagaggaagggaaaggaaagattcatgcatcccttactccagcctttgcatgcttggctgagagaaccctctcattccagctagaattgcttttgagtgctggaccccatgtgaacaggctaaagtgttcatatggatggaggcctgttcctttattctgccaagtggctgcagttgttcagcactaaatgcattccaaatgcaggttgtggtttcttttccttcttggcacagggtggacttactggtactggacctctgctggtccagcaatctcagcactgggttggaacagagctccacagagctttgtcagcagttctctgagcccttcacactcattgcagattgttttctcagccatcttgaggagtctggcctggatctcaagggaagggtggggttttctgaaacagccttgagagcactgcttactgggatataaccctgggtttagttggaagagggagagaagtgctactttagaaatagtagaatttgtctgggcgtggtggctcatgcctgtaatcccagcactcacctgaggtcaggaattcgacacggtgaaaccctgtctctactaaaaatataagaattagctgggtgtggccaggcacggtggctcacgcctgtaatcccagcactttgggaggccaagacgggtggatcacgaggtcaggagatcgagaccatcctggctaacacagtgaaacccccatctctactaaaaatataaaaaattagctgagcttggtggtgggcgcctgtagtcccagctactcgggaggctgaggcaggagaatggcatgaacccgggaggcggagcttgcagtgagctgagattgtgccactgcactccagcctgggcgacagagtgagactc

SEQ ID NO: 68403 - DNA, 1052 bp, Homo sapiens
ttcaacagtgagcaatgctgcgcccatcttattttcatttctttgctcctctatttccttctgagagcaagtgttggatttttatttagcgaaaaaataagatatagagatagaactgctacaagggctgatggaagggcaggcctgtattaatagcccttgtctctcttcagttgctgcccattgaaagagctgctcggaagcagaaggcccgggaagctgctgctgggtgagttttggaagctattgggatggagcataggaagccactggggtggggaagctgtgaggaaggaggaggtatctgttttggtctgtgaatcactctgttcctggacctgtttctaggatccagtggagtgaagaggagaccgaggacgaggaggaagagaaagaagtgacccctgagtcaggccccccaaaggtggaagaggcagatgggggcctgcagatcaatgtggatgaggaaccatttgtgctgccccctgctggggagatggagcaggatatccttgcagggcagagtgaagagttaggaggaaggtggttgggagagggatttccaggccttaggacatcatgacacagttccttaacaggcccacatgcccaggctccagacctgcaacgagttcacaagcggatccaggatattgtgggaattctgcgtgattttggggctcagcgggaggaagggcggtctcgttctgaatacctgaaccggctcaagaaggatctggccatttactactcctatggagacttcctgcttggcaagctcatggacctcttccctctgtctgaggtactggattgccagaatgcctcttttgcttttcttttctcgcctccttacgctgtgtaaggaagatgttcggcccccttgctcccctcttctgactgagctccttagccagcctcacttattccctgctgtcttgccccgcagctggtggagttcttagaagctaatgaggtgcctcggcccgtcaccctccggaccaataccttgaaaacccgacgccgagaccttgcacaggtgaggggtggcc

SEQ ID NO: 68404 - DNA, 1560 bp, Homo sapiens
ctggccaacatggtgaaaccctgtctttactaaaaatacaacaattagctgggtgtggtgatgggaggctgaggcaatagaatcgcttgaatctgggagaaggaggttgcagtgagttgagatcacgccattgcactccagcctggaagacaagagtgaaactccatttcaaaaaaaaaaaagaaacttgtatacagttattaaataataacagggctgagatttaaatggactccttttaattagtgtactaattctcttaccatgtttatttccgttcccatttatttttaatgtcccctgtaacttgttctgcctcgtttttcttttttaaacagtaagtgacgaaaattccaagaggctgtctagtcgtgctcgaaagaggtaagtgtgggtgtcaaaacttaagtaggttaaattggtactgctcatctttgaccacagagttaattctagactctcacatttccctatggtggaaatggcagagcctggaagtatcttcccatttcttcactccttgaatctcttgtgtcttttcagggcagccaagaggagattgggctctgttgaagcccctaagacaaataagtctcctgaggccaaaccattgcctggaaagctaccaaaaggtccgtgaaactaagagctggatgctacatgaggagtccctttgggtcctgggtagggaagaactcgctaaacatttccggagtgaaaggaacagccaaaggacattctgaggggtagaaagtacaggctcccagggtgtggggccagggaatgtgtggctgccattagtccaggactcttcaaacccttagggatctctgcaggagctgtccagacagctggtaagaagggaccccagtccctatttaatgctcctcgaggcaagaagcgcccagcacctggcagtgatgaggaagaggaggaggaagactctgaagaagatggtatggtgaaccacggggacctctggggctccgaggacgatgctgatacggtagatgactatggagctgactccaactctgaggatgaggaggaaggtgaagcggtgagattcatctttttgggcattcatagaaggatccttgctatttagtttctttcccagattcttgagactgtttcttagtggcaaggataagcctgactagaggaaaggggtttttgtgctccatcactgtttccctactgccttatatcctcccagtgcactacaagtttgaaagagctgtaggatagagcatttaaaaaaatctagaaggctgtcttggtgtaggtatgggaaggtggacaatggtgtgctccactgatgggcacagaaatgcactttttataaagcagttatctcagaactttgaaaaatttgttccttttggctgggtatggtgcctcacatctgtaatcccagcactttgggaggctgaggcaggaggattgcttgagcccaggaattggagaccagcttgggcaacatagggagatcccgtatctacaaaaaattaaaaaattggcctggcacagtggctcatgcctataatcctagcactt

SEQ ID NO: 68405 - DNA, 2110 bp, Homo sapiens
ctcaggtgatccaccgcctctgcctcccaaagtgctgggattataggcatgagccactgcgccccagctaattttgtatttttagtagagatggggtttctccatgttggttagcctagtcttgtactcccgacctcaggtgacccgcctgccttggcctcccaaagtgctgggattacaggtgtgagccactgcacccggccacctcttttaactttaaacatattcaggttcttgagatggaaagcaaagcagaataatacagtgtcatttgcgatactttagaggtaacttcaggtgataaaagatcccttcaaattctagacccctttcaacattttgtttctaattaaagtaaaaggttatgaggaggcggagggtgaaataaggaaaagaatgctgttataatggaggtggggagacagattctgaaggtagagaagagaaaaaacgaataagctcaagaagaggaaatacaataatagtaagggatagtgaaggtttaggtgactttaaaaagcacaaaatcatggacagttggaactggaatatgaggagtaggaatttgaacatggtggaggtcaggtcagatgacagaagacaatacatcacagttacttggtcactgagaagtgatggggggctggtccactagggtagagggagctcagtctgggccaccacagctcaccacctctttttctccctatgcagttctgaaacagctggaagaactgctgagtgacatgaaagctgatgtgactcgactcccagctaccattgcccgaattcccccagttgctgtgaggttacagatgtcagagcgtaacattctcagccgcctggcaaaccgggcacccgaacctaccccacagcaggtaggaccattttcttcttgacaccacctcttcctgcagaaccattctggagcttgtaactttgctgtatgtccctagctttacatactgggtgggtggcctatcagtgaattcccttgagattgggtggattcctatcatctggaattctgactcctcgggtctccttctctaggtagcccagcagcagtgaagatgcagactgataccacctccaccgctgagcagtgaccttcctcactttctcttgtcccagcttctcccctgggggcctgagagaccctcaccttccttctgcccatcttccatgttgtaaaggaacagccccagtgcactgggggaggggagggagtgaggggcagtggtgcccttcctgcagaagagacatgcagcagtagcgctggcgccatctgcaggagctggcgggctggccttctggaccctggcttctccccactgtaacgcctgttacacacaaactgttgtgggttcctgccaggcttgaagaaaatgatctgaattttttcctccttttggttttattttgttggtttattttgtgttttcttttctcctttttggggggtattcagagtgggctgggcccctgggcgagacacagctacctctgttggcatctttttaataccaggaacccagcggctctagccactgagcggctaaatgaaataaagtggaaaaaaaaaaaaaggaaaaaaccaaaagcataaaaaaccacagcaaatttcttgatgaaaattgaaaataaaagtttccttgtattttagtgctctggttcagtgtgggtgtaggtgcaggtggatgagtgtgtgcggcaggagcctggcacctgtatagttgaaaattaagggctacgtggtgtcctgataccccactgagtaactgggttctgtgtgtgggtgcagtatgtgccttgccaacgttgacttccacctgtggaaaatgagaggctgcaaaactgcgggcaccgccgcttaatggctctgtgaccttgagcaagttgtttaactttggtgggatgcagatatctcatgtatacctcatacggttgtcaagttaaaccagtgaagtacatggaacggttttaacacctaaccactaccttaatgttagtttctaggaaggctgaggggggttttcttgctaagttgtgcaaaattgggatgcaatttgtggaagaacacagcctcaatcccacacccccggaggcc

SEQ ID NO: 68406 - DNA, 1096 bp, Homo sapiens
tacaggtgtgagccaccgtgcccagccaaaacatgtttttgaagagtagttgataaagagtagatgataaaaaggaagatgcttaactgtgtaactaaatgaaaacataatatgggtatgtatatagtatgatctcagttatgtaaaaaactatgcacaaaaaaacctaaaaagaaaaatatcaggatgtatttctagaaggtgggattatctgttgttaaaaatttttgatattctattttctaaattgagtttttatcgcttttgtataagagaacctaaagggtaaagagttttaaaaatgaggacattgaaaaagggaaagaaaaaagttacaaggcaaagttaaactacttgggtgtgggaatgagctgtccatgaagttcttcataggttcttattaccatctgaaacaatgagaggtgagctgagaggccagtcagaagtgagtaaagtgagttatcagtcgaactcccgtttcctcttatcccttgtccagctcttagaacaagctctggtgattgaggaacagctgcgccgggctgcttacttgaacatgtcagaagacccttctcacccttccatggccctcaacacccgctttgctgaggtggagtgtttggcggaaagtcatcagcacctgtccaaggagtcaatggcaggaaacaagccagccaatgcagtcctgcacaaaggtagccagtggctcccctgcctcctgccgattcggcctccctgatctgactgcatcctaatgtacatatatttgttttcaaactttcagagctcctttgtctgggagtttaggaggtgctagggatctttgccatccttgggaggttagtatcttagaggcaatcaaggacagtagttctttgcctttttttttttttaaagagatggactcctggccgggcgcggtggctcacgcctctaatcccagcactttgggaggccaaggcaggtggatcacgaggtcaggagttcgagaccagcctggccaacatggtgaaaccccgtctctactaaaaatagaaaaattagctgggcatgtggcgcaacgcacgcttataatcctagctactcaggaggctga

SEQ ID NO: 68407 - DNA, 1739 bp, Homo sapiens
ccaccatgcccagctgacattactgtaattgcagacatttagatgtgggtctatccaattggataatagtgtgcaacagaggagaatgttcttcctttaggtatagtctcaataacatttcttcccctaggtgctgctgatgtagagaaggtggaggaaaagtcagcaatagatctgacccctattgtggtagaagacaaaggtgggtgtttggagaagttgattgtggttcagaagaactctaaaaccagaagcaaggactgtatctgccctgcctccctgtccatactcatctagccattttatcccaagataaaagactgtacctgtccccacatttagttgtcagtgggccaatggcaccattttctgggtctgagagacacccaggtggagaaggggtgtaggtggatggattcttgtagcatacagtgttctgggtaagggcgatggtgctgggctttggctggagctgacatttttcttccccatattctgtagaagagaagaaagaagaagaagagaaaaaagaggtgatgcttcagaatggagagacccccaaggacctgaatgatgagaaacagaagaaaaatattaaacaacgtttcatgtttaacattgcagatggtggttttactggtatggaaatgaggggcccaccagggttagaaggatctgatgtgaaattggggttcttgtcagaaaccacggtacagggactttacctctttacctctgtttgatgagggaatgccaaactgatagtgggttctgtggagaaagccagaagcaaattatatgaaatggatccaggggtaggggatggtgggggacaagaataagtagctttttcaattctcacagatgtttgcttccccccacccccaaccttccctaaattcctcctcagagttgcactccctttggcagaatgaagagcgggcagccacagttaccaagaagacttatgagatctggcatcgacggcatgactactggctgctagccggcattataaagtatcctttgcctgaatctgtactgaggcttttggtgaaaggttctgaaggtcttttagtttgaggttcttactttccttgttttgtttttcctgagcacttttccaatagccatggctatgcccggtggcaagacatccagaatgacccacgctatgccatcctcaatgagcctttcaagggtgaaatgaaccgtggcaatttcttagagatcaagaataaatttctagctcgaaggtttaaggtgagcggttggggaggaatatattgcttaagtgacaaacttgaaagtgcgtaacgtcctgcagcagagggagtctgtccatccagcgcactgttctcactttcttcattctatggaaggctttgctcccaagtaacttacacattagggttgaagacacacagaattgaaagttaactaactgtacatgagctgtaggtgactatgtgtccaatcagtgacacactagtgcagaggggtttgtttggggaacactgcagattggagtattcaggaaagatatagaggtgggattgaattgcatctctgaagatgtagagctattagtcagtgggctgctggttgttttttttttttttttttttttgaggcagaatctctgtcgcccaggctggaatgcagtgatgcagcctctgctcactacaacctctgtgtcctgggtttaagtgattctcccgcctcagcctcctgagtag

SEQ ID NO: 68408 - DNA, 3098 bp, Homo sapiens
tatcaacgtttttgggacataagaggctatatagaattcttttcgttctgcagacagttggtaagcttttatgaagtttatgaagaatagaaaggcttatagtcatcctctccttccttctctcttatgaaaatcttttacagtacttcagaagtttctccattctgccttgctaaggctctgacctcttttctttttgctatctttcaattgtatatgcatcagtgcaaggggttagaagaaagcattctgtctcttcatccttacctgtgataatagctctatcccatgtttttcttgagttatgctgactgctaatctatatgtaattatgaggagctgtgtactctcaatcaaatttcttctaagttcttaggtccaaacaggcacaccaagtatttaagagtccagtcatgaaaaggagctagcagagtgggaactgtgaggaccaggggtagctggtggtgctgacttcagcactcctgagtcctggccctccctctgtcccaggaggaagaggaggtagaacgggaaatcattaaacaggaagaaagtgtggatcctgactactgggagaaattgctgcggcaccattatgagcagcagcaagaagatctagcccgaaatctgggcaaaggaaaaagaatccgtaaacaggtcaactacaatgatggctcccaggaggaccgaggtgtgtgtggccggccccgccccccacccatgggccgttccactagagcagtgggccccgctcatctgccctctctccctccagattggcaggacgaccagtccgacaaccagtccgattactcagtggcttcagaggaaggtgatgaagactttgatgaacgttcagaaggtgagggctgtgctttttttgttgcttttctaaatgttgctttgtttaatatcctacctgtgtcactcattcatctttttcttcttgcagctccccgtaggcccagtcgtaagggcctgcggaatgataaagataagccattgcctcctctgttggcccgtgttggtgggaatattgaagtaagtgccatacgattctaaggaggggtgagtgtcagatattgcatctttggtggaatgcgacctgctgcctctcacctgggtttcttcttcccctaggtacttggttttaatgctcgtcagcgaaaagcctttcttaatgcaattatgcgatatggtatgccacctcaggatgcttttactacccagtggcttgtaagagacctgcgaggcaaatcagagaaagagttcaagtgagttgagggctggagtggactgatctagagcaagggcttctgctatctatctggtcattccatggttctaggcctagccgtgcagggaagtgggctattttctctgttgaagttggcaggtgaagctgttagtaatgtgttcctagcttccctggaagagaacctgggtcttcttgtggggtctagagatcagccttcccgtgcagtggtgggctttacctcaaggtggagccatagttattgcctgtgataatgcctcacgaagggatggaaaagaatctaagagtcagcatgatccctatttaactctttctctacttctttacacagggcatatgtctctcttttcatgcggcatttatgtgagccgggggcagatggggctgagacctttgctgatggtgtcccccgagaaggcctgtctcgccagcatgtccttactagaattggtgttatgtctttgattcgcaagaaggtgagccctgagcctcttgccattgtttctagggggccaggcgcagtggctcacacctgtaatcccagcactttgggaggctgaggcgggtggatcacttgaggtcaggagttagagactagcctggtcaacatggcgaaaccccatctctactaaaaatacaaaaattagctgcacgtggtggcgggcacctgtattcccagctactcagaaggctgaggcaggagaattgcttgaacccgggaggcggagactggaaggccaataggaaaggagcctgtagctggaattgggtcttcaacttcttgtcccattgctacaggttcaggagtttgaacatgttaatgggcgctggagcatgcctgaactggctgaggtggaggaaaacaagaagatgtcccagccagggtcaccctccccaaaaactcctacaccctccactccaggggacacgcagcccaacactcctgcacctgtcccacctgctggtaagtctgcctgtcctatcattttctgtccctctctttttgtcctggcctatttttctgctcccctgtgctcagttctaacagggtagtctggcaggacacacagcaattccctctcagtttaggagggccgtcctaagaatagggctggctcttaaaggcacgagaggacaatttaagatgagacaaactgggaagaaatgaccttctctctgatctagtaccttcttcctaattgattgtcttttattgttctgcagaagatgggataaaaatagaggaaaatagcctcaaagaagaagagagcatagaaggagaaaaggaggttaaatctacagcccctgagactgccattgaggtaagagatggggtgactgaatgccatactaaagacaaatgtgtaagtccagtcttccttttagttgctggcctgtctgcttcatctgttttgtttttgtttttttttcctttgaagtgtacacaggcccctgcccctgcctcagaggatgaaaaggtcgttgttgaaccccctgagggagaggagaaagtggaaaaggcagaggtgaaggagagaacagaggaacctatggagacagagcccaaaggtaaaggtatccacattttttttgtttgtttgtttgttttgagacagtgtagtgctgccgccaggctggagtgctgtggcgcgatcttggcttactgcaacctccacctcccaggttcgagcgattctcctgcctcaccctcccgaggagctgggattacagacagacgccatcatgcccagctaatttttgtatttttagtagagacagggtttcaccatgttggccaggctggtctaaatctcctgacctc

SEQ ID NO: 68409 - DNA, 2985 bp, Homo sapiens
gcctggtcaatatagatacttttgataagcactgttcagttattttgtagaatgtctcttaagtttgggtttgtgtgatgttttctcttgattagattagacattctgggcaagaatgccacagaggtgatgatgtgtccttttcttttttttttttttgagacaaagtcttgctctgtcaccaggctggagtgcagtggcctgattttggctgactgcaacctctgcctcccgggttcaagccattctgctgcctcagcctcccgagtagctgggattacaggcacccgccaccacgcccggctaatttttgtactgttagtagagacagggtttcaccatgttggccaggatggtctcgatctcctgaccttgtgaaccacccgcctcagcttcccaaagtgctgggattacaggcgtgagccaccacgcccagtcgatgatgtgtccttttcagttcatcatactgggggacggacatgatgttcatatgtccccttactggtaatgacttgatcactggttaaggtggtgcctgctgagtttctgcagtgtaaagtttctattgttcccattgtgattgataaatagcttgagggagatatttgagactatgtcagtgtcctgtttctccttaaactttcacaccgatattagtattcgtcagtggaccttgattacaatgattattactgtggtgtttgcctaatgaggttttatattctgacattctttcttttttacttctgcctcccgggttcaagctattctcttgcctcagcctcccgagtagctgggattacaggtgcctgccaccacacctggctaattttgtatttttagtaggcagggtttcaccacgttggccagcttagtctcgaactcctgaccacaggtgatctgcccacctcagcctcgcaaagtgttggggttacaggtgtgagtcactgcacctggcctattctgacatttttctataagagttagggtcttgctctgttgcccaggctggagtgcagtagcacagtcagagctcattataaccttgaactcttgggctcaagtgattctcctgcctcagcttcctgagtagctgggactacaggcgtgtgccaccattcccagctaaatttttttttttttttgagatggagtttcttgctctgttgcccaggctaaagtgcagtggtgcaatctctgctcactgcaacctctgcctaccaggttcaagcggttctcctgcctcagtctcctgagtagctgggattacaggtgtataccaccacgcctggctaatttttgtatttttagtagagacagggtttcaccgtgttggccaggctggtctcgaactcctgatgtcaaatgatccacctgtctctgcctcccaaagtgctgagattacaggcatgagccactgcccccggcttaattttttaaactacatttatgaattggaatttaggagacacttctaatggtgtttttggttcttttattagcaccgggtgctcagcagttctgcttcttgctttccactcgagctgggggccttggaatcaatctggccactgctgacacagttattatctatgactctgactggaacccccataatgacattcaggtgagcagaggcagcaggcagccttaataagtaacatgttatgctagaaaggcatagtggcctctatgagggctccaccatctggaattaggtttttaagtgagaaacaacagattctttttgtgttgtttaccttattgtaagccagagtttggttagctgtgatcctattttgggtaacatgataatagagggtggtgtctggaggcaggggtgcaaaaggaagtttcctatgaatgtaggctgtggaccttgccttgtactgaatttagaatattatgtggaagtcaggataagagtggcaccaggaaaatacaatttctggctttatttcctgttcaactccaggcctttagcagagctcaccggattgggcaaaataaaaaggtaatgatctaccggtttgtgacccgtgcgtcagtggaggagcgcatcacgcaggtggcaaagaagaaaatgatgctgacgcatctagtggtgcggcctgggctgggctccaagactggatctatgtccaaacaggagcttgatgatatcctcaaatttggcactgaggaactattcaaggatgaagccactgatggaggtgaggtagtcaggaacttacgttttggtgtggggcttggcctctctaaaggttagggagaatctttgataccaagggtcttgtgggacttgctttttccactgcagctgctgaaactgactttggggatgtgggcccttgattttttataggaggagacaacaaagagggagaagatagcagtgttatccactacgatgataaggccattgaacggctgctagaccgtaaccaggatgagactgaagacacagaattgcagggcatgaatgaatatttgagctcattcaaagtggcccagtatgtggtacgggaagaagaaatgggggtgagtatgaatccaaggcaatcctgtgcttggtaattggtctgaaaattggcattgagaccaaggtggtatttgagacaagtggaaaatatctgtaggcaaattcttatgttgatgaattgatcctcttcctttgaaaacaaagctgataacatgactaatcagattttcatctttgccttggttgtcagaaaacttacaaccaaatatcatgctcacaacagttattttggctctttaccagaatgtcattttctcctatgtgttttattaaaccttacaaatgaaattttgaatgctacctcatctctctagagaaaaggcagaagatcctaggtaatctatctctttgtgttttctggtttttatttaagagacagggtctctaccaggtgcagtggctcacatctgtaatcccagcactttgggaggccgaggcaggca

SEQ ID NO: 68410 - DNA, 3151 bp, Homo sapiens
ttcgagaccagcctgaccaacatggcgaaaccccgtctctactaaaaatacaaaattagccggatgtggtggtgcacgcctgtaatcccagctacttgggaggctgaggcaggagaatcgcttgaacccgggaggtggaggttgcagtgagctgagattgcgccattgcactccagcctgggcaacaagagtgaaactccgtctcagaaaaaaagtatataaagacttaatgggagaggtaagacttgtagttatggtgggaccttgggtttttggaaaggagtgggctgggcacttgtatagaggaaggtgagagcaggagcagcagcgcaggtgtgtcagtccttggctcagcttgagggggcagcagggtggtgggtgttcgctggggttgcagtgtgctggggccctcagtcctgactctcctcttttttctcaaagggtcattccaaaggccccttcctagtgagcgcccctctttctaccatcatcaactgggagcgggagtttgaaatgtgggctccagacatgtatgtcgtaacctatgtgggtgacaaggacagccgtgccatcatccgagagaatgagttctcctttgaagacaatgccattcgtggtggcaagaaggcctcccgcatgaaggtatctcaggggagggaagccaccctagagaaagagttgtggcttctggcttagtttacctccttgtgatctggtccctggtgaggcaaaagggtaaccctgggaggaggaaaacattccatcagtctcctggttgtgcttacacagaggaactgactagtagtgaccaagttgccttcatgtgcagaaagaggcatctgtgaaattccatgtgctgctgacatcctatgaattgatcaccattgacatggctattttgggctctattgattgggcctgcctcatcgtggatgaagcccatcggctgaagaacaatcagtctaaggtgagggctgagggagggatgttggagcccccactttgggttttttctagtactaccaattcattaaggggaaaacttgtagatggagaggagaggggaaaattgtctctgccttccttccttgtatgtgacagcccttggtggccaggcctttaaaaagaatgtgaggagtgggatgcttaactattgggcagtgaaaaacttgaaattttgtagagatttgctagagctctgttttcattggatttcacctttctccatctgcttcaccagttcttccgggtattgaatggttactcactccagcacaagctgttgctgactgggacaccattacaaaacaatctggaagagttgtttcatctgctcaactttctcacccccgagaggttccagtaagtatgtgtttatctgtaatcggctcataattgtgcctctcattcttcctgttgcccatttcctgtatcacttttctttcttcctttctccttctccaataacttttttcctttttctttctgaagcaatttggaaggttttttggaggagtttgctgacattgccaaggaggaccagataaaaaaactgcatgacatgctggggccgcacatgttgcggcggctcaaagccgatgtgttcaagaacatgccctccaagacagaactaattgtgcgtgtggagctgagccctatgcagaagtgagttgggagggacagaagcagactccatttagacatctgccagtctgcagagtgtttcctattcctcccccactcagcttcaaggcatctggtgacaggagcaagcaaggcctgaagaaacctgatgctagggcgctggagcgcatagttcttacttattttaggttatacctttccttatttaaaatggtggtggtggtagtgcttgtgcgttaggtgtccttagttccaaagtgggatgtgttggaagaaagatctcagttgttggcactgcattattagtcattgaaaggctctcaagtctaacctgtctttctaccttgcccatgtaggaaatactacaagtacatcctcactcgaaattttgaagcactcaatgcccgaggtggtggcaaccaggtgtctctgctgaatgtggtgatggatcttaagaagtgctgcaaccatccatacctcttccctgtggctgcaatggtatgtagtgccatctcctgttcctccctgggttgggtcttctccatgtgggctttcttttaatacttttttctttgcatttgttctcaggaagctcctaagatgcctaatggcatgtatgatggcagtgccctaatcagagcatctgggaaattattgctgctgcagaaaatgctcaagaaccttaaggagggtgggcatcgtgtactcatcttttcccaggtatcatgtggactgggagctttagggaacagtcatagacaacccttagtgacctaaggaaagggattaccatctgactcttccataattaaaccgtgcttcttttgcagatgaccaagatgctagacctgctagaggatttcttggaacatgaaggttataaatacgaacgcatcgatggtggaatcactgggaacatgcggcaagaggccattgaccgcttcaatggtgagagagaaggagttgtttagtttcaggaatcctcatttgcttatatctttggactgtaacttcttgtgcatctccttttctgtgtagttcttttgggactttgtcatttgagatggagtaaagcttttgaatgtctcaattggacgaatgtattggactattcctaggagattttttcttttggggtatttgttctttctgctagaaagaagaaagcattgtatctcgagggcaagcaaagggtcaggacttgttcaagctcaaatagcaagttactagcagacttgtctgcctcagtagacgctactaggtttttttttttttttttttttttttttttgagatggagtcttgctctgtcgcccaggctggagtgcagcggcacgatcttggctcactgcaacctccgcctcccgggttcaagcagttctcctgcctcagcctcccaagtagctgggacaacaggcgtgtgccaccacgcccagctaatttttgtatttttagtagagatgtggtttcaccatgttggccaagatggtctcgatctcctgacctc

SEQ ID NO: 68411 - DNA, 1050 bp, Homo sapiens
tcatcagaaaaaaaaaaaggaggtatattttgaatgattgaagaagtgttgtctggggggaggggccacatagcctagcttttatgcacttacataggaatctggcttaattcaggctcagttcctctgggttttgtttgtacagtgtaatttgagggtgattaaagttaaaaagatgaatctaagagggacataacgattatttacctggtggatcctgactagtagaattattgtattggtagggagtctgtgacgtgcttttcctcagtgatctgtaggatcaaaatcaggtctggttaagccctgtttcctggaggaccctaaactgaacatgaaattgcagtaatcataggggatctcttccctccgaattttccggagctcttccccaagaggatccgtgaagactagtgaggaggaagcagctgctctattaggggaggaggggagttccttgccagctcttgacttctctgtttcatccttcagccaacagtgaagtatgagcgacagccagagtacctggatgctacaggtggaaccctgcacccctatcaaatggagggcctgaattggttgcgcttctcctgggctcagggcactgacaccatcttggctgatgagatgggccttgggaaaactgtacagacagcagtcttcctgtattccctttacaaggaggtaaggaaatctggggtggatagttttttgtgtgggtgttttgtgtttgaagccttaacttacactgagtagagagataagggaataaaaaaattggtctctgaccttcaagaacactgtggataatagataaacacatgtacacatgtgtttagtagatagtagataaatgtgatagtggataaacacatgtacacagcggaagatttgagggcatggagccctgggtaggattagcagtggatccatagagtatcagttctaggggaatgattgtgtgttgagggaagtagaattatgagtagaattagtatggaaaggcttggctggacgcagtggctcatacctgtaatcccagcactttgg

SEQ ID NO: 68412 - DNA, 1070 bp, Homo sapiens
caaagtgctgggattataggcgtgagccaccgcgcccggcctgatgcctggctaatttttttttttttttttagtagagacgggtttcgccatgttggcctggctggtcttgagctcctggcctcaagcgatctgcctgcctcagcttcccaaagtgctgggattacaggcgtgagccactgcacccggccaacactctatgttaattattaactgactgaattctggtgtttgagctctaggaaagtataaattagagataatttttggtcagagactggtacagtagaggctctgaaaacgtgtgatctgtggcatacctagaggtctggtgtgaaacaaacggtattgccagtttttgagaggaagtgaggagggttgccttttctggctctgagggttttctctcctggacttgcagtgtggacaagaagggccacgtccactacttgatcaagtggcgggacttaccttacgatcaggcttcttgggagagtgaggatgtggagatccaggattacgacctgttcaagcagagctattggaatcacaggtgagtgattttgggtgaggcatagagttgtttctttttttttttttttgagatggagtcttgctctgtcaccaagctgtagtgcagtggcgtgatcttgactcactgcaacctccgacttcctggttcaaacgattctcctgccttagcctcctgagtagctgggattatttgcatacgccaccacacctagctgattttttttttttttttttttgagacgaagtcttgctcttgtcccccaggctggagtgcaatggtgcgatcttggctcgctgcagcctccgcctcctgggttcaagcaattctcctgcctcagtctcccgagtagctgagattacaggcgtctgccaccatgcccagctaatttttgtatttttagtagagacggggtttcaccatgttgaccaggctggtctcgatctcctgacctcaggtgatccgcccgtctcagcctcccaaagtgctggcctcccaaaatgctgggattacaggtgtgagccactgtgcctggcca

SEQ ID NO: 68413 - DNA, 1101 bp, Homo sapiens
ggatttcaggcatgagccactgctccaggtctgaaatgagatctgaatcgtcctttgatgaagttgagactgtgggctgtcccttctcctcccatggttatgatttgagattaagttgtctctttttctctcagtgtccagctctgaagggcaaagtgcagaagatcctaatctggaagtggggtcagccaccatctcccacaccagtgcctcggcctccagatgctgatcccaacacgccctccccaaagcccttggaggggcggccagagcggcagttctttgtgaaatggcaaggcatgtcttactggcactgctcctgggtttctgaactgcaggtaagtttaggatagtctggagatgtaggggctacgatgaagaggatagtgacaaaagagccttgtggatagaaggaatgaacacagcttcttggtggctgattttctctttccgctcaaagctggagctgcactgtcaggtgatgttccgaaactatcagcggaagaatgatatggatgagccaccttctggggactttggtggtgatgaagagaaaagccgaaagcgaaagaacaaggaccctaaatttgcagagatggaggaacgcttctatcgctatgggataaaacccgagtggatgatgatccaccgaatcctcaaccacaggtaccagctgagcacacgggagacgggcagtctccgtgggagagtcctgctaaagagattgggaaaatggctgtcaccagtaacttagacttggaagacactggttttttttgtttgttttttgtttttgagacagagtctcactctgtgcccaggctggagtgcagtggcgtgatctcggctcactgcaacctctgcctcccagattcaagtgattatcctgcctcagcctcctgagaagctgggactacaggcgcaagccaccatgcccagctaattttttgtatttttagtagagacagggttttcattctgctggccaggctggtcttgaactcctgacctcaggtgatctgcctgccttggcctccctaagtgctaggattaacaggcgtgagccaccacgctcagccttatatatttattttgagacaa

SEQ ID NO: 68414 - DNA, 2388 bp, Homo sapiens
cctgaggtcagcatgtgtgtagcatgtgtgtgtctgtctccctcttccccccttgccctgctccagcgtatgctcttatgccggcagctgggggacagctctggggaggggccagagtttgtggaggaggaggaagaggtggctctgcgctcagacagtgagggcagcgactatactcctggcaagaagaagaagaagaagcttggacctaagaaagagaagaagagcaaatccaagcggaaggaggaggaggaggaggaggatgatgatgatgattcaaaggtgcctggacctccatcctcttctttgtactgttaaacttttgtctttttgtttcctagacaccttactgccctttagaacactttctcttcttttcctcttaactctgttactctgatttttccacacaaatttgcttagcaagtgtgggcactaggtggcaggtacttacttgactttgctctttctgcaggagcctaaatcatctgctcagctcctggaagactggggcatggaagacattgaccacgtgttctcagaggaggattatcgaaccctcaccaactacaaggccttcagccagtttgtcaggtaaaacagaaggggtttggggaagggggaggagaatctttctgttctctcttcttacttctctttctttttttattcttaaacctttccctctgctcttgtgcatttctccaccagacccctcattgctgccaaaaatcccaagattgctgtctccaagatgatgatggttttgggtgcaaaatggcgggagttcagtaccaataaccccttcaaaggcagttctggggcatcagtggcagctgcggcagcagcagcggtagctgtggtggagagcatggtgacagccactgaggttgcaccaccacctccccctgtggaggtgcctatccgcaaggccaagaccaaggagggcaaaggtgaaatggggttcaaatgggagtgggggtgtctagtgtgggcttaagatgtcaaagacagcatgggaatgctggtctgtcagccctaaggtaggagataggagggaggaatgagtcttggattttggagggaaatttgggaatctgaatgtggggaagcaagcttaggtggagaagattttattttccccatctttggtcttgtggtatatatttggatatatcctgattttaggtcccaatgctcggaggaagcccaagggcagccctcgtgtacctgatgccaagaagcctaaacccaagaaagtagctcccctgaaaatcaagctgggaggttttggttccaagcgtaagagatcctcggtgagagcccagcccatcgctttagggagggtgccatgtctaatagaaaggatgtgaccttctatcagaacctgtccttcatagtaggcacgtaagaatgtggggcgtttcccacagaacaagatgagactaggctccctgtataacggtgcttgctgggattctggtgtccccagtgagagagtactcccctctctgccactctgtccttccccttggcttgaacgtctaaccttattctttttcatcctgccagagtgaggatgatgacttagatgtggaatctgacttcgatgatgccagtatcaatagctattctgtttctgatggttccaccagccgtagtagccgcagccgcaagaaactccgaaccactaaaaagaaaaagaaaggtgtgtttctcttctgtatatttgtgatgggatgaggtgggagtgattggggaagaatctccctaaggagataggggtcggggggtggggggaggtagtttttttccaataactgggctttccctcttccttgcccaggcgaggaggaggtgactgctgtggatggttatgagacagaccaccaggactattgcgaggtgtgccagcaaggcggtgagatcatcctgtgtgatacctgtccccgtgcttaccacatggtctgcctggatcccgacatggagaaggctcccgagggcaagtggagctgcccacactgcgtgagtgtctggccattgtggccccttggaacccatgagaagaagggtgggacagtaaagctcttcggggcctggatggaaatggaaatgctggtgctgcgggttgtgagctttgggaagcattcaaaggaatgatgggcactggcttcagactgcggtgggcgggtgggggtaataatctgaatctgtggtcctttactgcaggagaaggaaggcatccagtgggaagctaaagaggacaattcggagggtgaggagatcctggaagaggttgggggagacctcgaagaggaggatgaccaccatatggaattctgtcgggtctgcaaggatggtggggaactgctctgctgtgatacctgt

SEQ ID NO: 68415 - DNA, 1581 bp, Homo sapiens
ccctccccgggcgcagggaggcgcccccccacccccaagtgaccttgtgtccccgagcgcctcgccgcctgcggcctcccctggcccccccgcgccgctgccactcggaccccctcccccgtcacaccccgctcggtccagccccgcgtctcccctccccgcgcttgcaccagcctgccctcggaggcgtcgctccctcgctccgtgggggcgcctgccggggagccggcttccgggctgcccccgaggagtgtggaactaagttcagcctgagcggttcgggtgccctgctagggtggctggggtggggggcggaaagagcgggtgggtgtgggggagggggacagtgcgcgtcactgactgttctgtgtttctcccccctcccccgcacagtgactcgggccagtgtagaggtcctcaggccgccggcaggagcagctgggccaattccctggccgggagcggaaggggatggcgtcgggcctgggctccccgtccccctgctcggcgggcagtgaggaggaggatatggatgcacttttgaacaacagcctgcccccaccccacccaggtaacatcttccccaagggcccatggcgggaaggagacatctggggctctcccgagtgactcctctggtgaggcagggctgtgttgctccgctgtctctgtgcagagccggaggtggagggtatccgaagggagtggttcccttctgcggagctctggtgtgaggggggtggaagccatgtgcctcctgggcacggagatgccagcttgctgcactctgtcttgaggaatgctctgcagttcccagttgagggagctctctgggctggcaggcattacctggtatgtgggtcctcggaggaatgcaggtagctgggacccctggaggcttgtggtggtggtggtggaggggggcgttgaggattctgtttgaaagaccagccgggcatctgtgctagtaggatcctgtggttgctgctgtggaaaggaaagagggagtgctggttacactctatctgattatttttagcttctgatcggttaccggttttctgtgctgtctgaactgtgtgaagtttgaatcgcgctcctcagcaggatctggagtgcttaaagcagccaggcagattgctggaatgttttgagtggggaagtgatgggggctcggggaggatgtaatagcctagtgaagaggggcaaaagaagggagggcactcctcctcctggtgagtggacatagttttggcttttttcctagtggcttctgtctctatgaggtagcctgcggtttaggctggcagtgtgaagtgtctgtgtaggtgtgctaggggttacgctatctgtgttttggggtggcttcatgaactggccaaacccgtatggttgtaaccaccctgtctgattgggggaactgttgtctatcctcaaatgatggttgatgtcatgcccctaagcagatgtctttctcttctgtgtcctttttcagagcccctagctgtgtcacctactcatctccttgaccttcatgttttctagtttaatttttttttctacatgtcatttcttcattcc

SEQ ID NO: 68416 - DNA, 1413 bp, Homo sapiens
agtgttccattgagtggttccattttgcctgtgtggggctgacaaccaagcctcgggggaaatggtaagtggcaggagttggagggtccctaagttgagtggtcaagggcattctccctttcactcacttttctctccccttctctgtttcaggttttgcccacgctgctcccaagaacggaagaagaaatagataagggccttggattccaacacagtttcttccacatcccctgacttgggctagtgggcagaggaatgcctgtgctggggccaggggttcagggaggagtggatggcacagtgctgtcatcccttctcctcccctctccccactcccggtgctgaggctgcatcagaccctggtagggaggggtgccgcagccactaacggtatgtgctctccttcagccctctcccttcggagggacgtggtcttgcccactgtccttttgcctccatgctgaggtcggtgctgtatttcagagggagggtccttttcattctccttgctttgtatttaaggactggggcatagcatgggggcagtcccccagacctcttcattccccctcctgtggtgagggctaggtgtgatcaacacttttcttctccattcccttcctgcttttttcatggtgggggatccaccaggtcatctaggctctggccctagttgaaggggcaccccttcctctgtgccaagaggattcatcctgggagagggggcaaggtggaatgcagataactcacatgtaaaaggaacttgggtaggtaaataaaagctatacatgttggcctgctgtgtttattgtagagacactgttttagtaaacatgctgagcattcattttgcgtcctctgggttggatgcaatgtgagaggatggcatgccagaattaggacacgacatgaaaccagagtggtgcctctgtccgagaacttgtaagttctcaacttgggaaagacagaggtgctggagggtaggcctcagaccagggggtctccaaaactttgtaaatcatgcatcttttctccataaaacatctttcacttaatttccaataaatgatgtatttgtgctatacatacgtactgctatactatacattagcttgacttctttttttttttcctttgaggcgaagtctcactctgttgccaggctggagtgcagtggcgtgatcttggctcactgcagtctccgcctccgggttcaagtgattctcctgcctcagtcttacaagtagctgggactacaggcacatgctaccacgcccagctaattttgtatttttagtagagacagggtttcaccgtgttggccaggatggtctccatctcttgacctcatgatctgcctgccttggcctcccaaagtgctgggattacaggcgtgagccacagcaccca

SEQ ID NO: 68417 - DNA, 1028 bp, Homo sapiens
agtgagaccctgtgtcaaaaagaaaaaatactaataattttgaaatgtatgatattgatgtacagacttggaaaccagcaacagcagatgactcagcctgatttgcggcagacaactgctgtgggatgtttttgagaaggaaacaatggcttttgagacaaaattcaagaagcagcaagcccttcaaagaagcatcttcaaacatggacaaaaatacacttcatattaatgtggtgtgcaaaggatcccttgctgtgtttcagtaatttaaattccaactatgatagcaatgttttcagcaccttgaaaggacctttaaagcaaatattgtcagtatgttccattacttgagtgcatggcacagtacctctgaacattcagtactttttagttggaaggttatgctaatcaatggaaaaggtccaaagaacaaaaggaagaaatgtgtttcacctagccactcaggggccattgtgaccaggcctctgtctctgttgtagacctgaaggctgaaattgacaagttggccactgagtatatgagtagtgcccgcagcctgagctccgaggaaaaattggcccttctcaaacagatccaggaagcctatggcaagtgcaaggaatttggtgacgacaaggtgcagcttgccatgcagacctatgagatggtatggccctgttcatggctccccacctacttcccatctaatcctcagggtcttagacccctccttcaactgtgttgggatctgtttggggtctgtgagatccataaactctgccttaacctattttctttaattggagatagttttgtacctctcctttctccttcctttccacccaggtggacaaacacattcggcggctggacacagacctggcccgttttgaggctgatctcaaggagaaacagattgagtcaagtgactatgacagctcttccagcaaaggcaaaaagagtgaggagggggcggggctgtgagaggtggggcgaggactgaaagggagaagaagtcagctcttcat

SEQ ID NO: 68418 - DNA, 1124 bp, Homo sapiens
atctcctgacctcgtgatctgctctcctcggcctcccaaagtgctgggattacaggtgtgagccaccatgcctggccatttgtttgtttttgagacagggacttgctctattgcccaggctggagtgcagtggctcaatcacggctcactgcaacctctgcctcctggattcaagtgattctcatgcctcagcctcccaagtagctgggattagagatgcccaccgtcacactaggctaattttcatatttttaatagagatggaggtctcgccatgttggccaggctggtcttgaactcctggccttgagtgatccacccccttggcctcccaaagtgctgggattgcaggcgtgagccaccatgtccggcctgaactgcactttaaaaggagctgtaaggcctatgcatagtcagtcctgtgattgtttctctctcttccctaggtattgaaaaccttccctttgaattacagagaaactttcagctcatgagggacctagaccaaagaacagagggtatgtatagagtaaaaagtttttgtatctaatgagtgtgtgtaatcatttatttttctacttgatgttaccgtatcatctggtatgatctggagaactgtggcttctctcgctccttttttacgctcttggaattcttaaaacaggataatgatcctcatttctgtgtcagctttttcataacaaatagagtattgtgaaaacgcctcaagaattcaaagatgctgtgttctttatgtcttcctggagaataattagccaggctggctcacacctgtaatcccagcactttgggaggcctaggcgggcaggtaacttgaggccaggagtttgagatcagcctggccacatggtgaaaccccatctctactaaaaatacaaaaactagccaggtgtggtggcacgcaccagtaatcccagctacttgggaggctgagacgtgagaatcgtttgaacctgggaggtggaggttgtagtgagcccaaatcatgccacatgtcactgcactccagcctaggcaacagagcaagactctgtctcaaaaaaaaaaaaaaagaagaattaaagaaagtcaactcgagtcatttctgctctccacgtttgata

SEQ ID NO: 68419 - DNA, 1101 bp, Homo sapiens
aggagtagagaacaaaagaaaacacgtactaaatgttcagagagaatcagcaaacagaaaatgaaaacgcttatgcttcataaagatgcccagtgtttatcccgtgaatctggagtgactaggaagaagggaacctgccaactagaagtgatgatctttggtgctatctcaagttgaactggagtccagacttacaggccatagaccgtctcacccggcttcttgtggatgtgatgatctcaccttaaagtgatcagacatcttgctttgagaagaggaggagtcaggctttcctcacaaataagagacacgtcctgtgatgtttttgagattttataccagaggtcccgaaaagcacctggtcatagagatggttctgaagtcgctgatgaggagcaggtgtcactgcaccctcaagtccttggctcatcttagcagagggccctgtggtgttggggagagaggtcacattggtactaaactaggcatttcctgtcattagggggctgggctgcaaaaagcacttagttttcatgagtttccattaatatcactactactctccacaatcagtgtaactgcttttctttgttaccataacattctctggaagtgatgctcaaggctgaggggactgtttctggccataaggtggggccaaggaagacgcgttctgcttttctttttccttgccattgtgtttatcttgtgttcttgaatgttcgttaggacagttactgtaggagctgacttgaatgccaaattgtgggctgcctgttccttgggtgccaagtcctcagtctctcctcccccagcagagaggagcctcagcttgagctgagtgatgcaggcattgaccagaagcaaatcatcagtacctgatccacatcagagaggaaggctggtgcctcttggaggcccatctgatgtgcctccttaggagagcaggatgggcctggagaagatttgttgagccagttcctaaatggtcttgctgacattctttcccttttttctcttatcctgtgcagaatccacactggtgatagaccatacaaatgtgcacacccaggctgtgagaaagccttcacacaactctcc

SEQ ID NO: 68420 - DNA, 1035 bp, Homo sapiens
aatttttgtggtttctctctgtgtctgtgtttggaaatcttctgcagagcaggcctgcttttactatatgcttcagttcagagccaaggtgtgcattcaacttcaggtccatggggaacaggcggtattggtctttgttcagattactatttggaagcagggtgtctgtggtgagtgtgttaaccttaggagaaagcggagggttgatgagattgactactttaaggttaccaggagccatgggttgcagctcttcatcatctcactgccattctagccaccgacttacgatcagcaacaacctagatctgggtgtcctcttcatttgcctatccaggctggagtgtttttgggaggagggaggaagggggtgctctcatccgtcaagcaacgtcatttcacccagcagagagctgagcccctggtgtcgaactgcttcctcctccccccttccctcctctcctctccggcaggatccactccaagatgcacacggagaccatcaagccccacaagtgcccgcactgctccaagaccttcgccaacacctcctacctggcccagcacctccgtatccactcgggggccaagccctacaactgttcctactgccagaaggccttccgccagctctcccacctccagcagcacacacggtaagggagagtggcgggctactgaccccgccccgctggcatgccctccccacccccgccccggacacacacaacaacccgcatgcggggggcgggggagagacctggctggaggagagacctggctggcatctgggagaaggaagaccaaacaacactggagattcaagtggacacagagcttctctggggcaagagctacgtcggggagctgcagtgactatatgatattcactgatccatgggagacagacacgtacctggagtagaaacaacttttctctaattttcctccctgaaaatactcatgtacccatcttggaagatttgccccttgatgccaaaacagaggcatttgagtggagaagaccatacctct

SEQ ID NO: 68421 - DNA, 1341 bp, Homo sapiens
tgccttttctaccagctcccattttacactggtgaattgtttacgaaaatgaaagatagcttttactcagtaaagtctgaatagttgtggcttaacttgctcagaggcctccttattgatatttggtggacaataccagagtggaaaggattaccagcttgggatgagtgaaagtacgatcaggtgctactgatgtcaacccagagtgctgacactggctccatgtgctagggaagaggaaaggtttagcgtggaagataggtgttttgtaatcatttttctcccaaatgcttgagggatggcaccttcccctagcagctacgttggtcattgcaaaagtggttttcacttgattgtcaaggggctgtgggcaaggggtgggtagatgatggatgcaacatcagataagagggtggagagcagacatacctggtttgaaaaagcccctccaaataattctgatacttcctcacccccatccctctaggaatcgctgccaaaaaggaagtaggggaaaatctgagggaagaaaattatctatggagacaggagaggatccagttagttgttcctcattatcatctcggggtcttgaggaatacagaggcatgtgcttcatacataggaacatcagagcaaggaattccttaaatgtttgaaatcaagctgtaagcagaaggcaaacaagttaactgatattcctggcccattgaaattcgcatctgcccagagttcatactgtttctgttttatctggttgaaatacatttttgcacatggaggcagtccagtcattcagcaaacatttattgaatatttataatgtgctgggcaccatgttagaagcttaggccataaagatgaatatatagagctctactctcaagttggagtaggagagacctcagataggtgggcttctcttggaagtagaggggagggttcagccacaccttcttgatgggaagggttctaaccattgccctcacttggctcaggtgccggatgtgctcactgacattctactccaagtcggagatgcagatccactccaagtcacacaccgagaccaagccccacaagtgcccacattgctccaagaccttcgccaacagctcctacctggcccagcacatccgtatacactcaggggctaagccctacagttgtaacttctgtgagaaatccttccgccagctctcccaccttcagcagcacacccggtaaggctgctcttggtttaccccaccacctggccgtgaaccctaagaccatgttgcctgcacctactcctctctccacatgtattattctttccctttcacctttgcccattggtag

SEQ ID NO: 68422 - DNA, 1254 bp, Homo sapiens
ctagcaatgtgctaggcattgtgggggatacaaagaagtagaagatgcggtccctgcctttgaggaggtgacattctttccttctctgaatcaaggagtctcctgttctcagaggtggagaagagaagggagtcaatcaaggggtaaatctcactgttaccaggggggtggggacaagggttaggagaccattatttttctacagggtttgggatttcctgtgtactctgggttgggtcggcgggggggtgaggggttaattagacaatgatctgggggaaatgaaataggattaggatcaggactgaacaacatgacgccatctcctttttctcccaatcctaggtccgggtttggtaatcacgtccccctcaggctctcttgtgaccacagcatcatcagctcagaccttccccatttcggctcccatgattgtctcagctcttccccctggctcacaagccctgcaggttgtccctgacctctccaagaaggtagcatcgaccctaaccgaggaaggaggcggaggtggtggtggaggtggcagtgtggctcctaagccaccccggggccggaagaagaagcggatgctggaatcagggctgcccgagatgaatgacccttatgtcctctcccctgaggatgatgatgaccatcagaaagacggcaagacctacaggtaagactcagagccaggggcaggatggggcgaggatccctggcttggtgattctccctgtaccctcattgtgttctgccccggtcaggcgctacactctgacagcttcccagctctgagccacttgcatgtcaggtgtcccatcataggataggaggcagagctgctagcatcgtgttaggatgcaaagacccatttcaccctttcctttttttaacccttgttttgggggtcgttaacactgactaattttttagtaacagagtagaatttctctcttgtaataaggctttatgctgggtttgagactcttggctgcagctcctttttgctttctacatattccattcctatttttctaagaaacctttctagtaagcacctaacctatgtgccatccaccagttcctgggtcgcatttgaacactgagcctgccttaccctgcatggttgggatgatgggaggggccttcataagaaggtaggaggaataggatgcctccccctttggaatatgtacttaaagaatgactttgctcactttctaatttatgaaagtcattttgattctccac

SEQ ID NO: 68423 - DNA, 1050 bp, Homo sapiens
taggattgggagaaaaaggagatggcgtcatgttgttcagtcctgatcctaatcctatttcatttcccccagatcattgtctaattaacccctcacccccccgccgacccaacccagagtacacaggaaatcccaaaccctgtagaaaaataatggtctcctaacccttgtccccacccccctggtaacagtgagatttaccccttgattgactcccttctcttctccacctctgagaacaggagactccttgattcagagaaggaaagaatgtcacctcctcaaaggcagggaccgcatcttctacttctttgtatcccccacaatgcctagcacattgctaggcacacagtaggcacttaataaaaatttgattgaataatcaaacacatatcccactccccatgtccttggagccctccagcctggggtactgatcatggaagatcaacacctcagattggagaagagcagagttgctcaccagcagtcatcagtcctgtagacggcacagggaccaccgtgatattctgggtaacggacgcttggctgtgtggggtcagctggtctgacttggactctgtgtccatactgatgcctgagggcagggacactgaggcaggcactgtcagcaaggtggggtagtgaggtggggccagaccacagcccttctctggcaacagctgatccttcatcttgttgatgaacattgtgttctcgatctaagagaaaaggaaggggacgggagcaccctcttcagcctgagaggctgattctgcttgctcgtgagcacacttcagtgtctgtcctccttagggatcaaggatgagcacttcatacctctggccttctagagagaagcccaggcagaaacactagataattctcaggggtgggggacccagtaaaacagcatgtggtgtaccttcagtctccatagtaacagaacttactactgagacttggagagagcaagaaagcaacaccacttacctgacctgagactgtggggatagaaggccagaagtacgggttagaattgaagtgaga

SEQ ID NO: 68424 - DNA, 1052 bp, Homo sapiens
ctgcagtgagctatgattgtgccactgcagtgtagcctgggtgacagagtaagaccctgtctcaaaaacagaaaaactaaaatttctatttcaaggaatatagttttgaagaataagagaaagaggagtcatgctaggtactggcacctggccgttttcaagtcagtcagtgatttgttttttgtgaccttagctacatcatctcccctctcgtgagctcagtttctttttgccagcaaaggaaagtaataccagtttttctttagggggcatgaataacattgtgtgagtaaatgtgatacgtataagttctttcacagtcatgaagtaggatagcctctgttggatggggatacagtgacaaggggctctgaccaagggactaatgtgctagacactaagtcttgactgccagtccccagccatgtgatcaggtgccagaggagaccaggaactcttcagttccccttctccattgcttagctttttctgagtaattcctgagtgtgacatgttctctcattttttcttcaggtagaatggaagaatctcacttcaattctaacccgtacttctggccttctatccccacagtctcaggtcaggtaagtggtgttgctttcttgctctctccaagtctcagtagtaagttctgttactatggagactgaaggtacaccacatgctgttttactgggtcccccacccctgagaattatctagtgtttctgcctgggcttctctctagaaggccagaggtatgaagtgctcatccttgatccctaaggaggacagacactgaagtgtgctcacgagcaagcagaatcagcctctcaggctgaagagggtgctcccgtccccttccttttctcttagatcgagaacacaatgttcatcaacaagatgaaggatcagctgttgccagagaagggctgtggtctggccccacctcactaccccaccttgctgacagtgcctgcctcagtgtccctgccctcaggcatcagtatggacacagagtccaagtcagaccagctgaccccacacagcca

SEQ ID NO: 68425 - DNA, 1680 bp, Homo sapiens
cgtcccaaggaagggtctttgagaaaggggtaggggacgacatcaggagaaggctcccaggaactgtctcaggggagcgaaggttttgaggggacagctggggtctccagtagatagaccacggtgcaggctgagggaggtacttcttggcacaaggcctcgggtaggcagggggcgaagtcctcgaagaagtggggggaaggctagaggaagtggctgggcctgaactggcactgtgcctgccacaaggtcttgtgcatcccccagccctcagctttgccttctgaagccactcctcaggggcacagaccctcctcctcctccatctctaatgttctctgacccctggttacctgtggcctgggaacgaacaaggaccagtctctgagcctaggagtgaaacccaaacgctggtgatagaattcgtcttagtttctgggaattggatttatttctcttgtatccacgtagagggtagcactagactgctgttattatatccacccgtctttggattgctggctggggggtctgcctgccttccagactgactgctgacaaataattcctgaggttctccacagttctctggtggctgcaccctgcctggcccctgtaacctagacaatttgtttacagaaagttcaggagccctggaaaggagaaggaataagacggcaggaggaagagagagagagggtaagatgatttttgggttaatggcttttctggttttgggggagaaggggtcacaaccaaatggggcgtgtgtgtgtttcacaatgtgatagaatacttaaagtaatagcaattgtaatgctgagattgttgtggagagaaatcagtttttttctattatctcttgagggtcaggaagtttttgtgtaaaaagttggcgctatcccccatcactttccattcctactaatgctcatcaggaatgaaatatgaaatgctcaggtgaagccactgaatagtgttgccttgtgtccaaaggggaaatctttattctgctttgggacacaaagaccctaaatgccaatatagtccttatggaattgctttcctgtgtctggaacaagcagagctgagtttagaatggagttcctatcccaaatagtccagtggagtgttagaagtgggtctgtggagtgattagaatctgtgacacagggttatttgaatttggtatggcaagatgaaattttcaggggaaaaaaaaaactgcttcatggttagtctggagtgaagtggataaaactgtacggagtagactccagaagtaggtctggaagagtttcgggtagcctgaaaatgacagtgagtggacctaaagagtttgagttcagaacttatgatcccagaggttggtttataaaatgccctgtgggtttctgagccaagttgttgattaaatattgggtacatatctcttcttctccagtcttatttatttattttggcctcacattccccagatccatcatttatagtggaacagacagggcaaggagaaccaccgtgccgtccctcccacaggatgcagggtaaagtggtccggtggtgcccaggctagaagctgttggcccaggttgccagctgtgtggtggtagcagtcctgtttagtttgtttgtgtatggtgtgatgatgtttcccagtaacattggggtgcatttgtt

SEQ ID NO: 68426 - DNA, 1124 bp, Homo sapiens
caccttcacaggccatttgcacacgctcctgcaccctctccccgtccataccgctccgctcagctgactctcatgttctctcgtctcacatttgcactctctccttcccacattctgtgctcagctcactcagtggtcagcgtttcctgcacactttacctctcatgtgcgtttcccggcctgatgttgtggtggtgtgcggcgtgctcactctctccctcatgaacacccacccacctcgtttccgcagcccctgcgtgctgctccagaggtgggtgggaggtgagctgggggctccttgggccctcatcggtcatggtctcgtcccattccacaccatttgtttctctgtctccccatcctactccaaggatgccggcatcaccctgagggctcccccttgggaatggggtagtgaggccccagacttcacccccagcccactgctaaaatctgttttctgacagatgggttttggggagtcgcctgctgcactacatgagaaagggactcccatttgcccttccctttctcctacagtcccttttgtcttgtctgtcctggctgtctgtgtgtgtgccattctctggacttcagagccccctgagccagtcctcccttcccagcctccctttgggcctccctaactccacctaggctgccagggaccggagtcagctggttcaaggccatcgggagctctgcctccaagtctacccttcccttcccggactccctcctgtcccctcctttcctccctccttccttccactctccttccttttgcttccctgccctttccccctcctcaggttcttccctccttctcactggtttttccaccttcctccttcccttcttccctggctcctaggctgtgatatatatttttgtattatctctttcttcttcttgtggtgatcatcttgaattactgtgggatgtaagtttcaaaattttcaaataaagcctttgcaagatactcgagtcccctggttctgccttctgacccccgtagagaggaggagaggggtgggcagctaggaggaggcacaggatgaggtggggaccccctctagacctaagtcacctgccctcctctgacctggagctgggggccaact

SEQ ID NO: 68427 - DNA, 1022 bp, Homo sapiens
cgctccagcgccctgccgcgggccaaacctccccaccatgccccgcaccccgcccgctcctgcgaccccccagccccgctcagtcccgagcgcccgcagtcgtcgcgccgccgcgccaagcatgcaggtgagtgagagggacccccacgcccccacccgcggggagcccggccctgcccttcccggctccgcgccctgcgcctcctgcccctcccgacgcggtccctcgcccgggacaaggcctccagcctcccagcgccccttccccgaagggctctccatccctccgcggtcctggctcgctcccgccctccctggcgcagccgtccccgtccccgcggctgcctccatcccgcctcggctcggcgggcggctccgcgcagtctcctgcttcgggtccccagtccgctctcggcactccctgcctcggggtcccttcgccgacctccttttcctcgtctccccccactctcgccgctctccagccctgtgcggggagtgcgggcctgcgggatgggtgggatgggggccacgctggggctggggcccggctcccgcaccccgaggctcctgccccacccccagctcgtctcctgcgcacaacaggtcggtgagaagctgggagaggggtgggggtggcgcgccagcccggggactgcgggcttcctggagggggcggctgaagctgtgcggggcccagggactgggttggcgctggctgggggtggggatgcacaggcggaggggcgatagtcctagagtcagctggccacagatgcgccctgggagcccttctccgcttcactggttcgctctacacgcctcgctccctccctctagctttcttcctttcccctctctctcccttcttcccaccatgcccccatccctatgtctttcggtatctccacatccctttacatttgggggagcaattccgaactcctccatctttgctgctcccgcctctgcttcccagcccgttcctcgtgtcatttttccttaagcatttatgttctctc

SEQ ID NO: 68428 - DNA, 1048 bp, Homo sapiens
agttaatagctggcgctcttccactaataaagttttattgaaataaagcatttaaaaaggcgcccgtcattcttcccccagcgaccaatcgaagagtagaatgcctgcgtccctcactggagcttcagcggtcggaacgcgggggtggggcatgtcctgccgaaatttgcgtccttagagcggaagtacggccggaagcccgccatagagtttagtggccagagcgactcttcagggaggtggcaggaaaggcttggaacagctgccggaggtgacggagcggcggccccgcccggtgcgctggaggtcgaagcttccaggtagcggcccgcagagcctgacccagggtacgacgaagcagtcggcgggagcccacggtcgctgggcggtgtctttaagggagggggcggagccacgtgtaagcttcaatgggggtgaggtcacgtggttgtgggcgcgtgcggggcagcaatggagagctgagggagcgtcgtcagggtggacaccatgcgacacccatttctcctttgcatcctgtgtcttggggttcaatggggtgcacgtgatggggcttggggttaggcccaggggagggggtgggtgtggcagccttgcgaagtggctgactttaggattcctagatcagaattttagaccgctccatgtctgattcctcaccgcagaaccgacttagtgcctttacaatccagtccctcagccttgtgcttcccatccgaccagccatcggggacctctagcttcacatcctctttccttgcagctctggacatcctgagcccaagtcccccacactcagtgcagtgatgagtgcggaagtgaaggtgacagggcagaaccaggagcaatttctgctcctagccaagtcggccaagggggcagcgctggccacactcatccatcaggtgctggaggcccctggtgtctacgtgtttggagaactgctggacatgcccaatgttagagaggtgggttgctggcttgaatagccctcagagaagcgtgggcaaaggtttgaatttgagaatgg

SEQ ID NO: 68429 - DNA, 2012 bp, Homo sapiens
tcgatctcctgacctcgtgatccgcccgccttgacctcccaaggtgctgggattacaggcttgagccaccgcacctagccaactttctcttttaaaaatggagacaatactgcccctctctgttgtgggaataaagtgagattatgggaaagtgtgaagtctggtacaagtggagagtgaacatgttaaattagcatgcccttttcttccctatgtgcagcatatgctaatctattcaagttagctaagggagaacgtgtctttttcccagagacacatggcaaactgctaggaacacagcagagagaaccgttcacacaaaagtggcagagttaatttacaatcagaggaggcagcctgagtcctgacatgctgacagtggtatgtgggtaaactgagctaagttatttggggcctgtggtttaaccttttggatcactctgtgatatggagaaaactggctgacttttccctgctttcatctgcagtggaactaaagagtatcaatcaaagtgatgaaaaagaagcacttggctgggtgcggtggctcatgcctgtaatcccagcactttggaaggccaaggcaggtggatcacctgagggcaggaggtgaaaccgatatggcagaatcctgtctctgttaaaaatacaaacagggctgggcacggtggctcatgcctgtaatcccagcactttgggaggctgaggtgggcggatcatgaggtcaggagatggagaccatcctggctaacatggtgaaaccccgtctctactaaaaatacaaaaaattagccgggtgtggtggcgggcgcctgtagtcccagctgcttggaagggtgaggctgaggttgcagtgagttgagttcgagccactgcattccagtctgggcgacagagcgagactccatctcaaaaaacaagacaaaaacgaaaaacagggccagtcatggtggctcatgcctctcatgcctgttctcagcactttgggaggccgaggtgggtggatcatgaggtcaggagttcaagaccagcctggccaagatggcaaaaccccgtctctgctaaaaatacaaaaattagccgggcgcggtggcaggcgcctgtaatcccagctactcgggaggctgaggcaggagaatcacttgaacctgggaggcaggaggttgcagtgagccgagattgcaccactgcattccagcctgggcaacagagtgagactctgtctcaaaaaaaaaaataaataaataaataaaacaaacaaaagctcatgtatcccagaacttaaagtataatttaaaaaaaaaaaaaagggaggcggaggttgcagtgagccgaggtcgcgccactgcactccagcctgggtgacagtgtgagacaccatctcaaagaaaaagaaaaagaagcacttattaagtggctctttactacccttcttatggtctgggaatacaagaaaagcaccaggcatggagcttacccttctgaagcttgcattccagttgaagagagaagatgaatggatagaaatctgaattatttatttatttagcaagtatttcttgcgaggcaattactgcatagctctgtgggatacctgagactgggtctataatcttgttgaaagatattcttaggtagcaaccttctgcaaggattgattgattaagtgccagaatgaagctgagcacagtggctcacgcctataatcccagcactttgggaggccaaggcaggtggatcacctgaggtcaggagttcgagaccagcctggccaatgtggcgaaaccctgtttctactaaaaatacaaaaattagcctggtgtggtggtgcacgcctgtaatcccacctgcttgggaggctgaggcaggagaattgcctgaacctgggaggcggaggttgcagtgagccaagatcgcgccactgcactccagcctgggtaacagagggagactctgtctcaaaaaaaaaaaaaaaaaaaagtgccagaatgagtgatccatgataggaggag

SEQ ID NO: 68430 - DNA, 2135 bp, Homo sapiens
ggtgaattggggagtactggagactgtctagacatattccaatttagaaacatcaaacactctgagggcaggcaacacaatttgcagtgtctggtgtgtatgtctgtttgactctgaaaactgaatgtcttcaactctgaatttagggtaggaattggatgacgtatggagcaagagggcattgtggtttgggagaatagtgtaaacaaaagcctgaaggtggaaatgagcccttcctatgtgaagagtgatcagagaggcagagaactccttttggtgagccaggagagttaacattggccgggaaagatggggccaaaaagtggagttccaaacagggtaaggctgggagggtggagagggaagacttcccgtcacctcctttttcctcattctcgcagctggctgagagtgactttgcctctaccttccggctgctcacagtgtttgcttatgggacatacgctgactacttaggtaaccagaggggttggtgctctggagtaatggagatgggagaagggcaatttctggagggactcagaagaaattcctgggatatcccacttagatccctggatgcatagggtcagggtcaagacctgaattggcattgaaagtgggagggaagggaaggaggctagggcttcccagaaaactgaaatcaggattccttacactttgtcgtttttccctagctgaagcccggaatcttcctccactaacagaggctcagaagaataagcttcgacacctctcagttgtcaccctggctgctaaagtaaaggtgagtggcagtcccccagtcctacggtctagagcatccttttgtatgtccttgggagtccacactaggacagcccttgtctagaccgtggctgcttcctgccctcccctcctccaaggtctgtatataaactccattagcaactgtttaggctgatagtattcttagttttctgtgttgtttttattttttaatcaacttaagttctaaataaacatcttctgtggttttggtcaaaatagcaactaggatgttgttcaggtgtcgttcaacaataccttcttccccactgctggaaacagggctctcctgatgaagtgctaggcttctctttgttaggataaaacatatatattctagaagtatctctgtattcctgttaggctgttttttgtctaatatcaccacccacctccccagcctgcccagtctgcaacctcgcaatagttacttgactctcagttgtccttgggatttaatttaaaccaggctctctattgagagatacctccaaaggaatgcccgttgcaggtaggcagagtataaatgataaacagtaactccacacctctcccacttctgcttactcccctgtatcaagctgatcttgactaaggactgggtgataccctgagctgtggctaaaggagtgacacccaggcagatgtcattttctccttctgtggtgtgtcaggggtgagggtgttaggggagcattttgtattttatttaagattgtccttctaatgatgctgtttttgaagtgggaatacttttatttattttgctttagaaccagcctcttagaggaagtgatttaggaatgggagtggagggcaggtgggctagggcagggggaaaaggagggaagatttttggaagcccttctctactacggagcgtcacaaatcctggcctgatctccgcggccccagtgtatcccatatgcagtgttgctggaggctcttgccctgcgtaatgtgcggcagctggaagaccttgtgattgaggctgtgtatgctgacgtgcttcgtggctccctggaccagcgcaaccagcggctcgaggttgactacagcatcgggcgggacatccagcgccaggacctcagtgccattgcccgaaccctgcaggaatggtgagaaccgtatcctggcactgtccccttctcaccctgagaaagagaaaggcgcttcagggtgagagagggcaggagctgggctggtccgcagaggtggaacccaagaggatgaagggaaatgagttcatccctccaaaggcttctggggaatgcaggagtaggggaggccctgggaggcggcagaagtcagtgtccttgatatagtag

SEQ ID NO: 68431 - DNA, 1082 bp, Homo sapiens
cctttcatcctggtaggttgccaaccttaaaaaaaccattaaagttacgacggcagcagcagccgcagccacatctcaggaccctgagcaacacctgactgagctgagggaaccagctcctggcaccaaccagcgccagcccagcaagaaagcctcaaagggcaaggggtgagccagggtagcaggaactgctcacttgcagggtgccctgcttttaccccagggacctcactgtcctcatttccttcagttatttgcatgggagtagggagtgggggagcctccaggggttaggggattccctgcattctctctctctctctctttctctctcttctccttgccaggctccgagggagcgccaagatttggtccaagtcgaattgaaaggactgtcgtttcctccctggggatgtggggtcccagctgcctgcctgcctcttaggagtcctcagagagccttctgtgcccctggccagctgataatcctaggttcatgacccttcacctcccctaaccccaaacatagatcacaccttctctagggaggaggcaaatgtaggtcatgtttttgttggtactttctgttttttgtgacttcatgtgttccattgctccccgctgccatgctctctcccttgtttccttaagagctcagcatctgtccctgttcattacatgtcattgagtaggtgggtagccctgatgggggtcgctctgtctggagcataacccacaggcgttttttctgccaccccatccctgcatgcctgatccccagttcctataccctacccctgacctattgagcagcctctgaagagccatagggcccccacctttactcacaccctgagaattctgggagccagtctgccatgccaggagtcactggacatgttcatcctagaatcctgtcacactacagtcatttcttttcctctctctggcccttgggtcctgggaatgctgctgcttcaaccccagagcctaagaatggcagccgtttcttaacatgttgagagatgattctttcttggccctggccatctcgggaagcttgatggcaatcctggaagggt

SEQ ID NO: 68432 - DNA, 1030 bp, Homo sapiens
gtggaggcggactttcaccattttggccaatctgttcttgaactcctgacctcgtgatccacccgcctcggcctcccaaagtgctgggattataggcaagagtcactacactgggccggcaaactttttctgtaaagggccagatacaataaatatgatgagctttgtcagccatacaatgtgtgttgcaacacccaaatctgatgctgtagtgcaaaagcaaccatacatgatatgcaatgaatgaggtgtaactacagtccaacaaaactgtatttacaaaaacaggcagtgggctggatttggcctgtggaatatggtttactaacccttactatggggattacaaaatacatacttttcacaatcagagtttttttctaccacttcaagttaaatgtagaaattttaccacaacatagctccctttactgtctcatctcgtagttctcatatgtgttactataaatgacaaacaccacatactacaaatactgaaactccacatactaaacgctaaaaatgcttagttctaggtgaatttatctattgatttttaatttttgagacagggtttcactcctgttgcccagactagaatgcaatggcacaatcttggctcactgcaacctctacctcccaggctcaagcaattctcctgccttagcctcccaagtagctgggactacaggcacaggccaccatgccccactaattttttttgtattttttatagcggcgaagtttcaccatgttgcctaggctagtctagaactcctaggctgaagagatctgcccatctcagcctcccaaagtgctgagattataggtgtgagtcaccacacctagccttctaggtgaatttatttatttcttgagacggagtttcactcttcttgcccaggctggagtgcaatggcgcgatctcagctcactgcaacctctacctccaggttcaaacagttctcctgcctcagcctcccaagtagctgggattacaggcatgcaccaccacgcccggctaattttt

SEQ ID NO: 68433 - DNA, 1674 bp, Homo sapiens
ctccctggacctgagttatgtggggcccttctagccacaaaatatcaggcccagcctctcaacccggattttagttccagtgcccacacgcgcatgtgtagtcttgagtgtgactgcggcagagtaaggctgccctgacctcagtccaggtgagtcagtccagtgtttcagggactcccctgttcaggtcccagcctttagacatgtgaactgatttgtactcctgctccctgctgtagggtttggaccacccttcagcccagcacttactcctggggcctgtgactagttctcagcagggatatgttgtgggaagtgaggtgttagcatcagtagagtgagatgctcaagaaccagccccctagcacgtcctgacctgtctgccactggggtaagggccacgggagaggaagaggaaaggaactttcccgagggacacagatactctacttccggtcagctctccatctgggcccagcctcacacaacagccacccctcagccaccggcccagcgagtatccagaggacatgggcaaacgcctcaggttattttctccaccccagaacattacaggttggaagaggctgacactaggtgtgtgactaagcagaataacacagaggagggagacaggatgcacacgcacaagcaagacctggctccaccactcagctgcactgtgggaaagacttcctctctcgcaacatcagttccccattttgtaaaatgaacctttctaggcactggtgactatggagtcatacctcagaactgagacctgagtgagtgcagagagtctgacatgcacatgggatacaaatgaccattccatgctagtatttctccctgatcactctctccctgccttgctccttcagggttctctggtggtccctcatcccccactccatcctcaggacccctaaaatacttccagacacgatctggatctcatcctactgatcttgaacagctcccagccgttcaccctcccagctcctggctgtcatctttcactctctccagaccttagccccacaggtcagcaaagagaaacaaatgtctgaggccactctccccctgccctgtttgtggtttgggatttttccccctttctattgtaatggcctcaggccctagtaataataccctttttcctccaccctctacctcatgtccaagtcacatgaacaggtgacccagagaaccagaagctggcccacagaacccagcagtctggtcttgctgcctgcatattccaagtccatttaactcacataccttcctgcctttatgttcccaatgctgggactgtcattccaggggctgagggaacagcaggggtcaaagatgctttctctcagcccattctggttgggctagggataagaagaaagcagtcttaacctctctcactcttagacatcactggagtcttcagagaggagaggcaggaaacgggtggtgctgcaccaggatggggagataaagatgggacggtgaggcatgggaggcactgggaggtgaaagaaatcactgaggagctggggcatggggaagagaccttggtagctggctctcataagaagcctctgtccagcctcatcccttggagagcctgtgttgggggcacagagctgacatagcctgagggagaggagcctgggacgc

SEQ ID NO: 68434 - DNA, 2981 bp, Homo sapiens
gacatgtttgggatgatgaatgacatgattggaaacatggtgagacttgccccatacccttccccggccttgctctcagtgatggctgacaacaccttgcatcctctaaggcaagagggaaacagtatgctagtgaagggtaaagtactggataaagtaattgaaccagagagccttgggaccctgtacctgctgtcatgcctgcctgaagcagccggcagcagctctcttacgtagcatacaattaaggccctgtctcttcaggtccttcttgctcgtggttggactcagaggaatttgggagggtaatgatgaggcctgatgttttttcagttcttgcattttgtgagaaagatacaggctagaacaggcagctgaagggtgaaatcccttcaccaggggtgatgcctccccattcagccctcccctacctaccctgtcctcaggaacacatgacagctggaggcaattgccagaccttctcatcttccactgtcatctcctactccaatacgggtgatggtgcccccaaggtctaccaagagacatcagagatgcgctcggcaccaggcggggtgagttggggagccctcctgtcccagagaaggtaggattgagcggcaccgccagaaaccctggctgcttttttccggattgggttgtgtgtggtgtgtttatcctgagatggtataggcagggctttggaaggggcggctgagtgtgccacgttctgcctcatcccagatccgggagacacggaggactgttcgggattcagacagtggactggagcagatgtccattgggcatcacatccgggacagggctcacatcctccagcgctcccgaaaccatcgcacgggggaccaggaggagcggcaggactatatcaacctggatgagagtgagccttccctcccgcttcctggctggcagcccctaacccggttcccgtggacatccctaacacatagacacttctggggcaaagctctgggtcagccccatattcctttttttttttttttgagatggagtctcgctcttgttgcccaggtgcccaggctggagtgcagtggcgcgatctcagctcactgcaacctccgcctcccgggtttaagcaattctcctgcctcagcctcccgtgtagctggaactacaggcatgtgccaccacgcccagctaatttctgtatttttagtagagacagggtttcaccatgttgggcaggccgttctcgaactcctgaccttgtgatccacccaccgaccgttggcctcccaaagtgccgggattacaggcatgagccactgcacccaactgtcagtcccatattcttaccgcacttggagcctcctccgctcgggcggagtcaggtgctggcggtgtctttgtgaggggcctactttgtccctgaagttccgtattgatagtgttacacccttctccaccttgatccgtttctttctcccctctttatctttttcaaatccgcaattattaagtacctagtgtgcacataggactgtgaacctgaactgaagaataatcccattctgatttcttcctccagtaggccaccttacgcctaccggtggcttcctgggaccgtgcagaaaccaaaagagctaagggaattgccaccccacccatccctgcacgcacactcagccttcgccgctttggcccgaaaagctgtggctcgctcgcacatcggcctccaggagccaggccgcacacaggcctcatgtccgctctgtcctttccaggtgaggccgcagcgtttgatgacgagtggcggcgggagacctcccgattccggcagcagcgtcccctggagtttcggcggcttgagtcctcaggggctgggggacgaagggcggaggggcctccccgcctggccatccagggacctgaggactccccttcccgacagtcccgccgctatgactggtgagggccccgggccctcagcctctcttgtaagtatcaggagtaaggagggtggggtgcacctgcggacggtcctcggctgcaaggcaggctcagttcaggctcccgcaggagctgcctttggtagtacaagttgacatggaaagagaacaatgttctcactgacataggggattaaaccccaactcctggctcttaacgtaagttttttcttccttttgacttgtgctcctctctctttccccctccaggtacaggctgagaggctgagaaatcatcccctgaataactttttcctctcgattcccatccccaatttaatattaaattaacaggcaagccggcccccacctctccctgggggtctcagggagaacctttcacggcaccctttccctaccttttccttctttaatctcctggtttaccattgatgacttcgcctctgcatctactgacttgatttttcattctgccactccatcttcaaaccccctcacctttcccatcctactcctgccatgcattgaagggtcaatgcattttggggtgagctctgggtttaggggccccctccatccctcagctaccctggatctttgcccacctcttcctcagagcccccactgaggggccgtagccctatctagggctgtggaaggagcagactggttcctaactctctccctcctcctgcccacacacatcaaaagaatcttccctacacccttctctgcctttattttttgatttgtgcaacttgtaactaggtgtttatggaataaaggagaatggaaaaaagaccaagtgggattctggctgtacttttgatcttttcctgttcaattcaaccctgctgtctcctctgaagttaccttctcacttttcctcgtctccacctgtagtcttcgtacctcagagttcaagcccacatctccttggtacggacagaccatcagcactgccaggtgcaggccgtgagcacttggctgggctaggctggggcgtgagaacatgagcacctctct

SEQ ID NO: 68435 - DNA, 1028 bp, Homo sapiens
ggtagaccttgggggcaccatcacccgtattggagtaggagatgacagtggaagatgagaaggtctggcaattgcctccagctgtcatgtgttcctgaggacagggtaggtaggggagggctgaatggggaggcatcacccctggtgaagggatttcacccttcagctgcctgttctagcctgtatctttctcacaaaatgcaagaactgaaaaaacatcaggcctcatcattaccctcccaaattcctctgagtccaaccacgagcaagaaggacctgaagagacagggccttaattgtatgctacgtaagagagctgctgccggctgcttcaggcaggcatgacagcaggtacagggtcccaaggctctctggttcaattactttatccagtactttacccttcactagcatactgtttccctcttgccttagaggatgcaaggtgttgtcagccatcactgagagcaaggccggggaagggtatggggcaagtctcaccatgtttccaatcatgtcattcatcatcccaaacatgtccatgaaaccacccgactggaggaaagagatggaaaacagagtcaggaaagcaaagtcagtgttcagagttgatcctgtttaggaacccacaacccacatggctgcacatttcctttctcttcttccttcacatctagcaagttctctttctcattctgttaaaataaccagaatactcatatttctcctcctgtgaactgctgaccccttcctcagtctctgtgactgctgtgatccaattttccttctcctgcttgctatattccccccatctttaggaagcaagccaaagtaatggattctaaactctaaagaggtaaggcatgaaattgttaaaacctaccaaaaaatcatctctagttggccctttaactgcacttccctcctcaaaagaacaaattttgctagacaattacatcttcctaatgcgtatgaacttctaggagtacaacagttaataacatcttttcttttttttttttttgaga

SEQ ID NO: 68436 - DNA, 1022 bp, Homo sapiens
ctctgagcagttcaggcagacatcggggttcccattgctaggaatggttggaactggctggatacctagctcctacctagcaggaagtaggcatcggtgccactgttgctctgtgcgtatttttttgcagggtggtggagggattgacagtttggcgcttctgccatccatactatgtgctcactccacagggatccctttgctattcaccgtcagcatatgagccgtatgttgtcaggtggctttggatatagccccttcctcagcatcacagatggcaacatgccagggaccaggcctgccagccgccggatgcagcaggtaatgatgctgagacacacctgagacccaaagaaaggttggaggttagttaggaaagcacttaattttcttgcactacagccaactgagcaagtgaaatgctctaggagttggggaaagggtcaggaaaaagggctttgtgactcccttttgagaggatggaaaaaaattgaggccatgggcctggtttgggattgtaaagagataggatgtggtctctaatttctgttcctcatgtgttcctgtaggctggagctgtctccccctttgggatgctgggaatggtgagtctttatctccctgtgtccttccatctcagacacactctctacccttagatattattcccaaatgtgcctcttaggaatagtttcatgagtaaccccagaatcttctctttttatggcattcacaaagctctgagcctgttgggtactaggagccctgtgggttaaaggtgttaaactcttgttgggaggccgagatgggtgatcacttgcagtcagaagttcgagaccagactggccaacatggtgaaaccccgtctctactaaaaataccaaaaaagccaggcatggtggcacacacctgtagtcccagctactcttgaatccgggaggtggagattgcagtgagccgagactgcgccactgccctccagcctgggcaacagagccagactccatctcaaaaaaaaaaaa

SEQ ID NO: 68437 - DNA, 3826 bp, Homo sapiens
cctaaaaattagaagcggggcaggactagccttcgaaaaagccgaggctgggcattgcatggcattgcgtcgagctgtcctcgccctcatcagctcccttccccggccccatccgttcgcccttgcctctcttccagccttcctctaatttccccagggaacctgcggagtgtcgctttgggaaattaacgcggccggggtttgggggctgggagccctatcttgtgtgtgtatgtgtatggcggggggggggggcgcggtggttgctgaggggccgtcacacaggtctcccggaggcccgcggagtgaaacggggggagccaatgggattaacggcggtgggagaggggctgtgtgcgatctgccaaggtgcgcccgtgtggccctccggcgggctgtgcggtggcatgtgacttcactgagtaggtgtctttgtatgtctgaaatccagcgagtgtgtgggactgcccgtgtcagttacatgtgtgcatgtggagacgtagatgttctggagccatgttgtcgctttgtgagtgctgagtggctccgctgtgctcccgtgctgtctcaagagtgtggaccagaatggcccaacgctgggccatgtgtctcccatcgcgtgggtgctcctctctaactgtgtctgtgcatggctgtcggccggtgtcggtgtgtgtgcctgtgttgagtaaatgaggccagagggctgcttagcagaagacctagggcccaggtcacatattctcctggaaaagggatcatggaaggacagtgaccagaaggacagaacaggggaggagagggcccggccccttgaactttggtctctggtattctccctccctgcatcagcccagatgggaaagtcaggccagggccatacagacttttggtgctggggcccccagagagaagctgaccagctctttgctctcctggcccaggacgtagggaagagccccctaggtagtggaaatgccatactgaccttgtggcacagaaatgaagacctcacggtggggtggaagggcaccctctctggagtgagagtgaagagttctgagctacccttaaagggagaagggaattgagtgccccccagggcagccgttctgcaccaggctcctctcctatcccctatcctgttccagaaaggacccccccgcccagggtgatctcacacaggagacttccattcacatggaatcagatacacagcgtggcacaccaacaccagatcagatcacacaaggacacctaccgtgttacactgtgcctgccaaggagtgggtggggagagcactggaatctgaattgggaggctagtgtagtgtccagaagggactcagatgtgccatatcagcacaggacgtcaacctatgcctgctaggatcttggggtgaaggagaggggctggctggtgggagggtctcctagactggtccctccctcttctccattcctatcccaccccagtcacagaccttgtttgttgctctctccttgtttcccacgcctgctactcttcccctccttgttttctcttctacttcacctacatttccaccgtaaatggctacttccactacacccatgcatacaccatgggaggcagggatagaggaaactacttgaactgttttggggcggggagggcagaaagtgggaggggtgctgggaatgtgctaaggtgtagtgtttggccaagtaggggcctgaggattagggagacacagatggagagaaacaaagaccttagaagctgaaggggaagctgggagggatgcccaggagagagagtcctcaggaaaaggccccagaggtagacaaaaggcagagctgggcgggcagtggcggggcaggcaagggaggcggagggacacaggagggggcggggcactgaggctgcaagcagatggagaggatttgctttgctgagctgaactcttcagccagtgaggtttgggagaacttgatgggggtggggatcattaccctggttgcccgctcctgcttcttcatccctttcccacctcaccttgggtcttggggaaggaggtgtttggtctcaaccccttcatggccctaatgtaaggaccctagggcccctattctgtctctaagctgtggccaccttattcagttcacacacctctaagctcactacagagggagaactggggctgcagggacttaggggctgcaagccatttgtggtgagaaaggtgacctctttctcctttgcaggacctgaaggagaagaaggagaaggtggaggagaaggcaagccggaaagagcgaaagaaagaagtggtggaggtgtggaggggtgggggagaggaccacatctgccctaccatcttccctcccaatcatctcatccttcctctgctttccttccgagggtgctgggtcctgccgttcccctgagccctgtcacccttgctgccccaccctgtggcccatcccaagcccttttatcacccaggctccagtcccattggtggtgatggtgggcaaggcatgcagccagcctgaggctactccctctcctggtccccacaggaggaggagaacggggctgaggaggaagaagaagaaactgccgaggatggagaggaggaagatgaaggggaagaagaaggtggggaggggcaggggaggctgggctggcaaagtctgggctcaaaggagagcagagtcagggtgggtttgaagacctgaagcagggctgagggcgaccacgggggctctgccagagcttcctgcccttccccaatgacccatttctggctcctcagatgaggaagaagaagaagaggatgatgaagggcccgcgctgaagagagctgccgaagaggaggtttgggctgggttgctgggcctgaggggctgtcagggatgcagccgggctgggcgccctttggatttggacccagatccctgtgtggcaggggtgggggctggaacaggaccgggacagggggaggtctcccctcccattttacagctcccccattctctccctctccacaggatgaagcggatcccaaacggcagaagacagaaaatggggcatcggcgtgagcccctgccaacaggctggggttgggaggcctctctgggcctggaggtgggggtgggggcagccaagtccagccactcttcacctggctccctgctctgggccctgcaccagagctgccaccctcttctttctccccagccttctcatttccgcctctccagacactgcgccctccaccctcactctgccattgttccacctcctgacctgctccatctgagctctccagctggcccccaattgctcctctctctctttgctctctttctccctcccctaccagcctcattcttcctccggtagcctctcccacctaacctctgcatcccccagcctcatgtcctgccccatccctatcctgcctgatccctggatctccctcagatcccctcttctcagacagcgccaggccggggtggggccggggttggggccgagccccacagctgcccccctcccctccctttttgtataatttaataaagaaatggtcgcgcttctgtttttaacctgtctcctgctttcccgggggctccagtcagtgcgacaaaagggtagagagggaggagggtggctgacctcccattctgccaggacccttccctttgatacaaaagcagcagcacactcctaccacccacgactcaagaagacaagatcagccctccaggggtggcctggagcccagctcttctgagagctgacttatgtcctgttttggattctcagggatgctcc

SEQ ID NO: 68438 - DNA, 1084 bp, Homo sapiens
agaatttttccctctccagggaaacttcatctccttcctggggcacgcccagcaacctctcctctgggtccgaccccaaagaccagaagattcctggtccccagagaaggggtctctctctctctctctctctcacacacacacacacacacacacacacacacacacacacacgaagagcatctttatagtaagtttattgtatttttatttcagctcaggggagcaggggtggagagtgggcacaaatgcaaagtaagcaaatggggagccccagcagcaataggggggtcttcctggaagaggcaggctttaaagacaggaggagaaggaaatagggaaaaggagttgggactgagggaagtggtgaggaagggtaggaagagaggggatcctgagagaagtggatcaagaagatttgtaaccctgatttccctgtgtcctgaatggtctggaggagggtaagggagggtgtggggcaggcgcagagcctggcacaatcacctttgaggtcccttagagggttccctctcaggctagctaccccctctcccagcaaagctcgcttccaggaggttctgcacagggtcagtgactggtcactgggcattctctcctgcagtgcctgtgctcccagcttgcgctctgattagaagagccaaaggctttgtcctctggtaacagattctgccaccagcgggggatgaaggagggattttagacagggaggccttcatccctgctcgtaaattctctgagatggacccttcccatgggtgctgtgcttctgtgaacccaaaagtacacattgagtacccaccactagccactggtgagagccgtgtggcatttgtccctgcattcaagaggcagcagtggaacttgggacaagggacctgggttagtcccgactccagcacttgctagtccggcacttggtaatcaatcatctagcctctctgagctctggttctggtctataaactggagatgatcatcttagttctgtcactgccagccttgtaggatttttctaagtctcaaatagacagaggatgtgagacatcccttgaggccgtgtaca

SEQ ID NO: 68439 - DNA, 1100 bp, Homo sapiens
cccacctgaaccccatatcctagtgcagctggtgggcaagacgtcagaagtaatgcctgatccctgtgctccaacagaggcgaagcggaggtggagatggagtgaacagagggaagggactgactcagaggaaggtcggggagagtgctggagacaaagccctgcggtcaggagggagaggaacagaggtggaccaggaaccgtagagacagacaggaacccaggaacagtgactagatggggtggtggggtgagccctgtgggatttccagccaagagtgctcagagaccatgtggcagcccgagggaaggagggaatggagagtggagcccagcggctggatgagaggtctgcggctgaaccgtggagctgcaggatggatgacggagctggaggacaggtcgtggaactgaaggacggtgatggagctgaggagtgggaactgaagcagatgctggagctggggtaaacagggtagtgggaactaaaagacagatgatcaagatgggggccacaaatggagtgggggatggacagaggagaggaagatggatgatggaactggaggagagatgacggagctgctgtatggctgatgaagttggaggtcaggtgatgatgctggggcctggatattggggagaacaggtggggaggaccccgatctcaccaagatgggcacccctgtgagtgagtcatagagaaagacgatggcgctgaccaagttggtgacctgcagggatgtcttggcagactccgagccatccagcgaggaccgccgcttccctcgggcatcctccaccacaatggctggtacctcaaaagctggccgggtacccaaggcccctggcccacccgctttggtccccccaccaccccccactctccgggcctgccgagccctccggggccgggcccacagtgtctggtagaaggtgatggccacacagaccagacccatgacaattcccccaagtagcaagaggctgaagcaaacgccaaagccgaggccgatcttggagactatgaactggcagccgcgggcatagtagcgctcgccgttgttgtgccagccaatggagggcagtgtggagaggat

SEQ ID NO: 68440 - DNA, 1032 bp, Homo sapiens
gatcctccccaagcccttgcactttcttcaccccccgtcagggagcagcgtctccctgcgcttagtcccaaaggaagtccaacggctctgctctcaggggacccaagggagagtcggcggggtgagaggcccagtggccggggccgacgaggagagtgccctggtgaggcagtcggagaaggcagaggtgtctcatcgatgaaggtggtgatctcctcccggaagaagccaggaccccgtgggggtcccccacctgaccccagaaccccactctccaagaattggcgaaggctggccagccccccaccttcagcctcttcctcgtcctcctcgtcctccaacctgtgtctttgtcccaggtactcaggaggacccccgagggcccggctctgggctgggaggacccggatgtcatcagaggatgaccacttgtgcaggaaggagcctggttcccgaggggtagagaagatgtttgtctcatcatgggacagacgccgggatagggggacctgggaagaggagcgggtaagacctgaaggtgctgcagggacagaggcagaggcaggaaccaagtggggactccggaagatggtgccaccttcttaaccttcaaaacgtttgctccggtgggcaaacctggccccacgaggtctgaagggatgcctctcttgctatagctttctttcacccagctctatggtgccctgaaagccagggctagggaagaggggattggggtgcctaacagacactggagaaaagtgatgagcggcaccaagggtaggagatgtatcccccagttccatacctgtaagtagtggactctctcaagaggagggaagagcatgtgccttccaggcagcagcttcacctgggcggggtcccggctccctggtcctgtggctccgttagcatcaaagcgaactttgcaaactcggccctctgcatagtcgtcacagcccccatctaggagagaaaatgggcagagtggttacaggtagggaatgcctaccgcggcctcccaccactgcc

SEQ ID NO: 68441 - DNA, 1050 bp, Homo sapiens
tcatttgtagctgtgtgatcttgagcatgttactttacttctctgtgtctcagggctctcaattacaaaatgagcactttaatattctgtttcatgagactgttgtgaactttaaaggataaattccatttccatgaataaagctcttagaatagcccctagcagatagtaagtgctatatgagttatagttgtacttgttgttacagtttgatccactgcccagggctcctgacattgagtcccgggcttttcctacctccgtcttcctctctggaaacagaagaaacttaatgagatatttcagctctaatgtcagggattccaggggctgaccttggtgggtgatgatgcttttctggactgtcgcaggacccctggacccctgcagctctcatccctgaggcacttagagaaaagctcaggtaggatatgccccatggtgggaggggcttggcccgagctgggaggctgggtctggactgtcctgggcacccactgagcgcatctctcacccctgagagaggatcaagagaagaggccttgggaccatgagcccgtgaagccaaagcccttgacctactggaagggtgagttcctgggagggagaaggcaggagcctggagggtctgggggctgccagctactgctctgcctgcccttaggggatgctcagccccctctgctctgtcttttccctggcagatgtccttctcctggagggtgtgaccttgacccaggattccaggcagctgaatgggtcggagcgggcggtgttggatgggctgctcaccccagccgagtgtggggtgctgctgcagctggctaaggtaggaagacctgcaagctcatcagctcgttcaagactcttggatacaatcacctgttcccttgctcttggcctgcccccttcattctgcctgtcctgattatccaaccgggactgtgcttaccactgcctctcagctgtggataagttccgtctcgtcttaatttagctgacataggtggatgttctttacaaatgaattttgctagaaattgataggaa

SEQ ID NO: 68442 - DNA, 2810 bp, Homo sapiens
cagtcaccatgatagacgttctcccagaccaacagcttcctttggctcgaggcgggtcttacgtggagggcctatgggaactacgtcggctcagccaatagggtcagggcagggggcgtggcgggaagtttgaaactggtaacttcgggagttgagccacgagctgttgtgcatccagaggtggaattggggcccggtaagtgatttgaataatttaataaataagttagagggctcagcaggcccagaacgagccattttgtcagctgcagcagtcattaactccgcagaggcctctggtccctcgccaggaagtttcttcactggaaactgggaagacagggtggtttagggttgaaggtccgacgtggaagagataagggctgagacctgagtcacttctcacaggcattccctcctcgtcccgggctggcccttgcccccaccctgcaactcctggttgagatgggctcagccaagagcgtcccagtcacaccagcgcggcctccgccgcacaacaagcatctggctcgagtggcggacccccgttcacctagtgctggcatcctgcgcactcccatccaggtactctgggccagcgtgggaaaggcagagaatgtctgaattcttgggtctcttcctaacctgattttgagagagccgtcatgaccccacccttatcctagccttattttctgcaatctcaatctgtgtggggtaggctggatatctgagggccttggcaattccttcctggaatatggggaggagaggagagaagagtcagggcccagacttgttctagcctatggtcttgacaggtggagagctctccacagccaggcctaccagcaggggagcaactggagggtcttaaacatgcccaggactcagatccccgctctcctactcttggtattgcacggacacctatgaagaccagcagtggaggtaagcgttgggcccagggaatgctgatgaagctgtcatctattattcttgggtagggtccatgaagccattctctcagggttccttaaaggggcctctatcctcctgcttcggacccatctcactcttatctcaatattttgttcccagcctgggtgcggtggctcatgcctgtaatcccagcacgttggaaggccggggtggtcagatcgcttgagcccaggagttcaagaccagcctaggcaacatggcaaaaccccatctctagaaaaaatacacacacataacacacacacacacacacaaaagcacggtggcatgggcctgtgatcccagctactcaggaggctgaagtgggaggattgcttgagcccacaaggtcaaggctgcagtgaactgtgatcacgccactgcactccagcctgggggacagagcaagccccatctcaaaaaaaaaaaaaattgctccctttcaccttgatttccttgatttctctcttcccacttgctcaccctcctgggcatgagtcctgggtttctgtatgttttgctccttgctgaatgttgtgtatcagaaggtcactgttcacttcactttcttcctctagaccccccaagcccactggtgaaacagctgagtgaagtatttgaaactgaagactctaaatcaaatcttcccccagagcctgttctgcccccagaggcacctttatcttctgaattggacttgcctctgggtacccagttatctgttgaggaacagatgccaccttggaaccagactgagttcccctccaaacaggtgttttccaaggaggaagcaagacagcccacagaaacccctgtggccagccagagctccgacaagccctcaagggaccctgagactcccagatcttcaggtacagaatctaaggcaagatgcagggaagataaactaggataatgttttgggataaggtccatgggtgagtgtgggaggaataaactgtaagtcctagttttgggtccttgctttaacgccttacccaccccaggttctatgcgcaatagatggaaaccaaacagcagcaaggtactagggagatcccccctcaccatcctgcaggatgacaactcccctggcaccctgacactacgacaggtaaaggaagagaaagtgcaagctgttactaggatatccaacgtagagggtgggagacccttttacccagatcttccctcttctgaacagcaactccccccaactcatacactgccgttttcagggtaagcggccttcacccctaagtgaaaatgttagtgaactaaaggaaggagccattcttggaactggacgacttctgaaaactggaggacgagcatgggagcaaggccaggaccatgacaaggaaaatcagcactttcccttggtggagagctaggccctgcatggccccagcaatgcagtcacccagggcctggtgatatctgtgtcctctcaccccttctttcccagggatactgaggaatggcttgttttcttagactcctcctcagctaccaaactgggactcacagctttattgggctttctttgtgtcttgtgtgtttcttttatattaaaggaagtaattttaaatgttactttaaaaaggtatatgtaaaccttgcaccgagttttctgtgtgtagaatggcggcctagagagcttgcgttccctggcctgagcccactgatgctctgagccttctttgcacatctccctttaaccatggtgtccctatggctctgtccttggccctgctctccctgggtgtttacttctagggctttagctatcacttccctatattctggtaactttcaggtctctctct

SEQ ID NO: 68443 - DNA, 1680 bp, Homo sapiens
ttctttttttcacctacttttgtgtcattaaagcttggcacagatgttttttagctttattccgttctgagatgaagcactacctccttccgtccctcctcccgacttgttccttcgctcgtgctcattgctgatccagcccttcctgcttctttacagaaagaggaggaccctgctacaggcactggagacccaccccggaagaagcccacgcggctggctattggtgagcaccgctgcagtcctattcttctccctgagctggtctttctggctctcagcagcaccaggaaagccccaaagagtgggcctgattgatggccctagaactctggatggggcaagtgaggtgctggctcggaggagggacattgacctgttgtcattgctctactctccctcttcttccctatccttccaggtgttgaaggcggatttgaccttagcgaggagaagtttgaattagacgaggatgtgaagattgtcattttgccagattacctggagattgcccgggatggactggggggactgcctgacattgtcagagatcgggtatgactgccccctatgctacccaagattctagagcaagatgggccagggtagtggtgtcttaggcaagcactgacaaagctgaaggccaaggggaagaggggcatgtggggcagggggttgggtattgcctctgaccctctgcttcccccaggtgaccagtgcagtggaggccctactgtcggccgactcagcctcccgcaagcaggaggtgcaggcatgggatggggaagtacggcaggtgtctaagcatgccttcagcctcaagcagttggacaaccctgctcgaatccctccctggtgaggcctggcccctctgcctcgggcaccacccccagagcaaggacaaggagcccacttttctgggggatctggtgggagagagggtagggagcaggacaggaagggaagcttggaaatgaacacgacatggggatggccagaggagaagagagagagaccttggattggcggggggcctgcagagccctctctctctgccactccctcaaatccccgacccacatttctgctgattctcttctctgtgggttagtggctggaagtgctccaagtgtgacatgagagagaacctgtggctcaacctgactgatggctccatcctctgtgggcgacgctacttcgatggcagtgggggcaacaaccacgctgtggagcactaccgagagacaggctacccgttagctgtcaagctgggcaccatcacccctgatggagctggtacagcctcccctcctccagccactctcatgcttaaatatatttcatttgttagtaatttcgtgtgacatgtataatacatgaatgcattatcttgataagaaaggaaagtagtcaggtgcggtggctcatgtttgcaatcccaacactttgggaggccaaggcaggagaattgcttgagcctaggagttcgagaccagcctgggcaacatagtgagacctcatctctccaaaaaagaaaaaaaaagaaaaattggctgggtgtggtagctcctgcctgtagtctcacctactcaggaggctgaggcaggaggattgtttgagcacccgggaggttgaggctgcagtgagctatgattgcaccactggactccagcctgggct

SEQ ID NO: 68444 - DNA, 1254 bp, Homo sapiens
tcttagagtagttcctatcggctgggtgtgttggcccacacccgtaatcccagtacttcgggaggccaagatgggagaattgcttgagcccaggaggttgagaccagcctgggcaacatagcgagaccctgtcttctcttaaaaaaaaaaaagaataattcctgtcacactctggctgacatgctgtgaggggagcaagttagggagctgcaccaccagcaccccaacacacaaaccccactgatagtgcagagtgccaagtcccagggctctgtggccttctgacagactcaagggttagcaggtggtctttattttagggcagtgacatcagatgagcacctaacatggacatgtagcacttggggaggaggggggcttggcacactaagaataaaggcaggttctcagcagaaatgagtttactttcgaatttggggaacaattagaatgtgaatgctcagaacatgtcaacaggttctgtccaatagaacgtgaactgcacttatcctaatcccaggctaccttccccctccccggctcctctgccgccgagcgtgcttgcacattggacatagctgagaaggggagaacaggcaggttgctggagagaagcgactccaaggttcacccacagcaactccccactcttgaggggagcccgttcacagagttagtaaatgtttgcttccttcccttttcctcggcgctcaggccagagcccctccaactgtccttcccttgacttttaggtatgtggataagctggagaagatcttccagaatgccccgacggaccctacccaggatttcagcacccaggtgtatgtaaccaggtcctatgtaggaaagctgttgacagtcatggccgtataccttcctcctccctgaccgcctggggggcacagcactttaacccctggcctttttttgttttgttttgttttgttttttgagacggagtcttgttctgttgccaggctggagtgcagtggcgcgatctcggctcactacaacctctgcctcctgggttcaagtgattctcctgcctcagtctcctgagtagctaggactacaggcacatgccaccacgcccagctaaattttttttgtatttttagtagagacggggtttcatcatgttggccaggatggtctcgatctcctgacctcgtggtctgcccacctcggcctcccaaagtgctgggattacaggcgtgagccaccgtgcacggccaccactggcctattagg

SEQ ID NO: 68445 - DNA, 1039 bp, Homo sapiens
tgtcaggggtgctttggaagggtagaggaactgaaatacggacacagagccagtagggagaggctaaggaggcaaagaagcagcaccctccgaaggatccaccaacccattctgtcaccagaggagcttctggagtacgaggagaagaagcggcaagccgaagaggagaagatggcactgccagaactggttcgggcccaggtgcccttcagctcttgcctggaggcctacggggcccctgagcaggtcgatgacttctggagcacggccctgcaggccaagtcagtagctgtcaagtaagtcctctggtcggggcctgaggctgtgggtctatggcagagctatcccagaggatacttctgtctcttccctgttctttcatccctttgtggttggaacctcagggttgaatcagttgggctggtaatctggccctgatggaaccaaggggccctggtaggggggacacgggtactgactctatctgtcaccttgtcctgccccaaccactccctcttctgtggcacagggtctctttgtagtgtagcctctcttcattgcccctcagtcatggctgagcacaggcacttaggatcagctgtgggcagaatttggatttccagcaaatagccacactttgagcctagccattggcacctggcatgggtgtgagacctgaaaaagggctttggtctcggggagtcagctacccagccctttgctgctcctgccagtgaaacagctcttcctctctgtgtgggttttttttttttttctatgtgtgggtcttgctatgtttttttccctacgtgtgggtcttgctatgttgcccaggttggtctcttaactcctgggctcaagcagtcgtcctgccttggcctcccaaagtgctggaattacagatatgagccaccatgcctgggcttttttctttttcttttttttgttgacagccttccttctggcctctactgctcctcgttggccgaggacaggcatcagacacctgcccaggggaagagaagaatatggaggatct

SEQ ID NO: 68446 - DNA, 1057 bp, Homo sapiens
ggccagtggggaagaagggggtgggaatgaggggccatccttcttgagcaagaccaaagacaacaggtgtggtctggccgaggttgggcaccactcttttgtggctgcgatgaaggagctgaagcctgcgttcactgctgggttttttgccccagaacttgttaaaaatgtaatgcttctgtttggccgggcgcggtggctcacgcctgtaatcccagcactttgggagggtgaggtgggcggatcacgcggtcagcagatcaagaccatcctggctaacacggtgaaaccccgtctctacgaaaaatacaaaaaattaaccaagcgtggtggtgggcgtctgtagtcccagctacttgggaggctgaggcaggagaaaggcgtgaacccgggaggcggagcttgcagtgagccgagatcgcgccactgcactccagcctgggcgacagagcaagactccgtctcaagaaaaaaagtaatgcttccttcctctccaagaacaatagtttagaacgggctgtggactggatcttcagtcacattgacgacctggatgctgaagctgccatggacatctcagagggccgctcagctgccgactccatctctgagtctgtgccagtgggacctaaagtccgggatggtcctggaagtgagtatccccaggaagcaggacaggcctggtggaatctggtcagtctactacaccagatccctcattcaggcagctctgccctcctcaggagtcaggggcttctttccacctcaacgtggcatctgagggtggggttctctgacatggagacaggctctggcccagtacctgcctcacattccctgaaactcctgtcctgagtctgagctgttgtctggatctttgggccatcactcaagcattcctcttctgtttccttctctgaccccctctctcctttcctagagtatcagctctttgccttcattagtcacatgggcacctctaccatgtgtggtcactacgtctgccacatcaagaaagaaggcaggtgagtgctggccacatgcgttttgaatggag

SEQ ID NO: 68447 - DNA, 2672 bp, Homo sapiens
ctcaagtgatccttctgcctcggcctcccaaagtgctaggattacaggcatgagctaccgtgcctggccaggccccctgcctttgtaaataaattttcactggaacctggacacacttgtttatgtgttgtttgtgcctgttttcacgctgcggcaggaaagttgagtcgttgtgtcagagaccagagagagagcctgcagaacctcaaatactatctggcccttgccagaaaaagtttaccaaccccctgcctccctggaatgggtggagggtggttgtaaaggtactggaggatctgaagacataatagggtccgtgacccttgtgaggttgtgaagctcccttaaggcacatggtggctgggctgtggatttggggtatgggcagagagtgtggagagcacttccaggggccatgtctgagagactacatgatgccactttgaatgcccagtttgttcatccttttctgttttccccacttccccagatgggtgatctacaatgaccagaaagtgtgtgcctccgagaagccgcccaaggacctgggctacatctacttctaccagagagtggccagctaagagcctgcctcaccccttaccaatgagggcaggggaagaccacctggcatgagggagaggggctgagggatggacttcagcccctctgctctgtaccctttttccttttgtccccggcagcagggaagaagctggaggccgtgggagaatggctgggcagagcagaggggcagcgatagactctggggatggagcaggacggggacgggaggggccggccacctgtctgtaaggagactttgttgcttcccctgcccccggaatccacagtgctctgcttctctgtgtcgccccgcccagccccctggtgtggagggaggggtctcgtttgtgcgcgtgggtgtagctttgtgcatcctctcccagtggagcgatcacctgtgcctcccctccccctttgtttgcccctgtgtggttggtcaaggagggatgtgagggaaatagggaccccccgacttgccctcctgcctcagtctttcccccaccctgtctcttccttgtccttctctggaaaatgccaaaatacacgatgtgaataaaagtacaacggctaaattgtgtcctgtttgataccttgggggagaggcttaccttcctggggttagcaggagggcgcttaagaaaactcctaactctggccgcctccctgccaaagtcaagtctccacttttcactggttctagagctctaggaaaattggggttgggtggggaggtggagtagagtgactaaatgccgacacaaagccaaggaaagatggagtgaagaacccttccctctctttattcacacaggagtggaggatttcccaaatgtccctaactggctagctggcttcaggctgggactcagtccctgcagttcctgccaggccttgccagccggggcgagggttgggatgatcctggcggcctatgcctgtgtgggctgcccctcccgctgtgaaccctgcatttgtcccgcaagttttcactcaggtagactccctgggtacaagggtgcctgctcagcagtcgggcatgagctgctccgatgggcgaaggaggttgtctatcccacagttggagaggggccctctctgccccagtgggcgatctgggctacggccaagttgccaccagctagttccgcttgaaaaccacttctggccccgtgggggactcaagtcgccaagcgagggttcccctgagcgccggagctcacaggtctcgccttgtcccgaaagccccgcaatcgaggcggaggcgaccgagcccccgactctcctagaacgttgccacaagaagggggaacgtcggaacagtgcatcatcgggcggcggccggggcggcggcaggagggcgggcggggggcagggctccgggggactgggcgggccatggcggaggacggcgaggaggcggagttccacttcgcggcgctctatataagtgggcagtggccgcgactgcgcgcagacactgaccttcagcgcctcggctccagcgccatggcgccctccaggaagttcttcgttgggggaaactggaagatgaacgggcggaagcagagtctgggggagctcatcggcactctgaacgcggccaaggtgccggccgacaccggtaagccctcgccgaggaggggtctggccgggccggggccggggccggggcaggagtggcagcgccctctcccgaggccccgaggccccgaggccggtatccgcgcggacctgatgcagggctgtgggacgagggccgctggggtccgggcaggggcctcgcagccgcagccccgtcggtgcgtcgagggggcagggcggagcacatgatgccccttggactatggggcaggtaaggacgttttgggtctcctggaggaaggtggccccggggcgcgcactggggctgtgcccgccaggcgacggggttaggagcggagcccgaggctctgcgggagaccgggggaggctgggccgcgtgggcttcccgctccctgcgccctggcctcccgcgccgtgcgccgccgcacgtagccccagactcctccccttcctcgccggcgtccgcgtccccgcgccgagctgctcgggctccctgagcccca

SEQ ID NO: 68448 - DNA, 1063 bp, Homo sapiens
gagcccgtgccaaacaggctgagcgatttgggagtgaggagccatcctaccgctttccccaacctggaaacagcaaagcgcaaggcctctgagtcagttaggtctctgccacccacgggcaaaggatgctctcctccatcctccttcctccctccaccgaaatcggagagccgcgggcctgatccaaagaggcatccccttctcgttcattccccagaggcctcaatacaaaccccaggagttggcccctctccttttgctacaaatccttgccttgcaaaggggaggtgaggatgggctattttagaagggaagcagggttgctccctggagaatgctgagtctgtgaggtgcctatgccgagaatagctcgaggaaattggagccccagctgttaaaagagcagagggcagggtgagggccgtggcctctcaggggtatctggaaggctcttcgagttgagtgcagacccagcctgggctggaaaatggacaaaggtcatcttgctggggtgaaaagggggagagcagaaccaagaagaagagggtgagggctggggggctccagggcactggttaggaattgtggggaatgaaggctttctttagtctcatccccctgtggtaccatcttgtcctcagaggtggtttgtgctccccctactgcctatatcgacttcgcccggcagaagctagatcccaagattgctgtggctgcgcagaactgctacaaagtgactaatggggcttttactggggagatcaggtgagatcgaggtggagaggggtgtgtgggacccttccctcactttcctcgttgaggggaaagccacagggtgggctccctgctgaaccttggcttcatctcttcctttagccctggcatgatcaaagactgcggagccacgtgggtggtcctggggcactcagagagaaggcatgtctttggggagtcagatgaggttagtagccaagagagaagataagggatgtctttttccaagaaggatgtctcaccaagtctgtttctcaacagctgattgggcagaaagtggcccatgctc

SEQ ID NO: 68449 - DNA, 1492 bp, Homo sapiens
gatgccacctggaaatcccccaatgtccactagggggcagtaggccaccgttcttcgtactccggagaacctggctggagagctctttcttgttcacccttccctccatctgtatctctgccctgcagataacgtgaaggactggagcaaggtcgtcctggcctatgagcctgtgtgggccattggtactggcaagactgcaacaccccaacaggtaaccgggcccaggagccctgccctcatcccagcctgcctcaataggtttggacagacacagcccacatggggcaaccccttatttcaaagacacagagaccttgaacccagagacagtgacttgtccaagggcatccagtccagggcctggcttggatcagagccctggtactctgactcagtcagaaaccacactaagtgtccactggtgccagtgatttttcctcttagagaggcagaaaaggtcttacttaggccagcttcttgttctaggcccaggaagtacacgagaagctccgaggatggctgaagtccaacgtctctgatgcggtggctcagagcacccgtatcatttatggaggtgagtggctttggttcccggctgaggtggagtgggctgaggactagactgagccctcggacatggaggtggggatggggcagactcatcccattcttgaccaagcccttgttctgctcccttcccaggctctgtgactggggcaacctgcaaggagctggccagccagcctgatgtggatggcttccttgtgggtggtgcttccctcaagcccgaattcgtggacatcatcaatgccaaacaatgagccccatccatcttccctacccttcctgccaagccagggactaagcagcccagaagcccagtaactgccctttccctgcatatgcttctgatggtgtcatctgctccttcctgtggcctcatccaaactgtatcttcctttactgtttatatcttcaccctgtaatggttgggaccaggccaatcccttctccacttactataatggttggaactaaacgtcaccaaggtggcttctccttggctgagagatggaaggcgtggtgggatttgctcctgggttccctaggccctagtgagggcagaagagaaaccatcctctcccttcttacaccgtgaggccaagatcccctcagaaggcaggagtgctgccctctcccatggtgcccgtgcctctgtgctgtgtatgtgaaccacccatgtgagggaataaacctggcactaggtcttgtggtttgtctgccttcactggacttgcccagataatcttcctttttgaggcagctatataaatgatcatttgtgcaagaaaaaaaaaaaaacaagaacaggtttctataacaacatctcttactatttttacttgaaaaaatgttttgcgtagcagactgtcatagccttgaacgccggctccctttcttcctccctccaagtggctctggggctgtt

SEQ ID NO: 68450 - DNA, 1050 bp, Homo sapiens
atcctagagcgtcccttttggtttgcatttggggaaatgtcttctctcaccgttcctcacctcccccagacttcccttggactcccctctctcctgctcttccccacggcgcccctctccgttcgcgcttcctcccctctgctgcacgggggagagatggaagaagtggggatctgtcgaggcgcagaggggaggacaggcccagctcgcctccactccccaccggctcttatcctcttcacttcccgctgcaacccccagggactgcagggcctttctcaggaccctcttccccgacacctgtattgcatgcgcctttcgcgggaagaggagggatacacgtttgggagagagtgggaccttggggaaggggcagtgttcaggcagctggggtgttaagttggggaggtatgggggctctggaagagaggcccaggcagcccatcctcttcttggctcccaggagaaatgcaagcctggcagccattccgctctgaggagatctgggggaaccccaccggctggccaagctgcaaagaggcgcgggaaccactgtcgtgcccctcccctcctcactgcagtgttctcccatctcatcatttgatcttaccccgccccccactgcagtgacctccccttcctcactgcattgaccttctcctcttcccaggggggagggggaatcccttctacagccctagactgcagccagcgcctccctacccaccccccacccactgcagtaacctctttcccatccctcccagcctcccgccccgcccattgatctcaggctccacccctctaagcctcttatctttctccttccttcccttccacccgaggagatcccagccatcatgtccatagagaagatctgggcccgggagatcctggactcccgcgggaaccccacagtggaggtggatctctatactgccaaaggtaatgggtgtggcatgggccttcctacagccctagcttttccacggccaggctgggttcggccaggggttcggaggccttttttgatacccaggggtatggggt

SEQ ID NO: 68451 - DNA, 1049 bp, Homo sapiens
tgtgtctctggccgtgtgtaaggcaggggcagctgagcgggaactgcccctgtatcgccacattgctcagctggccgggaactcagacctcatcctgcctgtgccggtgagcaataagccagcctgcggctctcccaggggcgggtgggggagggagcatgcaactcatgaggaatgatgggaggaaagtgaattgagggaggtaaagaggaaggatggggacgtgagacttagtccggaaagctgggggaagtttgggatcttgggttaacactcctggggcgggcagggaggggctctttgacccttctgtctttctgtggctccccaggccttcaacgtgatcaatggtggctctcatgctggcaacaagctggccatgcaggagttcatgatcctcccagtgggagctgagagctttcgggatgccatgcgactaggtgcagaggtctaccatacactcaagggagtcatcaaggacaaatacggcaaggatgccaccaatgtgggggatgaaggtggctttgcccccaatatcctggagaacagtgaaggtgaggccaggagccccactcccagctctaagtcttaccctattgtgggacatcagaaagggtgacacagttcaccaagtcctgagtaggcgtggagggtcctaggactctgcaaactccaaaaggtaccagttcttagagtggattgcagagagcctgccaaattcacatgcagacctagggggacagtatttttttttttttttgagacggagtcttgctctgtcacccaggctggagtgcagtggctcgatctcagctcactgcaagctccgcctcccgggttcacgccattctcctgcctcagcctcccgagtagctgggactacaggcgcccgccaccacgcccggctaattttttgtattttttagtagagacagggtttcactgtggtctcgaactcctgaccttgtgatcggcccgcctcggcctcccaaagtgctgggattacaagcgtgagccaccacgcctggccaggggacagtcttttacct

SEQ ID NO: 68452 - DNA, 1099 bp, Homo sapiens
atataggtagtggttaagagttaaggttctggggccaaataacctggatttatttgaaccttgacttgtggagttactgctggtgaactttcttacttctctctggaaataataacagaatctagctcatggtagtgtgaggcttaaatgaaatatatataaaatgcttagatgacatgataccaatgaaagtatagtaagtattattaagagaattccattcctctgtgttcctagaagatggcctctcctcccagacctggggataaccccaacagcatccccgccacacttccctcaggaacagccctccacctctgccctgaatgtcttttctttccctcctcctccttgcccatccctcctgcttgtactataatctcactgtattctgtccccagccttggagctggtgaaggaagccatcgacaaggctggctacacggaaaagatcgttattggcatggatgttgctgcctcagagttttatcgtgatggcaaatatgacttggacttcaagtctcccactgatccttcccgatacatcactggggaccagctgggggcactctaccaggactttgtcagggactatcctggtgagaggaagtggtgtgagggggaggtctgggggcaggcagggacgtgtcccagcaactctggaccttatggggtgctgactcaggcaccaggtgggggtgtcctaagaagaacctgagaaccagggagagggtgcaggagccacctgcaaagactgggctttgtatgtagtgtaaaaatgcaggtacccgtgaccaatctgttctgtctcagatcctgattaaagtcatgggttctgaaaactactgggtcatggggaaggctctggaaggaaccagggatgatatgagtgtgactggatctagcagagaactagaacatttcagtatctttgattgatgaaattgtggatgctgaatggagctgggactgatgtgtgagtagaaagaaggctgagggggactgaattagcttctgcaagtctgcccagggcctttatctcaggatggaggcagttggtcgccatcttcctgacacagagcgaaagaaaatcaacata

SEQ ID NO: 68453 - DNA, 1048 bp, Homo sapiens
ccagcctaattctacccaggggtgccaaagagagcggggaacctggaatcatcctcacagttctctcacctctgcccctccacccctgattctctgctcccctcccagatagctttcccctagatgtttcctgacatagaccaaggttggggctgggaagagagtgcccagtgtgagagctggagaatcagtgctgtgtgtggatacaggtgcaagctggcccaggagaatggctggggggtcatggtgagtcatcgctcaggagagactgaggacacattcattgctgacctggtggtggggctgtgcacaggccaggtgagtgaggcagcctggtgagtgaagagaactctctgtgggattggtatttctagctcacccacctggtctctccttccaggtgtttgagggtgtcaggggagtttcaggagagcagaagtttcctttcaggggtgagagggcagtcactgagctgcaaatcctttgaaatgtttcagatcaagactggtgccccgtgccgttctgaacgtctggctaaatacaaccagctcatgaggtgagggtccctggggtgggagcccctggcccagatggctaaaggccccatttgcctgccagaccatctgtagcaccaagggcctggataacagtccatttcctggataacagtccaacagataatattggtttttgcttcctgggtttattgatggcctgattgacaaatcccagagatcacatgggaaagccagggaatgctaagccttggggcaggacacaaaagcaggtggtgtgggggtggttggagtctgggggacccctagagagagaagcaggatcctcctgcatccctgaccacttcctttgtggttcatctctctcagaattgaggaagagctgggggatgaagctcgctttgccggacataacttccgtaatcccagtgtgctgtgattcctctgcttgcctggagacgtggaacctctgtctcatcctcctggaaccttgctgtcctgatctgtgatagttcaccccctgagatcccctg

SEQ ID NO: 68454 - DNA, 1048 bp, Homo sapiens
aggtgttagagagggaccatgtgtcacttgtgctttgctcttgtcccacgtgtcttccactttgcatatgagccgtgaactgtgcatagtgctgggatggaggggagtgttgggcatgtgatcacgcctggctaataaggctttagtgtatttatttatttatttattttatttgtttttcattcatcccattaatcatttccccataactcaatggcctaaaactggcctgacttgggggaacgatgtgtctgtatttcatgtggctgtagatcccaagatgactggggtgggaggtcttgctagaatgggaagggtcatagaaagggccttgacatcagttcctttgtgtgtactcactgaagcctgcgttggtccagagcggaggctgtgtgcctgggggagttttcctctatacatctctccccaaccctaggttccctgttcttcctccagctgcaccagagcaacctctcactccccatgccacgttccacagttgccaccacctctgtggcattgaaatgagcacctccattaaagtctgaatcagtgcactgttgtgtctaaggagtcttactctagtccctatgaggggagagaagatggagcacctggaagctggtgaaactggatagcagagctgggggggcacaaaaagaggaagacaaactgaacaaatatggccgagatgatggcactgcctaccccattctggctaggtggggtgcatgtggcccctgctttcttagcagaaggcttggctcccagacgcaggtgaattaaggggttcaagagcccctaaaagcataaaatattttgtgtgtgtgtgtgtgtgcacgcgcattttgggggaaagggggtctaaggtgttttcatatccaaagggcttgtggactggagcagctcctgtactgggcctctgccaacaaaaccctggctggttctcgaatggaacaggacttcatggccatcacccactgcaagatggggaaatgggaaggaagaatggttccgggggtagtatacggaaggacctaaggaaaca

SEQ ID NO: 68455 - DNA, 1030 bp, Homo sapiens
cggcggcgactgaggccgagaagaggagaggggggcgggggagctgccgccgccgccccccagaggcgccggagcccggaatcccgctcggagccagccagccgtcccgagctaccagcaggtaaggtctgcggccgcctgggccccgggcccgcggggttctgtcccgcccgggctccggcctgcggctccccacccccacccctcccagttccccctcctgccgccgccgcctccatttgttattttcccaatcccgtccccccactgcgggctctgcctggcctgagggccgggggctcagggggtggggcccgccgaggagagtcgggggccagggtttcgggaggatcgggaaggtggggaaggagggagggtctccggaggaggcctgtggggccagagggtatccgggacccgcagactcaaaagaggaggaacatcgaggccggggttggcggaggaaaacgggggatgctgtgagtggggttccgggcgaaggcagaatggataggagagatggcagcgaggtggggcatgaagcctccaggaaaaagctccaaaggaccagaacacgggttccggagcctggggttgggggctttaggaatagacgggaagtgggaaacgggaaaggggtgtggtaggtggaaagagggattgtggctgatgaacctgggggagacggaggcttgggcaaagagaggtccatttttgagaagagccggaggttttccagcgtggaagagggaaggccatgtctttgtgacggttttcattcccctactgcaggtcacctctgaccctgttttccctatcccagacatagttatttcttggagagggcactggggcccagtagtgtgggttatcccaaaactagtgaggaggaaaacaggaacacagaagggggagttgggaagaaaggggttctgggaggatggaaatggagaattgagcaaccttacaggcactccaggcaagttgcgacctccaccctccaccctccaatttccggagcgtccgctgc

SEQ ID NO: 68456 - DNA, 1045 bp, Homo sapiens
cttttggcagttggttctgacctctacctcccttattatgttattttttgtagagttgtctttttgcttctttgcactttctttcattttctaaaacttgaattcctctttgagcctcccttcttgagtaacccttttcctctttccctcaactaacctttggccttcttccctgaccttgtagaaatggctgggctcccaggcccatcccaggtgagggtggcccaggacagagggctgtgaaacagcttcatgcaggggaaatactatagaacaggagccaggagacctgtgtctagacctggctgtgcctctgtgaccttgggcaagtcacttctctttgagcctgggcttcattgttaagatgaaggggctatagatgagatgatctctgaggcctctctgaaggtcccggattctcagaaggcttaggccagtgcatcgttatctgctggtctgggctgcattgttatctaggagtcactttggactggtttgttagtctggcaggtccagaatgatgttgggggctgggccaatgatcctgaaatttagcctgcgagcccctcccagagagcttgtgactccactgtattccttctgacatcccatatttctctcttaatttcttttcctgttcttacttaggggctctttttctagttctcactttcctcccaacccagtctggtcttaatcattttctttttaaagtaaggtaatggcagtgcgcagtggctcacgcctgtaatcccagcactttgggaggctgaggcgggcggatcacgaggtcaggcgattgagaccatcctggctaacacggtgaaaccccgtctctagtaaaaatacaaaaaaattagccgggcgtggtggcgggcgcctgtagtcccagctactcaggaggctgaggcaggagaatggcgtgaacccgggaggtggagcttgcagtgagccgagccgagatcgcggcacggcactccagcctgggtgacagagtgagactccgtctcaataaataaataaataaataaataaataaaataaa

SEQ ID NO: 68457 - DNA, 1093 bp, Homo sapiens
ccacgccatgggacagggtatgggtggacttcctcctggcccagagaagggcccaactctggctccttcaccccactctctgcctcctgcttcctcttctgctccagcgccccccatgaggtttccttattcatcctctagtagtagctctgcagcagcctcctcttccagttcttcctcctcttcctctgcctcccccttcccagcttcccaggcattgcccagctacccccactctttccctcccccaacaagcctctctgtctccaatcagccccccaagtatactcagccttctctcccatcccaggctgtgtggagccagggtcccccaccacctcctccctatggccgcctcttagccaacagcaatgcccatccaggccccttccctccctctactggggcccagtccaccgcccacccaccagtctcaacacatcaccatcaccaccagcaacagcaacagcagcagcagcagcagcagcagcagcagcagcagcagcagcagcatcacggaaactctgggccccctcctcctggagcatttccccacccactggagggcggtagctcccaccacgcacacccttacgccatgtctccctccctggggtctctgaggccctacccaccagggccagcacacctgcccccacctcacagccaggtgtcctacagccaagcaggccccaatggccctccagtctcttcctcttccaactcttcctcttccacttctcaagggtcctacccatgttcacacccctccccttcccagggccctcaaggggcgccctaccctttcccaccggtgcctacggtcaccacctcttcggctaccctttccacggtcattgccaccgtggcttcctcgccagcaggctacaaaacggcctccccacctgggcccccaccgtacggaaagagagccccgtccccgggggcctacaagacagccaccccacccggatacaaacccgggtcgcctccctccttccgaacggggaccccaccgggctatcgaggaacctcgccacctgcaggcccagggaccttcaagccgggctcgcccaccgtgggacctgggccc

SEQ ID NO: 68458 - DNA, 1103 bp, Homo sapiens
ttagtagacacggggtttcaccatgttggccaggatagtcttgatctcttgaccttgtgatccacccgccttggcctcccaaagtgctggaattacaagcgtgagccaccgcacccggcttcctttttttcttttgcccagactggagtgcagtggcgcgatctcggctcactgcagcttccacctcccaggttcaagcgattctcctgcctcagcctcccgaggagctgggactataggcgtgtgccaccctgcctggctaatttttttgtattttttgtagaaacagggtttcaccatcttggccaggctggtcttgaactcctcacctcaggtgagctgcctgcctcagcctcccaaagtgctgagattataggcttgagccactgtgcccggcctcttcttgtcttattttctaaacttctatcatcttccaccttcttcacgcagtctacctctctctgtccttcccctcagacccttctgatgactgtaatctcctgtcctgtgtcatccatatgtccctcctccagtagggctcagcctgtccacccctgccaggcctctagttcttccactctgcctttgttccactttggacctccttgtgtttgtctgactcagttcccaggcttggatcccttcacccaaatgcatggtttgccccaaacctgccttctggtgacaccttcctcttctctgccctccagcctctgcctcggtgcaccctctcattgaccccctggcctcagggtctcaccttacccggatcccctacccagctggaactctccctaaccccctgcttcctcaccctctgcacgagaacgaagttcttcgtcaccagctctttggtaaggatggaagttggggtaggcagctccaatgagaaaagggcagaaaggaggtatttgggtggggggatgggcctagttgggcttggggagggatgaggaggtgcctagaggagctgggcatgggaataggagagctggagctctgcccaagagaagcacgagttttagtgtcagcctaagaggttcgaatcccaattccaccctaccactggcaacttacagaactgggtgtgttacctcactttt

SEQ ID NO: 68459 - DNA, 4089 bp, Homo sapiens
tttttgtattttagtagagacggggtttcactatgtagatcaagctggtctcgaactcctgacctcaaatgatccgcccgcctcggcctcccaaagtgctgggattacaggcgtgagccaccgcgcccggccgaaactgtggcctcttaatacctatccctgtcctctccaggatcccttggttccagtaccccattatctatgacattcgggccagacctcgaaaaatctcctcccctacaggctccaaaggtaggtctgagcacttggtaatcacatggcaggtgggatgatcaaggtagctggcaagaaaccccaggggaatatggtagtgtcaggcctttaggcctctttccacatctgcaagagctgtaacaaaaatacctgcctcctggggtcaaagcagcaaattctgaacacactgtgtttgcgtgctttttactgtctcctccctgacgtgtattcaataagagtattgtttgtccctcgtcttgttcactgcctagatcaaagctttgttttaaagccttttttttctaactgcttgacttactatatctacagttacatccactagtacactctgttctggagaagtttgtccctaagcttgactagttcacctgttctctccttctagaccatacataaaagccgtgcctttgagttccccagacctcttcctcctccccacccacgcacacatatacaccctgggtcaggtagctcacctgtaacctgtaatgtacttctttgtgctatacctagtgcaggtcgcttattcatttactagactgggccctgggaataaaagattcattaaacacaattcttgtcccccaagtccttacaggagacatgattacggtacagcacgaaagcgcccacgttagaggttgcacagagtacagagggggaaagagtagtcagctctgctggtgacggggtttgcagttcaaggcttcacagtgggtgagggtgcatttcagctgtgctgcgtcttgtcttccttgtcagcctgattaactctcctccccccagggtagtgccaggctgtacaccattgcacagggcatacagggaggaacatgaaggagaaaatgcttgggaaagggtgtttggccttgaccagccactgctgacctcaatctcagacctacagatggtgaatatctccctgcgagtgttgtctcgacccaatgctcaggagcttcctagcatgtaccagcgcctagggctggactacgaggaacgagtgttgccgtccattgtcaacgaggtgctcaagagtgtggtggccaagttcaatgcctcacagctgatcacccagcgggcccaggtctgactcccaccaccatctgcgtggtgtcagcctttccttcctaggcccagagtattgggaattaggaaaggcagcttattagaaaagcattgtcaccctagtgccatttccacctaaaagctgtgctaattgccactgtgaaataaggagagccagcattagaactcgatagcactcggtgttaggaagcacagaggaaaatggccaagtcttggcttttcctgcacctcttcgagcagagaggcttatgttacaggtttgcctgacaggaagctaaggcagtgcatgttgtattgagagtgaagggttaggggtcgcaaccttcctttcagctccccagtcccctcaaaccacccctcccttcccctcttcacccctgccctcaggtatccctgttgatccgccgggagctgacagagagggccaaggacttcagcctcatcctggatgatgtggccatcacagagctgagctttagccgagagtacacagctgctgtagaagccaaacaagtgggtgagtcgcaagagccgtggggtgagggcttctgagatgcaggaggaggaaagactccatgggtggggctcctgacccaggacagggtctccctgactctctcccaccacagcccagcaggaggcccagcgggcccaattcttggtagaaaaagcaaagcaggaacagcggcagaaaattgtgcaggccgagggtgaggccgaggctgccaagatgatatccttctgctggagagatctcagcccagcccctagggcacctgagttccccattctccttcatgggcaggctgatgagactaaggcgaatgcgactccgtgctctctggcccttggctccttgttgggggtggggactacagatgagatctgaaatcttagtggtagtacctgagccatgactccccactgtaaggccagatcaatagcattggtggccttgccttcatttctggtgctgcccctagttcctggcagcagcctgcagggaggcccacaggtggggtccacggtagggctgggcacaagccacctgagcgcaaccttggatctgacagcccagaggaggactggagcaagggagtgtggtaaggacagggccagggattgagacctgcccttgcgtgtaccttaaccctcctcaccttggagaagcactgagcaagaaccctggctacatcaaacttcgcaagattcgagcagcccagaatatctccaagacggtgagtgtgtcagcccagcgtctctgatggggctgccttgagaaagtgctttcagttaaggcacattgaggtgagggaattcgaaccttgcttgttccggtttctactcagattggcttctctggccggcgcggtggctcacgcatgtaatccccgcactttgggaggccaaggtgggtggatcacctgaggtcaggagttcgagaccagcctggccaacatggtgaaaccccatctctactaaaaatacaaaagataatgagcccgctgtggtggcgtttagctatattcccagctacgcaggaggctgaggcaggagaatcacttgaacccaggaggcggaagttgcagtgagctgagatcatgccactgcactccagcctgagcaacagagcaagactccgtctcaaaaataaataaataaaaaattggcttctccgatactcctcctgtcaagaatgattcctctgggttccctgaccttttgttctaatcatagctgctgctcagcgctctggatccctaagtgcgagcagaaaccatgtgttactcattgctgcacccctgccctaatctgcatgtgttccatgttaagtagctgctgaattgcaggggtcggaattgaggtctttgcttaatgcaagcatctgtcttatttcctgccctgtagatcgccacatcacagaatcgtatctatctcacagctgacaaccttgtgctgaacctacaggatgaaagtttcaccaggtgagagatgtggccacactgtggggtatcaccaagaacgtgggacctgagtctggttgtttgggctctggagcctgctacagctattcatatggctcagagacattgaaccaaaattagaaaagggggtggttgacagtttctatcttgcatctcataggattgattttatgagatcaaataggattattcacataaaaagcactttaattataaagttttcatctaaccaaaaagtgatgaaagatgatactcagttttcttactcaagagccctcaaactcctctggtgaatggagggatgttaggaaaggagatgagaaatagcagtggccatgagaacatgcctcctcctttcatgagcctgagattcctggctgtcaaccctgtttatcttttctcttgggagcaaaggagggttcaaagctgagtggggcctgaagctgtcaattaacatgtgcatttctcttctctgtttcttgttcatctggcgatctggcaccacaggggaaggtaagctgttgttgcttctgtggggtcctgcaggccaccttctccagtacccgcctcctaccctaccccctttcccacctccccgaagacaaaccctcaatcagggtaggagggtcgtagagggaatggcctagagtgtcctgcctctcacatttatgtcccctaataatgtcattatctatcttttttttcctacagtgacagcctcatcaagggtaagaaatgagcctagtcaccaagaactccaccc

SEQ ID NO: 68460 - DNA, 1169 bp, Homo sapiens
cccgtggaggggcgcggggacagggcaaggggtttgggggagggactggaagcgtccggcgagcaggcggaggttgctcaccggtgaacacagattcgcgcacaccgtaggccacggcgccggcccccagcaacagcttcagggccgtgcccatgccccggggcccggcgggcagccgtcccgccaagtccttcaagttctgggccatgtctgatcttgaggccggcggcactggaggtcagaagggggtgccggcccgcctctaccccgctccggcttaggtactgcacccttcacacgagggttcgggcccgtaaggctggcgaaagaaagggcagcggaagtgcgctccctttgaaaccctcccccttagcccactacggacccgaacttcgcgcacaggaatcgcgcatacggaagtcccgcccctttctggaaggctgccctcccagggagggcagcgcaagacagcaagtcatctccatttcctggcccactttcaaaatggcagccggaaggaaatttgtgattagaagccgcgctgttcttatttaagagcgttagcgcaacttccggtattgttgcaagatggccgcgcccagtgatggattcaagcctcgtgaacgaagcggtggggagcaggcacaggactgggatgctctgccacccaagcggccccgactaggggcaggaaacaagatcggaggccgtagtttattgtggtgctggaaggggccagtctggagacagtcaaggtagtttgggacaggaagtggagaagtagtaaatcgataggttgggactccgtggaatgagggtaaggggcccagagtggatgtagaaagcagagaggggtgaaagatgcttttgaaggaaggtggcttggttggctttgcgttgatttgacatcctgggatggtagtactcatttttctttctttttttttttttttttgagacggagtctcgctctgtcgcccaggctggagtgcagttgcgcgacctcggctcactgcaacttctgcctcccgccttcaaacagttctcctgactcagcctctggagtagctgggactacaggcaggtgccaccacgcccggctaatttttttgtatttttagttcagatggggtttcaccatgttggccacgctggtctcgaactcctga

SEQ ID NO: 68461 - DNA, 2320 bp, Homo sapiens
tacttctgagagttttctttgattaaactgcctcctgcatcattagttttcacatttcttttttttgagatggagtctcgctctgttgcccgggctggagtgcagtggcgctgcaagctccgcctcctgggttcatgccattctcctgcctctgcctcccaagtagctgggactacaggcgcctgccaccatgcccggctaattttttatatttttagtagagatggggtttcaccgtgttagccacgatggtctcaatctcctgaccttgtgatctgcccgcctcggcctcccaaagtgctgggattacaggcgtgagccaccacgcccggccttcacatttcttgttcagatttgcagctcttcacttagtgcatgtttggtgtacgcaaactgagggtggtgactcgatattttgcacagtacctacttactgctcctgtaataaacacagcattcagccttgctaactactaactcctgcctagttccaggatgtctcattggccttgcctaacagccacaggttttttaattaaatccagtgtattagtagataatgtgaagtcacaggttgtgcccttcctcctgtttccctctcagaccattcactggggagtgcaaataaggctgcacagtaatcccccgaagggcttgctgggctccacccccagtgttcctggtttagtaggtctagggtgggcctgagaatttgcctaacaagtttccaggtgcagctgctgctggtagtttggggaccacacttgaagaaccacggggctaggtaacagaagcttatgctgttctctcgtcatgttccctgttcttcaggtagggaagacatatgagctactcaactgtgacaagcacaagtctatattgttgaagaatggacgggaccctggggaagcgcggccagatatcacccaccaggtaactccagggacagtgctcacaaccctttgagcctctgtatggaagggttggcagctgagtgctgcctctcttcagccttaaccatgtctcggtttctgctttgctcagagtttgctgatgctgatggatagtcccctgaaccgagctggcttgctacaggtttatatccatacacagaagaatgttctgattgaagtgaatccccagacccgaattcccagaacctttgaccgcttttgtggcctcatgggtaagaagccttagaacaaagttagaatgaacttgtcagtagggaagaagggaggaagaggaaaagggagaactaaatgtggatttttaagcgagaaaatgggagaacaacatgattaataccaggacaaggactgttattatttttctatgtttgtggaaactccactcctgttcttgcagtagcttcctggctgagtgaaagagggagtctgaacccatcactgtacagctagccatatgcttggcaactgtttgttcctaacatttcaggagtccagtctagatataaagcacacagggaactcatcttatccatggggttttccttgttcgatgactggacagaaggactgtggtctccatctagctctgaactcttttttcccccttctagttcaacttttacacaagctcagtgttcgagcagctgatggcccccagaagcttttgaaggtgaggtattgaaacctgttagttgaaggctggttctgggaatgtttctggggctgacttttctctcttttttactttaggtaattaagaatccagtatcagatcactttccagttggatgtatgaaagttggcacttctttttccatcccggttgtcagtgatgtgcgtgagctggtgcccagcagtgatcctattgtttttgtggtaggggcctttgcccatggcaaggtaaggtctgggctcaaccctgaaattcttggtagagctgaacttagtatagaattcccagagcagtaggcattttaacaatgcttacaatgagctagaagacacatgacagttccacaccctgccccagggcacatcctttgagggctgctgccataattggaagtcacagttaggaccttcttcatcctttgtagggatttgatattcaacagcacagctgaaatactagctcagccatagttttcctgccctaaagaagggctgaaacagctactgagtgacagagttggctgacaaaactgttcttttcttaggtcagtgtggagtatacagagaagatggtgtccatcagtaactaccccctttctgctgccctcacctgtgcaaaacttaccacagcctttgaggaagtatggggggtcatttgacagtagtagaacctgttc

SEQ ID NO: 68462 - DNA, 1074 bp, Homo sapiens
gcgggactggtgcagaaactactcgtctcccttttcacagcactcctttgccccagagcagagaatggaaaagccagggaggtggaagatcgatgcttccagctgtgcctctgctgccagccaagtcttcatttggggccaaaggggaaacttttttttggagaaggcgtcttgctttgtcacccacgctggaatgcagtggcgggatctcagctcaccgcaacctccacctcctgggttcaagtgattttcctgcctcagcctcccaagtagctgggaatacaggcacgccaccatgcccagctaatttttgtattttcagtagaaacgggatttcaccacgttggccaggctggtctcgaactcctgaccgcaagtgatccacccgcctccgcctcccaaagtgctgggattacaggcgtgagccaccgtgcccggcccaaaggggaaactcttgtgggaggagcagaggggctcacatctcccctctgattcccccatgcacattgccttatctctccccatctagccaggaatctattgtgtttttcttctgccaatttactatgattgtgtatgtgccgctaccaccaccccccccatgggggggtggagaggggtgcaaggccctgcctgctccactttttctaccttggaactgtattagataaaatcacttctgtttgttcagtttttcaccactagcattcctgactgctctctttcacagttcttctccatcatcagggttctctcctttagcacatgggaatctgggagctaaagcctgccttcaaagcatggaaccaaactgcaaactctgtaacctcctatctgtccctgaagtcccggggaacaaacagttttacaccactggatactttaggaaccccaaaacaaccaggtttgcaagaacagtattcataggataaacaaatagcaaatgtacagccttggcttccccaaactccacagtctcagtgcagaaagatcatcttccagcagtcagctcagaccagggtcaaaggatgtgacatcaacagtttctggtttcagaacaggttctactactgt

SEQ ID NO: 68463 - DNA, 1060 bp, Homo sapiens
caacatagcaaaatcctgtctcaaaaatatttatcagtaggaaatgcaggagggcacagtggctcatgcctgtaatgccaacgctctgggaggccaaggcaggaggatcactggaggccaggagttcaagaccagcctgggcaacatagtgagaccccatctctacaaaaaaaaattatccaggcaaggtggtacatgcctatagtcccagctactcaggtggccaaggcaaggggatcgcttgagcccaggagttcaaggccacagcgagcaatgactatgcctctgtactctagccggagtggcagagcaaggccctgactctagaaaataaaaattaaaatggtaaaaaaaaaaaaaaaaaaaaagtttaattgccagaagaattccttcactgagaacttgtccatcctgtgtttcagcatcaattcaaccaagaaatgaaggagcagattcaaagtggttatttttattatcttacctccactgggttttcagtcccaatggagattgtgagacctggcaagaccttgagatcagtagcatccctgaggggtaaacacaagactggtccactgtctgctgccctgactttcctacaactcttaagaggtttgcagtccccattcctcatagccagccatagaaatctttccctgaaacaggaaacactttgggcagcagagcttctcatcccattccaggtagacaaccacacccctaaacactcctctccataactgaaggtcagagggtgaagggaatagtctctgctctctgtgaccaggaacttcactcgttcctttccagcatcattcctgctctcaagcgcctgagtctgggccttttctacctagtgggctacacactgctcagcccccacatcacagaagactatctcctcactgaagactatgacgtgagtgtctactaaagcagcagcagcatgactgcaccagagctagaaaatggacaggcaaggatccctacagatagcagagaagtaggaaatatcatctacaagtgcatgttggttttgctctagatctgtgagttgtca

SEQ ID NO: 68464 - DNA, 1048 bp, Homo sapiens
agtggtgtgatcaaagctcactgcagccttgacccacctcccctggactcaagcaattctcccacttcagcctcctatgtagcttggactacagatgcatgccactatgtctgataatttttgtatttttttgtagagacagagtctctctatgttgccaggctggtctagaactcacgggctcaagtgatcctcccacctcggcctcccaaagtgctgggattatagaggtgaaaccactgtgcccagcctctatctacctacctacctatcaacctgcctacctacctatcaatcataaatatatttcatatatacatgaaaataggctttaaaggcagaaatgtgactggttcaggcaaaatcctgtggcataaatgtggatttttatgtttgtactagtgttagaatggataactggaagaaccctaaactaaaaagggcccactcctggcacagagtgcctgttacaacagtccagggcctgcatgactcaggtctctatgccagggtcatgctggagaatgcagctttcagaagagtcacttcagagtgagtgaaatacctacacaaacatctggaccaagaggggcaattacctgtttggtatctttcctggtatgtcaatcagctctccctgcaccagcttcatgtagtgattcattgagaactggggccctaccaagaaggccccatagaagtaggagaaaccagcaacttccagcagggaaggaacaccacgtatggcatatttctgttgctcagaggacaaggaattctatgccaagaagagaatgcatggttcaggatagccttgaatctccccacaagagccactttgagtgttccccacctgtgtgccccactgactggggttcttcaaatagccttctctttgggggatgacaaatagttgcttcttgtggaaatgcgtatgtgtgtgcatagctggctgttgctgctttagcaaatgccttgctggcattgatctctggactttgtgcaagagctggatcctgggcaaattagatttgttgatccttgctca

SEQ ID NO: 68465 - DNA, 1050 bp, Homo sapiens
ctcccaccaccctacccatccgttctctctctgctcaggtttggctgttgactactttgacggagggaaagatcaggtaagtacccattcatcggcagagaggttcaagacttaatgaaagggaagaaaaaagttgttaacaaaagactgaacccaaattccagagcggagctctccctcattccccagcctgtgcaatctccctttcagatagcactgagcaaggatcaacaaatctaatttgcccaggatccagctcttgcacaaagtccagagatcaatgccagcaaggcatttgctaaagcagcaacagccagctatgcacacacatacgcatttccacaagaagcaactatttgtcatcccccaaagagaaggctatttgaagaaccccagtcagtggggcacacaggtggggaacactcaaagtggctcttgtggggagattcaaggctatcctgaaccatgcattctcttcttggcatagaattccttgtcctctgagcaacagaaatatgccatacgtggtgttccttccctgctggaagttgctggtttctcctacttctatggggccttcttggtagggccccagttctcaatgaatcactacatgaagctggtgcagggagagctgattgacataccaggaaagataccaaacaggtaattgcccctcttggtccagatgtttgtgtaggtatttcactcactctgaagtgactcttctgaaagctgcattctccagcatgaccctggcatagagacctgagtcatgcaggccctggactgttgtaacaggcactctgtgccaggagtgggccctttttagtttagggttcttccagttatccattctaacactagtacaaacataaaaatccacatttatgccacaggattttgcctgaaccagtcacatttctgcctttaaagcctattttcatgtatatatgaaatatatttatgattgataggtaggtaggcaggttgataggtaggtaggtagatagaggctgggcacagtggtttcacctctataatcccagc

SEQ ID NO: 68466 - DNA, 1004 bp, Homo sapiens
ccacggcggcttgcttccaggctttgctgttctccgtcaccgtcttaacgttcctgctaacctggcctgctgcattctttttatttttctcccaattcctccgccttcttctcatgtgtttgctagtgtgcaatacctcacctgtttggaactcaacaacgtcccctcctgcaaaacgcacctgaaaacaagaaatagcacacaaggcctctaagtggccagaacagatgttaccaggcctaagtccataaggaaagcacccaagccccttgcttttgtcttaaatctttttttttttacacctttaaaataaggttatggtttctaaggcctgccgtaaattaggagtagggagaggaactattgccaagcaccccaaaagttcaagaggtgactgttgatcccagagtagcaaggaaagggacagacaggctataagaagtggacacaagaactcagaactcaggacagtgtaggccttgttagagtcaggcagacaatttcacatacctcagaacgtcataaagccatcatgactttactctggaatagatacgatccagacacctagaaaatgttaaattagattcaacttaaagaggcagagtaatatgtgtggtgttttttaatttcgagcattccaaatggttaagggttttcatgcttaaagagagaaacttagctacctagaacttatttatgagtgctctagataattatctactgttttatatttttttatttataccccgttactaaaacaaaagtaaaaataaagcaaaagattgaaggcattgacatttagtctatatactttctagttcctggctctagttcttagcaatatttgctgctaacctggtgttctgtctctgccaaatttctgcccatgtgaaatatatgagacttgatcctatttccttgctcattgatctacctgaaagggtcatagatgtctccacctccctagagctagtgatcctatatcccatcatctcagccag

SEQ ID NO: 68467 - DNA, 1804 bp, Homo sapiens
caggaaagaatacttgcccttaataataactcactaagttgatttcatgacttgttaatgagttacaacagtttgaaaaatcttgagttagaggctgcaattttttttttttttttttttttgagacggagtctcgctctgtcacccacactggagtgcagtggctcgatgtcggctcattgcaacctccgcctcccaggttcaagcagttctcctcctcagcctcctgagtagctaggactatggtgcacgccatcatacccggctaatttttgtgtttttagtagagacggggtttcaccatgttggctaggatggtctcaatctactgacgtcgtgatccacctgcctcggcctcccaaagtgctggaattacaggcgtgaaattacaggcatgagccaccgcgcccagccgaggctgcaatttttaatattcaatacttcaaagaaaaagtaagcttatgtggactgctgcactggagtattttgagcagtcagaagactgtaaaaggagtgtgtttatgtttgtgtggtgtatgcttgcaaggagtttgatggaaggatgctgaagaggaattttgccatgagccctggtgctggcaaatactaccagaaaacatctccccttcaacagcttggatctcatcactccttaatgtaactaataccatgaattgctcatataaattcagtaacatgcacctactacaggtaaagcagtattcttaaccctgcaagggcaggagcagtgggtgtagtatgagtcaggagccctgcactcaaaggtattatggtctgttagggtataggaaatgggcctgagataagtatactaataaccccaataaattttaagcaccataagagaggtacagagctttgtgagatttaaagatgggacatttcatttaaagatgagtaaggtttcagcatgctgagatggtaagacttaaggaatagcatgagcagaggcactgaggtgtgaatgtggcaacacagccaaggaacagtcagtagtctagtgtgactaaaacaggactttaaagaagtgatggaaaatcaggctggaactgtaggttaaagagcctttaaagccaaggtaaagagttagtactcacgtaggtgatagggaacattggagatttttgagtggggaataatatggctggagctgtatttaaaaagataatacagcctggggtgatttgaagtcagcatagacaagtagtagggaaactaaggagaaagaagtgatctagagaggaagttataatgacttggaggcagggtggctgtgctgagaggagaaagtgggcatctcctgtgagatggtctaggaataccggaaccttttgaaaggtagattctgtagacacagtcatctacacagctgctcatgcctgaaacccaagaatcagctttgttgcctttcttcactcactccccacatcccagtcacccaatcctatcaatacaacctctggattgtgtctcagatccatctactattctccatcaccacagccactaaccatctgtcaccagcaccacccaagtagcctcctgactagtctctaattctgttcttgccccctcagtccactctccaaaagcagccagagtgatccgatcctgtgcctctcctgctcagaacccttcaggggcttccatacctggctggtaagcccctgcctgctgccccagcctcgtcccaagcaagctgacaaccttttagccacatggcctttgttcagttcctcaggaaaggcatgaaggcttccctacctcagagcctttgcacacg

SEQ ID NO: 68468 - DNA, 1145 bp, Homo sapiens
attttgggaggccaaggtgggcagatcgcttgaggtcaggagtttgagaccagcctggccaacatggtgaaaccccatctctcctaaaagtataaaaattagctgggcatggtggtgggcacctgtaatcccagctacttgggaggctgaggcaggagaatcacttgaaccctggaggtgaaggttgtagtgagccaagttagctctactgcactccagcctgggtgacagagcaagactctgtctccaaaaaaaaaaaaaaaattaataaaaaaatgagctgggcgtggtggctcatgccatgcctgtggtcccagctactcccgagattgaggtgggaggatcacttgggcctggaagtttgaggctacagtgagccgtggcaccactgcactccagcctgaaggatagagcaagaccctgtctcaaaaaaaaaaaaaaattgtattacattcattagttaggaaactgttggtttctcaacaataaattcagaatgtaacacaagtagcaaccagttataaggggcaatctgttaaatggagttagggctggaattaggacttggaattcaacttttgtttgttgacataaagaattcaacttttgtttgttgacataatcacatattgcctgtgcactcctgctgggctattgctgtgtactgtcacggggcatacagatgactaggaaattgttttctccatatcccactcctcttctctcatcttctctcattaccaccaatcatcaaagtaataaacacttggtgtaatgcatctaccacactcccgagcccccttgctcattctaccatttcccacaccctgccttcctatctcacataccctgttgccttcagtaattcatagtatttctcatttttagatcaacttggggcttcaacttgcctcctatcaggtatagctcatcatgtggacgggtaggattgtattcctagtaggcacagtttaaatacatacatataaatataaattgattaagcttgatgtgtgcgtggtaggagtgcattttggttgtaaatatgtttcccttacaaaggttattaccatttctgtgtattgtaacctagaaaccagtagcctttcagcagtggagttcctggttcttgaacccagctctct

SEQ ID NO: 68469 - DNA, 1014 bp, Homo sapiens
tcctgggagcatttcgaacggagttgaactgtcgccgggccacgggctcagacctttccaatggcagctctgggtcccgacgccaagccccgcccagccctgagcctccccgtgtgcattctcggcaggagtcacctttgccttacaaaccttcagacccgccctcttcctaccttgccgcgctaggccccgccctctgcgcaggtcggccaataacggggtgagctggcgccgcggggcgggcctccagccaatgcgcacgccgtgggcgggccccgagccggaattgggggtgaagcgatagcgttttgcccgcattcggggcgcgcggagctggggggtccctgtggggctcccggagttaagatggcgtcctcagcggagggggacgaggggactgtggtggcgctggcgggggttctgcagtcgggtttccaggagctgagccttaacaagttggcgacgtccctgggcgcgtcagaacaggcgctgcggctgatcatctccatcttcctgggtaaggaccctcctgcctccctccgcccctcgcggagtccccggggagtaggggaggaatggggacaggacctccctctcttcccggagccacccgggagggctgtgccgggtgcgggtgtgaatcctgaagcacaccaacagctactgagggaagacagaagtcctgtctcgagtctggggcgctgtgccctctgaacctcttcatctttctcttcaacccctgccatgccctctggcctctcagtcgggcccccgccctcttgtgccaggctctacccttgctcccacgacctgtctttatttgtcgctctgttgagttccactgtctggccatgtgtcctgctctgtcattaataaccaccccgcacacgcgcgcatctcatcggtaggcatagggcccctaactttagccctttcggccttttcagccccatattccatatttcatattctgagcgcctgttttgcttattgccagcttatattatactttcg

SEQ ID NO: 68470 - DNA, 1028 bp, Homo sapiens
caaagccttgtgagagaccctgatcctaaactacccatctcagccgcttctggattcctgacccacagaaactgtgtgaaatagtacatacttgctgttttaaacaaaatgtgggggtgactttttacaagcagacagataactgcaacatagtctcaaccttgaatttcattgcaaatgaccccatcctgaccataacctcaatattcgctaagtgggcagaagaatggggttggggggtgggggcagtagatgacttcgggcagtaaaaatgtgtccagtcacaaaaaggcatgactccatcctcagtgctcacagccctcccatcctagctctaagctagacccttccacgagtctagagagtgaagttcagaggcaggcagctgccccctttcccttcctctttgaggcccacccacctgagtcctgtctgaggactgcctctcccctaggtaattgttaaaaggaatgtccagcatcttcagatggtaccctgctcgtttcaaagttgtgtgaccttactctgtggcttcaaaaggacaaagacatcagaatacaactcaatgcacctcacgccattagacagcatgagtgacaagccgcagggaggatatatcagacagcaccagatcttagctggtaggaagctgattgacaagttctgtggaggacagagcagcagagccctgaagtccacagcaataaggggaagatggtgttctagacacaccagcagggaagagccaaacctggatggtcagtttgacctcccagggtaaggagcctctgggtcttctctacctctcccaggaccaccacagtgaaactagagccagagggttctttgctgaaaagagggtgagtgaggtggagagatgcagatgagaggaggctttatgcagaagccatcaggttgtgccatatctaaagcctggaaaaaggaggataccagctgataggatttggctctatgtccccaaccaaatctcatgtggaattgtaatccccacgtgttggaggaggggc

SEQ ID NO: 68471 - DNA, 1358 bp, Homo sapiens
gcgagcatatcccatcgcctttctacaccagcagagctccagcttcccctccattcatgcctcagtatgtgcccacacccctgccctacagatgagtcatagatggagggtctacctcaatgtgaatggaacagtttttcttccacgcaagtgtgcatatcccacacgattctgtcttgcatgcacttcttcaatgtacggtgcgtgtgcctattgtcgtgtggcctctccatcctctgttctatagaactgctgagagccagcatcttcctttccctctctgtacacagaacaacagcggtggcatcttccttgacccaggcaggtggcacaatgcagagctaaaggcaccgctcgaggagtcgtgtaacctcaggcgaattctttcacttctgtgtgcctgtgctccctcccaggcctggtcccgatccaccttctgtcttgtctttcccacctgctcctcctcttggattcctctcccttcccggctgttttcggaagaggctcgctcatatccttgacccagctgtaaggaaactattgtcacccttaatgaaactaaagcttatcctgctgggtcctcattggagcaagaacccacaggtgaaggggcagccaggtggcaaagcccccaccccagcctgtctccccaccactccttcttttctgagaagcacaggtgggacaaggtgggcctcttgaatgagggtttattaaagtcttggaggaaacaaaagggaaacagaacagagagttatactcaccttgattatctgaggcacaaatgcagcctcagccatgaacatattgaaggaagggatagtccagtatgtaacagacgcaccctgctattggcaagcaaagcacagatggagtgaatttaaagagtcctttactaaaggactttgtttcaggacgaaagtccacacagagcccacagggtgtgggagatctgagatctggaactgggatctctgggctctgaacttgttctgttgggcaatctgctgatggagaccttgtcttcgagtgtcaggatgcacactgtggtcagctccccctaggttgcaaagggcattctatctgggacttgtcttccctgcccatctgctctccttttcaacagcttcttggttcttttgaaacctatgctgtcttcccaaagccctacctcctattgtgttggcctcctgtaagccatgctttcatctgtccagtcctgctcttggtgggatgaacgagaggcctctacagatctcaaggtggaggaggagagggtcagagcccccaaaggtactctggatttgggtaaatgcacctgaaatacaaccatacccagcaaaaataacatcctgcta

SEQ ID NO: 68472 - DNA, 1129 bp, Homo sapiens
tacttcacccttcccagagggcacgcagcacggatctgtggatggaaggggctgtggaaacaggttatggcagagttggggggcggggtgacgcggtgccacccctcctggccgccctcaggtcccgctgacgtctctcttccccaccccctggcttctggcttctttctccccacgtccctcttctttcccaccccctccgtggctctccagcttcctccccagcccccgcagttcctcggctcccccaaaattgcagccaggggaaggagccttgaaactctccagccccgacgccccagtctcattggctccctcccccgctgcagcacctggtccccccccctcccagtcacctgattggccggcggccccatcaatcgttgcccggctgtgctgacgtcatcctgcagtagcggggttggggtgggagtgagagagtgaggacgctgggctgggggaaacgggaagccgctgcaagtccaccgcctcagctacccagattgggatctgcccaggcccgctttatggactagtgtgggcggcaggctcctttccgtccctgccctgctgtaccccgctccttggagaccccctgtatccctcccgcaaggtggaatccgcaggctggaggctcccaggggaggcaaacgcctggccctgccctgccccacgccgcaccatgaccctcctgctgctgccccttctgctggcctctctgctcgcgtcctgctcctgtaacaaaggtgagtgaggtgggggtgggggtaccgaaagaggggcgtcgggcagcgccgtgcggggtgggggtgggaaggaggtgtcgaggctccctggcacctgacaggtgtctggccctcttctgatcaccctccttcccatccgttctcagacctgctccgtctcctctctttctcttcccccagctacatcttcctttctggtccatctctacccatgcgtttctcttgctggtcatcttgctcccatttggtctccattcccgtcctggggtctctattctccccttcccctaatttctacacgctggtggctacctcgggtctgggaaggactgcccccgagccggtgataggcctctccccgcggctctccctttcactggcgc

SEQ ID NO: 68473 - DNA, 1020 bp, Homo sapiens
ggccaagagcaagggagggagggaaggtcctgggagtgatgagaaagtaagggaagataaaagtgggctcaaggaggggaatggtctccactgaagaatggagattgagtcaaggatgccagaaaaggacatggccaggcaagggttaaacacatcatgattttgtcagatctcaggtctggaggctctgggaggttgctgctcagggaagctgggcttagagttgcgtgtttgatcattaatgcttttgtgcctacaggagaagggacagggctttgggaggagaggtggagctggaccccaggtggggagactgagggtggggaaggagacacagcagcctcactcctccccttctcccctttgccaggtgagatctgcggcttccggctccatgggtctggggtgccctttgaggctgtgatccttgacaaggcgacaggagaggggctgatccgggccaaggagcctgtggactgcgaggcccagaaggaacacaccttcaccatccaggcctatgactgtggcgagggccccgacggggccaacaccaagaagtcccacaagtgaggaagtccttgtctcctgccccatgtgttgcagggtcctcctccctgctcccaagcccaccatcctctgtccgtgcggtcatcgaatatccacccccacccgctgctgttcctaggacttagggagccccatcccctgctgttcctaggatttagggactttcaggcaaggtgacagaaacgtatagtagagttcagtggatctaatcttggctttgcctctcatgaccttgggcagcctagcctttctggacttgcttttccttatctgtagaatggagattgtgatgacacctacttcataaggctgctgtgaagattcaaggagatggtttgtgttgaaagcatgcaccacagtgcctgatacacgttgaagggcacagtacatgggcataatgatgaggaggagagcaagaaggaagaggatgaacacactcagcatgcatccagt

SEQ ID NO: 68474 - DNA, 1275 bp, Homo sapiens
tctcctttttttctttctcaactcttctgctctttctctcctttccctttctctcagccttcgtccttttccatcctcctctcttctcacctcccgtcctgctcctgtgttcctaccctaggagaccctttgtcgatccaccactacttccatggctacctggctggtttcagcgtgcgctcaggtcgcctggagagccgcgaggtcatcgagtgcctctatgcatgtcgggaggggctggactatagggatttcgagagcctgggcaaaggcatgaaggtattgccccatcctctagccctgttcttcccagcatgccccttgccccacccccttgccctacccctctacctctgctcccttcctctgccacctcctggccctgctctcagctgtatctgtgtctggggcccaggtccacgtgaacccctcacagtccctgctcaccctggagggggatgatgtggagaccttcaaccatgccctgcagcatgtggcttacatgaacactctgcgctttgccacgcccggcgtcaggcccctgcgcctcaccactgctgtcaagtgagtgttgggtggggcagggcaaatcaccaagcagagccagacagtgtcacagctccttggcctaaggcgtcacctagagctaggcatacctcttttgttttatggatgaggagattgggccctcaaatggagacaattgaccactgaaggtcacatagcaatattggtagaagagtctggactatactcagatttctcaacaatcaatctgttactctttctaccaagtcacacatctagggtttccgggctttgatcttctctatgcctctgtgctgatacgtaaagtgggacacaggattgggagtggggagacctgacattaattctgactcaatgcgaattgcttggataacctcgggcaaatggtgagtcctggctgcttcacttgttttaatcttgcttcaccaagctcttgcaaggtcacgtacgatggcctaagtctgggggttggcagtcctaggccaaatctggcctgcccacctgttttgtagttttattggaacacagcagtgcccattcattgcatatgtctatggctactttcactgtgatggcagaactgtgggtagttgggacaaagatcatatggccccctcaaacagaactatctaatccttcatagaaaaagtttgctggccgggcacggtggctcacgcctgtaatcccagcactttgggaggccaaggcagatggatcacgaggagt

SEQ ID NO: 68475 - DNA, 1635 bp, Homo sapiens
agaatcggcagtcctgtgtgacgggggctgttgggggccagcaggaggatgaggacagcagtgactcggaggtggccgattcccccagcagcgacgagagacgcatcatcgagacccccccacaccgctactaaggcctacacctctccccacgcagagggggaattctgccctggtgaaacagacactccagacatgggagaaggactttctgggaacacagagaccaagagggagagaggcttcagaaccagtcctcctttcatttcaaaaccccagcgggccctctggagtccgccctgcccctcccccggccccccatccctcacttctgggctgtcatgctcctggtgtgccccttgcactggggctggctgggttggaaagtgggctggacttcagctgcctttctacccccaatggcagctgcccccttagcactcactgtgttggggagagggtgacgattgcaatggctggggctggggctgggggtgggattgaaggaaaccctctcctctccccttcccttctctctcctgtccatgggaagcttttccccctctgcagggctccctcagctggaccatcgtccctgcttctcttatgatcgccccacctcatttccatttcagtctggggaccccatttctccctcctttccaacttccttcctttcttgtcctgtttcccttcctgcccttgcagtcctgaggtcctgcagccccggcccctcctccgtgacctggtgtggccaggctgcggggacgggaggggacgtgggggccccgggtgtacatatataatgtatattttttcaatgttgtcgtgagtgcagcccatgttcctgcgtgcagctcacggccttgtgtgtatgtgtgtgtgtgtgtgtgtgtgaggcatcgtcatgtcctggggcaggggcggggggttgggtgtggtgagggaggggacatatcctagggttttcaaataaaacaatcagaaaaaaaaaaaaagctctgtgaggcgcctcctgactgcctggtcctgtgtgggtgtggtggaggctctggggcctcaggggctgtttgggtctctgcacagagctgaagtgaggtgggcagggctggtgatcttgggggcctgaccaggtaagtccccaggatgccagatcacctggaaagtaagctgggggcagatggttcccacgcctcccttccttcagcaccccctggaaaagtacagaagattcagggaatgctatggacacctgggcagatgcccagtgccttgcaggggtgctgccaaccccgccccacaacttggaacattttgcctgtgcacatgggctccctgctgggcggccccagggagaaggcaggcaaccctgctgtttgtaccaaagggatctggagactgttcccaggctgaccctttcctgctagccaaggctcagacccaggggatgtctgcctgccttgcccatgtccttgtggctgcctcacatggctgcttagtggcctccgccctctccactcgggcccagcccctggcctgacagcaggcagagtctggcccttctgcagccttttgggccactagttctctgacccaggtcttacttaagccccaggtgataaaggatgataaccc

SEQ ID NO: 68476 - DNA, 1561 bp, Homo sapiens
tcagaagccctcacctctgattatttcttctggtgtaacctttcccggccctcctcttcaccctcagtgtttgatgcccaagtcttggcccatggttagcacatctccccatgtgactactgggcccatcgagatgttacctggggtgggggtatacatgggcaccagaggcctggggaagaccatgaattccttgtgccaccacatgccctgaacttctgctgtcactcgctgacttccctccctctctcaatctctgcctgtctctgacacacacactcgcacacacactaaacagggatcaggcttgaggcaggaggccagctccagtgacgcagggaaagggcagcaggcaggattctgcatgggtttttattttgttgctcaagatctcctggaaagatgtttcctaacctccctcaaagaagctggcaaagcctggggctatcaggcccggggcagggtttccaattcacctattcccaatttcatttgaaacagcaaacacatttgccttggcatcactcaaaccgttctttctgcaatggaaggctgttttcctctcaagtctactctccgcaatgacaattaattagcttctctaaaggtgcatgatgaaaagcatgccctcggggaaaagcgatgctctagaggcaactgggttaaccaccagttcaagaacaaagtgtgtccttcttcctgttaccaaaccagagtcctggaaactcgcttttgtgccgtcagagcagctggacacaaatgcactggcggtgggcagaggtgtggctctacccactttcaaagtctgcactccaccctgcagcctttgggctgatgcaccttcaccctgggggcttcactggggtgggcctagaaggtcacatgtgctcccagccttctaggtgctgtgggagatctcacgttcccttcagattttaggtccatgtcaggggctccccaaagtagatcccctatatccccagacctgtcccaactaggagctcttctttcaccagtccagaagagctggtgaaactttcagactctgaggtgtttccctgatttgtccataagtgtgaaatggagatgagtgtgtccattaggttcctcggtgcagtttcctaaactccccagcaacctgcggaggctctcagtgtgctccctctggcggcctcctgggagaacggaagaacgggaggaagggagacaggtgtggagagagatgggtgagcccgggcaggtgggcgcgtttgacaggcagagaggaggagctgacgcgccagcctccacggtgctggcgtcactgcctctcctgcggcaccacgctgcggagcacttaaaatacccacgtcctacaggaagaggacagatgaggctctaaatttagcgacagtgggtaggtggagggggaatgaagactccgggatgtggtggagctggcgttgtcagaaaaggagtaggaatcctgtatttcctgggtggggattctaattcataaggataagggagcttctgtcccaatatccgatctcagcgacctgactccagtttcagaagttct

SEQ ID NO: 68477 - DNA, 1031 bp, Homo sapiens
ttatccttcatttttaattacagcatttgtggttgatacaattgtatgggttagctatggctttatagataagtagattttgagatgaaagaaggttatactttttaagttcttattttaaaatctccactgttaagagtcaaaatcaagtttaaaaagaatgttgcagctcaattatttaaatttaaattttttatttggaagtacttagtttcactggaagttgaaaaaaaaaatgtataggaaggttctgtatacccttcacccagtctcctccagtggtaacattttacatagcagttatgcagagatcaaaaatcaagaagttgcccttgtttcaatcctcagagtttattaggtttcaccagttttacatgcccttatttgtgtgtgtgtgttttttgcaattttattaaatgtgtagatttgtgtaagcaccatcatgatcaagatacagaactattctctcaccacatgaagttcatttttttagcttaccttattttgtaatggaatccccccgtcttaaatcttctgggtcaaataattctccatcttgtgtttgctcagatctagagataaaacacatcttcagggttcttaaatttagacagcttcggttgacatggtatgtgaggttcatatgataatcgtgagagataaacctgcactttcatgggaaaagccatggatagcagtagcagaagataattggcaacagatcttttctggatgttggaggagaggctttggaataacagtctcattgtgatgttttctgcttttgttataggtttgccatgagcagactaatgataataactaacatttgttactgtattcattggttttcaccgcagcccctactgttatctctgctttaaagataaggacatggaaacttaagaaggttgagtaactagtctgaagatgcacagtgaataagtgatggagttaggatttaaatgtgggtagactgaccctacaacttgtattcttctccacagtgctgctatttagcagacacagaa

SEQ ID NO: 68478 - DNA, 1036 bp, Homo sapiens
aagctgaggtgggaggattgcttgggcccaggaggtcaagtctagcccgaggaacacagtaagaccttgtctttaaaaaaccaaaagcgcatgcatgtgtgcgtgcacacacacacacgcacacacatatatacacacatacacatatgtacacacgcatacatacacatacatgtgcacatacatgtatatacacacgtatacatatgtaaacatgtagatacatgcgtacacatgtatacacacacatagacatacatgtatacacacatacacatacacatgtatatacatacacacatacacgtatatatacatatcagctatatttgggaggaagggagttttcagacttttaaaatatatgtatataggtaaatatatatatatttttcaagaatcctaactatcctatatgacgttcataacttcatcttaaagttcataattttaccttgttcccttcttaattttgagcctgctactatcccatctgtatgcaaagatatgtttgggaaagggagagctagaaggatgtagctagtactttcacactcctgcccaaatgtccttctataatgcaaattggagtttgtaggttctcaacaggagaatggagttccctcacaggaactgtcattgtcatgggctaggagtggggagtagcatggggagggtgatggcagactaatgtgtaaaattagttcttacccgttccaggtatgatgaatatcatcctgaggaggatctgcagcacacggccagtgactttgtggccaaagtggatgaccccaaattggctaattctgaggtgagccacatccctctgctgctttgcccagcagagctggttttggaaggcaagaatcttgcttttcttaccccagtttagtttaaagagaaggagaagagatcttaggtctcttcgttcctgtctatagaacagagacttaagatcctgcctcttccttctagtgttcattccctcatctccttgcctactaactcttttttctgatgcctttgcaagtcttta

SEQ ID NO: 68479 - DNA, 1028 bp, Homo sapiens
gagggactagatcagaagagatcaagggctctattcaggaacgttggtgggaggacagagcaagtgggaagggggtatggtgagtgcggcaatccctcatcctcttagaagcacctgtgaatgggaattgagccaactgttatagaaaattggttcagaaagtgcaatcttgccagatttctagcaaataggttcagtgttaccataagcctttgctgtacttcttgaaatgtttctaggggagagcattggaaaatccccttcccccatctagatcgaaggaagatgagggagcagcttggattcttctcagttgtcccctgcatggggagatacactaacccccagaaatgactgctaagcctcttgccttgtctttagtagctaatgatcagagagattttttttttaaactaccatggtcccaggattccatcctgaaatttatttttctttgtatgaatatgtgtaaatgatttaaaaataaaactgtaaaatatttgtacgaagaataaatggaactgatgtgggtatgagttctgctggtcatgaagctgggatggcagaaggtgagttggcgtttggaggactgggattcaacagtttctgcctttcaaattctcactggtatattggttacctgctcatccctctaaaaatgatagagcacaggagacagggtccctgttctctgggcctctgggctagcaggagaaagagatgtcgataatcatgaatttttactcctgttactactacaaaggaaagtgtgcagtgccatataattgttaggttgttttgtattatgaattacatggaaggattttgatagtttttcagtgcttagggtttctaaagcttttcatctggctctgcctgcctttatcgggaactgtatcaagtgccatatcaagatgggtatttatcctgaggaaaaatttaaaaatatacacaaatatttatacttggagatagatgtttgtgggcacattagacttggaaaaaaaatttttttttttttgtttttt

SEQ ID NO: 68480 - DNA, 1011 bp, Homo sapiens
tcttttaggaagatcttttggcaacgggatctaggaggattgaaggaggaccacttgactgacaggaatggcattttgtaacagttgaggtgaaaaatgaaaagtactataacatatatagtgagaatggaggggagaggaaagacttttagagatacttaagaaaagctccagtgagttatggaagactgctggcttccttgggtaaaaacagtgggttgtttatattaatacaatggcagtggggaagatttagccttgtgcctatttcatttgagtgtgcggaattgtaagggaagagcttggtagtagaatgggatagaaacaatagcagggataaagacgaggtatgtttgcagcgcttggaaaaaacacacttacagcaagggaaattttattatgatagctgatccctaacctagggatctctgttttcagtttcctcaagaggagagaacttagtccaccaaattcaataccgggagatgaattcttgcctgaatgcagatgatctggacctaatgaattcctcaggtctgtgggttcttggagggtctattgcccaggggttcagatcagtggctgcagttgaggcacagacattctactttgataaacagttaaaaaagtctaaaaatgtaataggaagcttagatgcatataatggacaagaatgactgaaaattattcttggagaatatcaaaattgcaatcatagggaggcctttagcttaagaggcctgtgattattcctgatagaggtatggaaagaaccatgcagaggaatattatgacttggacctcattttattaaaacagaaattaatcttacaaaagattgtcataagtgacagtttaacttttttctttaaattttgttgtgtatatttaaggtatacaacatgattttatgggatgtatatagatagtaaaaagcttactaaagcaaagcaaatgaacacacccatcatctgacatagttacccttttttgtgttgttcttgtggcaag

SEQ ID NO: 68481 - DNA, 1688 bp, Homo sapiens
ccgccaccacgcctggctaatttttgtatttttagtagagacggggtttcaccatgttagccaggatagtctcgatctcctgacctcgtgatccgcccgcctcggcctcccaaagtgctgggattacaggcgtgagccgccgcacctggggaccctctggctttcaggaatagagaaacaaaccctcccaaatgacagggcttgtgtctttccctgcccttatattgtatatgtgggtgtctggcatttctattatataggtggatatgaagtaaatacatcattatgactctgacatgtctcttttcccatctaggtttctttctttacccaaagaaaatttcccaagcttcctcctgcctgcagaagctcctctactttaacctgtctgccatcaaagaaagggaacagttgacattggcccagctgggcctggacttggggcccaattcttactataacctgggaccagagctggaactggctctgttcctggttcaggagcctcatgtgtggggccagaccacccctaagccaggtaaaatgtttgtgttgcggtcagtcccatggccacaaggtgctgttcacttcaacctgctggatgtagctaaggattggaatgacaacccccggaaaaatttcgggttattcctggagatactggtcaaagaagatagagactcaggggtgaattttcagcctgaagacacctgtgccagactaagatgctcccttcatgcttccctgctggtggtgactctcaaccctgatcagtgccacccttctcggaaaaggagagcagccatccctgtccccaagctttcttgtaagaacctctgccaccgtcaccagctattcattaacttccgggacctgggttggcacaagtggatcattgcccccaaggggttcatggcaaattactgccatggagagtgtcccttctcactgaccatctctctcaacagctccaattatgctttcatgcaagccctgatgcatgccgttgacccagagatcccccaggctgtgtgtatccccaccaagctgtctcccatttccatgctctaccaggacaataatgacaatgtcattctacgacattatgaagacatggtagtcgatgaatgtgggtgtgggtaggatgtcagaaatgggaatagaaggagtgttcttagggtaaatcttttaataaaactacctatctggtttatgaccacttagatcgaaatgtcaatatacctgtgtttataatttgtcttcctgaaaaacccaccataattaacaatgcccatacttgcatgcgtgtgcacacacacacatcctggagccctaataatcatagttaatttctgttctaacatactcattatgcatatgacagtatggacactggcatttactgatggccgattatgggcaggcattatcctacgtgttactttacaaacatttcactgtctttgagggaagtattgttatttatgctttacagacaaagaagctgaggtttagagaagctaacaaattttcctaaggtcagcagctctccctggctctccctggcaaatctgatatgctaacagcattacattaaaaatatttgaggccgggtgtggtggctcacgcctgtaatcccagcactttgagaggctgaggtgggtggattatgaggtcagaagatcgag

SEQ ID NO: 68482 - DNA, 1077 bp, Homo sapiens
ggacaagcttggtctatgtagatgattaattacaagtctatgaattattcactgctctattcctagcacctatctcagcaccgtgcacataatagatgcttagtaactgtttgttaaatgaataaatgcatgtctccttttcactctgtctactgctgacaacctcacattgttgtagaatttatgtccatgcattggtaatctttgttctgtgaactttttcctggaagagtagagcaagagaagagaaaaaaaaattccctcttcacatccaatggcctttgaggagctgggaagagagcaattcacacttgattatcttacatcagataaattagcagcctctgaattgttgggcagtctggcagtggagctctccccggtctgacagccactccagaggccatgcttcgtttcttgccagatttggctttcagcttcctgttaattctggctttgggccaggcagtccaatttcaagaatatgtctttctccaatttctgggcttagataaggcgccttcaccccagaagttccaacctgtgccttatatcttgaagaaaattttccaggatcgcgaggcagcagcgaccactggggtctcccgagacttatgctacgtaaaggagctgggcgtccgcgggaatgtacttcgctttctcccagaccaaggtaaggaaatagagtgttatccagaaaaacatctggaactgggtggtgtgaagaaaggaaaggacaataggaaatgacaattactgatggccttgtgctggtatttttcatattttgtctcatttaattccagccacgatcctgagaggaagttagatattcttatcaagttcctaacagtaaggaaattaggctcagacagtaggtaacctgtaatctattcaagatcatacagctagtgtgtgagaacaaagtcaggatttgaaataggtttttgttttctgaatcaactgctttgtgcttcagttgagatgaaagaggtgagggaggaatcagagctcagtctcccaccctgcagcccatatatacacatcctgccgtcttccatgtggcaagcagggtat

SEQ ID NO: 68483 - DNA, 1473 bp, Homo sapiens
tgggccaccgcgcccggcctttttcttaatttttaaaaatattaaagttttatcccattcctgttgaaccatattcctgatttaaaagttggaaacgtggtgaacctagaagtatttgttgctgggtttgtcttcaggttctgttgctcggttttctagttccccacctagtctgggttactctgcagctacttttgcattacaatggccttggtgagactggtagacgggattaactgagaattcacaagggtgggtcagtagggggtgtgcccgccaggaggggtgggtctaaggtgatagagccttcattataaatctagagactccaggattttaacgttctgctggactgagctggttgcctcatgttattatgcaggcaactcactttatcccaatttcttgatacttttccttctggaggtcctatttctctaacatcttccagaaaagtcttaaagctgccttaaccttttttccagtccacctcttaaattttttcctcctcttcctctatactaacatgagtgtggatccagcttgtccccaaagcttgccttgctttgaagcatccgactgtaaagaatcttcacctatgcctgtgatttgtgggcctgaagaaaactatccatccttgcaaatgtcttctgctgagatgcctcacacggagactggtaagaaagaaatttatccttgaaaggccaagttccttaagggaaaagagagaaggagagagggttaagggatcatttccctcttgagcaatgatggaccattactataaagaagtgttattatcaactaatcctctggaaacccctttttccattataacttggtggcacctgccctttgaactatgtcccaggtctcaggagtgtgcattgagttgaaggacacagaattcggcagttgaacagtgtgcagtaagtttgagaacctatgggcttaggcatggtggaaacaaaaatgtatcgttatagttaaatgaaggtgatgtgtacatcttcacatagtgctggacacatgtgaataaatagcagatttattgctaattagccagaagacctaacgtcatagctcagggatgagcatgattttgttttgccaaaaatggcatggcaaatcacgatgagatttctgtaatacataatttgggtaattctttctatgtcagtaacggctgtctcttctccattctctgggtttgtggatgttactgggcagctctgagtttgggagcacctcccatgtctaattctcctaagtcctgggaagcgttgacccaactttatggtaaagataattccagaaagtttaatctactgacagtcaaacagaatgtagctagaagtccagtttggcttcaaaacctgtgctagtactcatgcttctgactggtagctgcaaggggtgggggatactcgggatactcataaagccgctaccacttttttgaaaatcaatttt

SEQ ID NO: 68484 - DNA, 1004 bp, Homo sapiens
cctccatcctaattttaaaaaaaaggggtagcgccgctcagcaatgcattggccaccattatagatctctcccaacgcagtctattatgtacaaaatggagatactgataagacttcttggagtaatactatataaagcttgccaaagtgccagggctgcttaagaaattgcttcttattacttagatctggggttctgggaattatcaaagtactttgaaaacaatttttttaaaggatattttaatatttgaaaaattttagacaaaagtgtccttttatttgttcccaacagtctctcctcttccttcctccatggatctgcttattcaggacagccctgattcttccaccagtcccaaaggcaaacaacccacttctgcagagaagagtgtcgcaaaaaaggaagacaaggtcccggtcaagaaacagaagaccagaactgtgttctcttccacccagctgtgtgtactcaatgatagatttcagagacagaaatacctcagcctccagcagatgcaagaactctccaacatcctgaacctcagctacaaacaggtaggcttgttttgtccttggaataaggtgaacaaaaattggactaatttgcatggctaagacctctgtggatgcatgtagatgtgtgtactatgtgtccgtacatcgcctcttgcaaataatttatgaagatgaaatgcttttgtaacttccttcacctctttctttccttaaatattctattatgtgaataattatgtcataatttaaccactttcttgcacagaccaatattgtgaaaatctttccaacgtttccttaataaaaaagaagtatctaactccacttaccagggtaggagaaaccctaactcacactggttctcattaaaataaaaactttttttttcctttttttctttctgccagcaactccagcttgttttgttttttatctgtgtgcattcaataaggccaatcattgtttattacttgttggccattttc

SEQ ID NO: 68485 - DNA, 1022 bp, Homo sapiens
ggaaacttcattctgttctttcctttcagtgatctttcaatcttgtccatccctgaaacacacaactccagtcacagacagttctggttgtccttgtaccctttctgttaatccctccttctctttcagaaggcctcagcacctacctaccccagcctttactcttcctaccaccagggatgcctggtgaacccgactgggaaccttccaatgtggagcaaccagacctggaacaattcaacctggagcaaccagacccagaacatccagtcctggagcaaccactcctggaacactcagacctggtgcacccaatcctggaacaatcaggcctggaacagtcccttctataactgtggagaggaatctctgcagtcctgcatgcagttccagccaaattctcctgccagtgacttggaggctgccttggaagctgctggggaaggccttaatgtaatacagcagaccactaggtattttagtactccacaaaccatggatttattcctaaactactccatgaacatgcaacctgaagacgtgtgaagatgagtgaaactgatattactcaatttcagtctggacactggctgaatccttcctctcccctcctcccatccctcataggatttttcttgtttggaaaccacgtgttctggtttccatgatgcccatccagtcaatctcatggagggtggagtatggttggagcctaatcagcgaggtttctttttttttttttttcctattggatcttcctggagaaaatactttttttttttttttttttgaaacggagtcttgctctgtcgcccaggctggagtgcagtggcgcggtcttggctcactgcaagctccgtctcccgggttcacgccattctcctgcctcagcctcccgagcagctgggactacaggcgcccgccacctcgcccggctaatattttgtatttttagtagagacggggtttcactgtgttagccaggatggtctcgatctcctgaccttgtgatccacccgcct

SEQ ID NO: 68486 - DNA, 3550 bp, Homo sapiens
ggggaccaacctgactatcatggtgaaaccctgtttctacaataaatacaaaaattaggccgggtgtcgtggctcatgactgtaatcccagtgagcgagatcacaccattgcggtagcacacacctgtagtcctagctactcagaagactgaggcaagagaatcacttaaacccaggaggtgttcatggtgagctgtgatcaaccttctgctctccagcctgggtgacagagcgagattccgtctcaaaaaaaaaaaaattcataaatagagatggagttgcccaggttagtctcaaactgctgggttccagtgatcctcccaccttgacctcccaaagtgctgggattatgggcgtgagccaccgcactcggcccagaaacacagattttaaaaataatactcaaaagtccaaaaatactcagtagacatttggaagcatctaactgtaatgaaatggaatgacagaaagaaaactagagagaactacagtaagttagcaatggaatcataagcgaatctgaagaaacctgttttcattaaatatggaagggttatagcttgaagcctattggaaatatgaatgtgaaggaaattgactttgtcaatgaccagatttttatatcaaccttccttttttctgtcctttctctagcactatttaggagcctacgtttttattatcttcaccggcttcctcattaccttcttggcttttaccttcttcaaagtccctgagacccgtggcaggacttttgaggatatcacacgggcctttgaagggcaggcacacggtgcagatagatctggaaaggacggcgtcatggagatgaacagcatcgagcctgctaaggagaccaccaccaatgtctaagtcgtgcctccttccacctccctcccggcatgggaaagccacctctccctcaacaagggagagacctcatcaggatgaacccaggacgcttctgaatgctgctacttaattcctttctcatcccacgcactccatgagcaccccaaggctgcggtttgttggatcttcaatggctttttaaattttatttcctggacatcctcttctgcttaggagagaccgagtgaacctaccttcatttcaggagggattggccgcttggcacatgacaactttgccagcttttcctcccttgggttctgatattgccgcactaggggatataggagaggaaaagtaaggtgcagttcccccaacctcagacttaccaggaagcagatacatatgagtgtggaagccggagggtgtttatgtaagagcaccttcctcacttccatacagctctacgtggcaaattaacttgagttttatttattttatcctctggtttaattacataattttttttttttaactttaagtttcaggatacatgtgccgaatgtgcaggtttgttacataggtatatatatgccatgatggaaatatttatttttttaagcgtaattttgccaaataataaaaacagaaggaaattgagattagagggaggtgtttaaagagaggttatagagtagaagatttgatgctggagaggttaaggtgcaataagaatttagggagaaatgttgttcattattggagggtaaatgatgtggtgcctgaggtctgtacgttacctcttaacaatttctgtccttcagatggaaactctttaacttctcgtaaaagtcatatacctatataataaagctactgatttcctttggagcttttttctttaagataatagtttacatgtagtagtacttgaaatctaggattattaactaatatgggcattgtagttaatgatggttgatgggttctaattttggatggagtccagggaagagaaagtgatttctagaaagcctgttcccctcactggatgaaataactccttcttgtagtagtctcattacttttgaagtaatcccgccacctatctcgtgggagagccatccaaataagaaacctaaaataattggttcttggtagagattcattatttttccactttgttctttaggagattttaggtgttgattttctgttgtattttaactcatacctttaaaggaattccccaaagaatgtttatagcaaacttggaatttgtaacctcagctctgggagaggatttttttctgagcgattattatctaaagtgtgttgttgctttaggctcacggcacgcttgcgtatgtctgttaccatgtcactgtggtcctatgccgaatgccctcaggggacttgaatctttccaataaaccaggtttagacagtatgagtcaatgtgcagtgtagcccacacttgagaggatgaatgtatgtgcactgtcactttgctctgggtggaagtacgttattgttgacttattttctctgtgtttgttcctacagcccctttttcatatgttgctcagtctccctttcccttcttggtgcttacacatctcagaccctttagccaaacccttgtcagtgacagtattttggttcttagttctcactgttccctctgctcctggagcctttgaataaaaatgcacgtagctgaggccggatgcggtggctcacgcctgtaatcccagcactttgggaggcctaggcgggcggtcaggggttcgagaccagtctggccaacatcgtgaaaccctgtctctactaaaaatgcaaaaattagccgggcgtggtggcgggcgcctgtaatcccagctacttgggaagctgaggcgggagaatcatgtgaacccgggacgcaggggttgcagtgagcggagatcgcatcattgcactctagcctgggccacagggcgagactccgtctcaaaaaaaaaaaaatgcacatagctatcaagtgtgctttagcttgaaaaggtgaccttgcaacttcatgtcaacttctggctcctcaaacagtaggttggcagtaaggcagggtcccatttctcactgagaagattgtgaatatttccatatggattttctattgttactctggttctttgttttaaaataaaaattctgaatgtacacgacattatgggcttatttactttttgtccttcctgtaaccacaaaatgagctctaaatcctgacttggctactcagtgcctgttgactttgagacttgtatgagaccctcatactcatgagactgtgttcttagagtctcatacataagagaatagcaatatgtgtttattatgtagattaaatgaaaaagctttcgtggccaggcgcggtggctcacgcctgtaatcccagcactttgggaggccaaggcgggtggatcccctgaggtcggaagttcaagaccagcgtgaccaacatggagaaactccgtctctactaaaaatacaaaaattagctgggcatgatggcgcattcctgtaatcccagctacttgggaaggctgaggcaggcaaatcgcttaaacctgggaggcggaggttgcggtgagcagagatcgcgccattgtactccaccctgggcaacaagagcgaaactccgtctcaaaagaaaacagct

SEQ ID NO: 68487 - DNA, 1200 bp, Homo sapiens
tgctgcctcagcctcccaggtagctgggattataggcacgtgccaccacgctcagctaatttttgtacttcttagtagagactgtgtttcaccatgttagccaggctggtctccaactcttgacctcagataatccacctgccttggcgtgagccacagctcctggccaaaaaaaaaatttttttttaattaggcaggtgtggtggcacatgcttcaagtccaagcgatttgagaggctgaggtgggaggattgcttatgcccaggagatcgatgatgcagtgagctattgtagtgccactgccctccagcatgggcaacagagtaagaccctgtctcaaaaaataaaaataaaaataaatccaagccttttgactccacagccactctttgtattgtacgtcagggacaggaggagcttgccgttaattgcttctgggaacctagatactaggttacactgtctttaaatttaattttctctgttccttgctcttacaggataactataatgggatgagctttgtctgtattggggctatcttggtctttgtagccttctttgaaattggaccaggccccattccctggtttattgtggccgaactcttcagccagggcccccgcccagctgcgatggcagtggccggctgctccaactggacctccaacttcctagtcggattgctcttcccctccgctgctgtaagtaaactcaccttatcttaaaaccagcctatgtaagctgacatgaagatactccttaataatacagtagtctgggcctggcatggtggctcatgcctgtaatcctagcactgtgggaggctgaggcgggtggatcacctgaggtcaggagttcaagaccagcctggccaacatggtgaaattcaaaaattagctgggcatggtggtgcatgcctgtaattccagctacttgggagatcgaggaaggagaatcgcttaaacctgggaggtggaggttgcagcgagctgagatcgcgttactgcactctagcctgctcgatggaagcaagactccatccctaaataaataaaaaaatacagcagtccctcctcttcttcagtttcagttacctgtagtctaaaaatattaaatggaaaattgcagaaataaataattcataaagtttaatttgcggccagacacagtggctcaagcctgtaattccagcacttt

SEQ ID NO: 68488 - DNA, 1103 bp, Homo sapiens
gggccttttatgcagacttaattggttctccatgattgaagcatggacaactgttctgacctgtgattggacaaaaagggaatgatctgaacccagctgggcctgtctgcttagatgatttgttggcctctctgtagcgtttcttcctctagggtgtggggcaggaccctctctgaaatgagggttttatgacccacagtcagattagcgtcctgccaagtgggagggcaggagaaagtcagagaagaattctgttatctgaggcctgctcctgaggcctgaagcatcccaacattatgacaaaagactctaccaagggctatggggattttgagccaggacctgtgaatggcacacaatatgtatgtatataaaatcataaatcacaggaggggtatccataacaagtgtcctgctgttggtaaggcagatttcaagtagctcagatgctgttttcatggaaaggaaaactgaagtttcatgtcatattcttcttccagctatttctggtggaaagggcaggaagaaggactctgcatatgataggccttggagggatggctttttgttccacgctcatgactgtttctttgttattaaaggtaggtgctctttgggtgaaaaaaaagggagggggaaagaagagaggttacagttgacttctgtgacacaaggggtgggttgttaaggttgcagtttgtcaataaagtcagaggagagaagcaggatgcccagagtttaagaaacatgggtcgtcagagaactggaggtaaactgttagaatccttacatttatagaacattattatagcttataaaataaattatctaatttaattcttagaataatatcaaggtaatcacacttaatagatgatgacatggtctcagtacaaagtgacatatatgagatcatatagatgggattgaaaaattcaatcctcagctgggcgcggtggctcacgcctgtaatcccagcacactgggagggtgaggcaggcggatcacctgatgtcgagagttcaagaccagcctgaccaacatggagaaaccccgtctctattaaaaatagaaaattagccaggagtggtggtgcatgcctc

SEQ ID NO: 68489 - DNA, 1098 bp, Homo sapiens
aacaatgtaaatgagtagctagaattaagaacatttagagagagaaaggagggccaggtgcggtggctcatgcctgtaatcctagcactttgggaggccaaggcgagcaggtcacttgaggtcaggagtacgagaccagcctggccaacaaggtgaaaacccatctctacttaaactacaaaaattagctgcgtgtggttgcaggcacctgtagtccagctactcaggaggctgaggcaggagaatcgcttgaatctgggaggtggaggtagcagtgagctgagattgtgccactgcactcctgcctgggtgacagatccagactaggagataagatacagaagataattcatttgcagaagggatattagtattgaacgaaaacctagaaaaaggacttcttacccactgggacttttaagtttatttttgagggttctgtgtaactggtgtgcagaattgcatcaaagctgcatgttttcttttctcctaggtgttctattactcaacaggaatcttcaaggatgcaggtgttcaagagcccatctatgccaccatcggcgcgggtgtggttaatactatcttcactgtagtttctgtaagttggatggtttggtaattttgaggggagaaaagaatccttgctacagatgttcaaagatggattgcatgaccctaccatcatttagttacctttttgttgcttaattttcctttgggaaaaagagataaatttaatgttggatgtagtcttcactcttcaagcaaatatgggatggatgggaaaggagggagtatagaagggactatatagtatgctttgaacttggaattggaggaaaggtgcttggaaaaactctcaagctctgttactccactgtttttacactaaaacaacaataatcaacagaagttatctgtgatccccagaatatgtgagaatttttccccgtgaggtgtgcaatcagttccgtagtggacaccatctaggtgtcctgcgattttttaattatgacactgtctacctggagatagcatcagatctcacaggttggtggcccagttcccaagactgccccccactcctgatgccagtca

SEQ ID NO: 68490 - DNA, 2888 bp, Homo sapiens
ctactaaaaatacaaaaaattagccgggcgtggtggcatgcgcctgcaatcccagctgcttggaagctgaggcaggagaatctcttgagcctgggaggcgcaggttgcagtgagccgagatcctgccactgcactccagcctgggtgacagaccaagactccgtctccaaaaaaaaaaaaaaaaaatgccaattagatattctagaaatgcaattggaattcacatttaaaaatcggtaaagcaacctgttttacttgattatgttgttcttttgtttttttaccccccaagaaagagggtcttgctctgtcacccgggctggagtgtaatggcccaatcatagctcactacagcttcgacctccgacctcagctccctgagtgcctgggactacaggcgggcaccatcacacctggttcccaactagaaatgttctgataatagaaagtgaaaaacaaaagttagattaaaaaaaaaagggatgatatgagcctggagaagaacagaataatgaggacagaggagaagttaggagcctctcactttgctaattctactttgtctttgattaaccttacaggcgcaattcaatgctgattgtcaacctgttggctgtcactggtggctgctttatgggactgtgtaaagtagctaagtcggttgaaatgctgatcctgggtcgcttggttattggcctcttctgcggactctgcacaggttttgtgcccatgtacattggagagatctcgcctactgccctgcggggtgcctttggcactctcaaccagctgggcatcgttgttggaattctggtggcccaggtactctagaacttctcatacttaatgagtgttagtttcatgggtcattaaaaaagttaacataggtaaagcactgaagaatatctggcacatgttcaattacatatggaagttttagataatagatagtagctgaagaagcaggctgaggccgggcgctgtggctcacgcctgtaatcccagcactttgggaggccgaggtgggcagatcacgaggtcagcagatgaagaccagcctggctaacatggtgaaaccccatctctactaaaaacacaaaaaattggtcgggcgtggtagcgggcacctgtagtcccagctactccggaggctgaggcgggagaatggcgtgaacccggtaggcagagtttgcagtgagccgagattgtgccactgatctccagcctgggtgacagagcaagactccgtctcaaaaaaaaaaaaaaaaaaaaaaccatgctgagtagagaaaggaaaagaaacacaatttgtttattttttcacatggtaaaagaatgtatgattttctgaactttttgtgttttaatgaacttgtggcctgtgaagtatggggtttatagcattatctttgtgtggtttctagatctttggtctggaattcatccttgggtctgaagagctatggccgctgctactgggttttaccatccttcctgctatcctacaaagtgcagcccttccattttgccctgaaagtcccagatttttgctcattaacagaaaagaagaggagaatgctaagcagagtgagtatccttcacaccttactacatgaattatatggttgtggtttgttttagggatgattgtactggacctactttctgttacactctttccctgcctctcagaatccaagtgaggagggttctgattactcctgagtaaaattttcagcccctaaagaatgaggtgaaaaggcgggtttaggaatggatgctatcaggcagggtgtgatggctcatgcctgtaatccagcattataagaggccgaggcgggtcacctgaggtcaggagttcaagacctgcctgaaacaacatggagaaaccctgtctctactaaaaatacaaaattagccgggcatgggggcgcatgcctgtaatcccagctacttgggaggctgaggcaggagaatcgtgtgaacccgggaagtggaggttgcagggagctgagatcatgccattgcactccagcctgggcaacaaaagtgaaactctgtctcaaaaaaaaaaaaaggaatggatgctacccatcacctcacctcgtgcggccctttcctggctgccttacaggaagaatgaatttggggcagcacattctcttttatcctttcctctttcttcttttcaccagtcctccagcggttgtggggcacccaggatgtatcccaagacatccaggagatgaaagatgagagtgcaaggatgtcacaagaaaagcaagtcaccgtgctagagctctttagagtgtccagctaccgacagcccatcatcatttccattgtgctccagctctctcagcagctctctgggatcaatgctgtgagtgtgatactttagggtcaaacgtgtcttaaagtatttcacttaaaatgccgggcatggtggcggtgtgcctctgtagtcccagctactcaggaggctgaggtaagaggatcacttgagctcaggagtttcaggttgcagtgagctataattatgccactgcattccagcctgggagacagagtgagactgtgtctctgaaatttaaaaaaaggaaaaaaaaaaaagaccctggaaggacactggcaacttcagagtgaactgactttaccagtctgtttttacaactagtatagcgagcatggtagtttaaagagggcatgatagatgatagtttaaagagggcggcacaacggaagctagcatttggcaggtagcccttgtattccatgcaaatatcagcttcctgcatttgactgtggattgtaggaagagagtattcctgtgccttctagtcaatatggatattaagagcacccttgtcccacctttttaaatactg

SEQ ID NO: 68491 - DNA, 1918 bp, Homo sapiens
agataagagactcaaagagccacccagcagtgaagacacaaactaccaccccctccaccaccaccagtgggcttccgtggagtctggggtacagatcagactgcactgtatttgtttccagaatggtcaattcttagtaatcctacccgagactgtctttttctctgccctcccagttcgtgagtggaattctatgcctacatttgcctgatgcaagtttttaaatatttccaaactgaccaacccagtttctcttaacttcttccttccccaattttctttcatttttaccaagttaacttcacattcttatctccagataagttctttagtataatctattcctttgtcttccccattaattacctaaatctcattggatgttcttttcataccactcataactcaaattctcctaatacagctccataattaataagaaacagtcatcaatcacaagttttaaggactattctctcctctgtcttccctccctccaggtcaccccagctctgatatttgccatcacagttgctacaatcggctctttccaatttggctacaacactggggtcatcaatgctcctgagaaggtgagtgccaggccacaataattagaatttagaatagggaagttattcctttaagtagggtttcaggaattcagaatttaaggccaggcatggtggcatctgcctggagtcccagctactcctgaggctgaggcttaaagatcacttgagtccaggagttaaacaccatcctgagcaacacagttagtgagggtccctccccaaactaggggattttaagacaaactttgtatctatcctgtccaagactgaagatggagacaatattggtggggaaaattagtggggtcatctaatcgaagcacaaagctcacttactcccggaacgctgggcggtgctgttcttcctcccactctttcacctcatagtgatgcacatcctgtattatcccttaggggttagttacaaagaagctgggttcccttagcagagggctggggtagactgtgaacatcggtgctgccacctactgggattttcaggacaaatagaattactattccagcgagagttaacataaattccaatacgttatctgccccttccattcctgtctatttattcccttgattctctaggaaggaaatgatccctaatgtttgtcttttgttctcatccaactgtaacagtctgttcttccaccaacccttttattttgcagatcataaaggaatttatcaataaaactttgacggacaagggaaatgccccaccctctgaggtgctgctcacgtctctctggtccttgtctgtggccatattttccgtcgggggtatgatcggctccttttccgtcggactcttcgtcaaccgctttggcaggtattgactagaaactgggcaaggaagtgggctctaccagccacattgaggacaagtgtggagagttagggcagggaggtgatgatgcctttgaataagaacaccttgaattctaatcaagggaaacctagtccaactggccccgaatatgactgcccttgcttggagctctactaccctggagagctcccacccagctgtgcaagagatgaactgtgagtgattggcctttgcagtccagctagggatagttcagaattattccctagtaaactcaactatggggtttctagaaacatacttaatttacaaggtccgaagttgtttacttgtattataaatgtttttattattttacccaggattggtaggaattatttttgtctatggcaaatgtggataatgacaaaaaaaaagtcttattctatagaagcttaacaatatgttttagaaggtagaatatattttcatttatgactaatgaaggaactgttttaatttg

SEQ ID NO: 68492 - DNA, 1054 bp, Homo sapiens
tgagacggagtctcgctctaacgcccaggctggagtgcagtggcacgatctcggctgtgcatggtggcaagctctgcctcctgggttcatgccattctcctgcctcagcctcccaagtagctgggactacaggtgcccaccaccacgcctggctaatgttttgtattttttttttttagtagagacggggtttcactgtgttagccaggatggtcttgatctcctgacctcgtgatccacccgccttggcctcccaaagtgctgggattacaggcatgagccaccgcgcctggccttgaccgtctcaattctcacctatgtctgtgcctattgtttttaccttcgtcttttatttttctttctgcacccttttgtttctgcttctgtcactgcttctctctaccagctggctttctatgacgatgccattcccatagcaacctctctctggggaagaatgaggggaaggaaaagagagagctagaatagatgggctaagagaagccagattggagttggaaggtgaccttttggattgagtcctagaacagagtacagagaaactatgaagactgataccagccaagttacactaaaccctaagaaaacacaaattgggagcccaaatccagtccctgctggcaaaactcattcagcaaatcctttctgttgtaaattaacctgtcatctattttccccttctctgtgattcagattattctttctttctgtttttagatctcatgattctttttttttttttttttttttttgagacagagttttgctcttgttgcccaggctggagtgcaatggtgtgatctcggctcaccgcaacctccgcctcccaggttcaagcaattctcctgcctcagcctcccaagtagctgggattacaagcatgcaccaccttgcctggcttattttgtatttttagtagagacagggtttctccatgtgggtcaggctggtctcgaactcctcacctcaggtcatccacctgcctcggcctcccaaagtgctgggattacaggcgtgagccactgcgcccagc

SEQ ID NO: 68493 - DNA, 1856 bp, Homo sapiens
ccattgtactccagcctgggagacaagagctccttgtcaaaaaacactccgtctcaaaaaaaaaaggagagagaaagtgcttcctgagaggaaccaaagccttcctatgagttatgctttgaattctagcgagaaatcctgttttctttccttgtttcctcctgcgtatattcaaaataaatgagtttcccaaacagttgagtgtcagataggtgaggtatttcagccttttgcacaggatctcattggagattttctgagatgtcttgctgaaatcaaggtgcgtggtgtctgtctaaggcagtggttctcaaacagtggtgatttgctcccagtggacatttggcaatacctggagatatttttgttgtcatgattacaggaaagggattacaagcttctagtggggaggggccagggattctgctaaccattctgtaatgcatgggacaagcctctgtaacaaagaattgtctggctccaaatgtcagtaatatccatatttaggactatggtatttctctgattttattaactttatgggaaaaagttagaaaagttttaaacttaatgaaataattctgcttccaactaatcactgctctctctctctttttttttttttttttttgagacagagttttgctcttgttacccaggccggagtgcaatggcaccatctcggctcaccgcaacctctgcctcccaggttcaagcaagcctcccaaatagctgggattacaggcatgtgccaccacgcccaggtaatttcgtatttttagtagagatggggtttctccatattggtcaggctggtcttgaactccgttcctcaggtgatccgcccgcctcggcctcccaaattgctgggattagaggtgtgagccaccgtgcccggcctatcactgctctcttcttgcatacaaatcatctgttaataatctttctagactttagtaggaaaataatgaagcactgtttcttttccacttttttaaaatggaaaagtttacatttttctgtcatcattctcaatctccataattttttcaatattaacagtgcccgatgattaaatttggacacaatgttcatatactgttatttaaagaaaaattatattcttaccatatcccattgcctttttggccttttgtttctcttccccatgtttattcatttgttacagttgtaaggtttttcttgaggaggtaagtaatcccacttttcttctgtcatctctaaaaactaagtaaatacaatacaatttaaactagaagctctgttcttatcttttaggacccctagtgagacatgtagctattttggaatgaggctatactaatcatgttgactagctacttattagtgagagagaagggggcagaagtcactgtcctgtcaccaggtagataagaatgtgggagacaaagaatgatgctgtctctgcacgtcctccacgtggggacattggaatcttttcctggggctgtggcatttcttttgtattgactgcagctgtcaggatcaaagaagaactaatgagacagaagtaaatagcttcattctcaggctacctgagaggagcaatgtctgatggagattaaaagatgaaaggggagaaaaattctttctcagccacacccagatacaactaagtcactcttttcacatgcttctgattcttcaaattctatgttaccacttagaatctagtggcaaaaaaaaaccttttcctaatgcttttttccttattacgtttttattatttttaagatagagaacagtgatgtttcctgatctcaatgcttttatatttagagctagaggtttattcagtcagccagtcatttatt

SEQ ID NO: 68494 - DNA, 1005 bp, Homo sapiens
ttatgacagcaagatcacctaatccaatccctgctcatttcgcagatcgggaaactgctagttggtgacagaaacgactcaaaatacaggagagacgtttttaccttaccttcagctgtctctccccagaacccttatttgataaaatgcttctcacaagctactgaatgagtgagtggaatgagctttgttggagatcccagaattgagtcattctaaaacatcattagaattatatgaagtttcactttattccacaaggatttgttagagtgcccattggccagaggtctaaatcacagccttttccctcaaggagcttaagtagatgcagtgaatgaataactagccaattacaacttacaggacacagtaccttgaagagaaattggagagggagtcaattcctaggatagcagagagatggacaacagacagaatgtgagtattaaaactgatgtcagatatcaaattggtttgtcagggttatgttgataatcacagtacctatcatcttcctaaacttttcttgtcttgataatgtgtaatatacgtaagtggtggtgggagagactattgcagccactagacttggtatattcccaaattatttttattcataagtaattactatttgccatttgtggccttttgtgctttaatattatcaagaacaataagaatgataaaatatttatgatcagcattgtaattgcaaacaggcctcagtaaaaattatacacaacttgttttgagcgaatttccttgaaaagaaccatggctatataggtgtgaagagtaacatagcgtaatatatgaatatacacaataatagctattcttttttttttttttttttttgagacagagtcttgctcctgtcgcccaggctggaatgcagtggcgtgatcttggctcactgcaacctctgcctcccaagttcaggcgattctcctgcctcagcctcccaagtggctgggactacaggtgcatgccaccacgttg

SEQ ID NO: 68495 - DNA, 1384 bp, Homo sapiens
ggaacgagggaaacttacgacttttgctaacgatcgcggcgtgctgtgtatctcctgtgccagttctgtctccccaagaccccaccccaagatgggccccatggcccacgtacccggcccccagtttcagtaggacgtgtccttatccctgaggtcctccagaaaggaacccaaccccaatggcccgtgcttcacacgctcctccccgcgccggtggagtagggggcaggagagacctgctgcctctggcgccaacctttccattcagtgcgtctttcctgcctagcccacgttcccgggccggagctgacacgggggtgggaggagccgagtgcttgctcgtcttgggcagaggcgaaagcttcttaaggtggaacaggaatgttgggctgctgggcctctaccgctgggatgtgccggcccctgcttcccaacctcgcctcccagtttttcatctcttgttccctggctccagtctaatttttaggggagtggaaatcaaacaggctgggaagaggatagaaaaataacgtagaaaagctgggcgcggtggctcacgcctgtaatcccagcactttgggaggccaagacgggcggatcacgaggtcaggagatcgagaccaccctggctaacacggtgaaaacccgtctctactaaaaatacaaaaaattagccgggcgtggtggcaggcgcctgtagtcccagctactcgggaggctgaggcaggagaatggcgtgaacccgggaggcggagcttgcagtgagtcgagatcgtgccaccgcactccagcctgggcgacaagagcgaaaactccgtctcaaaaaaaaaaaaaaaaaaaaaaggaaagttaacgtagaaaactgtaaataataaacagttatgtaaaggaaatacaaactatacagataacttcacctttatgatttaatatcttgcgttctattccccccattactttttattttttcaattcccatagagtcaatggtgaccccattatcttttaaagtagcagttagaatttttctgatggtgcaaatgtaagctcatattttgtctgataaatattactaaatgaatcgtttctatgttggtttagtttctctctaatagacctgactagagtcattaaaagaggtcagaactctgtgtctagtggcggcaggctaccccctactccgttgatcacaggtccccaggaatctggaagagtggagatgcggtcttggctgtggttcagttgtctcatttgtaaatgggaataacatttccccacctcgtaggtttagtgtcaatcctaaaagacctagtgtaaatgaaaacattgtaatctgaaaggtgtaaacagacattaggtagtattacacatacaaagcatataa

SEQ ID NO: 68496 - DNA, 1399 bp, Homo sapiens
gggtggaagagtgagactctattacacacacacacacacacacacacacacacacaaataaataaatggttagaaaacagttttccaacctataaaactatttttttttaaaaaaaaattcttcactaccctcttcccttagctaaatcaatattaacctctataatgcgtttcagtgtaatgaaagaataatggactttaaagttaggcattattacttactgtgttatcctttccatcatttagagagaaagagaggtatgacaggcttttcatgcctatttcacatatctactataaggacataataagatgtacatttggaatcttactgtgaatcatcatagtggttttttatttatatatatataaagttttattactaaggtaaatgaaaatttgtaaggtaagttaaaagtattgtcagaggacaagcaaaatcaagagttctttagattaggtcttggagtaggaaaggaactaaggctcaaggctgagggaatctgctgccatgaatatccatttacttacagaatttgttaagtatcggacactagatacacaagagaaataaggaactcatccaagaaaaacacatttaatagacttgttcctaattttttttttttttttttagagacagggtctcaccctgttgctcaggctggagtgcagtggggcgatcatagctcactgcaacctcaaattcttaggctcaggcagtcctcctgccttggcctcccaaagtgctggttataggcgtgagccacggtgcctggctgttcctaatatttttaatagcccatttacatgagctcttggtggcatgattataataagtaataactcattaatataatagatgaggaactttagagctctctaatctggatcagatttaggtacttgagggtctttgagggcagggaatcaagagggaagagaatgggaaggacttattttacagatcctgttcaaaacctgtgctaattttcactttcattttcctcctttcagctttttacctctcatcttgttaaactcattcttgttcaaatataccttgtggttgcttttttagtctttaagtattagtctttggtttcttagaagatgaattattaataacttttactttgctaatctgttttccatactcctggcaaaacaaatcacaaatacaatgttttgtaaaattcatcataaataatcttagttgttgttcaagttgattataacacgttttataaatttctgatgttttcatggccgtttgtatctccagcccagatgtctttcttgaactcgtctcatatattttactgcctactctacatctcttgaaaatctactagacatctcaaactcagcatatttaaaactgaatccctgatccttc

SEQ ID NO: 68497 - DNA, 1330 bp, Homo sapiens
accataaccagctaatttttgtatttttagaagacggggtttcaccgtgttggccagactggtctcaaactcctgacctcaagtgatccacccaccttggcctcccaaagtgctgggattacaggcttgagccaccatgctcggccagaattttattttttattgcttttattcgtgcttttccatctttttaatgatgcttattggactccaaagtcctcaagtagtagcattgtcttttacttgctttggactgtatgtaacatgaggcatctaaatagatcatgaattattcttgttgattaataggtagaaagaataggcaatccaggatagggaaatagaaatacagtcaaagattgtgggtgggcgttagtaaattaaggacatgtgcctgaggcttcctcttttcctgtcctagggcctctgactggaaattagaccagcctgattggactggtcgcctccgaatcacttcaaaagggaagactgcctatatcaaactcgaggataaagtttcaggtaatctttgcgggtgaccctctaacattaagaatattaatttggtgtgcttttataagtaccttcaatttggggactggaatggaaatactacttgttaattggggttctggattttggcttgctttactcaaaaaagtctttctcttatctgtcaggggagctctttgctcaggcaccagtagaacaatatcctggtattgctgtggagacggtgacagattctagccgctactttgtaatccggatccaggatggtactggtaagagaactgggattttgagtggaacgaagttaggaaaacaggtgaatgcacagccatgaaaagtgtttccgattgcatttatctttctttggtttacttcattttttcttccctttctctaaagttgctctagttgctaaaggaaaagtattaacatgttatttgtaatagataagcacgagttcaagatgtggtaattcatatgtagacttaaataaatgaaaaacacatatctaacaaatgaattaacacatttggcactttaggaggccgaggtgggtggatcacctgaggtcaggagtttgaggccagcctgaccaatatgatgaaaccctgtcgctactgaaaataaaaaattagccaggcgtggtggcaggtgcctgtaatcccggctactcgggtggctgagacaggagaatcacttgaattggggaagtggaggttgccgagatcacgccattgcactccagcctgggcaacaagagcaaaactccatctcaaaaaaaaaaaaaagaatgaacactttttgcccgtttattgtt

SEQ ID NO: 68498 - DNA, 1781 bp, Homo sapiens
tgacagatcatcaggcatcagattctcatagggagctcataacctagatccctcacatgtgcagttcacagtagggttcacacccctctgagaatctaatgctgccactgatctgacaggaggcggagctcaggtggtcatgcaagtgacggggagcggctgtaaatacaatgaagctttgctctctcgtgtgcaactcacctcctgctgcatggcctggtttctaacaggccacagactggtgccgggggttgggggctcctgccatagaggatacttcctagtcgagtcttcctacgttttccacagggcgcagtgctttcattggcattggcttcacagatcggggagatgccttcgactttaatgtctccttgcaggatcacttcaagtgagtgaagcttgtccttagttacgaggctgaatgcttataggaatgctgcttctcacatgaatgggcagtatctcttttcctcctggtttctttgtttcttaaactatttcattgtgaatataaatctccccattcacttttgtttccttaggtcatctttgtatctattctgtttcctttccttatagcctgcaatatatttcagatcccttgtgcagtagtttgaaatgatgctctgtcgaatttgccccgtcttttaggtggtagagggaggcctatggtaacagcagggctttatgtggggagtcgtgtgccactcttgttaccttatgtagctgacatgttttgtgacttttgcaacatttctttagcccacttgattttggtgcagctgtggttgacagcactgtgcacactgtcagcttcctacctcaagagcaagcatatctctccttttctgccttaggactctctgaagttatagaaagctaagagcaagctttaacttggaaagactaagaaactaacaccccctcaggagcagccctcaactgtggggaatgggaattggtggctaaataccatccttctggaaggggcaattctaatacgtattccgtgagatttctcagagagtccccagtggaattgaaccccagttgttttctttcttggcttttttcccttctgtttctcactcttttttatctctcactgtgttttctggaatctcatttcataaaagtaaatacacccaaatttgtatgtcagactctgctttcaggaaatctcaaactaagataacttgctgtgttcccaaaggtgggtaaagcaggaatctgagatttccaaggaatctcaagaaatggatgctcgtcctaagttggatctgggcttcaaggaaggacaaaccatcaagttgtgtatcggggtgagtatggtttttaaaaattttgttttcctgtgcttccataagcctatgacatctttctcttgctcttctttttttcttttgtagaacattacaaacaagaaaggaggtgcttctaagcccaggactgcaaggggtgggggtctgagcttactcccacccccgccaggaggcaaagtcactattcccccaccatcctcctcagttgccatcagcaatcatgtcaccccaccacccattccgaaatctaaccatggaggcagtgatgcaggtaaatctagtacttctaattttgagaaatccaatcttatgttttaattaagcaacacctgtttgtcaaggagagttaatgtttttgctatgaaatagctcatggtactgacaaggtgattctgtcagcttctagcaaggaatcaaagcttttctagtgaactaagagtcatagtatctcatagg

SEQ ID NO: 68499 - DNA, 2029 bp, Homo sapiens
tggccttgaacttctggacttcagtgatcctcctgccttggccccctaaaatgctgggattacaggtgtgagccactgcatctggccagttctttgcagttttgtcatgtgtaggttcatggatccaccatcatttcaggttatagaacagtttaatcactacaaagatcccctgtgtcaaccttacacaaccacacccatctccctctcatcctttcttcccccattcctaacgcttggcaatcaccagtctgttctccatctttataattttgtcacttcaggaatgttctatgaaaggaatcatacagcatgtaacctttgggacaggcttttcccactcagcataattcccttgagattcattcaagttgtgtgtcaatagtctgtttctttttattgctgaatagtattccatggtatggatataccagtgtgtgtaactattgcccatggaatgacatctaggttgtttacagtttttgaccattatgaataaagctgccgtggcatttgtatacagatttttgtgcaaacataaattctcatctccaagattttttttttttttttttttttttgagacggagtctcgctctgtcgcccaggccggactgcggactgcagtggcgcaatctcggctcactgcaagctccgcttcccgggttcacgccattctcctgcctcagcctcccgagtagctgggactacaggcgcccgccaccgcgcccggctaattttttgtatttttagtagagacggggtttcaccttgttagccaggatggtctcgatctcctgacctcatgatccacccgcctcggcctcccaaagtgctgggattacaggcgtgagccaccgcgcccggcccttccaagattttgattatgtttttcttttttcttttcttaccttgtgtttagatatccttttagatttggattctcctgctcctgtcacgacaccagcaccaactccagtttctgtaagcaatgacttgtggggagacttcagcactgcctccaggtaatgggcatagtgaaactagcatactctcaatcagggtgtaggagatatgtacagtcaattgaaatctttgatctggagaagcaatggatatgcaggtcacatagagtcttttggaagagttctagtgaaggaaatatagtagtgctgggaatggggggacaaaaaagctgtaggatgaggtttgagtgggatatttcaggcctttgtaagtagaattgccatgaagtgtggttttggaaattctaggcagtgatttcttagaaactattaagtaaagaatggagttgttatcctaatattatgtctctggctttctctgttctcctgtcttgcagctctgttccaaaccaggcaccacagccatccaactgggtccagttctgaatggcattggcaggacattaaggacagacttgaggaataaaaatgaccttgagggcaccaatctgtgagggaagttaggaacccatttcctccccagaaccagaatgactggacaatctttttcatagcttctccatcacattcaagctggtttatgtcactcccctgtgttgttacttgtacagccaagaaagtatctgttatctcctgcgtagtaccaaggtaggggactagtggatcttatcatagttttggctgactatgcagggcttaaaaggccagcgtctgtttgagggggaatgacctctaacatctgtaaaatttgtctcatcttttaatttctttaacttatttcaaaatcatctcatgacccttgtgtgcctctttgtgaagccctatttagcaatttcaggggagtcaaaaaccttgcaacttccttctccactaacccaggactaaaaatggacaggctgacctcagtgtttacaaattcagaattttgataggggtagatatggagaaagacctatttcctgggtctctgctgtgtagtctccttcaggcttattgtgctcagtgaacatccagtgctgggtgcagctccatcaccctcttgt

SEQ ID NO: 68500 - DNA, 1349 bp, Homo sapiens
tccactactcttttctgtttgttgagtttgaattgtgttaacatctttgatcagtgggtgtatctgtaatgaaggaggttcaagaggctgtgctttccaagtgatagtctataggagtgtttaatttcttgcagctccatctggttgctgcatttgaagcatggcattaatttgtatttgccctgttctttgacctaaagttgaagggtttagagtttttaacctgatctgtagagcagagaggttgaaagcacttaactcttgtttagtatcctcattgccttgctgcctgggtatctggcccctttccataaacatttcttttcagttcatgtagttctttaatagaaagctgctattatgtatattgtcatttgtgaaggaagttggagagtcacagctttactgtgacaggttttgcccaaggctttgatacctgtcacccagggtatcttaaaagcaagttgttctcccactactttcctttccctctgccctgccattcctattacaatgctgtgaaaaaagttctgcttcttaggtgaatgggtactttctattttgtttctaaacgagcaattttgaggatgaaatgggaagatatcattgcttcctttttgcacctattgggtatgtacactctggccgaagggagtccttatgtttagtttcaaaatatattactttcctggattctcttcttcactttttctgactttgggtccattttcttttcattgcctccttttccaggcagctctattcttgcagagccatagcaggacatgttaaaattccaatagaaaacactaaaaggaaagtctgtggaatcactagtgactaaatactgggaacctattttctcaatcttcctccatgttgtgttctttgtattcttgagatgataatatattatgtatttgaattcctgaaaaatggaaaatgtttaagatatatgtatataaagtgtatgctgtattggtgcaataatggtaattaaaaatatgaaaaaagtgtctcttttatcttttaatttgcttatttgattaccttttaaatttaattgaccaaatataagtggaccagtagttaataaaggatatttatatcactctttattaagaaataaggcttttaagaagttgagactagacctctgtgttcatggttctaaaatgacagagcactctgtgtaatcaatgaatattcattatttattttctggtacagttaatttaatttgcttcaaattatcttcatgatctaggccacctcttatatcttaactgtaatcagcagaaatgaaagggatcagtataagagaaataactaaggtcagaaccacagac

SEQ ID NO: 68501 - DNA, 1063 bp, Homo sapiens
aaaagacaatgtgaacaatgaacaaaaacttttaaagtataccttgtgtgtacatggcatgtgaagacacagcaacctttgttttcgagttgaggaagagatgatagagcagttaattaaatcccaagaactttctaggtgagcaaaaagagttgtgttaaggcaaagacaaagaaaatgtaagattctgtgataaagacaccatcagggtccctgacttcatttatagcactgttagggagtgaatgtctgtatctcctcaaaattcattggtggaagcactaccctccaacgtaatggcatttggaggtcaaaagtttgggaggtaattaggtttaatatgaggtcatgagaatggggtcctcatgatggaattataagaagagacccggctaacgagctgtttacttcctgcgggtgctcaggctgtggccatcttccttgctgttgctcttctcattggagaagatggccctggagacggtgctgaaggacctgtggcatctgtgggcctgtttgctgtgttcactggtcaaggtactatagaccagtttgaatatgatggttgtgactattgagatgcatatctacagatgaagggtaactgagagatgctatatggctgcaccagctcctcctttgatggaatcattgcgatgatgagtccagaggacagctgggtctccaactggcagcgagtcaataactttaagccaggtgtatatgcggtgtcaaccactggtcgcttgccctaaggaatcgtgcgggagctgaaaagttgaggagtggcctacaaatccaaagacacagctataaagaccagacgcagggctgccagcgtctttgctctccacctcctgcctctgcttattttttgttctggaactaaatgggcagagcttcaaatgcttcctaccctccaattcagactcagccaactgttgagagaacagcacatcattttatcattttaccttatttggacttcaggtgggggtgggagggatttgggttggtggattaacagatggaattgaggagagagtaggatgctgactttcct

SEQ ID NO: 68502 - DNA, 1079 bp, Homo sapiens
tcagcggaatggatcccccgattagcgggggctgggccggggaggggaccggcccgagcgcgcccggggtccggggctagttgaggccggtggtcgccgctccgcggagtcggtggggagcgaggcggggcccggccttcgcgcgtgtgccgggaggcgccggcccgtggcgtgtgcgtgcgaccgggcgagccgtgtcgagggggcggcgacttcgggcgtgtaaggagtatggtttccccgccggcgagggggtgtggtaaccccgggaacgccggctggagtcggacccgcgggctgctgacctgtcctcgggattgcggcgacactccccctccccccccttcccacaaattctatggagcgaccgcgggaggaggatcacgtggtgcggtcccgcagctactgtattcgattccacgttttcctccttacgtgtaaattttagagagtgtgacagtcattccatcttttcctttgacagtctctgaatgagaaggggatgaccaaataattgcttgtccagttttgattctttaaaaatttgagcatgatgtaaatattacactacttgcccctcacccccccccaaaaaaaacccaaaccagagtggtaataatttcaatctccccttattaatatgtccttatctctgatcacacatttgttatttcactgttttatcccatttgtattggcgaatagcgatggggtggtaattctgttctgtgaggggttattgcactaaccatgctcaatgcaactgctatgtaaattctttcagtatgctgtcattttcccattagttatatatattgttaccacatctttgtggagttaggttcaactctaaataggtatagaaagtatatgggcagcctactatgcagatttttttttgtgggcttggtatgttcattatatttatgggtgttcttaattattaactataaccatttaaattgaaatgtttttaaatctcatttttgttactttcacaatattgggtaccttaaaggtcatttcttctattttaaaaaatgatttcttaaaagcaattatgagaatacttttaagat

SEQ ID NO: 68503 - DNA, 1032 bp, Homo sapiens
tgcacaatgtgcaggttagttacatatgtatacatgtgacatgctggtgcgctgcacccactaactcatcatctagcattaggtatatctcccaatgctatccctcccccctcccccaaacattttaagggcatttttacaattccttcatcaaggggagctggggatattctacgtcaggtattctggcgtgactttttcttttgtggagctttgctttctgagaccttcccaagtggcctggaaggcactgtgtggctataacttttttctaatgagcatagtatgtctttgggtacagcgtctggtcagggacacactgtggccttccctatgattgtccgcagggaagagaccgaaatgcaacccataaaaaaagtcgttccatcaggttgaattgacagtgcaggtttgcactgtacctttcccatactgtggttaaaatggaaatctcttttcaagaaaagtttcataggagaaaaagtttatcagaaacactctgtttaaggaggagggaggataaggtttactgcctgtaatatgcatggaatatcctgctgtagggaagccatagtgtttatatatttttcattttaatgagcctggtccttatcttcttttttgtgcgcgtgagacggaatttctctcttgttgcccaggctggagtgcaatagcgtgatctcggctcactgcaacctttccgccttctggaagaaattagctaggtatggtggcacatgctacttgggaggctgaggcaggataatcacttgaacccgggaagcggaggttccagcaagcctagatcacaccattgccctccagcctgggtgacaagagtgaaactctatctcaaaataaataaataaataaaaataaaaagttattaaatattcagaactgctaaccctagagcatccgacattaagttagcatagttccttcctagcatgtgtgtaagctgagttactaccataatccagtttagataccctgcttgtttaacagagacttaggcctttgaggcagtgg

SEQ ID NO: 68504 - DNA, 1151 bp, Homo sapiens
aatgtaaaattaaccacagatacaaaaatatacttaagcggggtttctagtgatgggaaagatggaaatatattgattggcatttcatttcatatcaagaacagaatgttgagggaggagataaaacaaaaagtcagtgatcagattaaagtatattcctagacaatatataatattgggaagggtatttaaactttctgctaagtgacgagctacagttattaagttgcagtgccagtttccccaaggaaaaatggagaaatcatatttctgaagaggtggtcagtttccatattactagtgtataaaaattttagtttgaatgaaaaggaaacaatatctctacacgtgttttttcctgtttatataattagtatataatcacggcatttatttgtatgaaatccagaaatcaagtagatttcttgatttaccttttatgtatattttttcttccatctaggtagacgttacatccaagaggaaataatccaggcaaggaagcacaagctgatcaagatgtgtagttctgtggctgccaagttgtggtttttgacagatcgtcgcatcagggaagactatcctcaaaaagagattttacgagcattgaaggccaaatgttgtgaggaggaactggactttagggctgtggtgatggatgaggtggtgctgacaatcgagcaaggaaacctgggtaagtctgtatactaagtgatcttttggatttttacctagaatatgatgaatctgcatgttttaggaataattaggacagaggaattcttagccttgtcattactaagtatcttctaattataaggtctaatatattttatgaaagtaatataaacactaatatttattaactttattaggaaacagttgtgagggaaattaaaggtgaccttcaaaacagataaacaataaaacaaagtaggcgcatatctgtagttccagaggctaaggtgggaggatcacttgaacccacaagttcgagtccagcctgggcaacattgtaagacacagtttcttaaaaataaaagtaaagatgattctcaagttcctttcatttttactgtcttctatttttaaaataccttgtttataaggtgctgctaaggaaatttgtatctttggaggttctttgatta

SEQ ID NO: 68505 - DNA, 1150 bp, Homo sapiens
cgcctcccttctaccctctggccggctcacccggcgtatgtccctgctctccgtggtgtccactgccagtgagactagtgagccggagctgggtcccccagccagcactgctgttgacaacatgagtgcaagttccagctctgttgacagcgaccctgaaagcacggagcgagagctgctcaccaagctcccagggggcctgttcaacatgaaccagctgctagccaatgaaatcaaactactggtggactgactccactggtaattaaccaacaaaacccttgtaaaactttctttcttcttttctatttttaaaaccaacttgcaatgctgttcatggaggatgctcaggaagatgagagaaaattagtaggattagttggagagagtgggagatagatgagacctctgctagtaagatgttactttcatttacaaatcctacaaatagagaggcagaataggtggggtatagaaaaatgtcaggctctcatagttacccttttaaattgctaaaaaatgtgtatgctcataggccatgaggaacaaatactttttttttttcatggtcccttgcttttgtttttgtacaaaaaaaaatggttttgctacaaatatccaagtagcataacttcacattgtgttggaagatttgtcatcagtgaggaaaacatctgcataaattacaggaatttttgtattatacagctctgaaaattctgccatttccttattaactagcagctttagtttgtagtttatgaaatcttgaggggctcttttactgggatttcttatttttttgttttttcccgcttaatttggtgggaggtcaaattgaatataacccaataaaggcttcttaatgacaaaattggcatgtttgcatgatgaaatggaaatgaacagtattgcaatgtccggtatacaaaataacattaattcaatgtagataaaattacactagtttaaaatatgtgcattcacttgtatttgttagtgttttagtcttttttgaaagatgtgctctgttaatgttgcttttttttttttttttaatacatgctagtctaacatttcctgctctatgcctgcatctttaacaatggccaaagtgaagaaaatgctaccttttttgttaacaagacac

SEQ ID NO: 68506 - DNA, 1043 bp, Homo sapiens
ccttaaaacatagggtgagtagatgcttttttaggcctttttgtgtatatgtacgttgtttgtttttttccttttgtttctagcctgttcagtgtacagtttattcaaggctacatgcttttctttaatgcttctggctatgcattttctctttttacatataggatttgggattgggggtgggttggatgtttttgtttggggacttatttagtagtattgagtctcttatagccctactcttaagccttcaatactgtccactctttatattcctttacttgcagaatttataaaagcccccaaactgcatataatatgagcctttaaaacatgggtaaaactaatcccattgatgggtttggatggtatgttaagaaatggagatgctgcagagcccaacgtaattttttaaacagcaagttttccatctccctacgaatcctctgaagcttttacccaagccctttcttgcctctccagtgctattttccttcagatggaccttaaacataatttcttggacactactagagagacttcgaggcaataataaaagatcagtattaaccagctataacagaggtttgatcatgcttacttgtacagtttttcccccgttttaaaaaggaatgtaataaaatttgttttttccatagaattaaataatattaaaattgagtgaaaggttgattgttgatgaatagaatagtacctctcatctgtgcagtgtctcatttcacctcagagaaaaggatacataagaggagtttgtaatttatcttaggatattctaattgcatttaaaagaacttatcttgcgcagggtaaatgggggactcacatacatatattaatacctctgactcattaacagaaagaaatacttggtacttctttcgctgaatgaccatactgtggaggatgcatactatttggtatagagaaataaatgaggaagaaagaactgcttaattaaattatcattcatatgttcatatagagaccatctggttgccatgtgtattatgacacatacactt

SEQ ID NO: 68507 - DNA, 4427 bp, Homo sapiens
cctggaacagtagaaaaacccaacaagagacttggcattcatcaagcacattatcagactttgagaacatattgaaggcattgactttgaaaatcatctctttttctcaagaagaaagcaatggagaagcaaatttgtttcattcagtgaatccccagtttggggcttgtggggcttagagacattgtgaaatcaaatcttgtgttatacttttctcctggctcactttttttgagaaggtttatgggctatttggctggtgagacacgatcccctcctaagaaaatgtaggtgctcagacaggtaaccactgctgctactgtttttatttgtttgtttgttcaattttatttaagatttgtttttgttgtactaggattttaaaaaatgtaatatattgcaggatttataaccaggttcactgactgcttgcttgctttctttttttttttttttttttttttttcttcttaaaaaaacaaaacaaagtttcatttaaaatacatttaggcacctttggagcttggattttggaatgtttcagtagtggacagaaatctgctgttggaatcttctagtcttccaggtttaatttgaaatgtttttagttttgttttggatttttgtgtggtattttatttcctttataccaatgccattttgccatgctgttttggggtggctgcctaactctagtgaaaattctttctatattaatgaaagtttggcctttgaagatccttaatgttttgcattttttacattgtttttaaagaaatattctaactgcttgcactgttactgttctttaccagccttttcaggagccaaaaaaacaaatacaaacaaacaaaaaaatacccagagaaaaaactttccttcttcccccttcctgatgatgagtgagaagtattgagaactttcggggtcagtgcccttctaaactccccttcccccaataatgcagctgtataatgaatggtaaatgcaccggtttggattcaggcacagccccagtctgcctacaggtaatttaactctttctcctttctttccatcactaggctaactttctttttttaaaacttcctttctttacgtactttaaaaagtaaccatgggtttgtcataattctcacttaaaaataatgcataaatgtatctagcaaataatatgattaaagaagagcttttgggggtaaagtttgacttggttatgatatactcaagacttgggaattttgtttagccatttagatgactccatttcttgcatatatgtctataattaagtatttcagagtgtgaattttttggctttgtttttgttttgggtttgtttgtttcttccattgtgctactctggcttaagctttttcaggggttggtgttccgaatacacagtgagctcacagtataaagacatcaattaggagttgacaggtatggaaaactagagttttgaaaggtaaaattaggctctaggttatatatatggtaaaaactcaacatagcattcattttaccttagtgcttctctctgtgactttataaaagtgaaagggaatagtaagacgaagataatacaaaaaaatttagttcttttaggagcaatgtgatttcagaactaatcgttttagcatttctaagatactagttctaacaaggagatgtgagcagtttgagattatcagaaaatcatggtttaaaccttcaaaaattacaggtttgaacagataggaggacatttctgaagcacaagatggctaagcacattaaccaaggacataaaatgtcagggataggactacaactcgtccattttaatagcctttctgttaggtaataaactaaactatcctctcctccgtctttaccccagtctacctacccattcttcctttctcctatacttcctaaagttttagttctgagcttttattattttgggatattgtcatctttctaataggtagaattttagtgaaagtaatcaggaccttttcaagatagacttctgcataatttcatcctgtggctttggacgtactatccaaagaggctgtacatccagcaagtcactagttagtgaataggaattcttggcgtgtaatgccatttcttgtagctgaaggaagacatgtgataagtgattaacctgttctgtgcttcagttgactcttataaggacagtcattccctttaagcatcttaagacaaaaatatttatctgttgaattggaatttactaacagagggaatttgaattggaatttacttccagctgcactcatgcaagaatttgtgatgtatactaaaaaataaaaaaaggctcattcaggagagccttgtactcagcaagagtggctaacattagagcatacagactatgtgattgtataaggcatggagagttaaacaacctccagtcagctgcctgtttgaataccactgacttgttaagaatgatcttgcttttagattttaccatattcaaacttattaggtgagccttatatagcatatatacctggctgctattgtggggtttgggaacatgaggggtggggtgaactgttgttgttttaggtttcagtcagacagacatccctgtgcctcagttcccagaagcacagcaggcctctaggagcatccgtgggaacggcgcagtcctgacatcaccaactctcctgctcaggctcatcccatatacagaggtcaaagggtggggtttgagatcgggggaaggaatgagaaagtagaagcaatgtcacttcagtgccactgttgactagtctttggtgcttatgtcagtatttgttttatttcctgatttttttaaagttggcaaaactacatatttttatcttgatgaaggcagtgggagggtggaacaaaaacaagccattactgctatttctagttcatttactggagactgtcccttaatagctaatgtagaataaatttgaaacatagacctagatgacaaaaagaatgggaatagaaatgaatctcaggatttgaacaaacagaagacgtttatgctgtgttgatgcccagttctacaactgctattacatttgtcattctgtctccccttttcccctaattcttttatgtatgtatgtatacagtttgaggaaatgtgcatctatggtcagtcctttttaaaagacttaatgaatttattactcttttgcaaaaaatatacccactgcttatatgggcatacaaatgctaccctattttaaatgtaggtggcgtatgtgttcgtgttttaatgtattcagagccattgggcaataagcagtccagaacattgaaaactcaagcaggtaaagcacctaacacccttagtttctagaattactttaaaaaacttttatattgctgcatcttccacagttctttgggtagtctctgaacttaaaatttgtaggagttgtagactacctaaatttttaagttatggtatttgttcataggttgtaggggtaggtaaagaaggaaacagacaagaaaatggcttcttgaggtggcagctgctgagtggctaaatcttaccactttctttctactttttttggaaattttcccagcttagcatgaacatggatcatacagtgtttgattttatgtgattgagatttttgttttttatttttggagggaaggtcttggagaaacattaaaaagttggtgtatgtgcaaaaatacgaaatgttaaacaaaggaattttttcttatttaatctgaatggtaagcaagaactttttctatatacccttctgctgcagcagacaactaaactggtaggtggcagcagaggaaggaattcttcagattgatggctactgacttaaagtctgcataggagaagagatagagcatgacataccaagtgaagcaagggggacaaaaatggaaacaggactaagattcctgcattttgactctaaatggtaagttatctttaactaagaatgtgtttttagtctgatagcaatgttatataaattatatgattggtactatggcatgtaatcataaatgcctgtaggtccttgccttaacgttgaatttgacctcactggtaaactgtcattctttactttgaataataactaatagtatgtaaaattaggatttttctcctcagcatgttggtatatgtgacctttaattatggcaaaattatgtggacagtaaatctgaatgtttttaatttgcaagataaataaaatatgcattgttaatcattttatacaaataaaaggttctggccacgtactgtggctcacgcctgtaatcctaacactttgggagactgaggagagtggatcacctgaggtcaggagttcaaaactagcctggcaaacatggagaaaccccatctctactaaaaatacaaaaataagctggac

SEQ ID NO: 68508 - DNA, 1032 bp, Homo sapiens
tactaagagccagagccttccctggggtagtcttccaaagctctgccatgatcaaggaaacaatatatactgtggaaaaggtaggaaaagggaaccaagactattacaagttgcatgtcatatatctgctacaaccttgcagcccatttaaataatccaatcatgagtttgtgtgtatgaatatatacatatatgcacacatatatgtacatacatgcacatatatacatgtatatatacctacatatgtatacacacacatatatataatcacatactgtgtatatggatgccatatatatatatgaaaactacttttcttacaagtgtacatacatatacatacatatatatgtatgtatatacatgccttgtgtgtgtgtgtgtatacacgccatgatgcccattttaccagttttttaaattataacgttaggtcccctcacagctagataaatgaagaaaacagaagtaacttactaactgattggtgccctccatgggactgaacccagatagcatcttcacttccacaatagccatattggaagagctacggctccccacataactgagagcaggaagaagaaaacacatgtgagcctattacttcagtgcactctgcatccccaacacacacacacacacacgtacacacacacatacacagacacacacacacacaagtgtcccagctcagctcctatgaccaggtgctctgccggccaccagcaccccagctttaatcacctggtgtgaatagtgagagtcaaggatcgaggtgaagtcggttgctcacatctagcttttcctatttccacactaagactaaaggtcttcatatttgtgggagggagaatattgtatctcaacaccgtctggtaggaagaaataggtagccaaatcagacttggaaagaactttaaagattgtacagttcaaactacttttcttacaagtgagaaagaaagagagagagaaggcctaaggggaagatgctctccgactctccttcccaatgtccgctcattc

SEQ ID NO: 68509 - DNA, 4707 bp, Homo sapiens
caagcttccacggtttagcacatagtagacgctctataaatatttattgaatgttgaacgatgagagagtaattaaaaaccggtaagttgatatcataaatacaacgacaacggctcccctatcaaatgtttagtgttcccagagacagccccattgttctacatctcgttatactctggccttttcccgtttttgtcattcgaactcatatacatattgaaatcgaagcacacacaaatccctgaaatgacaaacttaaatgctatccaaaggaagttacattaggttgctgctttgaaaatgaagtcaactcctaatgggttagctgtttctgcagcattctttcccgccttcttggagttgaggtgagggattaaacaatcaaccttctctctcctttctctcattctcaaagtttttctcgccttttccttcctttcctttgcttcatttcttttcccagtctatcgtttctctaggggtcgttgctttgctctttctccctctctgtctgttggtccctttgatcctttctttctaccccttattcccagcagctccagaaaataccttctttctccccgtctcacgtcacttccctcccttctcccatctccctctcctctccgagaggtgcgttccccactagaggccagcactttcttagtttcgtccttccaaccggcgagcagaactcggagagaaagaagggggtaaaaaagaggagaaagagagcaagagaggaaaaaacccctgggcctggagcgcagaggcccgggagctgcgtcgccatggcaacgggcgccggcaggaaacgagggacgcgcgggagggagggggcggagggcgccgaggggaggcggagggacggcggggggggggtccggctgccccggaagcacctccccgcagccccctcctccagcccggcccgcagcccctggcctgcggcccccaccttctcggccgggcaggaagtgacaggcccggagcgagccccggaggcctggctgagccgcggccgggcccgcacccggagcggcgggaggggcggggagccgcggtcgcgccgggcgcctcccaccccgccctcggcgcccccgcccctccaggaaggggaggaggcgaggggagcccgccgcggaggccgagcgagcccccagcccagcctggcgactggggaccccggcacatgaggtggacgcccccggggaagacttgggtgcacagccaggcgagaaggtaaccgggcgaccgagggccggggaggggcaggacctctgggggcttggctgcgcggggatgtatcctcagccacctccatctgtgtaacgccccaggtacctcccccagttgctttccctgcctacctccggcgctgagctctgcggtccttcggctctgcctgtccgagtcttctggctattcattctgctgcgcttcatgctgtctgtccgtcaccctagctgcctctgactgctcattttcttattcatttttccttctctgactttggtccttccagccgagcatgctgtctagttatctccctgctttcgtggtccgctgggttcctcagcctccagttccttgacttctgcctctgctctctgtatgcacatgtcccagctcacttgggtcagttcattcccggcgcaccactggatccacccccttcccccagtgtatttgatttctctttgaaacatcattttcatcaaggttctatatagaacgaggacccttgggcgtctactccctgttctcttgattattaccgtgtctttggcacagtcttccctgaaccacccccttctcccgtcccccttcctatgtcccatcctttctgcatgataagagtttcgtgcttagggatattgactttctccaactctcggcccaatgctaagtccacctcaatgtcccattctaactcccttcggtaggtctgtgcgcctacccaaccccatgtatgcccacatgctaccttttaagatgaccatggcttagctactctgggggcatctgtggatcagcttctcactgtcttccagtttaatttggaaaattttgatacctggtgctgcccaaactgtttgttgtctccattttttatatttaatcttgtagtcataatgttgatcacaaatgaatacatttatgtgcccgggatccaggaatcctggttttggtggcagtttcccttgattttattgagacttttaagttggtccctttacatttttatttctagttcacaatccaaaaaaaattattaatcagaattcaggtttgggaagacgaggggtcatacggtttgtattttcacatgtgaatgtaggaattatgttctctatacctagcaaaggggtctcgtgtctctgagtccagtgaactaaatccagtaatctataaaactgtgccgtgctgcctctaatccttacccactttttttcttcacatgctgataatgaggattcatgggtctgtatctgtttagtgctttgatattttggcaaaagatgtggggagaaggtagactagttgaagctgatatgatttttcctatgtactttttgggtaatatacatgtttgcagtgacatttgctagtcctaaatgaaactaaagactggggggggataatagtgtgattggatgatactgggaatgagataataagaaatatcctcagctttattgccaaggccaagcagtttgatactttgcttgtttgtttgttttggatgcaatccctaagaccagtccattcaccctaatgaaactgttgacaacacttagcagaaattctggtttgatgtttatattcttaagccagataatattttggtgacctgatatttctagtggcccagtgcctcagaagtagagaaaatagtgtgtagcttaacaaaagagaaaaacaaaaaaaaagaatgagtaaaaaccttattgtcatttagtgctgctttggaagaatatttcttcttctcatctcctgcctctttgcttggttcttagcagtgttttcatatgtgtctttttgcaaatgtaagtgtagtccccagtgggtaaattctgacatgttagtagattataaagttgcatcttactttcttgaagattttcattgtgtgtatttctatgtttcatactccggagtcatttcttaaaatgatatattacattcagtatgaagcctcctttgcagtgaggaaacaggtataaggaaggaaagcaacatgcctgaggtgttattagtagcctgagctggaaccaggcagctatttgggctatgtgggctgtaggtgagctcttctgcttcctagttttatgaccttccatgacccactgaatgtgtctgtatcttaaggtcctcctccataaaatgaggataactactcactatcatagtgaatgacactgccttaattacagtttggtttgaagaagcatgtgttagtccaaagacttgatacttactagggcaacttctttaacctcagaaaaccttatgtctcaaattgtagaatgaggataacagtgttgactttacagcactactatgagagagatacagcataggtgaagtgcctagcccagtgaaaggaggcaactagtggctctccagtatatggtgactcatttggatgataacgatgcagatggagacaaaaatgagataaccaaaacttttaagtggaaagattttaaactgttaaaaaatgctatgggaatgtaaggtaactttggtattgtaaggtgccatctcacattctggccgttttatttaatgacagccatgagggaatacgtaaaggttgtttcttttgagactgcatagcttcaaaagatggtagtattgggaagacatggttgcaagagtgtattgaagatttgggagttttaagatgagaaatcatggcttatggaagaggaggaagattcttagatacttatggatttcctgtgtttttgaataataacatgagataacagcttgggatcaagatataaattttaaccttttactgcttccctctaggtcttgagtcagacagagcaccagccttggggaccctggaccactatcatggagactgagagcgagcagaactccaattccaccaatgggagttctagctcagggggcagctctcggccccagatagctcaaatgtcactttatgaacgacaagcagtgcaggtgagactcagctctgaggggccatggtctgtgagtcttggcttgtggtaggcagtgatgctggaaaataattgtactcagttctttttcaacaaactggggagagttgggttagatgatgactaagctgtcttccagctctgagaatcttaggagtttacaaatgtttaggcaagcaaacagtgaaatctggtctttcaaataaggatttaaaaaacacattcagtccatctagctagattctaactaaccctttctcatactggattgccaggtttttaatctttggccattcttgtaaatccccttgagtaatagaagtatcatggaactctttagagatttatttttaaacaaacagcaaattccatgtttttattaattctgttaggaaatgaggtcttttagcaaatattttggttactagaataactatacatatcataaaaatagttctaattattaaagaataagaatacagtaaagtccagttagcacta

SEQ ID NO: 68510 - DNA, 4252 bp, Homo sapiens
tcaccatgttggccaggctggtcttgaactcccgacctcaggtgatctgccctcctaggcctcccaaagtgctgggattacaggcaggagccaccacgcctggctcagaaagatctcttgaggccaggagttcaagaccagcctgggtaacatagcaagaccccatctctaaaaataaaaaaaattagctggacatggtggtgcatacctatagtcctagctacttgggaggttgaggcagtcaggaggattatttgagcctaggagtttgaggttacagtaaactatgatcacgccactgtgctccagcctggtgatagagcaggttgactttgctctaaaaaaatgaaggaaaatcagccgttgacgatttagcccaaactcccatctcctctggtttctgtccttcccatggccccctttcacacaaatacagtgatttacatagaataggagctaggagtggtccattctaaatgttttatcctctcttttcctaggctctgcaagcactgcagcggcagcccaatgcagctcagtatttccaccagttcatgctccagcagcagctcagtaatgcccagctgcatagcctggctgccgtccagcaggtgagaggtcagcagccagctggcccgagagggaggggacaggcactacaggtgggtaggggagattttttgggcatatagcatcctatactaagccaggctgcagacagcctcctccgcctcctgtccttctgtgggaggatggatgcatcttagcttctggggttgcagtaagaaccgtaaaatcactttttaggtatagagtggctgtgttatagacctgcattgtctaataacgtagtcactagccacatatcgctattgagtgcttgaaatgtggctagtctaaatggagacgtcctataagattttagagttagactacttagtacaaaaaaaggtaaaatatcagtaatttaaaaatattaattacatgtgaagtgatattttatattgggctaaataaaataaattatgaaagttaacttttcctgttttactttttaaaactttgcatagtagaaaattataaatgtggttcatattatatttatattggatacctctggactagacttttactgactcatgatatgacctgaccaaaagatctttttctagctgggcgtggtggcttacgcctgtaatgccagcactttgggaggctgaggcaggtggatcacttgaggtcaggagttcaagaccagcctggcctatatggtgaaactcattctttactaaaaatacaaaaattagctgggcgtggtggtgtgcacctgtgatcctagctactctggaggctgaggcaggagaatcgctcaaacctgggaggcggaggttgcagtgagcggagatcatgccactgcactccagcctgggtgaaagagcgagactccttctcaaaaaaaataccatctttttccacctaaaagagagtgggagctggaggacaagttgcctctctgccccaggagggttatgtggggctaattggttagcatatgtggtaatgtgaggatcactggactagtgaatatacttttctttaccctaaagtggaatctccctgtttataatgtgaaatctctatgttttgtgcttgtgatttattactagaagactgagagctttttccttcactgtctttgctatttcttgtttcccttcccctttaataggccacaattgctgccagtcggcaggccagctccccaaacaccagcactacacagcagcagactaccaccacccaggcctcggtgagtacgccctctcccactgagaggcttctctacctgggtctttgtctctgggttaaattactttgtgccgctgatctgagagtgtttattgagccgtcagtggatagttactgcttttaagtagagaatagtagtacaaggggaaagtaaccaacattaatctatattggagtctctaaagaggaagtctaaggaagagaggaaagaaaatcctggggaagaagaggagataacaaagaaggggactaatccctggactcttcaatgagaagtaaaatctgttctgtttcaatcttttgtcttctcaactgttaacactagtggttagagactgttggttttttttcactttggtaataccctaaagtagccaggatgacagttttggatatgaagacattatttatttcccccggctccatgaaagtgaaatactctgttcttgactgtgtgactctgaatttgtcagtcacgtacctttccttttacttctcccaaatccttagtcctggttcctttctgtaccacacagatcaatctggccaccacatcggccgcccagctcatcagccgatcccagagtgtgagctctcccagtgctaccaccttgacccaatctgtgctactggggaacaccacctccccacccctcaaccagtctcaggcccagatgtatctacgggtaagccacagatgcagtcaccattgccccagaggcataattgtctggccctggcaaagacttgagtgaaagcttttttttgagacagaatctcgctatgtcacccaggctggagtgcagtggcacaataatggctcactgcagcctctgcctcccaggttccagcgattctcctgcctcagcctcccaggtagctgggattacaggcatgcaccactatacctggctaatttttgtatttttagtagagacggggtttcaccatgttggccaggctggtctggaactcctgacctcaggtgatccacccgcctcggcctcccaaagtgctaggattacaggcgtgaaccaccgcgcccggccaaaagccatttttttaaaccatggtaaccctgatgttttgagagaagctgggacctacttcccatactttacttaacctggaagtgatgttctgtgttcacaggtagcctatagattaaattgagatattatgctagaaaatactggcttaacatttgactaaattagtgttagatatagtcgacctttaaacctgtggctcaagtatacaaattctgtgttatcgctcagcctacctactttctatatataagtacttgttctaaaatcctaattttctctatttctttgacgtgtgactcttggacatcaatctgtagttttctatgcattctaggttttcttctggatggttcattacatgtggagaatatgaggctcctgggttggtgtggaagaggcagggctcagctgtttaatatcttctgtttattttgtcttgtggtccttcctttccatctcttctgtctcttctttccctcttgtcctctttgctcttcctcttcctctccttgccagccacagctgggaaacctattgcaggtaaaccgaaccctgggtcggaatgtgcctctagcctcccaactcatcctgatgcctaatggggcggtggctgcagtccagcaggaggtgccatctgctcagtctcctggagttcatgcagatgcagatcaggttagtggcgatgactttacctgtgggtgggcactgggcaggatgaagggaatgaccacggacctgggtccacccttctgccccattacacttttcagaattcttactttttgtgttttgtttttccttcccttaatcaccatagaacttgaatcccatataacctttgagttaatctgagttagaaagacaaggagatttgcctgaaaatagtcttgtggatctgggaagtcttattttcaagatagggtaaatttcctcaccatccttctagtcctctgtgggtttgttttattcggagagtcttaattctctcatagtactgtcagaagagaagagattgttgagagaattcttctgttagttagatgtaaagctgacctggctgagttactggaggaatgtttggttgcttctgtttgtgagttactctagttctcaactttcagtcttctcttcctgttcactgttttttcccagtaaaggtcttcctcaccattacttctcatgacttattcccaaaatacatgtatttttgagcctggaattttagcttcttatagatgggacacaacctaggatcttacgataattatttcatccttttagtttatttatcagtaagctggtaaatgttgagttcttccttcatgtacttttggccctccctgtttatgggtttcatacctgtaggttctgcatctctggcttccacatct

SEQ ID NO: 68511 - DNA, 1926 bp, Homo sapiens
agacaatgaaagtgctaaattaggctgggcatggtggctcactcttgtaatctcagcactttgggaggctgaggagggtggatcacctgaggtcaggagttcaagaccagcctgaccaatatggtgaaaccctgtctctactaaaaatacaaaaattagccgggcatggtggtgtgtgcctgtagttccacctacagggaggttgagacagaagaattgcttgaatctgggaggtggaggttgcagtgagctgagatcgtgccactacactccagcctgggcgacagagtgagactccgtctccaaaacaaaaagaaagtgctaaactaaatggtgctaactttgagtgacacatgagtttggaaaagaattggttacattactttgcaatgccttattgggatacttgagcagagtcttggacgagtggatttgatttggagtgagaagaaaactagagagagaacagcaagcgtaagagtatagtcatatatttaaatacgagtatgtgtggtaggcgttggagatgaggggataaataaaatagaatcaacaggcatgatgatagaagaggtcattgctggggtagagcatataaaggaggttgtagttaacttcataggtcacagggatcattgctagctattgaacagcagattaacaagatgaggaaagtacttaggaagaactatagggagaataactgttctaacagttcctggagaagagaagttagggaacttgctaagaaactcttgtggtcatctagctgtaaggcaagtctttgttttagactctggtgatagcaatgggagccacgagtgaggttggttccatttccatatccagttctttgatttatccgctcattcattcatcagatatttgagtgtcaatatgtggaggaacagagggcagtagttaaaaatacgcatctgatgggtcagattccagctccactacttactgtgtgaccctgtgcaaatgatctgacatctttctgttatcgtttttttcatctgtaaaataggtattgtaatatacctacctcaggatgtgttgtgaggactaagtgagttgctgcgtttgactgcttgaagaatgcctggacgtagtgagtgtttaggagaaactactgctattaatatatcaaacattccttagcgttggatgcccaagaaagtcacgatcactgcatttgtggagctcacagaccattgaaacaccagacattaaactgatagtcacctgaatggggaaataattgagaaagtaccgagtgttctgagaatttagaaagggacctaacttagctttggcatggggtgtaaaagtcaaggaggtgacatttaacttggggtgtgtagaagttagccagataagaatgtggaaggagagtgttggaggcaggagaacagtgtgtccaaaggtcctgaggagggcaggaacttgatttgttagaggaattaaaagtcttgtattcttggagtttggcatagtggggctagacgggtaggaggaaccttatctttcagggctttgggggctgtgtttaggattttgggctttttataaaaagcaattggaagctatagaaggattttaaatatggaagtgtcatagagagatttggatgtatttttgttttgttttgctttttaaataccatgttgatttcctctttggagactaaacggatatggtgtgagtgtgactgtagggagaataactgttctaacagtttaagggacagacgatgttcatactgggggtagcaatggagatggacagaaatgcatagatttgaggataacttagaagaatcattgaagagggtgaactaatttagtagatgggggaattaaaggagatgccagataggaaatctgtggggtggctggtggtgctgtttatgagacgaagaat

SEQ ID NO: 68512 - DNA, 1100 bp, Homo sapiens
aaacatacaaaaaaaattagccgggtgtggtggtgcatgcccatagccccagttaacttgggaggctgaggaaggagaatcacttgaacctgggaggtggaggttgcagtgagccaagatcgtgccactgcactccagcctggtcaacagaggagactccatcttaaaaaaaaaggccagcgctgtggctcatgcctgtaatcccagcactttgggaggctgaggcgggtggatcacccgaggtcaggagttcgagaccatccagcctgatcaacatggtgaaaccccgtctctactaaaaataacaaacattagctgggcgtggtggcacatccctgtaatcccagttacttgggaggctgaggcaggagaatcacttgaacctgggaggcggaggttgcagtgagccgagatcgcgccgttgtactccagcctgggcaacgagggcgaaactccatcttaaaaaaaaaaatgtttggggagatagtacaggttgaggagaggaacgtttaatatggggccctgaggtaggatgaacccccactttggaaaagcagttcaaggtcgacagagggtcgtgggctgacagaggcgaatgggaaagagcagcagataggaaaatctggactgtagtgtcacgaaggcaagggaaccaaatgttacaagatgtgcatgtgtgcatgcgcgcatgcgtgggcagggggcatctctttctaatgtagagagagaaagaaagatggttttattaacagggagggagagttgtttcagttgtttggggggtggtgaatccaaagtagtatgagtttgaggggtgtgaatggctggtgggaatgaatacagtgactgtaaacagctattaagagtttagcagcaccaggaaaggaaggtggaactggggaggggaatgtgcagttcctacatggtgatgagggagccagtggagaagaagtggaagaggaggcagtggatattatatgctgcttgagatggcaggaggaggtggaatatagagtgcagagaaggactgattgccttttgataggaagaggagagaagggggaaatgatgggtgtgtatgcagataaatgtatagattc

SEQ ID NO: 68513 - DNA, 1636 bp, Homo sapiens
tggtgtgatctcggctcactgcaacttctgccttctgggttcaagcgattcttgtacctcagcctcctgagtagcttgattacaggcgcgtgccactatgcccagctaatgttttgtatttttagtagaagacggggtttctccatgttgctcctgctggtctggaactcctgagctcaggcagtctgcccaccttggtctcccaaagtgctaggattataggcgtgagccactgcaccggcctattgtactagatttctacatggtcttcttcacttcagtcttaacctacttgtagttcttttccacattactatcaggaaacttttactatgtttttttaaataagaaaatatatgttgttactactaattttttaatcgtacttctggtacacagaatttgataaaattgtaatccttggatcatgacactctctcactgttggtctcgtcataacctgttaaaatttatttactctgtaatttttaataatgtaataagcagtgtgcagttccgtctactgccttccattacccacagtaacgagccttctgatttctaagtccattcttccctcgggtccttttttatatggttttattgcatctctctatgtttctaaaatgccctttttattatagaaaattttaaaggtacacaaaaacagaaaaagtatgaattcctgtgtacttaccatccagcttcaacaattatcgacacatgaccaatgcattcaggcccttctctgcctgtggaatattttgaagcaaaccccagacaccatgtatatattttaattgtattgaaatgtgtaaggtactcgtgctgtatgtacacttttggagagtgctttcttaataacattgtcacgatccatttgttttgttgcagtcattggagtttattaattgtagtttctatatactattccattgtatgaatatactatagtttattcatcttctcttctgtagatggccctttgagttgattccaggtcgtggttgctaatgaataatgccaccatgaacattcctacacatgcctcctgtggtacatggcaagagtttgtcttgtggaattcctgggttagagggtgtgtgaatgttcaactttaggatatgataacaaatattttctaaaataggaagtgtattgatttatacttcaatcagaaatgtataaatgtataagtgaatgtttattttgattaataagctttattggcttcctataatcagttaagcagacatcattctttccctttatccatattttggagtactgactatgtgccggaactgtgaaggtgctagcaatataacaatgaataagacagataaacttgctgttcccaaactaaagttcagattccttgtttcaatacaccaggcccttactggcccagcaccttcctacctccttatccacagcctgccttccttgctttatttctttccattccttgtaactctccccaaacataatgaaatatttataatttctaaaaatacagtctttttagaaattatacattttttttaataatattttaaaataatgtctttttttttttttctggacagggtctcactctgttacccaggctggagtgcagtggcgtgatctcagc

SEQ ID NO: 68514 - DNA, 1547 bp, Homo sapiens
tgtatttttttgtagaggcagtgttgcccaggctgttctcgaactcctgaactcaagcagtctgtccgtcttggcctcccaaagtgttgggattacaggcatgagtcatagcgcccagcctaaataataatccttttttggttctggccttgcaaatgctgttatcaatatctttaaacccccaccttcaccattacctactgagtgtcacatcagtatcacttgttttaggaagcccttccttgatctccctagtcttagttgatattccttctctgtactcctatggtactgggtgcatatctatacatcttattatgtcataagtgataattttcttgtcttctgtagtagaaagtaatcattaagagcagagactgtgtctttcctctgcatttccagtatccagtgtagtacctgaagcatagtaggtttttgggaggtgctgaatgattgaatggcgaggaaagggataattgaagagatattttgaaggaataaaagaccacacttgatgataaacttgctagtgagtgaagatggctgaagaatcagatacagagccagagttcctccttaggaggtaggaaggccttaaagtatatggtaaaggcagagatacgagctgaggtattctgtggaatacgacacaatagcagtcctggctgcttttgaatctttaaccttaatgcctccagtcctccttttctcaatctgttttttcgtatctttcaggttcagaacttggcagtaaggaatcaacaggcctcagctcaaggacctcagatgcaaggctccactcagaaggccattcctccaggagcctcccctgtctctagcctctcccaggcctctagccaggccctagcggtggcacaggcttcctctggggccacaaaccagtccctcaaccttagtcaagctggtggaggcagtgggaatagcatcccagggtccatgggtccaggtggaggtgggcaggcacatggtggtttgggtcagttgccttcctcaggaatgggtggtgggagctgtcccagaaagggtacaggagtggtgcagcccttgcctgcagcccaaacagtgactgtgagccagggcagccagacagaggcagaaagtgcagcagccaagaaggcagaagcagatgggagtggccagcagaatgtgggcatgaacctgacacggacagccacacctgcgcccagccagacacttattagctcaggtaaattgtcattcctcatgtcattattctctcagaattcatgtgaaattttcctttttttctttttttgcctttttttctttgcctttttgttttttccccgcttctgttggtccttgaatagtggaaggaatgggaataatatcagccttgaacatattagttcagggtcaggaggacaagtgacagatacagattttatctgtttctaccaggcagtagtcagcttacaagttcccctgtccgctttcttaggctgtgagttcttcagttttatcactctgtctattcattcatcacatcttactgaattgcttac

SEQ ID NO: 68515 - DNA, 4097 bp, Homo sapiens
caaaaattagccgggcgtagtggtttacacctgtagtcccagctgctcgggaggctgaagcaggagagtagcttgaacccggttggcagaggttgcagtgagctgggatcacaccactgcactccagcctgggtgacagggcaagactctgatagtttatacttgctttcagactgcgggtaagatgtagttagatgtgtgtatcttatttggtcatgttgatttttgcctttttttgtttctagtaccttagttgttgatgtatttagataatttactcacaaaaaaattaagagttagttattactatacttggtatttatatactctagcagttctatttctaaattgctttatcatcacatgctttgatctctggacaatctggtacaatatggagaagtagagtttgtcactcccagtttacagtggaggaaactgagttaggtcagagctgacaggtgctgactctcaagactcagatggtggtctaagctgatgatttgtaaaatccaagtcatttgtgggaagacgttgacatctttaactctgtgggtatctcttctttcagtgaatattaagtgcttctgcagtgtcaggccctgggctgtgttttagggatgtgaaaatgaataaaacatggattcagcctttgagaaactccaagtctaatggaggaggggctaaccattcttctttgctgagtacagagtaaaagaatacaatatttaagtatggcaaagataagagacacaagaaattactcaggatctgaaatgactgagcaagggagttctttctctgagatctttaagactagtagtagttggtaatgtctgattgagtgggaagagtatggacgaagtgatgtccaagtttcatactgactagatttcttttcaccgcataattccaaaactaggttataccttggaaaaatgaatttacttttaatttagaatgattattattctctgctcttttttctctctgttgtattctgggattgttcctatagccacctacacacagatccagccccattcactgattcagcaacagcaacagatccacctccagcagaaacaggtggtgatccagcagcagattgccatccaccaccagcagcagttccagcaccggcagtcccagctccttcacacagctacacacctccagttggcgcagcagcagcagcagcaacaacagcaacagcagcaacagcagcagccgcaagccaccaccctcactgcccctcagccaccacaggtcccacctactcagcaggtcccaccttcccagtcccagcagcaagcccaaaccctggtcgttcagcccatgcttcagtcttcacccttgtctcttccacctgatgcagcccctaagccaccaattcccatccaatccaaaccacctgtagcacctatcaagccgcctcagttaggggccgctaagatgtcagctgcccagcaaccaccaccccatatccctgtgcaagttgtaggcactcgacagccaggtacagcccaggcacaggctttggggttggcacagctggcagctgctgtacctacttcccgggggatgccaggtacagtgcagtctggtcaggcccatttggcctcctcgccaccttcatcccaggctcctggtgcactgcaggagtgccctcccacattggcccctgggatgacccttgctcctgtgcaggggacagcacatgtggtaaagggtggggctaccacctcctcacctgttgtagcccaggtccctgctgccttctatatgcagtctgtgcacttgccggtgagtgatgtctgatggttttgagggcactattatgcatgagagtggacctgggctaagtggaaatagagcttaattgaataggggaataaagagttaagagggttaatattggtatttatctgcttcttctgtaagagagtgacacattatataatatctgaactttatactcctaaatttgttgctgatactattctgggtttttgggtatgtaataagttagatcaagatagccttaaccaaatcagtctttgaaaaaacaacagttcttggttggtctacgtgaatacagggtctcaagacctaggtcaggactaaatcatgttacattttcttttgtcctgatggaaagttactaggaatgaccaggaattttagtgtaccatgggaagtagataaattgggaaatctggaactaagaaaattttctttgaacatatggtaataattgtggttccttattatccttcatttgtacatctttgtttctttcctattctttacggtatagggtaaaccccagacattggctgtcaaacgcaaggctgactctgaggaggagagagatgatgtctccacattgggttcaatgcttcctgccaaggcatctccagtagcagaaagcccaaaagtcatggacgagaagagcagtcttggaggtgagtaactgacttctaatgctgttggagagcacacagagtagaggaatgttctgagtgagctaaaagataaaactggttgagtagaaaatgggccagaagttggtggacaaatgaatagatccaaaaacagggaatccaggtgaattgtcaagggtggacatagattattatggaagatcatgctggctcaactaatagatggatcaatatgtcatctcatgtctgttgcttaatctgtgtttgttttccagaaaaagctgaatcagtggctaatgtgaatgctaatactccaagcagtgaactagtagccttgacccccgccccttcagtaccgcctcctacactagccatggtgtctagacaaatgggtgactcaaaacccccacaggccatcgtgaagccccagattctcacccacatcattgaaggctttgttatccaggaaggagcagaacctttcccggtgagggcagggccataaggtgggactttgaagtggggacttggtctgattgttgtcttttcaaactccagtaaaagtaaaaggcacagaactatttaatgaaagaatggttcaattacgctatttatttaattataaagaaggaaagggaaaagagtgtgtggaccataaaatgaaaatgttaggaagaggagaaaaaaaggaagaaagtaacctttaaaactgtaatgtttagttagataaactagtttgttttataatgaataaaattatagtaatgaagttaaggagctttcctagggtttgcagaaccaggactagaactgaggtgtcttgactcctagtgcattctcagcaccataggaaggaagaggacaaaatagggagccagcgtaggaacctgttctccaatggcttatctggaaaaaaagccagttactattttttttttctcatttccaaacattgtatagagaccagttactactcttgattaccgtattgaaagtgattctctctgaaccagacttggtcattaactcagagatccaagcagagacataattgatggggaaatgttggggaaagctatagagaagcagaaggggatcaggctaacttaactctcaatgttttctgggacaggtgggttgttctcagttactgaaggagtctgagaagccactacagactggccttccgacagggctgactgagaatcagtcaggtggccctttgggagtggacagcccatctgctggtgagcatttatttagagactcatttgggggaaggagactcgtggagatgtgtttgaggactcggtgtaaaatagtagttacctatttatttaaagtagaaatgaggcctggcacagtggctcatgcctgtaatcccagcactttgggaggccaaggcaggcatatcacctgaggtcaggagtttgagaccagtctggccaacatagtgaaaccctgtctctactacaaatacaaaaattagcctggtgtggcagcatgcgtctatagtcccagctactcgggaggctgaggcgggagaaccacttgaacctgggaggcggaggttgcagtgaagtgagctgcacgccaccgcactccagcctgggcgacagagcgagactctgtctcaaaaaaaagtaggaa

SEQ ID NO: 68516 - DNA, 2507 bp, Homo sapiens
tttgagaccagcctgagcaacatagtgaaaccttgtctctacaaaaaaatataaaaattaactgggcattgtggcacatgcttgtagtcccagctacttgggaggccaaagtgggaggatcgcttgagcccgggaggtggaggttgcagcgatccaagatagcaccacggcactccagcccgggtgacagagtgagactgtctcaaaaaaatttttttttccaaaagatgatctaaaataggacatttatatctttaatttccagttctccttattctagattttataatctatcttaaggactcttactgattttcccactgcttttggaaatctttgtggtagaaggatcttatatctttctaggcattagtagttcctctctcctcagaaattgaatcatatctgaaatctaagagtatgaattaggataaaattagtaagacatctaaaatggagagagttcggcttaaggttaggaagacgtcataaagttctcaagggacaagtcttcgtgattttaggttttgaactttgcgttttagggattctcaactaggttgtgtaggtttttgggggtgaaccctgagaataattttagaatccagctctgagcctaatgattgcctgaggggcagcagaaacccatggtgactgtccagcaataccttgttttttagagttagataagaaggcgaatctcctgaagtgcgagtactgtgggaagtacgcccccgcagagcagtttcgtggctctaagaggttctgctccatgacttgcgctaagaggtactctgggcaccctcctccttgccctcagcactggtatctccatctaatgttacaccccttccccaggatcgtctcatagctgatattttatgtctccctccttgcttttattcccttccccaaatcagctcataagcagaaattcacatttagagcagggtggtcttctgtggcactattgacatcctatatatgccctgtcctgtaggtacaatgtgagctgtagccatcagttccggctgaagaggaaaaaaatgaaagagtttcaagaagccaactatgctcgcgttcgcaggcgtggaccccgccgcagctcctctgacattgcccgtgccaagattcagggcaagtgccaccgggtgagctgcttgttgtagagccagatgcctttaaactgggtctttttttctttccctgcagggcaattcatttgcccaggtaagagggtgtgagatgagaactctggtttcacattgattgcattactacaaattccaagagatcctgaccccctttgtctccggacctcttacccaactactggttcatgtttccattaatccttacactgtacttgagtacaattgttaattgtactcaattgtactcaatttctctcaattgtacttgagagaaaatctagatcaattgttaggtcatggggagaatcaaggaagtgatacagtttctatttgaaagactttgagagtagattttgggaatttgcaaataaagtgctgcttatttcacatatgataagatgagtttttcttctacgcccaacccagggtggtttgggaagaaagagagaggaataaacctttgacactgacctcattggtttgctcttttcccctatagggtcaagaagactctagccggggttcagataattccagttatgatgaagcactctctccaacatctcctgggcctttatcagtaagagctgggcatggagaacgtgacctggggaatcccaatacagctccacctacaccggaattacatggcatcaaccctgtgttcctgtccagtaatcccagccgttggagtgtagaggaggtgtacgagtttattgcttctctccaaggtactgaccctctcttcaacagaacccaggttgttttccttaacatcatcccacaggggccttgataagagggaaagtaattgacttttaagcagtaggagcttgaatgctaatatagaggctctactcctaatattcaagttgacttcctaatttttttctgggttgacattatcttctgtaatgtcagcaattttacagtgtttgattctcatcttatgatgtagctgcatttctcactaaatttttggataaaatgtttttgtgtaattaactatgatacctcccatggggaaaaaattttttttttcagtggagcagggtattagaaactaagtggccattgttgccccactcttcaaagagggcttgtttgctagtcttctttttttttttttttaaacagagacagggattccctatgttgcccaggctggtcttggagtcctgggctcaagagatccttctgccttggcttcccaaagtgctgggattataggtgtgagccactgcactcagcctatatgcaattttgacaaagagtttttttcggaaatgaaaatcaccctacccttcttgctatttgtctgaattctgggcccttaaacaaaaatatcacaaa

SEQ ID NO: 68517 - DNA, 3393 bp, Homo sapiens
ttggtcttggactttggttttgttgttgttgttgttttgagacagagtcttactctgttgcccaggctggagtgctgtggcatgaattttggcacactgcaacctccgcatcctgggctcaaatgatcctcctgcctcagcttcccgagtagctgggactataggcatgcatcaccatgcccagctgatttttgtatgttttgtagagtcaaggttttgccatgttgcccaggatggtcttgaactcctgagctcaagtgatctgcctgccctggtctcctaaaatgctgggattataggcgtgagcctctgcacctggccattttttaaataccagttgctttctaatttcattttgcttttaaagcttgccatctgacttcatattactgaatttaggacaggtactttggaattaatcattgctagacctcagtttcatttagcttcccttctcctatcatctggcattacctacatgttctcaccatttcttctaggctgccaagagattgcagaggaatttcgctcacaggagattgatggacaggcccttttattacttaaagaagaacatcttatgagtgccatgaacatcaagctgggccctgccctcaagatctgcgccaagataaatgtcctcaaggagacctaaggtggccctcttgcacaaaccagcctaaggcagacactctccactgtccaggttataacctggtaccagcagactttgcagggaagaaagagttgttccaatcatgtaaccttctgtaggggattactgagacagggaagagaagtgcaagaattggttgctggtgctacatggcggcagctttgacattttctctgggttctactttattttttaaaatctttacagttctcaccatttcacgtaccttaatccaatctttataaaagaggcagtctagagaactaggactgctcagccttatcctggagtggagcatttagcccaggtcttaattctccaagaggaggaatacatagtatggtaaggcaaggaactgggtggaatgtcaggttgcctgcccaatgggagaggtagggtttttctagcttgtgtgacagaagtagcaaaatctggtcctcccccctcccagtgtagctgtggctcagagttttttctttttgttgtcacttactcccttgtgattgaattttttctcctgcatccatggcaggatccccagccagtatagagacttggttggcatcttctgctgcagggactaaaagtatttgactggggcacatgtggctgttgtcattctttctgcatcccactgttcccctccaatttatgttattttctaccctgtttttcagttccatctctgctctgtcctatagctttataaaaccagagtgtgtggggctgaggtcaggagtataagtacctgccttaggcactattccttatataacaaaaatattaaatatttttttcctcagtaaaaggatgaaaattggtttcagttgtcttactctattccagtctttgcccactttcacacaaatgacaaggccaatatgttttgtttgttttttaatcattaagagtttttgtacaaaaggtgatggttttttttcttcattttaaaacaccagggtgtgggggagggatgcaaacaaataacaaaaaagatgcttttgtaacattattttccctgtttagaaagaaaaaaatcactccaatagtattgaaaagtccaaagatgaaatagtttcattttcttttcctaaggcttataaaaggccccctgcctgttgattccatccctcttttgtgtccagtggagccatgttactcttcagtggcccaggggttcactattaaagaaagatcagtccaggtttctgggcacatggcctaaacaggaagatggaagcatcagaggattaaaaacctttccccacagaaatgtgggcaagaagacacttccctgagccagcagaagggacaggtgcagcagcattccacacccagcgcagaggacagcagagccctcgatgtcccacttctgcttccgttccctttctagaagattgaaaaaaaggtcaaaaccacatgcctgtggagaaagtgcgacatgtttagaaatactggtagggaaccaggagtaagaaaagctttaccagcttttactacaaatggatgaaagacatcaggatcccaccaccgcaaggtaaagtgacttcccttttctggaacccctgtggcacaggagtaccaattttcctttccaacgaactggatttctggataggcattttggctgtatgtggacagataagaccacagtccttagcccaatcccagctatacagtcaccccaatttccacaaatgatgtgatggtaccgtataatcctgtaattgggaaatttcacatttttcctgtcctaatctcagaggtgggagaagcaagtctagaacatctccaggctcagactaaacgagagtacttggactgcaaccaagtaatcactgcaaagtagttccaagcagcaagaaataccagattctcatggaggctactatagggtacagaataacaacatgaaagcaatcaaccctgtataaataatgtttcttggcattttttttttaattaaagaaatccagtgtctcaaaaacttgtgaaaatgtgtttaaaaaacaaacggccagtgagcctgctacaccattttgcccatatgcctattgtaacttctgatgtcaagagacaatgcaaaagcctctgttttcacaggccctattatattaactctgacttacaactgtacctctctagagaaaaaacagaaaataaggaacaaagggaaggcagttttactagtgagaagatgcaaatcaaaagcaaactggaaagcaagagcaatagtaagggtgagatgagggactggagttgagactgcttgagaaatctggctgtgtagctttggtttgggggactgaggaagaggctggacatataaagtgcaatctacattggtaataaatggtcatccctttcttctgactcctcccccagctggtcatcccccacaccacgatatgctgcaggcacatttcgaggtttagaacggcagacaaagtcacagccatcctgtagggggaaaaaaaagaaggaaataattcgcagcatctaactttaggatatgagaaagtgtacttatggtctaggaatgtggcaagaattggttttctatagggataatgagaaaacctaaaagatctgacaatcagcctaaattcaatttggggcaacaggagaaaaagtttcttcttattaggcctcaccttcttcccacccaggccctcttaaaagctaaatcagatttagaagagcccatctggtcaaca

SEQ ID NO: 68518 - DNA, 1994 bp, Homo sapiens
ctgttgaccagatgggctcttctaaatctgatttagcttttaagagggcctgggtgggaagaaggtgaggcctaataagaagaaactttttctcctgttgccccaaattgaatttaggctgattgtcagatcttttaggttttctcattatccctatagaaaaccaattcttgccacattcctagaccataagtacactttctcatatcctaaagttagatgctgcgaattatttccttcttttttttccccctacaggatggctgtgactttgtctgccgttctaaacctcgaaatgtgcctgcagcatatcgtggtgtgggggatgaccagctgggggaggagtcagaagaaagggatgaccatttattaccaatgtagattgcactttatatgtccagcctcttcctcagtcccccaaaccaaagctacacagccagatttctcaagcagtctcaactccagtccctcatctcacccttactattgctcttgctttccagtttgcttttgatttgcatcttctcactagtaaaactgccttccctttgttccttattttctgttttttctctagagaggtacagttgtaagtcagagttaatataatagggcctgtgaaaacagaggcttttgcattgtctcttgacatcagaagttacaataggcatatgggcaaaatggtgtagcaggctcactggccgtttgttttttaaacacattttcacaagtttttgagacactggatttctttaattaaaaaaaaaatgccaagaaacattatttatacagggttgattgctttcatgttgttattctgtaccctatagtagcctccatgagaatctggtatttcttgctgcttggaactactttgcagtgattacttggttgcagtccaagtactctcgtttagtctgagcctggagatgttctagacttgcttctcccacctctgagattaggacaggaaaaatgtgaaatttcccaattacaggattatacggtaccatcacatcatttgtggaaattggggtgactgtatagctgggattgggctaaggactgtggtcttatctgtccacatacagccaaaatgcctatccagaaatccagttcgttggaaaggaaaattggtactcctgtgccacaggggttccagaaaagggaagtcactttaccttgcggtggtgggatcctgatgtctttcatccatttgtagtaaaagctggtaaagcttttcttactcctggttccctaccagtatttctaaacatgtcgcactttctccacaggcatgtggttttgacctttttttcaatcttctagaaagggaacggaagcagaagtgggacatcgagggctctgctgtcctctgcgctgggtgtggaatgctgctgcacctgtcccttctgctggctcagggaagtgtcttcttgcccacatttctgtggggaaaggtttttaatcctctgatgcttccatcttcctgtttaggccatgtgcccagaaacctggactgatctttctttaatagtgaacccctgggccactgaagagtaacatggctccactggacacaaaagagggatggaatcaacaggcagggggccttttataagccttaggaaaagaaaatgaaactatttcatctttggacttttcaatactattggagtgatttttttctttctaaacagggaaaataatgttacaaaagcatcttttttgttatttgtttgcatccctcccccacaccctggtgttttaaaatgaagaaaaaaaaccatcaccttttgtacaaaaactcttaatgattaaaaaacaaacaaaacatattggccttgtcatttgtgtgaaagtgggcaaagactggaatagagtaagacaactgaaaccaattttcatccttttactgaggaaaaaaatatttaatatttttgttatataaggaatagtgcctaaggcaggtacttatactcctgacctcagcc

SEQ ID NO: 68519 - DNA, 1023 bp, Homo sapiens
ttgctgggacttttgtggttttagcactcaatgtcctgtgtcccaggaaccccctcagtgtgaacaaacgaggatggttggtcacccaaccttgtttgcaggctacaaattcaaccagctgccctgttacttactgctaccaggttgccaagatcctgccagaaggctaagtggggaaactgctccattcctttggctcccactaccagtcgctggtataggaaccccccaacaacataaacagcaaccagtgatgcaaacctgtagagagagaaagacatctatacttaagaactgggaaatagtaaaaactcagataggataacctctgcatttattgtcagctgtttcctaagatacattccctgaaaaggaaaaatgagtagtgatactaaatgaaaaagggggctggtaactcttagaaaaccagttagagtgctgtcagtccaagagaagcaaaggcccagacaaaatgtgacagcgtgtgattctatggccaagaataatcaccattaagtatatgattccatttctctagaagttctcataatctaatgaaataatataaaaattgcctagtcctgcagtaggggaaaaaagcacctccaaatgcaaatctataccggcaactaaacattaaatctcatttttcaaaaacttgcagtcagaattttttttttttttttttttagacggagttttgcccttgttgcccaggctggagtgcagtggtgcgacctcagctcactgcaacctccacctcccaggttcaagtgattctactgcctcagcctcccaagtagctgggattacaggcatgtgccactgtgctggctaattttgtatttttagtagagacggagtttcatcatgttggtcaggttggtctcaaactcctgaccttaggtgatccatctgccttggcttcccaaagtgctgggattacaggcgtgagccctgtgtcctggcagaattattttatagccagaggatttaaaaagttatccccatcaattacagcat

SEQ ID NO: 68520 - DNA, 4547 bp, Homo sapiens
ggtctgttctgataaaggaaggcatactcacgtgacaagtaagatggaacccacactgaggtgggagatctctggtgaacaggccaggctgctatccatctcaaagaggtagaaacaatcttggactttgccacgctcctcagacacagggttaaaattgtcctgatgatgagatggcataacacattcaggtggttaagtgttttgactcctgtccaacaaaataaaaaacccaaaaaacatctgctccttcctggttcagcagcctattttccatggaagatgcgtgtctgacacagagagaaactgagctcctagttttctaatgtccatcccaacgtatcgtgtcccctctggatattctccccaacctcaggtcagtcctttcagtctcctccctcggcttatacaacacagggtgcctcaccgctagggtgtgtcgattgcaggagatcatcaccactgcacgacgctgctccttgccacagtggttgtcatattcatcaccccctttatagatcagcatgatccaattacctgaggagggacaaggaaaatggagctatggggtgggggaaaagcagaggcagatctgggtggtatggcagagtggaattgcgtaattcattgcaattggttataactaaacaaccctcatcagtacgaacttggtataccagaaatgccaagctaaacttgtttgcttacaaagacttgtgttcccttaagacaagaatcagatattcatttaagaataatcttaatttttaacattaaaggtaggcaactgacaatgcaaaaccaattatgatccataccttaacactgattcattttctgaataccttctaaaagcaaaaaaagaggttccatacaattgctgagcagcaggggtaagcccatctaagatttcaacttagccccagataaattcagagtggatatctaagattggaatgcatatctcttctttagtatttactgtgttcagttcttttgcaaaatatcatttgattcagtaattgtgaggtgaataaggtaaagattctgctcctagttttgcatatgagaaaacaaggtcaaaaggtgatacgactttccagtcacaggattaggaaacaggaggagaacctggtcacatgatccccagccccaaacccttttgttacttttttattgtattatttaccaggagtaaatagctaccttgtataacttatttatctgtatgggagggaattggaccataggtgcttacatggtcctctccagcaatatgacttttaagaaatatcaccaccatagcacaaaaatcagtgggtaaagttttgcagactgagtagtttgcaaaaaaaagtttgagctcttaaaatttaactggtaaactttgattaatttgatgaaaagtggtggtggtggttggtatttgtaagtctagtgtgaaactcattaaaagtatttgggtgaataaaaggactctaggctacagaattctggctagagttggctgggcgcggtggttcatgcctgtaatcccagcaccttgggaggccaaggtgggcagatcacgaggtcaaagatcaagaccatcatggccaacattgtgaaaccctgtctctgctaaaaatacaaaaattagctgggcatgatggcacacacctgtagtcccagctactcaggaggctgaggctggagaatcgcttgaacccaagaggctgaggttgcagtgagccgagattgtgccactgcactccaggctgggtgacagagagagactccgtctcaaaacaaaacaaaacaattctggctagagtcttcattttgcataagtttttcactgattttaatgcacaactgtcctgagctgtggcttacagaggagctgtggaattaggcatcctgtggtatattacagtctcaggtgtgccgaaccacacgtatgatatgctgaagacactagaaacggccaagacatacaggattgtcagagggattgacttgggatcagttagtcaatcgatggtaggaaggggagttttcttacttccgttgaagatgtgagtctcgttgagtctccctaccactgtctccttcccattacttttgttgatttgcaccaggcctgccccagaagtgtggttgccagcttcccggcacaccctgaagatgtagatgtatgtgtctgaaccctggcccacagtgctctcaaagctgtaaagagaagtgggaagaaagaagaggagagttactagctatcagcctcaggaataacagcatccctttccttaattaaaacaaaacaaacaacatgctcgatttatttatttgaggtcatggctgagtgaatatttgtttaattttaagatattcataaccttgacagaccatccttattgctgatgatgaattattaaaacacacttgagctatcttgatagctcaatattctagttatttttagaatgcctgttagtaaccatgttccaatgaataagggcccatgttcatcggatagtctcgtttcttagggaccaacttcagatttatatatctgaaggttcctgacacttataatgacatgtgtcggcctaaatatgtttatctgatatttctaaagtcctattatatgtaggtgtcaaataatccttaaatttctacaagctggtctcttggatccagtcttggaaatagctacacttctgtgaaagatgagaaaactgcacacagcaactaaaaactgggctgagaatttgctctatgtcataaaagagagcacattatgaaataaaatcagtaagaagaaaagactttaacataaatattttctcaagctctttaaggttcttctcatttaccttttattaaacagtggtttcagcctcttcactagagccaactctttctctgactctttacccttttctcctaccaagtcgcaagttttttcttctgtctgccaggattctctcactgccacagccaggagtagtagtagcagtccagtcctccagcagctgtagaaagggaacatcctttgggagagagtgtgtgttggggagggcaggtaggatcaggagagagaggaaagagataaagcgtatgaatgtgtaataaatcgatggtattttaattatccagaaagtacaagattctctggcatatgcaacacatagtacattttaatatctctgtaacaagagcatctgcagcagaaaattcatttatatgtaacttgtagtctaatgtataggtgagtctttcagaacaaactacaaagttgggaagagggaaatgaaagaacttaaaaaagaatgatgacagcttgggtggagccatccttgcctctttactgtttgatggcttgatgtagtcttctgaaacctctttggcctctacaggtcacaaatctcaagggtttctagacttcccataagtacagttgtcttttacactacaaatcaatgacaacaaattggggatcaccaagccactttacaattgagtaaattcaatgcacctgctgcttgtactgctctaggaatgaaaacacacagacagctctctttcccaaacttactagactggtgcaaaggtcattgtggttttggcaaaaaaaccccaccaaaacctaacattttcttttctcttatccatcttcatacccaggacagactgacttacccttgcaaaacactttactctggtatctgttaatgatccctcaggccattgctacttgtttattccaagagtatcacggacaatttcctgatttaactcttctaaacttttctcacttacaaaaaacgctgcaagtctggactttggtttgaatattctttaaagttctctagttctttttcatgcgggtccacttactccacctcatttttaaaatataaaacttgaaacaggcagaattttcatgggtactaatgagtttgaagatgggaaaatggaagctccaaccttggccgtgaatgcactttccccattcccctaaacaacctaacatctgaccttccacttcccacaccccactaaagcaaaaaatcccgggaaattgtctacctgacttcctgtaccccaaacatcaattctctactgtaatattatggtagtttccatagaataatcatagctaaccaagaggtccaaggccctcataacacatttaatgcactgaaaccacacaacagcaggaaacaacagactactgccttgggccaggtgctgttcaaagcacttaacatatattaattaactaattaatcctcacaaccttatgagtaaatacaattattgttgctattttaccagtaagaaaactgagacacagctagtggagtgagccagagagtctagctccagagctcatggtctgtgttgaacaactacatgtatatttccactatgtgcataacaattttttggagatgagagtagacagccaaaactgtgggtttttttttttttctactaagaagtgaaggggaagtgattcctcacacagttgactgaataggaggtgaaataaagaactcaga

SEQ ID NO: 68521 - DNA, 1050 bp, Homo sapiens
tgctatggtggtgatatttcttaaaagtcatattgctggagaggaccatgtaagcacctatggtccaattccctcccatacagataaataagttatacaaggtagctatttactcctggtaaataatacaataaaaaagtaacaaaagggtttggggctggggatcatgtgaccaggttctcctcctgtttcctaatcctgtgactggaaagtcgtatcaccttttgaccttgttttctcatatgcaaaactaggagcagaatctttaccttattcacctcacaattactgaatcaaatgatattttgcaaaagaactgaacacagtaaatactaaagaagagatatgcattccaatcttagatatccactctgaatttatctggggctaagttgaaatcttagatgggcttacccctgctgctcagcaattgtatggaacctctttttttgcttttagaaggtattcagaaaatgaatcagtgttaaggtatggatcataattggttttgcattgtcagttgcctacctttaatgttaaaaattaagattattcttaaatgaatatctgattcttgtcttaagggaacacaagtctttgtaagcaaacaagtttagcttggcatttctggtataccaagttcgtactgatgagggttgtttagttataaccaattgcaatgaattacgcaattccactctgccataccacccagatctgcctctgcttttcccccaccccatagctccattttccttgtccctcctcaggtaattggatcatgctgatctataaagggggtgatgaatatgacaaccactgtggcaaggagcagcgtcgtgcagtggtgatgatctcctgcaatcgacacaccctagcggtgaggcaccctgtgttgtataagccgagggaggagactgaaaggactgacctgaggttggggagaatatccagaggggacacgatacgttgggatggacattagaaaactaggagctcagtttctctctgtgtcagacacgcatcttccatggaaaataggctgctgaa

SEQ ID NO: 68522 - DNA, 1856 bp, Homo sapiens
cagtacaagcagcaggtgcattgaatttactcaattgtaaagtggcttggtgatccccaatttgttgtcattgatttgtagtgtaaaagacaactgtacttatgggaagtctagaaacccttgagatttgtgacctgtagaggccaaagaggtttcagaagactacatcaagccatcaaacagtaaagaggcaaggatggctccacccaagctgtcatcattcttttttaagttctttcatttccctcttcccaactttgtagtttgttctgaaagactcacctatacattagactacaagttacatataaatgaattttctgctgcagatgctcttgttacagagatattaaaatgtactatgtgttgcatatgccagagaatcttgtactttctggataattaaaataccatcgatttattacacattcatacgctttatctctttcctctctctcctgatcctacctgccctccccaacacacactctctcccaaaggatgttccctttctacagctgctggaggactggactgctactactactcctggctgtggcagtgagagaatcctggcagacagaagaaaaaacttgcgacttggtaggagaaaagggtaaagagtcagagaaagagttggctctagtgaagaggctgaaaccactgtttaataaaaggtaaatgagaagaaccttaaagagcttgagaaaatatttatgttaaagtcttttcttcttactgattttatttcataatgtgctctcttttatgacatagagcaaattctcagcccagtttttagttgctgtgtgcagttttctcatctttcacagaagtgtagctatttccaagactggatccaagagaccagcttgtagaaatttaaggattatttgacacctacatataataggactttagaaatatcagataaacatatttaggccgacacatgtcattataagtgtcaggaaccttcagatatataaatctgaagttggtccctaagaaacgagactatccgatgaacatgggcccttattcattggaacatggttactaacaggcattctaaaaataactagaatattgagctatcaagatagctcaagtgtgttttaataattcatcatcagcaataaggatggtctgtcaaggttatgaatatcttaaaattaaacaaatattcactcagccatgacctcaaataaataaatcgagcatgttgtttgttttgttttaattaaggaaagggatgctgttattcctgaggctgatagctagtaactctcctcttctttcttcccacttctctttacagctttgagagcactgtgggccagggttcagacacatacatctacatcttcagggtgtgccgggaagctggcaaccacacttctggggcaggcctggtgcaaatcaacaaaagtaatgggaaggagacagtggtagggagactcaacgagactcacatcttcaacggaagtaagaaaactccccttcctaccatcgattgactaactgatcccaagtcaatccctctgacaatcctgtatgtcttggccgtttctagtgtcttcagcatatcatacgtgtggttcggcacacctgagactgtaatataccacaggatgcctaattccacagctcctctgtaagccacagctcaggacagttgtgcattaaaatcagtgaaaaacttatgcaaaatgaagactctagccagaattgttttgttttgttttgagacggagtctctctctgtcacccagcctggagtgcagtggcacaatctcggctcactgcaacctcagcctcttgggttcaagcgattctccagcctcagcctcctg

SEQ ID NO: 68523 - DNA, 2284 bp, Homo sapiens
tgggcctctgtagcactcacttccccatctgttaagacagccatggccatttaccagtggaatttctactgtcttcccgctggctcctttctgatgtagcagtccttatccctttttctccagcagcctacatgtttagaaaagcagcctcaattggctaaaaggcctaatgctgaaagaactcaagagagaaggagcctcagacaagtagcggctatgtcccaagagcggaagctccccacaacgaggaacacaagataatccgtccatcagccattcttatccacaccacagtcgcatccccctcaaagctctcccagggtgccagaaattctcgctctgtctagtgtcccgactttccaagcgcttgtagccataccctctccaaatgatgccacttgacctcccaccgtgatgcaggccaaaattcctcctacaaataaatccaccaacacctccaacggactccatacttggggtattttcctttccctgctttctaaatatcgtaaatcccctctctggtcttggaagtcctttctccctcacacctttcggaactccgtgactctccgctctcatgcctccgcctccattctacccttagggctcctcagccagatctttggctagaaccatggtcaagggagaatgcgattccggctcctgtcacagacgcttaagtgtgagcgcaacccagcccgcctcctcctccacgcccctcacactcacgtgtcgtgggaaactggagtagccaaagctcagaatccccagtgaatacccttctggggatgggagacggggccagctaggggccggccgcagaccccggtcccagagctagtttcagaggccagcgttccccctagcgcctcgctgtgccccactctgggaaccggaaacaggaagcgccaagaggccgctgggcaaccgctcctcccaccagaccccgcggcatgtgaccatagaaccatttcgcccctttccccttcccgggctccctgataatcttaaactctgattggccagtattctgggactttagctccgccctcgttccatcagctccaatcactatcgaggttgtcgtttcgccttttctggttgcctttctttcaatggggtcccagagtcccgcttccagggcctctcggctcgcgcaccccggtcacgcggggtcacgcgcctgaccgctcccgggtagggttcgagtgaagagggtgagaggggcaggtggcggaagcggaagttacgcaggcagctcgccctcgggctccgcgggagttgtagttctcacgctaggtctcctccgggcgcttccctagcccgttcgccgcctgagagggacgctgttccgccgcgtggaagcttcgagtctcgactccactgttgacccctagacgagagtagtgcagcgacggggccgtgatgtgcgtcctggctttcttaacgacacctctcctctgtatttcctttttccagttgagtaccttggggtgaattattattgttactgttatctctgtcgttccttactgcttcgtggtattttgcttgataagcatgctctgcaaccacctctgttcgccagaggttacttctgcaaagtaggaagaaacgagcaatacgatggtaatctttgcgcctttgctaagatcttttgtaggttccttatgtcttactagccacttgttgaagtcctgctcattcttaaactctgttcagatgttatttttcctgtaacttcgtgcattcactctcttcagaattaacaatttcttcctgtggaccctcgcttgtggcttgtacctggctttagcatgttttcattccgcttccactcttacgttgcttctatgtgtgcctctctggctctatgcaggtgcctggatttttgattcttacccctctcattagaactactacagtgttttgagtctaataataataaaagctaacggatgcatatctcggtggtgcccggcacttttgtaagtgctttaaacgatagttaattcacttggtcttcacaccaaccttatgaggaagtatcttatcccaagtttacagatgagtaaattaaagcagatagaagctaagtaacaccgtgggtcccaagctattaagttatggagccagtatttaaatagtctccataatccatgctctcaagcactacgctttaccgactgtatgccattctgcatttctttgtttattagtaatacattcagttcaggctaggtagtaatcatatctgggttggatgttgccccaataaaaa

SEQ ID NO: 68524 - DNA, 1018 bp, Homo sapiens
ctcctgttctgtataatcataagagaggaaggtaattaacagtcctagaacctcagcttcccaagtagctgggaccacaggcgcaagccaccatgcccagctaatctttgtattttttgtagagacagggtctcacatttttgcccaggcttgtcttgaactcctaaactcaaataatctgcctgcctcagcctcccaaaatgctgggattacaggtgtgagccactgagcccggctcagatgcttttcaaaatgatcatgttttccatatttcaaggactaaatatagtttttggtaactttcaattttaatatatttatcatttatagagaagatgcaaggataatacaaagaactctggtacacattttacctaaattcatctttttcccctccatatacattagtttattttgaacaggttgagagtaaacttccattaccattaaatatatcagtgtgtatttcctagaaacaaggacatcctctcatcaaaatcaggaactacagtattaatacaatattaccaaatccatagtctgtattcaaaattttatcacgtttcaatagatgctatgtatagttacttccgatttcccaacaatcacaggagccaagccagagtcacacattgtaattagttgtcattgatcttacttgactttgaaattttgataggtactggccacttgttttgtagaatgtctttcattttggttttgtttgatatatctgatgtaggatttttctcggtcactttgccaaccagggacccgtccatagctagtgacaccccccccccgcaaaacccccaggcctcacttgacctgctgcctgtgttatagtttgtatctgcattcggtggttcctgaactcttgtcccacatccaagaagaatgaggatatgctgacaatttgaaggatgagaaggatggagaagaattttattgagcgatggaacagctctcagcggagaggggatgtggtaggtggaggtggtcccccacccctgcagtc

SEQ ID NO: 68525 - DNA, 1045 bp, Homo sapiens
cctgtgtccatgtgttctcattgttcgactcccacttatgagtgagaacatgtggtgtttggttttctgttattgtgatggtttgctgagaatgatggtttccagcttcatccatgtccctgcaaaggacatgaactcatccttttttatggctgtatagtattccatggtgtatatgtgccacattttctttatccagtctatcatcgatggacatttgggttggttccaaggtagttctgtcttaagttcttcgagaaatctccaaactacacttttttgtatgaacgcacagcttaccacacaaatgtattgtacagctatacaaaaatattttctttctttatatccttattatataagtttttttctatttaattttttttttactttttaaatagctttgttaaaaactaagacacaaaaacatacattagccaaggcctacacagggtcaggatcatcaatatcactgttctacttccttatcttgtcccactgggagttcttcaggggcagtaacacgcatgaagctgtcctctcctgtgataacaatgccttgttctggaaaacctcctgaagggcctgcccaagaccgttttacaattaacaaattttttaatggataagtataaagaatgtactctaaaataacagtaaaaagtataatggccaggcacggtgcctcacgcctgtaatcccaacactttgggaggccgaggcgggcggatcatctgtggtcaggagtttgagaccagcctggccaacatgatgaaacccgtctctactaaaaatacaaaaaattagccgggcatggtggcgcatgcctgtaaatcccagctactcgggaggctgtggcggaagaatcgctggaaccggggaggcggaggttgcagcgagccgagatcacaccattgcactccagcctgggtgacaagagtgaaactccatctcaaaagaaaaaaaaaaagtatggtatattaagtacataaatcaataacagaggcacatattatcatcaggtattatgtatcatacataaccg

SEQ ID NO: 68526 - DNA, 1049 bp, Homo sapiens
tataaaaatctatagagtgccaaataaaggaacaatttgaaatactggtgttgatattgaaaaagcaagggactctaatgtcagaagagaaatccttttgcagatgaggtggtgatgaattctttgtttcaacacaactgaaggaggaactgaaggaaataccagctgatgagtgatgagaagggattcttgataatagagtactaggtgatttttggcatgtaatgcagaagttgcaagaagtggtaacaatgatgcaattgttttacctgccatttatttacttttatgtgagccattcttcttagcacttatagctacacaaaacaaaaatagtaacagaattaatgttgtttaattcttgcaatccatggatgcataaattcactgggggaaaaaacagctcatcattctcattaaagatgtgcttcaaaagtattttaattttatatctaatatgtatgaatcatactttgtatttattttgttttgatcagttatatacaagtatttttgaacatagctcagtcagaaggaaatgtttaatatttataaatttatggttacattctatttaaaagaggagttaaagttaaatttacctacccacatatgttacatatatatgtatttatgtatatgtattcatatatgtatatatgtgaacataagtatacatacgtatatgtatagatgcttgacaataaagaagtaagaataattcacaacattttttgaaatataaaaatttaggataaatttctgtatggtaattggcatggaaattcaaattcaaaaaggaaaaaagaagagaaagatattaaatatcagaccattaaaagaattttttaatgtacttttaaatagtgatagtaggtatcttatactacagtgtttattattcatgagaaaattgtaaaagtaatctaagtattaatttaaaatatcatcaaaaataatatcttttgctattacttaaaatcatgataaaaatatgtttacttgaaaatatgtaaggagtgcacagagtccaaaaattattttaggag

SEQ ID NO: 68527 - DNA, 1099 bp, Homo sapiens
gaccagaagaaaaacagagaaggcatcaccttaatggcattgttcagcagtgatccagagccttcgaaaaaaccatctgccttttgtccctgtgaaagccaggtgagggcatccctgatgtgtgagctctccacaaagatgtacgattgggcttgagcaaaggacttgagcacaaatgcagtgagcccgtcgagcaaaacagaaacacacacatgaggaccacctcactttcatagctcactttgtgcactgcctccagacattgctcttcacaattcagtggaggagattactgggaggtattgatggggaaatagtatttaagagctgaatatactctagtccaacaaacacctcaatatcttttattatatctcaactttattggtttctctgagttgatgctttttaatttttttgttgtgaaacatttgttggagcctccaagcctccccaccatgaaaactgcatttccagaatgacttgtcctgactttactgcatcacggtctccttctgtcctcgccctcccctccttctttaatgcacagtgtgggagcttcttcccctgtcattttatagaatgacattttctgctttatatttccatttagaagatccttatttcaccattttcagctgtgttatcacagcaggtaagctttcagagatgaaacggtgagattacccaacaggaatgatacatacagcatatgcgttatttaaagactaacaattttccacaaaaaactccagatattagagagtagctgtttctagaatcctgaaatgtcatggatctacagagagcatagggaaaaaataatcttgtttccctgactgctaccatcattgtccccaaaggtgctgtaggaaccatctctgtgcttataattcaattgcctttggtaccctgaagaggaagtgttcatagatttattgaaatggcaaagacattggaggattattgagcttttttctcagtgctattaggaatcatagggtaactaatatttagttaaaatttcccgcaacccccaatcacaggcttgatgatactattgaattttctacttgtatattgggacattttattgaaa

SEQ ID NO: 68528 - DNA, 1011 bp, Homo sapiens
cattaaaaacttacgctttaacttaggggggatatgggagattcctgaaagggttagagaagaggagggacacgatctgacacatgttttaaaggatccctctcgctgaaggggaacaagaagagatgatcaggagaccagttagaaagctattgagagcctgcaagagaaaggactagaatagtagagatggagagaagtgggtagattctggatgcaatttgaaggtggaatcgactagatttgtgcatggattgggtagggaagataggggaaagaatgtagtaaagaactccaaagtgtttctccctagcaaatagaagaatggatttttcatcatctgagatgaaggaaattgagggaggagcaggtttgtgaggacgagcagatactcagtcttaaacttgctgattttgatatgcctatgagacctacaagcctgtaagtggagagtgggcagttgaatacatgagtttgagttcaggaaaaaggtgtggatcaaagttgtacagttttggacacaagtacatagttgttattaaagccattgactagatgattttatcaagggatcctcgtatagagaagagagatctgcagactgagcattatcgtcaagatgattataggtggcacagagttgggtttttaatgataatttaaataaacttaaaaaagtgttagcttttccccttctctttcaatatagtggtaatttttgtattgctatattaatgatattggtaaaatactggttttctatacaagttagtaacctggagttcctcttaaaataacttgtttaagtaaaaacatgagtgcatttaaactgtcaattgaacagtaaatcatactagtgtcacacagatatttcaatattttgaacatggtttaggaagacatttgagaaacacagaggtatcagaaagaatcctgtcctgaggtcaacagccttagaccttattattaggcaagagcttttaagcttttaagcaagtcttttatttctct

SEQ ID NO: 68529 - DNA, 1002 bp, Homo sapiens
cttttttgcatccataaaactgaatattttagacttagatgttttcttctcttctttttccccatgaaacaaatatctatgtctgtgtatgcatataaacagctctccttatggctttattacaaagagcatttttttgcttgtttcttgtcattttaaattgaaggtttgcatatcggaggttgttctttacaatcttagtaaactctgttttgtttatgttttaccagaagatatggcttttcctgaatatctatgcttaactcgttcctgtggtcctttcctcttttttctcagtttcttctagtcgtctcaaatgtctgcatctaaaacccacattcagatgcccacggttgtctacagtccacctgtttccagcttcccccttcttcaatgttagtcacagataaatattatttgctattttatctcagagtatttgggaaactgtgggactcttgaacacagttgtcagtgagggttgtgtacgcaacagaaagaaataaaccagaaataaatatttagagattaaacagctggttaataaaccaagaagtattcttttcatccttctaccatctgatttgtgattccagaacgtccagaagagagagatttaaattgctttcagctaagctgtagacctctagcagatgaacgacatattttcctgaaggtatgatgaaagtttttagtgctttttgatagtgataagatttaatttcacgacctggataattctgctcagttatagttaatactaaagaattacatttttaagacatcttaacatttctaatacaagttttgttaatcttttcttaatgaaagacaacttcaaattttcctggaattttactgccctgtgaggactgaagttttgcattttatgtattcaatcctgtattcattcaacaagtgttttctttgtttgtttgtttgttttgttttgttttgttgtttttctttgagacagagtctcgctctgtcacccaggctgga

SEQ ID NO: 68530 - DNA, 1065 bp, Homo sapiens
caaacactgaatgttctcacttataagtgggagctgaatgctaaaaacacatgaacacatggtggggaacaacacacactggggcctgttggggtgggggcagggggagagagagcatcaggaagaatagctaaaggatgctgggcttaatacctaggtgatgggttgatctgtgcagcaaaccaccatggcaaatgtttacctatgtaacaaacctgtacatctggcacatgtaccccagaacttaaaataaaagttaaaaaaaaaaaaagattctgtgccaggcatggcacagattgtcttggtaagcaagattgctcccttaaggagaatataacagagaatacaatgagttaaaatatgtaaagtactttatgcagtttctgcttgttgtggaattacactatgcctgttactctgaagaacttgttttttgcaaacatttttggaacttttaacttccaaaaatgatcttatcacgtgagcatttcatgatctccaaggttggaacgtgactcacagatttaggtgagagctcagcttcaggcttcattagcagcacactctggtctacagcacggagggcacaaagggagaggggggtggctctcaccttcaggcgggtgtttgaggctggcaggctctgagctgaggagaatctcaaatttacctgtaaagaggatatgattaaagcagccattttataattattacagtaaccggcccttcttctactccaggctaagagtagccttttctatacttcctttctctttattcatcttacagcaggattaagagatgaacagcctaggaactaccaattcagtgtctctggaacaacctggaaatttgattccagttaactcaggttttccattccttatataaatgatgaaatataaattgacttaatcatatagaaataaaatgctgcatagaattgaaaacacacgtacaagaaagatgcataccttgctatcactgacctatctctgtgcagtgtttatgtgaagactgtgtgcagtttgcacggtgatgtgaaaatcacattccacccctgag

SEQ ID NO: 68531 - DNA, 1020 bp, Homo sapiens
tgacacacaaatcctggcttgtctgtagagcatacattcatcttggcaatcccttatttgaggaaaacacagatactgagtcatttcacaattgtcacgacgtgcaatccattttatgaatcaataaaaaaatgtatccctttttgggtaggaattctatattcttttttggtaaatgtttcatagatgttgctgccttatgtctgtgactttcctgaaattggaggatgtctctttccacatgagtagtaatgacttgctgatacttcctggcccttttgacagcagaaaattgtgtagggaattaggaaatacagatcaaagagataatagaacgggaaaaaaggaggacaatttaattttctggaaataatgcttatggttctgcagcagctgcagcatcactgggaaggagcaggaaaagcaggatcaagactggcgggggcagttgatttcccatcacggtacagaaaggaagagggcagaatgggagcctgagccctcgattcttttaaccctgttcttgctccaactcactggtttttatttcatctgatgggcagtgaaagtaaactgccaatcatttatttttgtaacatattaactacttccagcataaaaaaatcaattccagatcattttcatgaccatatgtattaatttatccactttcccaaattttctaaattcctgaaaaatagtagtttgaggctaccactagctcaggtcattaatcagttttaaaactattttcatgaaaacacaaaacaaattacatggtttgatgaaataaaccaatattcttgcagttttaaaaagaggtattaatgtaaatccatatcccaaatatgttttggtagtctagggagcacaacatacattcttcacccaagattcatcctaactggctcttcagtgaaacaaggaagtgaaatctgtcatagaattttaaataagacaagtttgggagcaacctctccattgcttgaaagattcacttttgatctgtataagtattct

SEQ ID NO: 68532 - DNA, 1059 bp, Homo sapiens
caagacaaaggtaagttacgactgtaattgtagcattaaatatagggactagaagagaagagatatatgtgaaaaaagttgactttgtaattgagaatagttttgatacattaattgtataacagatttttcaaatgatccaaaataaagctacttttcaaaggaactctacaaaagacattattacctttggacatatttctaaaccaactttattttcaaagagaaatgtgtttacgaagcattgagcaactttgggtgggttgagaccgaaagtatccttgccacttgagtatacattgggggaggcagagctggaatcattggcatatgtggaatgaaattaatgcatgtattagcacataagggatgtgaatagcaatacttttcataaacaaaaaaagcaggattattggttgtaaaatttatctaccatgttaatatgctgaataatcctgtacgttttctatccttgtgaatacttgggctggcagagaacaggctggaaaaatcaggagattacagactacgtttccatccttcaagtatttccctgcatggatactgagacgtagaacaaatgataaaaagaacatgatgaatgtgctttttgtcttattagaaagactcacacttaatatgacactatattaatattcagagatcaggccagtgggcttgtcaactgagctgtaattccaccagcctgctttagtcaatactgcaatggcgcttccttctatacatattattagaaactgccctagtggaaaataatcttctaccagcccagtcttgctttttatattagaattaaaatttttattcattaaaaacattattaggagagtgaaaggaaaagtcacagagaagaaaaagatattttctgtatatataattgacaagtgcttatacccagaatatattgaagacttccagaaataaattagaaaaagacctagcaccttacacaaaacatccaaatagctaataaatatatgaaaaggtacttggtctccagagaaatgcaaattaataccacaatgaaatctctacata

SEQ ID NO: 68533 - DNA, 1053 bp, Homo sapiens
taaaagttttgtggtcttattacaggatgtagaaaacagtgggcctcagttattcttttgctgttgtgccggagtataccacggttgtttttgaaagataactttgaccatacccttaggaacttcctcagctcactttcaaatggagggcactggctttctaaccattgtgtctcccagcccagtgacagctgaagctgtctgcttccgatatcacaggcagcacagaagagccgccctccaggtgctgctgggaaatgctgcctggaaccctttgccatttactttctatcaaaagctgagggaaatggtacatatggggctttcctaaaaatatgggatccatccatttgtcagcaatgtcattctatcctatcccagggcctttcaagattttggtgaaaactaatagatcccatattccagaataatgctattaataattttattattattacttaatgatagcaaaaagttagctaactccaaccgctcacttgttatttgccaggtaatcctctgatccagaggatttggccttttgtgtgtgttaatgtcctgcttgcaccagctgtatgaggaaggtgccactgttgtcatttccatttctgcactcgtggaaacaagcgtagtgaggccagcctgagccacagagctgcaggtaggggaggcagctggaaccctggcgcctggctgtggagtttgaggctctgactcctgcgccgcgctgctgccccaaccctagtcatacgaggtgtttcaccccgccctggatactctgagatcccctctgggttcagcaggctcagagagctgactgcctggagcagaaggcatggggtcctccagagactcccctgagctgagttcccctgtggacaccagggccgcctccttgtggcgctccctgaagggtcctctctggaagaactgtattggttccctggggctgctagaggaaagcttcacaaactggggcttaaacaacagaaactgacatcccacagcgctggaggctggagtccgagatcaaggtgtcagcatgcttggtcc

SEQ ID NO: 68534 - DNA, 1078 bp, Homo sapiens
agaagcaggcacggtagccaccgggaccatggtgtagccgcaggtggtctggagagagtgaggcaggggtggcagtgactgaagaccattcagtgtctttcatagaaagaatggcagaggagaccccagttccttcctgagtcccctctccttgggaaaaagtgttcctactctctgggtgagcgtctggtccgaatcgttggcttggagatgattttacgggctctttctggagaacaaaagtaaaaccttagtgttccgatgagacacagtaggcagtacttgggagggtcttatagaccccaccctgtggaagtgggtctcaacattacacaaccccctctcgggcccgtggacagttgctgtcttctctgttttctctctttgtgcctgtgccaccctcagagaagaagaaaggagctgaggaggagaagccaaagaggaggaggcaggagaagcaggcagcctgccccttctacaaccacgagcagatgggccttctccgggatgaggccctggcagaggtgaaggacatggagcagctgctggcccttgggaaggaggcccgggcctgtccctattacaggagccgccttgccatccctgcagccaaggtgagggccctgcagggccagaaagccgctcttggctctcactgtggtctaggccatgaggggcgtcctcatcacactgtagtttgggggatgccccccaccgtggtcaggttgatggcaccttaacccattctctcctgatgcgtgagttggaggaggcgcgtgggatcccttggggtctccaggcagcagggccagttggcattactggggatggtatttaggagccaggaaagccggtgcattcctagtgaaaccacagggagaggggggatgccaggagctgagaagagtgtgctgcatacatctatttacaaatggctttccaagtgatgctcccaacttccatgcctatgatgtgatggaggatgtcagtgatagaaccattcagttttccagtttttcctttttgtaatatcagtactcttaactggaaagctttccctaacttacacctacctgca

SEQ ID NO: 68535 - DNA, 1839 bp, Homo sapiens
cagtgaaattccgtgcatggggacactggagcccagaaaagttaagtgactcatattttctcaccaagcgtgggtgatggagccattcagttttccgatattttattttttatatgagtattcctttaactggaaactttcctaacaacaaacacctaaagacctgcagagttgcttttatttttgttaccccagctccacgccttaaccctcactttgaaataggatgtatcaaccctattttgcagatgaggaaagcaagggtcagagaggttagacaactcttccagagtcacacagctgggaagtagcagctccaggagcagaagctggggccgcttcctggtgcaccgatggtcttcaggtgttttgtggaaactcgggggcctccggggcgaccttgaggacatggacaaggctaagcaggggttcccttcacccagccctgcccttggtttactcaggagtcagaccagccctagtttcctgtgtttcatgtattggcttttcatgtgaaactcgaggagagcttgtccgttgtcagaagctgttttttgaacgtctctacacagtccaggcaggaaatagaagcactcacatcaggagctcagtgtcaggcaggcaagcctcctgcaggggagccccgccctgctcaggtggcctcatctcccctcccagctggtggtgctgccctatcagatgctgctgcatgcggccactcggcaggccgccggcatccggctgcaggaccaggtggtgatcatcgacgaggcgcacaacctgatcgacaccatcacgggcatgcacagcgtggaggtcagcggctcccaggtgcgtgggcctcccctccccaggccagggcctgccgtgaggtaaagggacttggatggttcctccagacacccgggccaagaattcctccggaggtggggcttgctacagggtgcacgagtcaaggcggtgacctcatcggaggctgaccatggctttccagtgcatcccagaactctggggaccccgctatgacagagtgcctcatttccctgcacctcacctgcccccatgctcctgagtccctccagccctggatgccagcagccagttctgcaagccagggagatggcatgtgtgaggcagaagtcccctcaggattggattttgtcattactgaagttgtctggaggggactgaattgaggaatgctcaagatcagtgcaggctcctcctgctgccctatcatgcgccatgcatggcaccaggtgtctctggtcttcacgctgactctgccatgggggtggtgttcctgttttacattggaaacttggagattcaaagatggtcaagctctgtcctgaggtcatgcagctcatgagtgtggagctggggtgtgcccactggtttctgactgtgaaacccccacgacatcccaccagctctactgacctgtgcctgggctgaattgaggctgggatgtgatggtgaccttgaaccatcactctttgtagactccaggtcttttcccaacccggtggaaactagcaggcagattccatacttgaggaattcagcctcttgctttttctctgacccacagtggacactggaggaaaccttcccttccttcccttttctcttagctcccaccagcctaagggctgtggaaaccagtaccttttgtctgcacccagccccctctcctccctttggtggcttcctgtgtgtccagggctagcatcttctaggtgaatctaagatgtcagtaccttagccctcggctgcttgctcagagcctggtttgtgttctttccccagctctgccaggcccattcccagctgctg

SEQ ID NO: 68536 - DNA, 1046 bp, Homo sapiens
gcaaggaggctccaggtgcctcagaaggtagcactgcgttgtgctgcctgggtggtagaagtggtgttttttgttttgtgtttaagattacagcttgctcagtttgcacacatgcctacagctgggcttggtttttgcaggtgcagcgatactgtgagaagagcatgatcagcagaaaggtaactgctcccatcttgtggtcctgaacaagacccagctgtgccccaaccccctgccgttgccatgctttcctcccctgccctcagggaactccagagtccccttcgtctccaccctccttggtgcagtgggccttgctggggtggtgggatgtgcgcttcaggtgtcttgagcctggcagagcctccgatccacccagcctctctctcatggctgttcctcgttcctctccactgctctctctcatcccacccagctctttggcttcactgaacggtacggagcagtgttctcatcccgggagcagcccaaactggctgggtttcagcaattcctgcagagcctgcagcccaggacgactgaaggtgaggcaggagggtgagcaggcagagccggctgcaggcatgggcaaggacttctgttcctcatgtgtggacctgactagagggaggcctcctccccattctgctctgtgcagctcttgcagcccctgcagacgagagtcaggccagcgtcccgcaaccagcttccccactaatgcacatcgaaggcttcctggcagctctcactacggccaaccaggacggcagggtcatcctgagccgccaaggtaatcaggtggttcttggccaggttcagttcccaggaaggagccaagctgagcccgggagccgcagcatgaaaggattctttccttccatcctgggaacttcctgggttaggaggaagcagtgcagtgggcactggcctgctgtgacctgggcaagcagtggaggtggacgggaggagatcgaggggctgggatggaggtcctctagggcaggggtcctagggaaacttgtattgtggggtaggtgggctttggt

SEQ ID NO: 68537 - DNA, 1046 bp, Homo sapiens
agatggagaggacagtatggtccacctctgtgggctggttgtcctagagattaaatggtgtttaatttaaagagaaagcactagcacttgtgcctcagacctggactcacctgggggaccccctttgctgggacgatagaagtgtctgttgggcttgcactcacctcccaccgatctgtttttccaggcagcctcagtgagagcaccctgaagtttttgctcctgaatccagctgtgcactttgcccaagtggtgaaggaatgccgggcagtggtcattgcgggggggaccatgcagccggtaaggacacctttcccagcccctcgtgccccaggtgttgggatgagatggggacttgggagagatgcattatcagtcctgttctctcctggggccccaagccagaaagggtcagctcgagcaggcccagtggtgtccactgggtgacactgctattctctcactgctgtgccttttaggctgcaggagcagtgcagactcctctgctgctccattctgtagccccaggatcacacttctcccagagaaagctgttctgtggtttcaaactcaaggaaaaaaatcatgattccacttttaaaaggttcattttgatgtatatgaatataatagtctttgtaggcataatttttacttatgtgcatagctattttaaaaacaaaagtgcggctccctccatgtgctgtcactggaacttgctcttttcactcagcagccagagggtcataaaccctgtctccttgtcagcaagcatgcacgtatttcagtatcccagctgtgctggattccagttacccagatatacagcatttcatgtacctccttctcttttgttaggtgtgcaagctatttgtagttttctgttttgagcatgactgtgatgaatataaccgcatttccgcacagtggtgactcctacctagcaaagggcctcctggacaaaaagctgctgggaatcctgaagcagtgcttcccagccccagctgccttagcttttgatttttatatttttgtatggatagatt

SEQ ID NO: 68538 - DNA, 2033 bp, Homo sapiens
ccccaaagtccctggctgtgaggttctccagtccgctggccagaaaacacaaggccacgagcagacccgagacctggcaccctaaacctgtctctgggaaatgtcctctgtctttctcagatattccaggaacctaagagcgcacaccaggtggagcaggtgctgctggcgtattccaggtgcatccaggtgcgggcgtcatgctgagcttgggtctgagaccatgtgggggtggcagctggaaacgtgggtgtcatccaagttttggctcagcaactcagcgtctgggtttctcctacaggcctgtggccaggagagaggccaggtgacagaggccctgctcctctctgtggttggaggaaagatgagtgaagggatcaacttctctgacaacctaggccggtaagtagtggttctgctcatctcctgggtcgtgatacatggccggccctcactcccagcagctgggcccctgcctgctgtctgctgccattagagcccacagctgggctgcgactgctcagaccagccagctggagggaggggctcagcagctctgggtttggccctgagagagtagttggattttaggctggccattgctgtatcaggacccaatcaattggcctagacgggatctctcagccttacaagccctctccaggtggtaggtacagagtggagagaggctgagttttgatcacagtcggagagggctgacggaaggggtagaacggagcagctggtgacatgggtgatgacccgggagttcctgacgtccacccactgggctcttgtctcccccccacgtgtgtggtgatggtgggcatgcccttccccaacatcaggtctgcagagctgcaggagaagatggcctacttggatcaaaccctcgtgagtgaccccagtgtcacagagggtgacagagtaggcagtgggtgggagtggcatcacccccagggctgatacagccaggccttccccactgcgctggtgtctcctgccccctccggaagcttggatgcccctccacaccctcttgatcttccctgtgatgtcacctggacccctgctgctggcattggccacaaagcctcctggtctggctccaaagcctggcagggtcttttccccgggggagctgcaggcagggaacagtcctgatgggtcatccccttcactcccagcccagagcccccggccaggcacccccagggaaggctctggtggagaacctgtgcatgaaggccgtcaaccagtccataggtgagcctggctgcctccagctgggtggacagatgggggctggagaaggggagaacaggaaagaggggttgcctgccctgtttcctatataagtctgaggaaggggagggggtcgccatgggaatgtgctgtaggggaggcaggtgttgctcggagccccagcctctgttcctatgcaggcagggccatcaggcaccagaaggattttgccagcatagtgctcctggaccagcgatacgcccggccccctgtcctggccaagctgccggcctggatccgagccagtgtggaggtcaaagctacctttggccccgccattgctgctgtgcagaaggtcagtcctacctttttctttctgagagcctcccaaccccgagatcacatttctcactgccttctgtctgcccagtttcaccgggagaagtcggcctcttcctgatgggcaaccacaccaccgcccggcgccgtgcccttcctttgtcctgccctctggagacagtgtttgtcgtgggcgtggtctgcagggatcctgttacaaaggtgaaacccaggaggagagtgtggagtccagagcgctgccgggacccaggcacaggcgttagctcccgtaggagaaaatgcgggaatcctgaatgaacagtgggtcctggctgtccttggggcgttccagggcagctcccctcctggaatagaatctttctttccatcctgcatggctgagagccaggcttcctgcttggagtccgcaggaggctgtggcagcagtg

SEQ ID NO: 68539 - DNA, 1689 bp, Homo sapiens
atagcaaaaggtcatgcagatatcaaaccaggtaagactcattccctaagccaggattgaatccaagctacacagaggctacacaaaaccttgccaagtggttacaggtcttgctcccaaggatgttaaacaagatggaggtcctcagcaaatttgctatggaccatacagaaagacatgcaaagcagaccagattggctacagcttcagatcagcctcacaaatcgtctctcgcaattaaaacactacagagagccctctgctcagtcctgcagctgcccactgccctcctactgtccaccgtggccctgctgcactctggctgcgtcctctctgggatcgctgccaccttccacctgggcctcgcagctgcggcctctgccagagccagctcctgatggacccatgtggaaatgggacctccagatatcatcctggcagtcattgaagactttaagagggacaccaatagcaaaaagatgaatctgggagttggtgcctaccgggatgataacggaaagccttggacgtgctgcctagcgtccccaaggcagaggcccagattgccacaaaaagtttggacaaggaatacctgtccactgggggactggctgaattttgcaaggcatctgcagaactagcccttggtgagaacagcgaagtcttgaaaagtggccggtttgtcattgtgcagaccatttctggaactggagccttaaggattggagccagctttctgcaaagattttttaagttcagctgagatgtctttctgcccaaaccaagctggggaaatcacacgcccatcttcagggacactggcatgcagctacaaggttatcggctttatgaccccaagacttgcgattttgacttcacaggcgctgtggagggcctttcaaaaataccagagcaaaatgttgttcttctgcatgcctgcacccacaatcccacgggagtggacccaggtctggaacagtggaaggatacagcaacaatggtgaagaagaagagtctctttgccttctttgacatagcctaccaaggctttaccagtggtgatggtgataaggatgcccgggctgtgcaccacttctttgaacagggcattaatgtttgtctctgccaatcatatgccaagaacatgggcttatattgtgagcgtgtaggagccttcactgtagtatgcaaagatgcgatgaaaccaaaagggtagagtcacagttgaagatcttgatccattccacgtatgccaaccgtccccacaatggggcccagattgcttctaccattctgaacaccccagattcatgaaaacaatggttgcaagaagtgaaaggcatggccgaccacatcattagcatgcggactcagcttgtctccaacctcaagaagaagggttccacccacaactggccacatagcactgcccaaactggcatgttttgtttcacagggctaaagcctgaacaggtggagtggctaaccaaggagttctccatctatatgacaaaggacggccgcatttctgtggcaggggtcacctccggcaacgtgggctaccttgcccatgccattcaccaggtcaccaagtaatgtacctggtgcaaggaaacagagacgacctttctgtcttcagcctctgctattgggagcttcacacagaggatgagagagagcggatggtgg

SEQ ID NO: 68540 - DNA, 1051 bp, Homo sapiens
aagtatatctccaaatcattggcccactttttaatctagttttcgttttcttattgttgagttttgagttcttaatatattctagatacaagtcgctttttagagagatgtttttctgcctttgcttgtctttttattcccttttcagggttttttttctagcagagagttttaattacgttaaagttcaatttatcaatttttaaaatattgataatgcttttggtgttgtatgtaagaaatttttgcctaattcaagttcacaaaaatgtaattttcctcttctaatagttttagggtttgaggctttatatatgagtctaaaatttattttgagttaattttcttataaggtattaggtgtgagctgaggttcactgttttgcattaggacactcaattgttccagcactacatgttcagaaaatattaccccttacctacctgattactttccacgtctgtcaaatgtcaattgatgatacacgtttagatttgtttctgaaaccttttttctgttccattgatttatgtgtctgttcttttgtcaatatcatactgtctttgtttctattactttgtaaattacgaaagcaggttccctgatttccaaatttggccatttttttttccttcaaaattgtttggctattctagttctttgctttttcatataattttaaaattaccttgcttatttctacaaaaaattcatactgcaatgtttatcagtattgcactgaatctctaaacctgtttgggtataattgacatccagcaatattgcatattccaatctatgaatatcttatatctctctgttgattcaagtctgctttgatttctttgtccctttggtttccagctttcatcatactgatcctaaacatattttgatatatttatttgatatctttcatgttattataaatgatactgtttttatatttaaatttccacttcataattatgaatatggaaatataagtgatttttatatatgaacataggtaatcctgtagctttgccaaattcatttattctcatagcc

SEQ ID NO: 68541 - DNA, 2203 bp, Homo sapiens
aggggcagcggaacgcgcagagggcacggtgcaagcacgggacagctctgcattggccaaagggatcccaggaggcctggccctcttttctcctgaggctggatcccaaccagcaggaaaaggctggattttcgccttttgtatttgttttggggcccaaccaagaaaaacagtggagggggaataaaacatgtttaaatcttttttttgtcttaaaaccatctttaatttcacagtcacaaaataaaacataactcgaatgttttgatgtttgcagtgacatcgattgtgaaaaaggttagccagaaaggaaacgcagtgagacagagcgctcggccaccccctgccctgggcgcctggcgcatggggggcggggcggggctcgcggggtgacgtcacagcccgacgcgccacccagctgtttttgtgctcccagctctagcgaaaagccgccggtatttctccatctggctctcctctacctccaggcaggctcacccgagatccccgccccgaaccccccctgcacactcggcccagcgctgttgcccccggagcggacgtttctgcagctattctgagcacaccttgacgtcggctgagggagcgggacagggtcagcggcgaaggaggcaggccccgcgcggggatctcggaagccctgcggtgcatcatgaagttccagtacaaggaggaccatccctttgagtatcggaaaaaggaaggagaaaagatccggaagaaatatccggacagggtccccgtgagtgtagaggagcggaggggatgggaggggaagggcccgcgggggcgggggcgggtagtcgagatggcttccctggggcgcccaggcggctctggagaagggaggttccgagaattacttaatcctgaacgcccttcagtgccagagccaatggacgtccagactgtagagcttttaaaaccccgtatgcctgggccccgaaccccacttcagggctgacggcgttttgggggccgagccgccgtcttcagtgactcagcaacccacacacggtctcagcagctgagaccgtgtgtgggttgcggtgcacaaaatagggcccctgtgggcgagactggttagatcggggccatggattggctgcctttaagaacgcagggacattgtgctgtgcggtgaggtttgcgcaaacccagtcgatttctgccttggctggttctcctttaatgaagttgactttggctctcatatcattggtcttgggacgaaaaggttcagaagctattcagtaattttcttgcattacagggggttaggggagcacaagacagtcctggcctggaaaacaaggtcacgttctctgcccaacagccctcttgcctcatcgttctaggctccggggcttgtgtggggacagccagcctcctcgtgttgatttctgatcacctggtacctggtcgcgataaggcaggactgagacgttttttctccgttttggacaccggcttaagtagttaaaactaccgcaggcagtgagtaggaacagaaaagtattaggtatctttcagcatccgggcgttttccccattaccccctcccccgcccacttgcctggtgtttctctaatgcaggctgcgcagccgaattggagggcagaatatggcttaagtggtagggggaccagcagctgttggattttggaaatggaggagcggagattttaaaattgtgctctttatcttcaggtaggaacattagtattacgtgtcacataatggtaaaataattgctgttatctgatgtcttttcttgactcacagccactctgggtttcttctctaatccttacctaacgttcgtggttttatagctaccagaagccaccagggccttagcccagcagtagaaacctcttgtaacccttttcctttaaaaagaaaaaaaagtcattagggctcttcattccccaggaattacaaaaaggttttcagcttatagaggggtgagctaatcccttactcgggaaaggatcctttacaaattactttcctggtttctggaccttggatacctgaaaattttgcccagttctggtgataccaatcttttgagcaatgatatttaaaaaatacaatcaagttttattgatagtttaccctagcggtattataagtactcagtctgtaatcattgacttacttccttacacgattaccc

SEQ ID NO: 68542 - DNA, 1030 bp, Homo sapiens
tgctcccttctctttgggcagagattctatttttgacatttgcacaagacaggtagggaaaggggacttgtggtagtggaccatacctggggaccaaaagagacccactgtaattgatgcattgtggcccctgatcttccctgtctcacacttcttttctcccatcccggttgcaatctcactcagacatcacagtaccaccccaggggtggcagtagacaacaacccagaaatttagacagggatctcttacctttggaaaataggggttaggcatgaaggtggttgtgattaagaagatggttttgttattaaatagcattaaactggaattgacaagagtgttgagcatccctgtctaacctgctctttctctttggtgccccttatctcaccccttccttggaatttaataagtctcaggcatttccaattgtagactaaaaccactcttagcatctcctctagtattttccatgtatcaggacagaggtgtcttatgtagggagggggcaagtatgaagtaaggtaattatatactactctcattcaggattcttgctcccatgctgctgtcccttcaggctcacatgcacaggaatgctacatgatggccagctgcttccctccttggttatcatccactgcagctgctagttagaaaggtttggagggatgacttttagtaaatcatggggattttattgatttattttcacttttgggattttgtggggtgggagtggggagcaggaattgcactcagacatgacatttcaattcatctctgctaatgaaaagggttctttctcttgggggaaatgtgtgtgtcagttctgtcagctgcaagttcttgtataatgaagtcaatgccatcaggccaaggaaataaaataattgcttaccttaaaaatccactgagttcagcaatgttgcctttattttgtatgtattagaatagatgatatgtggactctctgaacaaaagaactaagtggggaaagctgttagtgatgaatgttcacatatg

SEQ ID NO: 68543 - DNA, 1063 bp, Homo sapiens
gcaccaggttttgctgtaggtcccaaccacaccttactctctccatcacaacttggtcagtctgaagccaccatctcccaaagcagcaaatagcacctaggcaaggctcccggcatcagaacaagcttggtgtcttctgaccatatgaaagtcttgttcagttattcaggaacgaatatgtgggtgggctttgagcatgcaagttaaatgagagaatggaaaacagattagtgaaaacttctttcatgaaaaaccttaagacccatctctaaccctctctaatctcttgcagtcatatccccaagtgatgtctacctctgtagagagttagggaatatatcaaggtcaccaaaaaggaagtaggaagttataaaagatccatgccaagcagcaccacatgcagaaaattatgtaagattacggaattttgatgaaggcattgaaaatggacacttgtccctaatgacaaaaatatcaaggtgctgttccctgataaagccaaaaggaagctaatatttgagtttaagatgtgaactgtattttgaaactaacagatttatccatgacctaggaatgagactggatgaatatttgaaagaaagcaaaaaacacatggcggcagatcctaaccctctgtacacatctgaaacagtccctgtagggcaagagactgtaggccattgctaaaccaaagagatcgtttgaatttaggggctgtgtctctcccaggtaggctttgcttattgtaggcctacttcctggattttcctaaggaacaaattttgtccttggataggacattacatatcattttcgacaagctgtctgattttacgaaacagtggagtttttaaataacagccaagttcagaggcaaagtcacaccagctgttgtggaagtgtgtccggaattggtgggtttttggtctcactgacttcaagaatgaagccgcggaccctcgcggtgagtgttacagctcttaaggtggcgtgtctggagtctgtcccttctgatgttcagatgtgttcggagtttcttccttctggtgggttcgtggtctcg

SEQ ID NO: 68544 - DNA, 1841 bp, Homo sapiens
tcaccaccttggatgttaccaagttgacgccactttcacacgaagttatcagcagacaagccacaattaatataggtacaattggtcatgtagctcatgggaaatccacagtcgtcaaagctatttctggagttcacaccgtcaggttcaaaaatgaactagaaagaaatattacaatcaagcttggatatgctaatgctaagatttatcaacttgatgacccaagttgccctcggccagaatgttatcgatcttgtgggagcagtatgcctgatgagtttcctacagacattccaggaaccaaagggaacttcagattagtcagacatgtttcctttgttgactgtcctggccacgatattttgatggctactatgctgaacggtgcagcagtgatggatgcagctcttctgttgatagctggtaatgaatcttgccctcagcctcagacatctgaacacctggctgctatagagatcatgaaactgaagcatattttgattctacaaaataaaattgatttggtaaaagaaaggcaggctaaagaacaatacgagcagatccttgcgtttgtccaaggtacagtagcagagggagctcccattattccaatttcggctcagctgaaatacaatattgaagttgtttgtgagtacatagtaaagaaaattccagtacccccaagagactttacttcagagccccggcttattgttattagatcttttgatgtcaacaaacctggctgtgaagttgatgaccttaagggaggtgtagctggtggtagtatcctaaaaggagtattaaaggtgggccaggagacagaagtaagacctggtattgtttccaaagatagtgaaggaaaactcatgtgtaaatcaatcttttccaaaattgtttcactttttgcggagcataatgatctgcaatatgctgctccaggcggtcttattggagttggaacaaaaattgaccccactttgtgccgggctgacagaatggtggggcaaatacttggtgcagtcggagctttacctgagatattcacagaattggaaatttcctatttcctgcttagacggcttctaggtgtacgcactgaaggagacaagaaagcagcaaaggttcaaaagctgtctaagaatgaagtgctcatggtgaacataggatccctgtcgacaggagggagagttagtgctgtcaaggccgatttgggcaaaattgttttgaccaatccagtgtgcacagaggtaggagaaaaaattgcccttagccgaagagttgaaaaacactggcgtttaattggttggggtcagataagaagaggagtgacaatcaagccaacagtagatgatgactgaagaataccggttaaataatacattcggatggagctggaagttgcaatttctctttaacaaccaaggggtttattttcaaagcgatattggggaattgatttcacagtttgttaccttagtaggtaacggtaaggttattctctctttttttttttggttatgaaaacttagggactacaattagtataaaaattggcataatgttggattgaatctacattttggcagaagttaagcattcccacataatgtcaaaattatacattatgcagtttttttgtttgttttattttgttttgtttttgagtctggctttgtcacctaggctggcatgtagtggcatgatctgcaatctctgcctcccaggttcaagcgattctcctgcctcagccccccaagtagctgagattacaggtgtgtgccaccacacggggctaatttttgtattagtagagacggggtttcggcatgttggccagg

SEQ ID NO: 68545 - DNA, 1050 bp, Homo sapiens
cccaggctagtcttgaactcctgggctccagtgatcagccctcttcagccttccaaagtactggggctacaggtgtgagccactgtacctggccaccatctttcttttttaatctctcacttttattgaaaaaaaattagcacaagaaagcaatatatcataatttcattgcaatattgcaaggtacttttgccttctgaccaaaaattgtcggtgtggaataaaatgggagattgtgggtgtgattaagaggtcatgattctatttaatggactaagagcaaaagaaaatattttagtgatgaagttatgataagcatttccatattctagacatttaggcagcagaattttttaaaatcatggtttatgcagttgtaagctttggaattaaacagttgactacatatgttttctgttctacagtaattctacaataatgcgtttttcttctgggagaggagaatgtgcatttttgacctcaacaagaatggcaactattgattgcattcaaacgtacaattgtatctgtgggaagagaatagactctattttctctgattcggtgtgcgccaagaagaaaaggtgaaaatggaatgttttctttttttgtttcccataataatttctgattataaatcattgcttttaactgtgggacttagttaattcttcaaaagataaagatgaacaggaagaaaaagaaaattattttggactatgactttaaagatcagatgccatctttcttcctggagaagaggagattttctcttttgagagtggttgttccttcctttaatgtccctgaggaattattcattctttctaattctcagaactacctatacaaccagttagagaactctgatattatatcctgggtcttttttcttatcaataggataaatcattccagcatcttctggttttgaaagcagttgtgaactagaatgtagttatttttttcttcccatctagaagttacctcatcttttaaaacatttgttttgctacaaaatataacttcaaacttactgaaagttgcaag

SEQ ID NO: 68546 - DNA, 1308 bp, Homo sapiens
tattgtttctaaggaaataattttaaatattgggaaaaaatatttttacaatttacagtctgtctgacatttggtaaatagctaattgtgatatattcatattaggagatagggtgcagccactaaaatgattttgagtattgttcattagtaatggtaattttcttttatacaattttataaaatttttgctcttatgtactgacttttctggtttataaaaatactttattaaaaagtgagagtttccatttaattaacatatagcttacagatctatacaagatgtgattgtatttagagcatttgaagtactctttttctaattatatgaaaagcatataatttctgcctttttattctttaactcatggttactttgtcactctttataagtttgattttaatttttcccaggtgacctaaagaattaatgaccattcagaaataaagcaaaaagcaggccacaaccttaaccaacaccaaagaaacatccaagcaataaagtggaagactaaccaagatttggacattggaatgtttactgttattctttaagaaacaactacaaaaagaaaatgtcaacaaatttttccagcaagctgagaacctgggaattcctgcacggaagacaagagagtagcctctccagtttcagcaaccgctaggtttctattttttttcctggtttttactgttttggtaatatatatattgaaacaagaaatattaataccacatggggagaaccccaaccaaagaaatctgaaatatatagtaaatgcttttttttccgtttttgttcattttggatgctggtgctaaacctccaagtgtcatgatttaaaaaaaaaaaaaatttatgtccttcttatttatttctaggatgaggggaggataacatttttgctttcttatgtgactctctttgaaaatgtgcagtaagaaattcctcaaaaataaaatttttacccttcagaggacagaatgtttaatgggagtgtatttttgccgaccttagcgtgtgtttgtcttctccaccacttgatttacttgacttgattaatagtaaattcaaagccaaatgtaaagttaagttaatgctgtttcacaaatttaggcatataagcttgagatgataaaaaattggattcctgttgaaatgtacagctggaaattgacaagttcatgtctgagttcagtagtaggcatgaattatttggtactgtctctttttgagtaatcttcattcagtgaggtgacgtgatgacctttagattaacgaaggagttaatagttctaacatcc

SEQ ID NO: 68547 - DNA, 1766 bp, Homo sapiens
ttgttgcattgacctgcgaataattctagcaataagtactcatcacttgacttttttttttttttaattttgagatggagtctccctctgtcacccaggctggagtgtgccaatctcgggttgctgcaacctctgcctcatggattcaagcaattcttatgcctcagcctcccaggtagctgggattacaggcatgtgccaccacgcccggctaatttttgtatttttagtagagatggagtttcaccatgttggccaggctggtctcaaactcctgacctcaagtgatccgcctgcctcagcctcctgaagtgctgggattacaggggtgagccatcatgcctggccctgatcacttgactttttaatttttaaaaataaataaaaccttattttctggagaagccctgtcctgttggcacctgttctattttcttctgtgttccctacagcaggggacctcctcgcccacgacctgccccagcagttggagaggctgaagataaagaaaatcagcaagccaccagtggtccaaaccagccgtctgttcgccgtggataccggcgtccctacaattaccggcgtcgcccgcgtcctcctaacgctccttcacaagatggcaaagaggtaaatccaaccagtcagggcggatgttgccagatagtctttaatcatgtcagactttagcattctaaaagtggttttatcacatgaaacctgacacttaacaaatataaaaacattttgctcaagatccatatatatagggtatgccttgtacataacacagaccacatatttgaatccagttaacattctctgaaagaatgacccatattaatggggattcagagctaaaacatttggggttcttcaaagaagagaggcatttatcaagaggaagctgcctctaagcatgagttgaaagcagttgtatatcagactttatggagagtagtggtatttagttgccgttttgtaagctgttcttatatggtactaattttgttttgttttgttttttgtttttgtgaggttttggtttcgttttgttttggtagagatgccagggactgaatatggtactaatttgtgactcatacttaagagtagttaaatttttgcatgctaattttccttcacaggaaaattcaaacttttaagaactttcagtcttgaactttccactgtcatctgactttatctgatttatggctttgttttgcattttaggccaaggcaggtgaagcaccaactgagaaccctgctccacccacccagcagagcagtgctgagtaacaccaggctcctcaggcaccttcaccatcggcaggtaagagctggggcagcccagtcttgagttggtattttctttttagtatcactggtttctcaacaagagtacaaattagtctaaactagttctgcagttcatctgtgccaaccccttgtctctattgggactctgtggaaaaagtgatttggtggttaaatatttctgggattgacctcattttgataagctttggtgagggtataagcattcagacagagttgatgatactcaacttcttttttctagacaggcagttttttaactactagtaccacttaggaaaactgatgctaaaagtccctaacaaaggcctggttttagtaatcagaaacagtttcagaacctgtttagtaatcagaaacagtagaataaactaaaggattttttttccttccctttttctttgataatcaactttatttattttgag

SEQ ID NO: 68548 - DNA, 1114 bp, Homo sapiens
taaaacatcatatgcagaagctgatcgaaagctgcttttgaacatgtacgcttattcctgtaacttaactgcatttagttaattgactgaatggctgactttcctacctattccatgtcagaagtaaaagttgtcttgatcctttaaaccatattttttaataatctttataatatctactagctctctgactaagtagtctggttaagccagtcaagagcatcaaaagaaaattcctaaagctctcatccatataactaagctacttcaaggttgtcagtgtgttctcttaaaaatatatagatggatctctaggatagtaaaaattattgagatcaaatataaaagtcttcgccaacgttttctactattacaacgctatgaaatttattgggcataatagaaaaaaaaaataggaatatataggccagtggtatttgccttatgcactaaggacataatatagcatgatttattagtgactgaataacttccatttttaaagaaaatagttctatagatttgaaaattaagtagaatcattcactgagctactatgtgcttgttgtctttgagaaaataattatatgatggagggaagggagcaacattgtggcatctaccaggtgacagatatttggaatcggttcttactttagttgtctctagagcctgagggaagcagtggtttccatattttttgttgttgtcacaaatgaaggaatttgattacttttaaaaatcagcaacttttattttacatggacaagaagtggtagaacttaattttaattcattttgttcttgtcatccagtctttctggcagactctcatcctttatacacgttaattgctgtttctgtcagtctttttttgtgactcaacagtttctgaggaagaaatggccgagcttacttaggaaactaaagagaggctcatgtgatggggatgatgtgaatgaagggggagagggtatgaggtgagatctcaggggaggtcagacatgctggtagaccactgtaaagacttgacctactgtaaatgtgatgagaagccagtaaagggatctcaacagaaaagaaacattgaagagattattggactgttttgttg

SEQ ID NO: 68549 - DNA, 5022 bp, Homo sapiens
tttcttcttgttgctgccaaaataggagaagtttcactcagtacctttgtgctggacagagaatcatatgagcccatgaatagggattgtcctcttggtacctcctagactaacataggtttcaacacattctaggaaaataacagtatctcaagtctttcccattgaggaatattcttcctggtctagcattgcttctactttgacagttgtatatttgctaatttatgttctttaaagaggttacacattgcttttgcgattgacattactagacaagaaagcaaaactcaggttgtatgagcaaacaagccatatatgtttaaatcaggatgtgaagtaccttgctcactttgtttaaaacctagatctgtttttaaaatcacagtgggaattcttagtatgttctgccagtcttatactctagcagtccaaggctgttttttgagttagtgtatattctttttaattttgaggccatctttttattttcttctcagggtgcagaagctgccaatgtgactggcccggatggagttcctgtggaagggagtcgttacgctgcagatcggcgccgttacagacgtggctactatggaaggcgccgtggccctccccggaatgtacgttgtctctgttacttaaccagtgattgagaaattgttcatgcatggaattaagtgtatgtacttggagcagataaatgccttgtcttctcctggagacaaatgatttaagtgatttttattttttctttagaggaaatttttatcttattttttaaaatgtgtattattgatttccataggtttttgggaaaccggtggtgattagttacatgaataagttctttagtggtgatttctgagattttggtgcacccatcactggagcagtatacacggtactcttaaggggaaattttagcgctcagaacttttccagagccgctggtctcattagacacttgccattcagaagttgtatcagttaggatatatttggctacaagtaatagacatttaattatcttttaacaggaagacttaagggagacagtgctgaggttttttttaacaaggtttctcttcatttggctcttttttctggccagaacctagtcacagacattcactggcaaaggggaatggatttccatcattgacttaaccttgttgttcattctttggtgccgacactgttgacctctaagaaaatcaaaatttggttggtgaaagagtgagaaataacttgtgaacaggcaataaaagtacaggccacagaactattaacgaatttgccttggttaagaggctgttttatttagcatagcatttttccattatttcaaagtaaagaagcaataagtgattctgtggatttttagttctttaggttggtttcaatgcaggggaaagagtttgtcacaaatctggctggagctttcttgggaggctcagtttataggagtattctcaaggcacccaaaacggacccagtatatttgtggtcatgagaaacttactagatttgaatcattcttggtgtttctagaattagaaccaggtattggcacattgaagaaaactccgaatgtttgtcagcacaggattgtgactgcctgtctcatccaaagaaaaactcatcagaattaaatatctgcagattgagaatgacctatctttatgttttgatagctttatatctttctgtttacctaaatgcttttcctccttattctgccatcatcacatcctgcccaaattaattctgtcagattccttaggacttcccacttgtttctttgtttttgcttatcttatttggtttttaataagctatgagggggatagctaggaatgagctgctgtagcatttcctacatcatgttctctttgaagttcatcagagtcacagagcgctaactgtgattattttgactcccaggttaattcaaaagcaaaagtggtagaaaaacattcagtgaaaaatttttcttaaagacttttcctgtccaaaacctgaaaattccaaagtcatgcatataaaagatatttagaaacaaaattgttaaaacgcttaagaaacaaaattgttaaaactcttaaagtatacataaatgagcttttttgttgtaatatctaagtcccaacaacttgttcagtatctctcaaaagagtgtgttcagcattgctggtgccattattatgctttgtaaaactcttaaagatttgattgtgtgaaatgcaaaagaggaagataagcccaagaagaaaaacagtttatgttgtctcacacttaatattttggtaagcattttctgtgcaaataaacgtttacataattgtgaatctcatctttggtagaggttttatgaagagtagaatgacttgattttttttgaagttagactagttgaggcttttttggagggggagtttggttgcacatgtggacttgttctggaagggtccaaagcttaaatacactcctgtaaaaaaaagtaatgggtcattattttgctttttttatttattcatttttaaaaactagttacttcccattaaagacatttgcatatcccctttaaagtaagacttgaaatcacagtctttgtaggatgtttggttttttaaaatgtaaaatggtagtatatgatataatttaaatagaagaaaaatataaaatgaatcggtaaattcctttgtgaatattaataagatctattatttagaaacctccaggattagggcttactaccatcaaagtatgattaaagctttactcctaaacatataaagggagtcatgccttaggtcagtggttctcaaacttcctgattttgggatctgtttatatgcttacatgttattgaggattctagagtttttgtcaatgtttatttatattaatattatattagaaagtaaaataaacttaaaatgttaattgattaaaaataactatatgttcatgaaaataacagtttttatggaaaaaaaatatttaaattgaaaagagtggtattgctttatacttttgcagatctctgatgtatggtttaatagaagatagctggattctcacatctgtttctgcattcagtctgctgagagaccacatgtcattgtagcctttgggagaccccaccatatacttctgagagaatgcctgggaaaggcaaatagcatcttagtaatattatggcaatagtttgacctcgctgaccccctggaagttttcagaaatcccatccacactttacagacttgtaggaagaataccacttgggtcaaatatgttggtaacatcataaaatgtattcttttttggcttttccctgacattgcctcagtggatggtaaatgctgggagacacgcatttgatggagcaaaaattataaaccttgcagatactcttcgggtggttggttagctgatacgagttctaatgagatgactattaaattgattgtagattgattgctcttgcttttctgcttcttggtattttatctgcacagatctactctaatcttaatgtagtttatcccaggcaatcacatgataatctgggttaaatgcattttgtctgtataatggaaaggattatattgctttggggagattttattttggtgatattcatcctaaatggtgttctttggttctttccttgctaaaacttcttctgaatctctgtttctttgcttcgctagtacgctggggaggaggaggaggaagggagcggcagcagtgaaggatttgacccccctgccactgataggcagttctctggggcccggaatcagctgcgccgcccccagtatcgccctcagtaccggcagcggcggttcccgccttaccacgtgggacagacctttgaccgtcgctcacgggtcttaccccatcccaacagaatacaggtaaaattgcaactgagacttctcttcagcaatcctcacccttccgtccttctctgcctcctcttcctcctcctcctccaacatcagctgccagaaaccttgcttatggcttcctgatgctacaaaagctgaggcaaggccttcagtctgttttttcaaagcagtcattccggtaacacttctaaaagcaaaaccacgtgatccatgcctataatagggaacccttatggccaaagtttctagttgatagaagaacaaaagaattaaggtaacaagacaggtggaatgtgtaagagcttggactctgaagtcaggctggatttgaatcctgtttctgctacttatttgtgaggttttgagaaaaccaagttttagattaagttcatccattaagtgggggcattaaatgcctgcaccatagggttatgatgattaaatataaaggatttagcaaaagagatgcctgcagcataaataacatttttaaagtattggttttaaatgagacagtgctgatttttaaaggcaacctaccagaatggaggttgttgattattgattctcctttttcactgcagaatattagtacagctgttttgagtttgttttgtgcttaataaaccttacatcaattttgcagttcctagggaacttggaaaactagggatagatcatcatttttgttatcagtagccacaacttttttctcctcagtgtcgttggggtttcttttttttcccctcaccgctagatgttttgaccgaacattatgttcagtctgttctttgctacccttctcctgtcccatcatgcatgactgtgttctttcttgtttttttccttctactcttcaacagctgcccctgacaaatgtgctaaaaataacaagtagacttacatatatggagagattgggtacatgagacatagtagctttagggcagcactctgggcttctaggaaacaaggacaggaaaagtcagtgagattgtaatatgcacttatttttagcgtcttaatagtgctttcctgaaatactcctccttagtgtttggcttatacaacatatatcacgtttgctgaaagcatgatgatt

SEQ ID NO: 68550 - DNA, 2709 bp, Homo sapiens
ttttcaaatagttttatttttgcagttgtataaagtgatatttggttagaccactttctaatttttaaagcctttgagtccttagcaaaaaaaagaaaagtctgtttcccttttagcatcctgttctcctgatgtggttcctccttagtgtttgcctggagccaatctggcttctgcctgggtaggtattggttaaagctcctctgtcagagcagctctcaattgaagtaaatagcgcagagaagcagatagtaagatgagaaaacttccagttcccagggtagccctcactcttgttaaatgaggcatgttaggacgtgtccaggtcaaaagctgcaaattcccttagatttgcaggaaatagaggaaatgggtaagatatggagcttctctgctataggtgcctcagtttttctttgctttattagcctaggatgttatttattctgttattaatatgtcctagacttcctttataaaataggttaagagaaggaatactatccttagtgttctttttgtttatttagttttcagtgaattgtctgaaatatgcgttctcagagtataacaataaggaagatagagcagcaggtactaatgccagcccattctcttgcagtgcagaaatccagaatacatctgattttctgtgtttttgtttccttctgtttaggtttgtgtgtgtattggagtgaccgtaggagttggagatagtggtatctagctgtggtttctattgtttatatttctacttgactggatatatctcagttgcatttagataatttgagtagatttattttgttcagatacagtgacttttagggtcataatagtgttgtttataatacttggaggtttgaggttaatagaccttttagggtaagaattctgaagactgctagagtcaaggtcctcagaagttgctgtattggtggctggctttattagcctgtgagtatatgacccgattccagcccccgtgaggttgtgtggtgagtcacctcaatgtgttgaggcttgcccagtttaacaggaaaaagggagcgagccggcagggaggggctgtttttggaatggctgaatgttcatgctgcgtgcctgtcctgaactgccttttttcctctatgggtgaggtctctgctctgttggctcactatttcttttccctcctactcagagttaggggacgggctggattacacatgcttaatcgctttataaaataaggttgacctagttccatagaaacgcaagcccctttaactgtttagagataccagccaaagaaatggaaatgcatggcaggaattattttctgccttcattgatggaacaagagagagcagcacctattcataagcagatatttaggtgtagatgtttaatgaagaatagcatcttcactaaccttttaatgtattatcagggaatgtaggatttgttgacatgaattgtgtgatgggagaaaagttgaataaatatcatataggtagagtacagggatatgaattccccctcctccacttcccccatcatccctggggctgttacggttgtgacttcagataaatcactttaactgttagcctcgtgttaactcatctgcaaaatgggaggagaggggggaggccagattattactaatacgttctgattcttgagataattttgtttactcgtcagaaatatttatccccttggcattttaatttgtttttctttatcactgcctcctttcctcctccggagattcagagaatctctgaagcttaatggtttgaggtaattaatacatctgatatgatcaggtgatcagcctgtaacagtagtgtgtagtcactgcacacactgcagttatagaaaaaacatgttctgtttaatccacctgtcaagatgaatagcacaaatcaaggaagtaatgtggaatatagttttatagtgctttcttgttgttgtgttggagatccaacttagtgggagaatggtggaaaaataagaatcggtcaacagtttcttcaagttcactctggtgtacttgaaagcagtgaaatctgtggccaatattgaaatatacatcgaataaaattttctgttctctttccagactgccatcaagaagaataacccacggaaatatctgcgcagtgtaggagatggagaaactgtagagtttgatgtggttgaaggagagaaggtgagaggaaattgtggttgggtatcaaagtgctggcacatagtactgttgcacaataaattatctatcagccccttatgaattgacatgactttggaatttttgtacaatagcaggaagtgacttttaaacagaattttttttttttttaagatggggtctccctcttgcccaggctggagtgcagtggcgcgatcttggttcactgcaacttccaccatccaggttcaagtgattcctctgcctcagtctccctaatagctgggattacaggcatccaccaccacgcccggctaatttttgtatttttagtagagacggggtttcaccatgttggccaggctggtcttgaaactcctgaccttaggtgatccacctgtgtcagcctcccaaagtactgggattacaggtgtgagccaccacacccagctagcagaaatatttttgacattgtcattataaacattctgcaataaagatactttaatttcttatttaataaatgatca

SEQ ID NO: 68551 - DNA, 1052 bp, Homo sapiens
ttgtcattcataattgattccaaagatcatatttgaaatagttgagataaatataaacctacaaaatacaagttacatgaagttttattttgtttagattccttctctcaattctgctaaaatcaggcattgtagagaagtggtcctgctcatgaggtagagacaaccattatggtaaagagggggattttatggaaaaatgcttaagtttgattcgcaaaactgtagagagcaaggtaaacaaagaaacaagcccaaattcatcatgtgatttgaaaagacctgttatatcacgtctcagagtggtaagtacagaactggattgagacagcagcagttctataattattcttgactcctctgatgagctcccacttggcgactggacaagttgctttacgtctttgtagattgcctgttaacaaggagccaccttgtttctcattaaagtttgcctaatatttccaagtatgaaagtgatgtgttaaggtctttcactcttttattgtagctcctattttgaacttataaaatttgtctaggttaaaacttggaacattcatcttgaacattctttttttccttcagtgtttctcaattttaatgattacagaattgtatagacttataaccactccttatcttgcgagtttcctgaaaagttgaataaggaagaaaggtttagtcttctgaaaagtatttccttatgagatcttggcttgctccattttctttttctaaagtattttggaattaagcttttaatggtttctttaggtatgtttaggctttgtctaatgttatcaagatcttagtgatatgagctatatctctctgtaggtcagatactaatttatctgcttaatcctattttagccaccaaagtccttggcactgtcaaatggttcaacgtcagaaatggatatggatttataaatcggtatgtgtgtgtgtatatttgcatgttttaagtttatacttacattgtggcaccaggagttataaatcccttagccttcattaatggcttatataaattttttaggtttcta

SEQ ID NO: 68552 - DNA, 1838 bp, Homo sapiens
ttttccatcatcagccttcaccttcaagtcacctcttcagttctaagtttgaccaagttgcagcggaaggtggttgtggcctagcagacacggtcccttgtcaggcttggcacagcttgttagtgggccaggactaaccagaatccaaaaacgagtcacacagtgtctctagtcccctccttccctgctgtccgtatcagtcagctttcatagcagaaggaaatctggtttttaaaattttgctactaactgggagactctttcgagctccccttctggactctgggctccttgggtttagtgatgattatcttggtgtcctagtagttagcttggcagctggcatagaaatatttctcagtaatgtttgctgatgtgaatgaagtgagaggtgggaggaggccagccccctttcctctttctgtctgcgtgtaacctcagggtgacgtaacactttcatccactggcttgcttgcagaaagcactcaatagggcccactacagccttagagagggctagagcactcctggggggtctgtcctcaaatgcttattaatagaattttgatacaataatgttttataatttttttttggagacagagtctcgctctgtcgccagactggagttcagtggtgcgatcttggctcactgcaacctctacctcctaggttcaagcaattctcctgcctcagcctcccaagtagttgggattacaggtgcccgccaccatgcccggctaatttttgtgcttttggtagagatgggggtttcaccatgttggcaaggctggtcttgaactcctgacctcaagtgatctgcccgcctcagcctcccagagtgctgagattacaggtgtgagccactgcgtccagcgtaatgttttattattttgataaaattctcaaaaactgcttttgtgtcaaaaataacaaagaaggaaattgaggaaaaggtacaacaaaggggcttaaggaattgctttaacaggttcagattagcaggcttctaagtgccccccagtttttctgacaatagaatcagggaactttcaaacattcagagttgagagaccttagagatcccctgggccaacctcctctattttttacagggaggggatccagagagctaaggggtttgcttcaacccatgggtgagtgagccaggtttggaggacacaggcctacaggttcttaggccactgcattctctgggttcatggtgtgtccctataaaaggccaaggaaactcgatataataggcttcgctctctctggcacttcctagcttggtccattttaatcacaagccagctggtctgagggcacgggggtatgtgccaaggaagatggtatgtgggggtagaaatgggccactggggtctggtcaggtgtgagaagaggaagtagtaggagggaggagatgagagaagaagggcctgacggacttgtattggcaccactatttgcatcaatatatgtatatatatatatcttttacagtgcacaaaggcctgcaagttctgttttgggctgaaggccccctatctgctgttaggactcctttgaggaatccttgggtgggccgtaggctcttttatcaagggtcagacaatcctatttatactttaatttctgtgtagtaagctccctgtttcaaacagtcaaagctaaaaatgtggcagctggccctagagaagtagctatcctgctcaggataagtaagtcaagggcaaaaaataccccagatgtgagcaccagaggcaggtagagctaagtcacattctgctcctctgagtgcagctgtatttgtgcacaccaggaaagagctgggg

SEQ ID NO: 68553 - DNA, 1071 bp, Homo sapiens
ttatatgataatagcaaatgccttttgcatcttacagcagaattttgaaggaatagctaatgtggttctgaataagtttccagagatgaaagaaaaggaaaaaacctaagtctggaagtactgtacagtgagtctaactagcattattactcagcgctcaagtatttgaacctattcagggatctgctccttcatacagttgcttattatttgtgactggggtgagacttgaaagagagcatcaattctccagtctgcttttgtttaacaggcagttccatgtctgtctgaccacagaacagacactgtttgctgtgggctggtgaatgttcactttcaagagcagggagtagatggcccttcgtggaagtttaattatacagaagagtttgaaaaggccaagtttgttactttggggcatggggaaaccttcctctctagcagatgtgaggggaccgaagtgtctcttttcagcagttgtattcttcttgctgtggacctaaattcgatcctaagtcattctttgtatgtacatggcagatgagaagatgaactatagactggaaaataacccttttttgaggaattgtggagaaaatgttacccacctgtccctcctaccaccatgcaataagtgtgggctacttaatactcttgaagcaagagtttaggtttggagagaaactgctcctctgatcttctcctggaaaccacaagtggaagtttgtgattttcttctcagctgccctgtcccctctcccttgggttatgacaggccgtgtaactttatctttcttaggacttatctctttgatgaggtcagtaatcctgcttcacttacgtcccctatacgtaagattgccataaccaaagatgacatgcagactctaaagcatttcctggaaaaaatgagctacagatagaagtaaggctcgtaatttaaaaaatcgaaccccagagaacagcctgtctctgaagttaaccattcccccagtactttctcttgtttccctggtgaaagtgtgaatctgggttgtggcaggggaagttctggcactgctaagaggtgag

SEQ ID NO: 68554 - DNA, 1114 bp, Homo sapiens
ggcagtttgccctgctgggagagatgtgggataaggccccagagtggaaaaaaacaaaaaaccttaaaaatgcaagaaggaagaaaggtaggtgagccagcaggtcccactgaaaggccttgttattgcagcaaagagggaagaggtgggcccagtggcacaaatcactaacattcttctgacagtcactagccagttcttctgagaatttctctgtcttgaaaaacttggtaaaatggccaaatggagcttctccgaactagggggaatgcctgtgtgtgcgttcgttgttagccatcatgttgaacagtctgatttaagggaaagttggtctgtgtacattttcatttcagctgtggtctttgaaggttcaccatggaggaggtgtgggtggatgagaatagagtcttctgcctcttggttggcttatatgtaggttataggtgaatgtgagttcacaacccccagcctatttcttatttgggtgcacttttggatgacttgcagggctgagtttgggaaaacccagttactcttcctttatgcacatatttctgccagactaaatgccaaatagataattggaaagaattttcttcgcagccctggtccccaaattggtgtctgtgattcttcctagggtctcatattatgagagtgcactccctttaatcttttgggacctcaagtggggtctgtgtggacaagattgtgcttctttgagaaacttcttgctgcacaccagccagggtaaggcaagagttagtcctgttggctgggtggttcttgggcagttgagcatgcttagcacttgagaggtttctgttataccatttgccaaaagggacatctctccgctggtcctagtgccccagggcacaaatggcaggctttaggagaaaatgcacaatttcaggttcagtctctatctgcatttgtgtgcatgaatggactaataattgcagtgcgttgaacgatttctgcatattccaacacctagaaagtagcttcctggattagggaacggttcctaggtacagctaccaaaggctcaagcttaagcaccaacactggaggttagaattagcacgctctagggaggacagcgagaggg

SEQ ID NO: 68555 - DNA, 1022 bp, Homo sapiens
tttatatgttggtaggttgtgtgtgtgtgtgtatgtgtgtgtgtgtgtgtcttgtctgtcttcagtggtgaactgaaaaaataaagtgttgtttacgtgcttctatgttagtgtctacattccaaactgggcaatagttttctttaagctggcttaagtgaagaggtgtttggtcagccacagggtatgaatcaaccaaacttcaaaaagcttcagtgtgtttttgataacactcttaagtatttaatagctgctttaaggatttgtgccttagtgtacttggatgaataggtaaatcacctccccatcagcaaactagcgtttgggttcccacgttggcaaagcagggttcctgttatgtgtctggtcatatttgaacttcttttcacattcaggtgacatagttgaacatcagtccgtgccagtttctgctactattgggtttttaatggaagagaactctttcttgttactacgatgccatgcttctgctgtgttagcagctgctgtattgaaaaacaggtgtctcttataatcctctgactggatcagtttgctagcctggcagagtcttattgttattgtttttatttatttatttttgtcccacataagtcagaaactgccaagagatgttgatgagtgggattagtatgagaggagatggcagcttttcttggtggaggtttctgttacaagaatctaagagtcttatgaagatagggctaaataaaaccaggatacgaaccacaggggagaaccgccaaaagaagggtagtaaatgaatggttctgtcaagtcacctctctgtcattcttcaaaggccaacttaaagccagcactgccacaaaagccatccaggactaaggttagcgaacggtgacccttgtttggtccacgatgcactaacagactcttccccttgttgcttcttactgctactggaatggaagctttgggagggcaggtgtgccatcttttccagcctgccaggcagtctggtgcatactcgtctttctcct

SEQ ID NO: 68556 - DNA, 1013 bp, Homo sapiens
ccttgaattatcatccacactagactgaaagcctgctgaggacaggagtctgatgggttcatttttatatttccagtgtccagctcaaggtctggcacagaggacagccaatggctattaattgaatagaatttcttaatcagtaggtatttattaagcttctgttacggacttaattggtgccaggctctttgatatgtaagataaagacctcacacagttgacatcctgagcaaatactctgtgagggttgaggaaagaagaaaggtagagacctgtgttttgaaacatatcaggactccatgtcagggcgaacatactgccacctcccatacctaaggggctcctgtgaggcataagtactgacatgtacacacagggcactcacaaatgctctccttctcagttgcctactttctagaggggaatatagatagctggagaagaagcttgagaaccttcaggctggatgtgccagaaacagcagagacagcccaagataaatgaatgtattaactgatcatccttttttttgatgtggctcaggatgcctcttgggtcagggagagagaaccagtggctgtttgttgtagctgtgtgcggtcttggccatagctggctgtggtatctgggacccagtggcaggtcaccaccgtatggggctgccagttgctcccccaccccattcctctaagagctagtagggagagagaacccggaagagcagcacggcttgctgaaacttctctgaggtctgtgattggcctttccatgtcaagggaagaatccctctcttacttgagtcagctctttccagtcttctcttgtacagcccatgttctctcctaccctatctgagatgaagatctctctggagctctcattttactcctaatgggttgcctggagggactaaaccagtgagaatgactgggcatactatgggactagaaaaacaactcaaagttatgtcttacggatggtaggacagcctcaatattgctgtttacagt

SEQ ID NO: 68557 - DNA, 1053 bp, Homo sapiens
atatcagttttcatggccaaaatttgccacgtggacataatagtatttggtatcaagcacgcctttcaggaagaagggaaaaacagtagattttgggcagcttttgattacaataatttcaaatttctaataactaagaagtacttcatgtgattcttgtagagtaaaagcttaaaaattacccttttctttgtaagtgatatgagtcttacttcgtttgggtaagaaactcagtttgaggctaccaatttttcaaatagtggtcttagaaactaattattgctgtaatttcaataactaaataggcattcctattcaaacctttactcaagtagttatattctttaactatagttactcatttgtaacatttttcactgtaagggtagtgacatcctgtttgtaacacaccctgtcctgggactaaatggaagggattgaggaaattctgctggagtctaaccccaccatagggcagcagcattttaggaacaaaagcagagaagctcacactcttctgagtataactggggagaagatttagggaggtggcttgtaggatcagttttaagaccaggtcagacatacgtacaaattctttctttgtaaatgagaagtggcctttaatagctttcatatggatagatgggtagatgaaatattattctacctaaagcatgacatttcagtaagtactacactttgaaacttgccttgcagggttttaaaaatattcttttctgggttctaatcatttataacgaagagtcactagcattttattaaaacccatattttttggagagggatattaagtgagcagggattgtgggttgttcttgcttttccttaactgtcctgccccaaaaaagtgatgggaataacccaaaccttaaaggttcctggggctttctttttccctagacagggacctcctcctctcccctgctctcatcccacttgttcctgaaaaagggtaaggttggcagggcggggaagagagaaggaaattagggttctagcttaaaactgctgctagagtggctagttctg

SEQ ID NO: 68558 - DNA, 1436 bp, Homo sapiens
cagaaccgtggaagagtccggagcagatgctctgtgggaaaccctgaattagccaagagcaaaagttatcgccatcctactgctctgggaaggctgcctgttggagaaaacctctgtgttcccttagccttttcactgactggaggactttccagacgaaatctggcacttctcagtaaccttgaacttgaacattcagtgacagaagggaaagggagagggtttcagctgctggagctgggtaactgtgcagggctctcgcagcgggccatttgtggctctgagggtgccaagctgcagtgttctgagggtgtgtgaatgagggtgttgatcctggctgcagaaggggcagctttctgagcaggtgggagtggtgaatgaggaggggatttggcggggcaggatgtgagatgagtttactctgctgggaaagaatttggagatgtccatgaagaagaaaatctggatgactattgagggagggctgatgttggagagaagggctcatactacaaatcagaataaaataaaggatatcttagtatcaagaggaaagcactgttaagatactaaaccttctgctgcccaggtatctgaggagagaccatggaagagttctatatggaacaaatgaaaaagcagtaaagtcaggtctagacctggagtttttagtaataccaagtttacataggaagtgtctgggaagtagtgattagagggaaagtatgttggatgagtgaatcattccttcagaaatcaatattttttcctactaggccctccgaatgtcatctttgtagttgcccaaatacatcagtttctctcttatgtaagagagcttgtctcatttttattgctgtattccattttcaagtgtcttcttgggtaatgatcctgtatttgatcttggccagatattatctgtgactgttgttagagtgatccttttcctttcccccgagttagtcaaactgtgtgcgtggtctctagactgagatttggcagtgattccatggctcttgtgagtggagttgactaacaaaactcaggaatggaatggccatattttggaatttggttgaagcaagtaaagtttttattcttctaccaatgcaaatctatctcagggaatttctctttattcagaaagaatgacctccatcccacctttctctaaaaggtacaaatcgtaatgcatatttgacacattagttggcttttaccttggggaccagcagaccaccccgcagatacaatgcacggaatctagcaaacaataaagagcagtgtgctcgcgtggccagatcgttcgcttccttcctttttcgccttcatttttgggaagtccttgcctcgttagttccataggccatgagacatagcaatataaaatgccagaggatgttcaaatgggcgtgtggaggaagagggaaagc

SEQ ID NO: 68559 - DNA, 1010 bp, Homo sapiens
tcagggcaggcatctcatataatttgactcagccctaatacactgattttcttacagccaaggattaactctctccattaaagactcatgtgaggggaagaacagatagcaaagtgtttgctaaaatgatgaactgtccctatttcaccttcaggcagcaaaatcatctgcttagaaactaattagagcattttccccaggcgttggtgatctacttctacatgcctatgatctcttagacagtagttgtaccatgttcaggaactggccataaagcagccctctccctagcctgtctccctctaatagaagaaggctgagagtggctcattccttcagatgaatctcagaccttttatttcagattcatttaagggcatttacttctctgtgatgctccttactttctgttctttaaaatcttctttgcttttggatcccagggtagacaaggaaaatgttgcaccatcatatataggtaggtaggagactttaaggtgctcaaagcctggtcgacattttctggtggcacagatgaagccattttctatggaagcctcctaggcaagactctgtcctgcatcccactgagtatagacctaatttctttctaatatggatggaggaataagcatggtcatttatcatgctgaggcagctgtaagccgtctgcatccgggttccattgcaattggaacagtagcaaatccattgggtttctttgtttttcagggtaattttctttcccttacagtgtactacagatttggggtctgtggtcttaagtgaacatttacataaagttagctatttatgattttaaacaaatttcatgcccctttctgctgtgttgttggtatttttggtttctatgtatcataaaccacagaagttcagtgacttccatggaatgatgtggaaaatcaggaagtaagactgaaattaagaatgaaaatttctgactatatgtgtcatgctcattttcaccgtttaaggtctttcagaccaca

SEQ ID NO: 68560 - DNA, 1053 bp, Homo sapiens
ctggtctcaaaactcctgacctcaaatgatctgctagccttggctttccaaagtggtgggatttaaaggcatgagccactgccccccaccccaccgccccaccttttttctgttcttttttttttttttttcagctcactgcaacctccggctccccgctccccacgccccccaccaggttcaaacgattctcctgcttcagcctcccaagtagctgggattataggcacatgtcaccatgcccggctaatttttgtatttttagtaaaaacgaggtttcaccatgttggccaggctggtctcaaaactcctgaattcagatgatccacccgcgtcggcctcccaaagtgccgacattacaggcgtgacccgcacccagcgccacaccccctttttttcttaataagaaaatgagtagacacatccctgggtgccaatcactcatgtatcaagattgctgagtatgagaaatcagtaaattaatatgaagaacttaaaacacagttctagccaaagtaatgcttaataagtacagtattgtgcaattattgctaaatagcatacatttattgtgttcctccatttaagatactttcaagcattgtagggaaagaaaagcacataagctgtagtctttagctttaacggacttgtagcctagttgagagaagccatatgtgtaagatgacgagtaatagcacaaagcagtgtgtgatcagtgccaaatgcaaatatgtactaaaggagtttaaagcacagagaaagtttgctgtgaactggaataatgataacaatggtagcaacagcagccagcatttactgagtgcttcccgtgtgctaagtactgatcaagtctcttacaggtattcgctcatttattctttatgtcagccatataagaaagatgtttctattagttttcctgctttacagctcagaaaactgagtgaggttagctaacaggcccagggtcccacaccagggaaatgtggagtctgggctgcctgttagagtcttggctgcctgactccagagccccagtcttagccacgt

SEQ ID NO: 68561 - DNA, 1090 bp, Homo sapiens
acctgaccactgcttctctaggcgtcgtttgaatatttaaagacaaagcacagtacatttgctattttattttattttatttcattttatttcatttcattttaaaccatggctaactcttctccagtcttctccaggagaaaaaacttgattgtcatcctggcacaaaaatgtccacagttaggctaacaggcaagcttccgtgagcagatcaaatttgctattctggttccaacatttaactccctagctttttttaaaagaaaaaataagctggcatcaactgaaatttcaggttaggggcttggtttgaggatgtttggggaagcgggagctttctgccatgtcttttgtggacattggatgtatttccgcattctggttggccacatttccccctggggcagattcttcagaatcatttgtctcccactgggagtctttttccctcccccccccccccacccccctttgtctttttctctgacatctgccgcacactctctccagggcatacggtccagaccctcctgggagagcttcatctgcttagtataacttctagcagaagatagaactgatggattttcgtgcgcaaatacagattcacaagggtgttcggtgtcacaagcatggatttatgatgcagtttgaaaagggtcagaatattcagagatgagattaatgccagcccatgagtgctttgtggtgctgaggtaactgaagtgcatctggtggtgtccagagctcaagtccccactgcagacgccaggaagaaagaggtggctcgcagactgagaaggggcgtagggatgcacccttcttgtctccttctgcttgataatttagatagaggatggcaggtgtaaatcagtttgtggtagatgcagtgtgagctgtcctttctcccccttcctcacgtccttacaagacacctgtctgctttgtatcgattccggcactgtgttatgatattcttgtagtttcatttttttgttgtttctcttttgatattggactttatatgcaaagaatgggattagtcataatctttacttcaaaacacattatcttcatatttttatgctgg

SEQ ID NO: 68562 - DNA, 1085 bp, Homo sapiens
aggccaggcgtggtggttcacgcctgtaatcgcagcactgggaggctgaggcggatggattgcctgagcccaggagttcaagaccagcctgggcaacatgacgaagccatctctacaaaaaattagccaggcatggtggcacatgcctgtggtcctagctacccgggaggctaaggtgggagaatcacctgagcccaggaggttgaggctgcagtgagctgtgattgcaccactgcactctagcctgggcgacaggatgagaccctgtttcaagaatagtaataataataaatttaaaaataaaatagaatgcattattatatgtaccttagaacttaggtcttagagagtgcctacctctccttgggagagaagacttacggtggtgggagacagtgttgcatctgtcagataaattagggaaggcacatggggcggacgatttcagagaagttaaaggcatgggagaacatttgccacgcaggccgtggcaagtggttggctttgactgtaacatgcagcgtatgcagttcctggaggcagatgagggaagtcatgcagtacttgtgtttctgtgagtctcttcagttttggggtttgtagacaggtcatgttcacttactcctaacctgtctcccacaatagtcatctgggtctgtgctacttagtgtcatcctctcactctttcccttggtggcatatccagttggctaagaggacaggcctgaccttgtgcccagagtagggagaagatcccgatcacctctggtccttgtcaggctgtttgcttggatggtagagttcacccaagttcggactcaggaacggcctgtggtcatggagtagtttttttctgtccagggtctggaccaagataactccatcacaggggtagcaacagtatgtgctggggcaattctgctacccacttctggtgtccttcagtgctttccctgcactatctctgtccccagctgcttccatccatttgctttctagtgatgaagcactgggggaagctgcagggatggctgctgcacccacatccatccctgcccatctgttctcagagactctatggctag

SEQ ID NO: 68563 - DNA, 1049 bp, Homo sapiens
agatttccaatcatgcccataaggtaatgcaatttggcaagaggatttggacttgacgaaatctcttgttctatttggcatccagaaaaggctgacttgcctaatttgaaaataaattgaaaacaaaaaaaatttaaaaaaacctctggttgttccttgtttgatgaaataccatagaaaactattactctttttccataccccattactatggagaatatgtttttaccactgactcttctaagtatctgtccttagtttcctgtccttccctgccacaggttccaggaaggctgaatcactacagcatggtattaaatcatagaaatacgtgtgtattttgtaccatgtgggtctgcttgcattcctaacatctgcattagtattagttttctattgctgcataacaaactgccacaaatttagtggtttaaaacaacattcatttcttatctcagtttctttgggtcaagaatctggacacagtttacctgggtcatctgcaaagggtctcagaaggctgtaattaatgtgttagccagggctgtgttctgatctgaggcttgactgaggaagaacccactttgttagcagaatttagtaccttgtggttgtaggacagaggattttagtttcttactagctgttggttggaggcttccctctgttccatactatgtgggcctcccaacctagacacccacaacatggcagcctgctccttcaacaactagcaagggagtttaatgttttcctgtagctcatatttctttataggtgtgacctcaatttttcccctaatacctttgtaagatagaagtagggagaaccaagatagatccaaaaaggctgaatgaaatgcctgagattgagctggtggttgcattgaacaatataaattgatgaataacaatttattaattgtgccaggcactgtgctaagagcttcatgtcagtacattcttgtttagttcttagcacaaccctctgagttaggtattactactactaaactatttaacaggtagggaagttggggattagagagg

SEQ ID NO: 68564 - DNA, 1047 bp, Homo sapiens
caggggtcttcttcctgtttgtgaattatgactactccaggtctctccgtaagtggaatctcatttgaccttttgtgactggcttatttcacttagcatgatgttaaaaggtttatccatgttgtagcatgtgtcagaatttcattcctttttggcagccattgtcttaagactcaagagtttaagtgtttttagtctctgtagccagaggtagatttttcttccagctctgtgcttgggcatttcccaaagcgaaacttccaaaggcacatcctgtcttcctgagtggtattctttgaggcagctgagtagcaaaactgaggctattaatgttcgcttagcaactgagcagctactgtgtatcaggggctctgcctgtgaccagggagtacacggtcttgtagaagagaaaaccgggtactcagctaactgtggtaccatgtgctaggtgccaaaggaggaacagagggccctgcgtgatctgctcaggaccgtgagggagaggtaagaagagttcaaaggagaggtcatatttcaaacagaccttgaagctgttcaaggcagagaagaaaaggatggtgttccacgaatggcctgagctaaggcaagtggaaacacgaggtttgttggaagaatcgcaaggacagcctgatgtttatagaaagtggagagagtgtggggaatgacattagggcgtatatgaatgccatgctaaggattggggtacaggtaacttggaggcctcatgcagttagactgaccccgttcgatctgtgggttgacaggggggtgtgaatggattggaatgggagagaccactgtgtggggcaaatgggaagggagcgtggttgcagcattttaggccagagatggtgagggcctgaagcaaggcagtgagagagaagaatttgctcatggtcaggtgcatcgggcctgttgacagcagagtttgttggactgctcccacctattgctttttgtcttctgaagtttttataatttcaattccagtttagaggtctgtttttagaacatttctccgatctt

SEQ ID NO: 68565 - DNA, 1051 bp, Homo sapiens
agtttagtaaagggcagagcagggactagactccatttctcttcgctggaagagcccagcactatcacattgcaagattgtttcttgtaaaacagtcctgcataaaaataaaaaagagtagagagcatgatgtgaatttcagcttttagaggctgctgtctgtttttcataggttaaatagtgaatcagtgtgctccgagcttccatgaggggcagccctccttacctggcaggttactgagttttctaatgacttcagttttaggtgctaggagatagtagggccacctgcactgttttgtgagcaggacagataagaggcaagtggagagggtgggagagcactggcttgcatcatacaccccagctgcccttgcagggcccgactgttacaagccaggtatttctaggacgattgcattcctagccatatctgttttctttcagatggggcgtacaatttaccttttgagttctgtaaatggaatcgaggtgaaatctttactctggtgcacatatgacctgcaggttgatgctgcttgtttggaaagccctctacttcacagcgaacagtttgtactgtcaggtagacctctctgccaggggaccaactcctgtgtatttgaaaaggaagacaaacctgtattttgtagaaagggtctattgttcccagggggtggttgtggccaacttcttggactcctttggctgactctgaagaaggaattgaagtcagaatgctaatcactgacttgcacaggcctcaacaatcaaacctcagggaactcagaagaaagtaaacaagagcgctcaattgcagagtcttgaagaagagcagctgtgtaaaggaggctagacgtgaaaaaaacgtgttggagaggaaaaaaaatcacattccctgcttctcaaatgggaagtcttaaaaataataaagaatcctgagcagcgggctcatttcccatgagcaggcttgctgtggcaggcaggctcacctgctagaggtggtctcctggcttagaatgggagcacacctgtgggaatcgcagcgctt

SEQ ID NO: 68566 - DNA, 1060 bp, Homo sapiens
attctatatgtaatatttgatatataaccaagaagctatgtgagttacaaagcatgatgatacagtgaacacctatgaactcaccacccaacataagaaccaaaatgactgatattgataccctacctatatacctctaccttcttcctcattctacccctgccctcttatcccagttagccactgtcttaaattttacagattttattccgttcctttttttcttttttgaaagcgtttgatcttttcttctctcctcctctcctctcctctcctctcttcttcttttctttcttttcgagatgaggtctcgctatgttgtgcaggctggtctggaactcctgagctcaaatgatcctcccaccttaacctcccaatagctgagaatataggcctgtaccactgcacctggctagatctcatgttttctttggaaatctagtaattgtgatataggatctctgaatgcagaacacctagggcacaagtgatgcttaattttatgtgtcaacttagatgggccacagtgctcatatgtatgatcagatattcttctggatgtttctgtgaaggtatttatggatgagactaatatttaaattggtggactttgagtaaagcacatggccctccgtaatgcgggtaggcctcacccaatcagttgaaggcctgaatagaaccgaagagggaatgccacagcagatggccttcagacttacactgcaccaccggctcttctctgggtctccagcctgctggcacatcttgcagattttgggcttgtctgcctctataagcacataagccagttccttaaaataaatatctgtgtgtgtgtatgcatttatatatacacacaccaccctattggttcactttctctggagaaccctgactaatacagcatatcacacctctctgtatgccacgtaggtagcactgcagaattaatttgcagagtattctcacatcgggaggtcagcagtatattaggcgcatatcagaaaggcatttggatgattctggcctacaccatggaagagaaaccttgattttctgt

SEQ ID NO: 68567 - DNA, 1957 bp, Homo sapiens
tacccttttcctcctacctctgacacctgcccttcacctcccacctgctacctgagatgggagccacacgtgaagtgagaagaagggagaatgaccaggtgggtgatgaatttaaactggaaagagaacagatcctgatgccagtcaggatagaggtggtctagctcttatgtgatcatgggcaagtgaacatgcctcagtgagcctctgatcagtttctgtatgaggataattatatttatcctctaaaatgaggataatgatatttatctgatacagttcttctgccctaacacatacgtgtgcattgcctttgctttcaaatgtttggtaatcacctttttagatttaaatcattactcaaattgaactctccttcagcctttgtgtgtctagactttccgttaagattagattacttgttttactatgattgtaaaccattgtttccatgaagtctcatagcaaatgttcttttgctttcctcttttgttactagtctcttgttatttctcaaacatatcaagcgcacttctccctcagggcctttgcgtgtgctgtttcctctacatggagctcagatgactgcatgtctttttcctaaacttctttgaggtgtctgttcaaatgtcttccactcaggggggctttccctgagcaccttatagaaaataaataaaatgatataatatctgctctcacgttctgttgcacttgccttgctttgtttttcttcatagtctttatctggaatatatatttatttctgtctacatcctcccactaggacagtggttcttaaccttggatgttcattagaatcaccctgggagtttaaaaaaatcctctcctgtgttctagaacaattaaattcagtaatgttataaggaagagactcagcattagtattttgtaaaactcccaggagattcctatgtgcaaccaagcttgagaaccagtgttctagtctagaaccttacttcccagaggatgtggactggtggcatcagcatcacctttatttgaaagctgagtccaattcttctctttggcaggacccacagatgatgcatatgacattaaagcttgagatgcactgcactagaatgcaggggcgtcattttgcttgctgctgtatccttagtgtcagaacagtacttagcacatcataagcactcactaaatatttatcaaatgaattaacgttggagatgagaggaaggaggaggtaataatggaaagaggacaaagaaagagaggcaagggaagacagaaagaaaacagatttggcctccccacattttctgggcacagatataacggctctctcttgctctttgctcccaatcaaaactcagccagcctcatgtccaacatctcatgggcttgcctccagttctctgcactttccaaagtgatagctgactaatcaaagatattgtgataatgaattgcctaactacgcagcctgccttcttctcttctagcatgtatttgattaggggcctgctgaaaccaattaagtaaataattcagtatgactttatgaactacctactacatgcatggcttaacacaggcagcctcaagaggctgagaaccaaagacggaaaaagcacaacttatagtccagctatagagacagacttttaggtaagtaatcataccttgaggtgaaaaaaaaaaaaaaaaaaaaaaagatctgtgatggaagacacttacagacatgtagacagggtggtgtggaaggtctacagtaagtgactgtttcagactgaggggagggagtagactcctggtgaggagggcaggggcatgtgagttgcgtatgtgagtggctggaacacaaggtggggaggcatgcttgtgtgctttggcaatcacaaagacggttagaaggcagttaaagggttggagtatggtcagttctgtgttttgaagagatgactgacagtcg

SEQ ID NO: 68568 - DNA, 1326 bp, Homo sapiens
cggtggctgacgcctgtaatcccaacactttgggaggccgaggcgggtggatcacgaggtcgggagatcaagaccatcctggctaacatgaaaattagccgggcatggtggtgggcgcctgtagtcccagctactcgggaggctgaggcaggagaatagcgtgaatctgggaggctgagcttgcagtgagcggagatcatgccactgcactccagcctgggcgacagagcaagactccttctcaaaaaaaaaaaaaaaaaaaaaaaaaaaaaagatcattcggaaccgaatatgtgaagatcagggctgtgatctggtgaattgggagtgatttatgccacccaagcgagttgacctgaaccgctggggtccatcatcctgcttctgtttctgcactggcatttgtgttagtatttggtggaaggtggttcacttttggctgaagttggtggatgtgggcagagcaggattagttcctttcttctgccctctcttctagcaatgctccaaggatgctttggaagactcattattcagagctgcagctggactgccttagacatctgcatttctctatctctgaaataagggactcaaacaagagcatcactcttttcctttccagctctaaaattatgtgatttttctttcacatggtaagtgaaatagtcatctgagctgctgtagtaggttgagcttattgtatcccagatctgagtggttcaactccatgttcatgctgcccagttccaagagcacctctgtggccttcaaacagttgtacacagtctgtaaactgctcagccacttctcccagtcttctaagcaggcaaagactccttatctcttagatctaaaatcattaggtagattttgattccaagggtcaaagcacagcatggtaggcagcaagctctcatccaagcccgtatttcagcaggcaggcgatgctgaggtgctttaggccttcagtgcacacagatagatgcttcccctgagcctcagggaaagctttattttgcccacgttgtattccttcctgcatcgtatatgttaatgttgctctgccactccaaatacagcagtgtctgctcagttccattttcttccttttgcaaagagcaggcaaccagctatgccttcctgagagcagacaaacctggagccaagggggccacattttcagcttcaatagcaattgctgcagctcccttatttcatcacctattaggatgcgcaggcggcgctaagtgacacatagcccataaaacatatctgcttcctgctgatttcatggttctggaggacaggctgtgcacagggatt

SEQ ID NO: 68569 - DNA, 1005 bp, Homo sapiens
tttagaattgcattttgtctaaaggaaggatagatagaatactactaataatatcaagatgctcagaaactgttgagaattttttttacaggaagaacttaaatttccagaggcttttaaaaaaaaatttattaaggaaggagtaaataaatacgccgggttcttgagtaaactacttttacccttcagaaccactttgtacgtagactttatcatgatggccaagagtttttaaaatactataggcagagggtatactctagagaaagaagacaacattgggtttaggactgctagccccatccagagcagttatgtggttcattcagggatcttcttagcccttcaacctcaatttctacatctgtgaggtaggttttgtgctagttctagtgacatgactcgtgggtgtattaggaggatatagcagcatgtaattgaagggcttttatcttggaaaagccttagtaggctcaaggtttctagttgtttagggttctaagattttactaactagtcagctgcttggagttcaaggcatttcttcagattataatgagttgatagtgcagtgtgcaaaaataaagaccgaaccatggtaagtagcaaggttactgtaaggaaaaaaatgtgtcccactggcccctttaaaatggcacaggtgcatctctgtagcaaccttgacagccatcatgtgggatcattcccctcacccagggaacagtggttccccaatctccaatctctccattctccagcatgagaaagtggtctggagcttgatcacatgaagatggacagacacagccttttggatgcgagagagggaagggaatgcaggccaaaagtggggtgggttttcctttcctcttccttgttttttattaaccttgtcttgctcctgccacacacaagtgcagccagtgctcaggacactgctccgtgtggagctccggaaagtgaagctgagaagccttccttggggtggacatggggggagctgca

SEQ ID NO: 68570 - DNA, 1041 bp, Homo sapiens
tttttcccccacaggccacatatatccttaatgccttcatccattcccctcttgggaatgtgcatctttgggccattggagaggtcttgcttggactgcggccactgtgatttctgggggcagactcagctccttcttggtgtagagatctgcccactataggcaccaaatagatgttggcaggcttctttcctccttactgcttctatttatctcacctgtacttttagatttgctgctcttgggtaagcagataagaacaagggaaatgtcttccgttgttgttaaagacaatgttaggatagaaagtaatatgtttgtactcaaaaatgcccagtgagatttctagccacggccaagttatcatttgcataagcaacctggaaatgccctcttggtcctactgattgtgtcccatggttaatgtagatccctggataaattcgaatggctactcctgctcaggggtcatgccatgagaacttttctcatacatcagatagagtccccttccgtcagctgaatgcatttacccctcagtctgtgctacccataggataagcaacatgcataagaaggtaggtgccttggcttaggcagctctgttgagtcaccctcaagaatcctgctggaattctgtgaggagtgaggatgcagagcaacgaaatattcgaaggctgctatgatttttacaagcttgaacctgtctcttggaattccccattgtgaagtcattgttgactggttggcattataaagcagttcagagaagtaaagttagatcagtctgcacgcaaataccagccacaccatctcccaagctagtgactggaactgcggttttcaagtcagtttcctcattgcggaatggagataacgatgccttccttgcagggtcattgtgaggctgaaataaaataaaggcttcatgggaacacataccacatgctcacttaatgctagctctctttcctgattgtggcagtgactgtattttccagctacaattgtgacacgtgttctgagaggtgttaagtattt

SEQ ID NO: 68571 - DNA, 1186 bp, Homo sapiens
gcatgttgatctaagctacaaattgcactgctgttttgccgaacccaacagtcggtttcttgccattatttgcggtattttaacttaaaactcacggtaatccttctcaccccatctagtttgttttaattgatctaacaaacactgcttgtttgaattcaaatggaggatccatggaagctctcccaccccaccctttgatacttgataaggggtcaaacagtacttcttttaaattcagataattctttgaatgaactatgaaatacttcagagggaaaggaaatatcgattctgagatggagagtaaaagaacaaggagatattcattattgttgcagataattcctagcaatgaaggaaaaaattagacgttggatatttttggttgtggtggttgtatagtgagataggtggacaatagaaaaatcttccttgtggattgaagttctaaatctagaacttatctttgaagctgtcactttacttgatcagctcactatggaagtgaatctagaatcatactttgattagaagctggggatattgctacagaagagaaaacatggctttaatatagtgatggcattaattatgtgacttgggcaagtcattttttaaaaagttgtctttaagccattctcgcggacgtattttttttgttcccttttgtccctcctttttacttgtacaaaccacagggtgtacacctattgacatgagtccaaagtaaaggctgttttcaacgatggcagagttttgttatatagccccaaggctaggcatctgaaagacaactgtatacagtgtctctacggagagagtaagccggattgcttgggaagctggtactgcccatgccccgcctcccttttgctccccaccccgagatggtctcatacctccattccaagctttcattgtctctctccccctcccctcttcctgcccttatttttaacagcaggaacgaatttcatatacacctccagagagcccagtgccgagttacgcttcctcgacgccacttcatgttccagtgcctcgagcgctcaggatggaggaagactcgatccgcctgcctgcgcacctgcgtgagtgttcgtgacccgagagggacagaggattgatggcgtggggcgggggtggcaggcagtgggctccaggccagagaggggcaagctct

SEQ ID NO: 68572 - DNA, 1066 bp, Homo sapiens
tatttgccagtgataaaagcaaagtgataaatggagtaaagtgttaagtgctgattagagaggacttgaaaaggactggcaaagaagcctgggcagagtgcaagaggagagcccagggaagaaaggccagaccgtgccatcctgctctgactcactgcccagattaccaggacagtgcccttcaacagtcctacagcagaacccctctgcttaccgggagagcaaacacaagtatgtttgttgagaggatagaaagggcatcattttttcttcttcttcctcttcttccataaagggtactgaattttttttgaagcttgagggtagaagagccgaagtacaattacagtagacaggtgggaaaaaaaaagttgcattctttaaaggaacataagcttttcattgtagcttgaaaacacttgaaagaccaaggacccccaagggtgcccaggcaaggtcactcttgactctacgcagagaagggctgttgctgggagcaaaggatacctttgcccagttctcaccaggggacttgtagtctcgcaagggagggatgttttctgatttgtctacccaaaggccgccctttttctaaactcatgggggagtggctgctgaagggggcagttacagcacctcacgaggtgctgccagcctgctcattggcagaggcttaccttatgaaacactgggcctcagacagtgatgctcaggccccgccttaggataacaatataagtatagttcagattgatggggcagaatttaaataattaaatgtcgttattttaaatttcttttaaacatgatcatttcacatttagttgacattgcgccatttgcccgcagactgtgcattttgcagtgtccatttggccttctaaaatccctgtgaattatatttaaaaatcggaacgtaggactcattcatcatatttaatagggttagggtttatgatgttgcaggttaataaatagccataatagccgctcggcgttttctggagtcagaacaccagaaatagtcccttggctctctttcctttccttgtgaatctttcaaaat

SEQ ID NO: 68573 - DNA, 1033 bp, Homo sapiens
ccactctgaggtcaaccgtgtttaagatcataaagccactctagagaatctctgtggcattgttgtgtggaagaagaaataatgatcactactattattatatatatgtgtgtgtgtgtgtgtgtgtgtgtgtgtgtatataaaagtatatgtgtgtgtgtgtatatatgtatatatgtgtgtatatgtatatgcttcatatatattatcctgaataataacaaactctgcacagtagatattatacctgaggctcaggtaaaccacttgcccgaggtcacccagagaaagtggaggagccccaatttgaatccgtatctaattccaaaacccagacttttattttccacttcaccctattactctttaaaagtctgaggagcaaatgaaagttgtttcattctatctattggttagaaggagaatatccaagctaacaggctgatttttttttccaatttttaagcataatataaattactgacaagagggcccagatggataaaatcagagctataaaccaaattatcttttgaacttgaaggaagataaatttccatatccaatcctgtatgcacactgttatctgccagatagtctcaggtatgtgtgtaaattctggagtgttagaaacaaaactaaatgaagtaaaaagaggttccttgtctattattttccatcttttttaaagagatgatctacctcacagatggttattaaacagtaagaaagatgctgtgattgaatgaagattgtgttactgagtttacaccttaaaacactgaacttcctgataatttgtgttaagccaacacgcttcagaaaaattgcctgacgtttggtgccttagtttacccacatggcatgtgtgccagaacacgctacaacagggtaagagggcagagaacatgctcttgtaggggtcagttccttgagctctggttctacgtggctgattacttgggtcatcccagcagttcattccatctctcaggactgtggtttccacatctgcaaagtgaaatggcctgag

SEQ ID NO: 68574 - DNA, 1021 bp, Homo sapiens
gggctctcaccacttaaccattcacaatatgtctgagagattaatttttgtaaggctgtggtttgagatatctcccccttccttgttttacttaaaatcctcagtgggaaagcgtgcatggggaaaaaaaaaaccaccaccaccctggataaaaggtactttggtaacatacgtgctttaggaactataatttgtcattttattttcttgtgccctcttcatttgaaatgctgcagcctttctgccagaagtctcaagtttgtgtatgagactgagggggaaacgagagtaggtaccttgtgctgagactgtcctgggacagtcccgtggtgggtgtgagcgtctgtgtgatgcaggtatgcttatttcttcatgaaagccgcaggtactggttgcctctcgcagggttaaaactcttggcggctcacaggaggtgatgaagagcaagggcacgggagaatgaagaagcaggaggaaggtgtgggccagggtcggtttcggtggggtccccacttgctgggtgaaagctgaactgtttatccacacatcccagcagcagcagaaagccaaggggtgttttcaggactcagctgccaaagtttcttgaagcagctctgctcaaaggcatatgctgggctcacttctgagggaaatttcctttttggggaagttgaagcaaaggaatttcctgtgtgggcagacagagcttcctgacttgaaggcttcttggaagggaaacagtttcataatgaaatgacaaattaaagacataccagccgggttcacttcaaaacagctattgagagtgcaggcaaagccctattatactccctcacagaacaaaaataaatcccatcctgacaggtttctgtatgccggattatatccgtccccccacacctttcttcacagccttcttcatgcttcccttcctcccacccccgccattagctgccaccagctccatcttgaacagctctcgagagcagccggcagccaggccgggagcctgtttcttgct

SEQ ID NO: 68575 - DNA, 1071 bp, Homo sapiens
gttaatgaaataaaaaaggcacaggctttgaaatcagttgtctaaatttaagggccagctctaacaatatacaaccagcaatgtaaccttgaacaagtcactgaacctcccagcctcagtttccttatctctaaaatgggtacagtcatacctttttcacattgttgtgaggaaattagattatgatttcagaggcactttgtgaattcctataagccttcatacttcttattaaaccactattgggatctctggagactgaaatatagtattaggctaagacagcagaattgtagaatttgtagatcaatttggcaaatatttagtagaagtcttctatgtgtgcagcatggctcgactctgtgggggaaaataaacaagtggaaagtttcaggtggccgcatggtatagcagaaagaatattggacttggggccaggaggccagggttcaatcctggctgtcactcagttgcctgtgacttggtatgaactgtttaaccttgatgagcctcagttgctcatctgtaaaactgggagaaatcaaactctatgaccttaataaactctgtccaactctaacattgtataatcagttttaagaggtttttgcctttagcagctgtttataggatttattctaaagagtagggaagaaatattcattgtataagagcttgtctgatgaagaagattgcatgaaaaagctacacttttttaataagtatatctgatgtaaacaggaaaaatgggtgcttgccagatatgtcatctatagcaacttgttttgagggggtctctgaatgctgacatgaaaatgactaggatcatgggttgaacgtgagtttgctcaagagaaggttctcttggggctttggtttacttcctcccagctgctccagggaacactcaggatatttccaaatggctgctcatttaagccattcccgttatggttctccttgtccaaattggcttccatggtacagtcccagtgttgactggttctgctaatttgattctttttttttttaatgtgctgatatgtagttttaggactgctgcattattgt

SEQ ID NO: 68576 - DNA, 1047 bp, Homo sapiens
gataatgttgtgatcatgtgtataaaaactttcagacacctaaaaagtagaaggtgtgattcatctctgttaaagcttaatctctgagcataacaaccaacatctggaagctaggcagccaacagaggggttaatttttctggaaccttggttgcaaaaggttattagtttgcagaaagactcagagatcactgtttatcttaaaccacaagagaatgtttttgaattcagaagaacagtgatatagttcggtaatttcatgaacctcttccctgggaaaccttatgactcaacagtcaaaggtgtccgaatagtaaagatggttttcagtgatcaggtctgtgcccatgcctggccttggatagactctgaaatgagattctttgtttgattgatggggtgatggtttctgttgtgtacatttgaaggaaaccagtttccccacccaaaatttctaaggagtttaatctttggggtataggggagttaaactacactgagtcaaggaagtaattgattgcatatttcctctaaaagtcagctatggacttgatattgactaaaacaaactagcagttctcttccaccaccaagtcagagcgtctgttcaccattctgcatgattaaaagaacaactaagaatggtaatgctccatttaaactttccttgtgattctctctggtctaccttcaatcaacaaaagcctaaaatttttattttagaatcatgatgttggaagatctttagattgctcataccataaagctgtttctaagattggtctcgggaaggtccaagatcaggattgaagtatgaaaaatcttggccaggtgcagtggctcatgcctgtaatcccagcactttgggaggccgaggcaggtgggtcacaaggtcaggagatccagaccatcctggctaacatggtgaaagcccgtctctactaaaaatacaaaaaattagctgggtgtggtggcggacacctgtagtcccagctactcgggaggctgaggcaggagaatggcgtgaacccgggaggcagagcttgc

SEQ ID NO: 68577 - DNA, 1060 bp, Homo sapiens
taaaataatcactgaaataacctttggtgcttagtatggtaccctggaaaacttggatctctagaatggttcatttcagagcttttccagatagccaagtttttattagaaaattggttggtatagacggtgctcactgtgactgttcagtgcatgatgagaatccttctttacagagataaaaagtgtgaagagaattgctgagaagtaaccattcattcccttctgcatttgcctagtgtgctgtgtaattaaatgagctgataaaatttacaagaaataaagctttatgcaattacaaatagatgacatgactttttaaaaggttttgcccatatttttcacacacgctctacctttagccttctctgctttcacacagatgctgaaaaacaaaagagttaattagaaaccattccttttctctctttctggtacagagaaggcttccactaagtatgtgctgaataaatgacccagtctgaaagttttaatttattacacagtatattcatagaactgtaactgttacaacctctagtttgatagatgtagctgtttttgtttttttaagttgagattatattaatatctgtcacttgggttgccagccttttagaagaaaatttggggtttatattagaataggttttaggttcagtagcctgtatccttttttactgccctgggacaacagcaaatattcacctaaattcattctgtggtgtaacactttagaagtataccagttcttccttgcaaataacaacaaaaagctctgaacaacttaatcacagagaaaaaaaaagcttttattggaggtatattgggcagctcattggctgataaggtagcagaagcaaaaggatacttggcagcccggagcttagctgagatggagccataaggacagttttattaggatgccaccacagctcggctgccagtggacacatgaattcgtgagactagcacctctgccataaataacatctcaccatccctggggaattggtcactcccttaagactcaaacactgtggcaagtgcatctaattgg

SEQ ID NO: 68578 - DNA, 1041 bp, Homo sapiens
caaacaacaataaagaccttgaggagggaaagtgtttgatgtattaaaaggaacgcgaggaagcaaatgtgtctaaagtgattggcaagtgaggaagagcggagttcggaaacaggagtggggcaagaggacttgggaggaggctgtaggccactgtaaagatactgtgttttttgtcattttctgagacaggctcttgcctcggctggagtgcagtggtgtaatcatagctcactgcagccgcaaactcttgggctcatgatccttccgccgcagcctccagagtagctggaactacaagtgtgcaccccgtgccttgctaattttttttttttttttttttttttggtagaaatgaggtctcactatgttacccaggctggtctcaaactcccagcctcaagcaatcctcctaccgcagcctcccaaaatgctaggattacaggcatgaaccactgcgcctggccgggactttggcttgtattaataatttgccaatgagaattgtaagcaatggattgacatgctctttgaattttaaggaatcattctagctattgtgtagaggataggaagagggagagtgggagaaaggagggggaagtgtgaaagtagagaggcctgttagggatctcttaataagtctggcaagacatgatggcaggccgtaccaagcatgttcctacctcaggcctttgcacttgctgacctcgctcgctgggatgctcttctaccaaatatatacttgaaccactgcgtccctccttcagagatatctgctgaaatgtgaggtcttcatagtaaacctcaccccttcacttgtataccctttccatgacattttttcctctataacatttatcaccatttgacacagtgtatattttacttgtttatttacttagtgcctgatttcctgactaggatgtaagctcaagaacagggatttttctgtttcgttcattgctgtgtccctgatgcctagaacaatgcctgcagtgaggaggtactcaataagtatttgttgaatcaattagggaa

SEQ ID NO: 68579 - DNA, 1032 bp, Homo sapiens
taatgtccttcttacttggttttttatctccttcactaattcatccgccctgcctcactctcctctcagtagttcagatgccataggtgtgatgagccttgaagcaagagcttctacctgcttcggtctgggcttcagcttggtgcccagctatgacctttgttcactttttctctccttcgggtgtgagtccctttcctgaattctggccttaatggaggacaatttccaatagcttcctgagaaagggtaggggggaggcaactttattgagaccttgcgtgtctgaagaatgtctttcttctttcctcatacttgatagattatttcctcatacttgatagattatttgtcttactgtatgattttagacatggggtaattttcccccagaattttgaaggtagcactccattgcattttttttcagtgccattgttgagaagaccatgccattccgatctttaatcttttgcataaacctttgtttgttgacttattgttccctggaagcatttttttattccccagattctgcagttttacagtaatgtgccttagtctgggtctgtgctaatcctgatgctctttcaatctggatattcatttcctttcattctgggaactgtcctcctgttttcttcattctttctccagaactcccattattaggatgtaggtccaataattatctttatttttcacctcttaatattttaagttcctcttggagagattcctcaaccttttttgtcagcacttcttttttttttgtttctgatatcatacttttaatattcaagtactttttttgttcgacttgttcttcattatagcatcttgtttttgtttcatagttgcaatatcttatttctctctggatgatatttttctttccctgagttgtctgttttccccacgttgcctttgtctggttttggtctttgttttgctgtctgccttctatactcaaacgtctggtgatccctgcatgtctgcccatttctgagagttgatggacccctcaagcac

SEQ ID NO: 68580 - DNA, 1051 bp, Homo sapiens
ccagcactaactgtggcagatattgtcctaagcactttacatctgctagctcattttatcctcccaagagccctttgagaagtttctgttattacctccaatttaagatgaggaaactgaggcaccaacggcaagcttgctcatgagtggtggagctcccctgttcatttaaccatgttgctgtattgcctggtgctgcttaccacaggtgcctggcccataggactttatgtcctggactgggcaaggttatagaagatgttttagttattagacaaagaaagccatgctgttccttccacacaccatctcattcaaaaccaatggtcactctgtttgggggccactaggagagatgaggttcagagaactccagtaaattaaggtcacaaggtcacacagatgaacagtggctaccactatcagctaggattcaacccaggtcggactctacagctggtgggatgcctcccttctcttagtatatgtgctctgttttgccgctcaggaggcaggaaagaaagatcaaggatgagtaggtgcctgtactcctagttaccttgcgtagcgctatgtgactcttacttgtatttcccaggcataaacctggctgcatggcaaagaaagccaggaaggcagcgttctccttttttgtgtagaagaaaatactcttgcctcagcagcagagaactgtgtccacctactgtttattttcctccccctttttctttttttcttcatcaaaaagatatgaatgctgagatcatcccagagaaatctagaataaataccatgagaaaatagtccctctggaaggcgtcttgtactcctgctgtttgtaaatgtgaaaagctcagcaaccgggcagctggatgggtataaatatagcccacagcactgacgcccgctgaatcctgctttcttagaggcacaatgggaacccacggaagtcagagaaggagcagtaaagcccagtcgatcaatcagcctctctctttctctctctccatcctggaccttagtgtgggcgtgaggatagaagcagctttaa

SEQ ID NO: 68581 - DNA, 1048 bp, Homo sapiens
tatggttaagctagtggtatcttgtatttcaatgataccttacggtttaccagttttcatgtaatatattaacctatctcatttaatcattacagtgttccttggtgtacagatgaggaatcaaactcagatatgacgaatcaaactcagataggctaagggtggaggtagaccaggagaacctgcacccgcatgcattcttctcactgcaagttcaggcaggccaggagatgaaagccagcatgagccagtgaataagcaattatctgacaaacccaaggccagcagaagtaagataacatctttgttcccctccatttcttcctatgccatccagccctcaacccctgctaccttcaagccctgttgatactcacgccctcctgcccacattccttcggtggggcactgaagttttggtggaggggagcagagcgaggaactctttgtttgtgcagtaaggacttccttacaggaaatttcctgtgatggaaactctggggaaacttcctgttggttaggccactgccgggggctgataacctgaaccacttaaaaccttcagggctctgctgctgagaggatgggatggcccttccctgcttctccaagtctgggagggcaagaaagtccaagcgtacagaagcctcaggaatctccctgggatggtattttccaggagctaaaagctatggctctcatcagctgatcttattctagaagaccagccctcatggttaaatggactgcttagatttataacgagaatggtacctgcagcgacatactagctggatgcattaatagggctttggaaaccatctcaaagttctgggtctggttcttcatacatcattttaaaacatattcctgttatattactctccagtgttaagggtttatgagcactgcaaacatttattttcagctctcacttatgaacttggaattctaattaatccttgtcattgtcagacatggttgacactgtatgctgtgtgggtcacttagcaccaagtgtaaatcatctggggtatgtcttgcagga

SEQ ID NO: 68582 - DNA, 1055 bp, Homo sapiens
attctttcaaaagatttttatcaggtgtttactgcatactctgaagtgctgggatatatcagtgaccaaaacagatatgacccctgccttcatgttgcttacagtttaataggggagataagtgtctaccaaggaattcacactagccagagagcacattgcccacacagcatccagagtaatctgttgtaagataaatcagactgttacttccctgtgccaaaacctccactggcttccagtttcatttggaaaccttctgagttctcagtatgaactgccaggccctgtgtgatctgaaatttgtaaatctcgtcaacctctccaccctcatcctccatcaccttgtgttctgctagttcctcttcagccaccctgatctttttgctattcttggaacacacaagtttatgttctacctcagggcatttgcacttgctgcccttctgcctatgaagctgtttctccagatactctcatgttagagtccctcaccttatccaggcctctgcttaaatatcacctccttagagaagcttccccaacagcattatccaaacgacaccttccttcactctccatcacctttatcctgcactatttttcttcttggcaattttcaccacctgacatgtaattttttaaaacactggatggtgacccttaggtatctattcaaaatggccattcttgtgcacagctggggtatgatgccagtgggtccacctgtagggtaattggatgggcctggctgtctcatgggagactccagagtcttttcttttgggaaggcaagtttgtccaaaaagaaatcctgtgggctcctccttagaaagagtcaatatatgatggcacttgagcttttaccatgaagatttccactgagttcccctatattccagagctgctcacccttgctccctcctgaacttggcgttctcagattcatcctgattccagcaagggaaatgtcctttcatctgcaaggaggtgcaggttgctgggctgggggagggtggaatacagccatgccacagatgctttattagtcttct

SEQ ID NO: 68583 - DNA, 1050 bp, Homo sapiens
tgaatctgccatttttaggttttcatgtttaaaaagtttcctgacaatgtgtctagcaatgtgctagacactgtagataatatacaataaaatattaaagaggcggctcgtcctcaaggaactttcaagcattcatacatttctgtttgattgtaacatatttattattttaaagaactggccagagagttgcatgttctgtgtagggataaatagcaagtttcaggcccctgcatttattggcacttacgtacatggtagtcctcacacctttgccggacagcaccaaaaatcctgcggagctcaactctgtgacctcaccctttgagcctggaaatcagcatgaactcatgatctgacaatcccgaacaagctaagcatttcttaaaagaaagcagtgacttttaataggtctcactgatggtgttccaccgattaaatcagtcaaacagaattgtcacattgaagattatcttgggtttctagaattcattctaggttttaaagatgcagacagattctgagggtcacaaacgtcagtttgccaagtatgtttaggctgtaaagttatccatgaaaagaccgtgtggtttgcatgagattgattgtgatcggatgtaactacattgctttttacagctcagtagaaaccactttcaattgcaaattgtagcagaagcaggcgtctacttaattttgatcttaaagaatttcaaagagaataaatgcacactaaatagtggtggattttggtagtatacgccaacatcactttttatttaacacatgcagaaatgtgtactggtagagaaaattggtagagtgaattaaagtacagacagatccacattgactttaaatgaatacatgcacggtcagaaaacggtaaccctgggcaggaatctttaagttttcagggctcattagacagtgagcaggtgaggctcaaggctgagtttgcaactgtgctgtgaaaactcaaaaatgaaagtttttttcatttctgagcctgttgaaaagtgggtaagaagggaaagggcagtctcataa

SEQ ID NO: 68584 - DNA, 1617 bp, Homo sapiens
tggcatagcttagcatccacatcataaagggctcagatcgatggctctccttgtcaagctctgcagccctctctcaggctttgtgagatgtggtttgcatcattttcctttaaggaaatgttatgcagaaacataaatgcagtatacaacgaggaggctttcaccaagaaattaaaagggtacagatgtctaggaatgcaggggttaagacaaaaatgtactgcagggaaagaaatgtgagcagaatgcccctcttttcgcctgcttctgccttgcatccagcccttcccggggagtgtgatgtgaactgccatccaaggtggctgtggtacaggggcagggtctgggggctgcttctgcagcttcagcgcagaaaacccagagctcagtcccagcaaaagcctaaaggagaaggaaacagaggccctaacacaacagaaaatgatgcaccccactttcctgtggttcatcagttcacatacttcccaggagaagtcaaatcacgccccagaataggatacctacttaggacttagtgatgttttatagtcatgtcgaagaaccttcacatccatggcctcatttgatctcacagcaagatgggcatgattaaaaaaaagaagttactcccactttccagatgagaaaacaaattcaaagacagtgagtgccttagctgagtcctatccaagcaaggcagggggcaaagccaggactaaaacacaaggttctaattccttctccatgatttcctgatgcccatcataccctaatagaataggatcaccctgcaaggcaactggtccacatggagagtcctcttggaggacaccgacccgtggtgccacctctgatttgcaagttggtgcattagacaagccctggaatgacagccagaagatctctattctgatcctggccctccgtctacttgggccactttgatcaagccatttagccccgttcccttcaggtggctcagctggaagtaagaatgataatgcccatgcagctgactcacctggtgactgtgaaggccaaatgagatgatgtgtttgagagcactttgcaaactgtggagtattgccagccatttctcctaatttggctcagggcagaaagacatccaggtgaagagcttgatgtgtgtgatgacttaggcttggggatatttgtgaacaggacacaacaaataaattcgtttgacgggcagagggacagtatgctgggtatagtagaaactcttggaacctgcagttattgaagggtttaaaactcaaaaatgatacagaaggcagttctattacagtttctgcttttttgctgttcaacacctctgaagatggtgcgtttaatccttcctgggatggcaggttatagatgacttcatgctgaaagtgacccgtaaggaatatccgtatattttgaagtgtatgtggttcaccaggcagaaaacagtctgccaagtctctcatcccaggcagaaggggtggcacatgcgaaggccagagaatgcagtgcctctgagaactgtcagatgtcagtgtggctggagccaggtctgctagagggtgaggttggaagttaaccaggagtttaggaggccctgggaagcct

SEQ ID NO: 68585 - DNA, 1052 bp, Homo sapiens
gggaaagtccctcgatttctgaacttcagtttcttctgaaaatacagttgtgccagctttagctccctcgcagaatagatgatggcatgacatggatgcggaagcatctggtaatgttttgaactgcacagagctgagtgtcctgaccatcaaagccagagctggagtaagtgatcagatgtgtcggggaggagaggggtgccaatcacagactgcagagctggctcagatgtggactgcctaggaatggaaatctttggctgtacagtctggcattaaacctggggactgttatgtgccaggcaccgtgtgcaaatcactgcaaaatccccttcagctacatgcatggacatgttaactcttaacacatgtacctaacaattcacaatttcatctcccagaaggtggaagatgcattgaggagcattgctaatttgcactcaaatctgacaaatgaggaattgtctggaaaagtagaaatgatagcagagggtgagaataaaaacatgattttaggattggggaagggaaatgagagacaagaacagatgtgttttcttgacttaagacaaatttttaaaatgtagggaaaagtatttatgatctcatgatctgaatgctgagacacaactcagagtcatttgggctgctcttgaaaatgaaatcctgacttatcaactgcatatgacccttattggaataagaaggaagggagacaactaaagaaactgatgaggcgatattggggatattctctgattagctcaatttttaaatagtttgtgtgtgtgtgtgtctgtgtctgtgtgtgtctgtgtgtgtgtttgtttgttttgaaatagagtctcactctgttgcccaggctggagtgcagtggtgcaatctcggctcactgcaaactccacctcttgggttcaagcaattctcttgcctcagcttcccaagtagctgggattacaggcgcctgccaccatgcccagctaatttttgtatttcagtagagacagtgtttcaccgtgttggccaggctggtctcaaactcctgacctcaa

SEQ ID NO: 68586 - DNA, 1060 bp, Homo sapiens
gggttcagatctccgcttctgtcattactagggttatgtgaccttgggcaagtcccttaaatgcgttgggcctcagtttcctaatctgaatccctatcatagggttgtgtgagcatgcagttgaatgagctaatatctattcatataaagtgcttagagcagtactaggtgcatagtagtgcttagtaaatgactattaagtaaattaaatcagcctgattagaattgcctccaggtgcaaggctctatcccatttagacacgctaacacacaaggtcttaagggctttaggtttaaggaaaaggggctttttcccccctcaattctacaccacaacctttttattctattgaattacaaaggaaataacagtgggacttgactttgaacaccaaagtttatccagcctctttccagctcggtgaacgtgtccacctacttcactctttatgctaaaggaagagcagcgacgctgataaatgtattgagtggcctcgagcaggtggcttgctctgtcaagatcacttttgtatgactgctgggatcaccacagtctcccctgtaacttgctgggttcctcttgtacataagccgagggcatttgcatcggttcctggtgagggggtttccacacggtggccctggttgcttcaggggctgggctgtgggagacattaatgggaagtgaaaagagaaactgttgtgcttaaccggcagagctgtttggagtgtgactcttcttgtatttagggaaaagattactcatgagtattttcttccatagaatataaagaacctcaaattactacttgcatcccccacccccttctcacccacctccctccgttgcagcgtgtcctctgcagaaacttcagcattttactctcaattcccctcccaagcaggattcagttctgtatttgctttggggcccatgtttccaataagccaccctgtactttttcctgtttctgcctgagcatcttctgctcactggacctctcacctccaggcaccttcctaggcctgaggaaccagaccttcacatgtgtcccctaat

SEQ ID NO: 68587 - DNA, 1053 bp, Homo sapiens
agtgcagtggcacgatcttggctcactgcaaggtccaccttccgggttcacgccattctcctgcctcagcctcccgagtagctgggactacaggcagaggatcggcatggcaaggtgcggcggtgaaaagtggaggcggggcatctgttgggctgcagtctacgagcaatagttgtgacattaactaaggtgaggcccactgagagacgaggtggttccagaaacagataaaaggcagagtctgcaggtcttggtgaccactttcatgtgagatgagaaggaagagaggccttaacgattactcccaggtttctggtctgatcatctgagcatttgctgacctaagaaacaccatctcatctgtagagatgtttgtgttaggcacatcaaatgtgtggtgcctatatgacctccaggaggaattacttaggagatcacggaatgtggttctggagttcagaagaagtgccaggctggagtagatttagcatagacgagccgattgaagccatgggagtagatgaggttgcccaagaagaagggcaggtgagagacctggggaaccttactactgaagggctggagaaggaggaagagcagagaagtaggcggaaaaccaggataagtggaaatctctgaagccatggagtattctaagagaagggaagtagagattgctggtgagaatgttgttgagaagtcaggcagttccctgagtaccaaccattgccctttggatttgacaacagggaggtgacctgagcaaaagcagattggagaagggtgggagtgggaaccagaatggaaggtgaggaagtggtgagaatggtgttggacagctcccctgggaagtttggctataaagggaggagagaaacaggagcagttcctaacagggaggatggggacaaggggcatgtacatgtggacaggaaaaaaacttgaaactgcttaaaagctaaagggaagaaacccaatagaagaagttggcaatacgactgcaaatggggacagtaagagctaactgtaaactggaaatgtctgtatgaaatg

SEQ ID NO: 68588 - DNA, 1050 bp, Homo sapiens
ccagctcagcctcccgagtagccgggacaatgggcacgcatcaccacgcccaactaatttttgttttttttgtagagatggggatctcactatattacccaggctggtctcaaactcctgggctcaagtgatcctcctgcctctgcctcccaaagtgctgggattataggtgtgacgcacagcacctagccagattcttttgttagtaacaccttttagatgtgatctcctccatatatgaaaattggaagaatacatcaagagagcaggctgggtgtcgaggaatgaagggacactggaaatgaaagaagatggagggctgtcttcatttacttagcaacctgctatagacaagacacatattctgtgttacttcacaagccaaaactaagaaccaaagtacagggattgcaggggaagccagattccacctcagcagagaaactttctatcaactagagctgtccaaaaatggtttgcttgcgccgtgactggctacccatcactggaagtacccagccaaagccacttctttctgggagaaggggaggtgggagactcttagtgagcaaagtttgagtcaatctaggaaacctctagaatcctgtctagatctaatattccaagttattactgggacacactatcgctgccaatcatatgctcacagtgcacgcacagcaagtggtccccgtccgcatggtggtgatgtgtttttgctgagccagccgcattccctgacggagcccctagttgctgaggaaacatgtctgtgcatggactgactcagctaaggccacactcctgggtcttagaactaagttttttcgtgacccagtacccaggacctcgggtccatgttcccacccgtagccgcctcatggatagcatttaagataactcccaataccttattagtctcctaataggcttctggtctaggtaggaaactggccgagtccacttgacccgcccctccccctgcttcctcctgcacactcgggaagaacccctctgaccctgctcccttggccagcgtcagtatgggag

SEQ ID NO: 68589 - DNA, 1040 bp, Homo sapiens
ctggtccaggacacctctgcatcttcctgcccatctccttttaataaaatgcccaagtgacatggtgtctgcagctctttgaggtattttgctttatttagtcatgatactaagtagtggcagaaagttatactaacagcaaccaaatttcaaaggtagaggtaggaacaaagtcaaggcaaaaacacaaggttccctcaggaatcccttagaatagggtatccgtggagttttatttagtgtcagtgatagaggagcaggagtttgtagaaaaaaagaaattaatatggaacgtttctcaggtccatgctgagcttgaaagaaaaaataatacagcaatatcttcaatccaaaatatgccttgaatttaagttggtaattaaaatgtttgtttaaaaaaagtcgctaaaattagagacaaagacccattgtttgttattactgctgactgcatatctgtgtgtggagaagggtgtgaggagacagtcacaggcctgtgatattgtaaagatttatcacccacccccaaagggttttgaggcacccacctgcattttcagcttggatctaagtcaaggggtgggacaagaccatgacaggttttggggtttgtttattttttgctaattactcgtggacacttcaaataccaaatatatcagaacagaaaggcacctgctcaacccagcccctgccatcctctggcaatggcctgacatctctagatgattttctagagattgtggaaccttggagcaatgcctgtgtgcatttttaaaggagggaagcatcccagaacatgccagttccttatagagtatcttgaatagttaccacctctaaccggacttgtgaatttttttcatgtttattcttttcccgtctaggattgagattggttaaaaaggcatatttttctctgtagggaaaatttctgtgaagaatctatgagttgtcattggagcattacaaatgttcttaatgacttcataattcttcgagtaatctgaagtgcaagctaagatagatgtaaaaagaac

SEQ ID NO: 68590 - DNA, 1026 bp, Homo sapiens
aatgattgctcatccccaagagcagggctaacaattttgttttgttgttggcaaaccaaaaaatgagaagtttcttgtttttcctaattaacacttcacaaaagagagcctgactccaggcgatgacaccacctccttgtgccaagcatttcacagcagggcccctcgcttccgtgatggagaacgaacagcatttcgtgcacgctccctgccttcctctcatcctttcctcccctcactctacccttgctaaatttagcagctgccctcctcccccaattcagttattcattcttttgctcttcctgccatgtgcatttccggcttgcataatagccaccagccactccagagaagaggaggtgggtttactgaagcttgacattaaggcaaggaatatattacctagcctgcctttcagatacaaagggtatgtgatgggttttctttctgtctcttagtctttctctcattattttttttgttaatctcatttggaatttagccccattttattcctgagtgtgattggaggcttatggtctctcctcctcacagatccttcctcttttccctttggcctgatttgactcagcagtaggtgtgtttgttgttctcatttgcaggagctcagcaatagagaaagctggcttactctgagagctgctcgcaaaccaagtaaatacagatgtgccaccgcatacgctgtaatgagctttctctcaagtattatgatgttggtggttgtgagctcagtaggtaagaggatggagctaatgaggccgaggtcaagggtgtcattgccctgcagaccagttagctctgcttcagacccagctcttaaaagtagtgcattttcagagaccattccttaaagctcatggccaggaagcaaggtctgagagcatgtccgggcgcatgtgctccagtgaacaggtgcacacaacaaggagagaagtgtaggtctttatccggtggtatccagggagaagagctttccaaggcacagaagtgatatgaagaggt

SEQ ID NO: 68591 - DNA, 1096 bp, Homo sapiens
atattttaactaatgcaaccaaatccaaatttaactcattccactgaaaggcattgtttttctccgaagaaggtaggactgaatcatccctaaagttccttccagctctgccagtctgtagtctgacagtcttgattctgtaaccctcccaagaaaacacaagagttttaagcacctttgtttctttgaggatacccctgtgtgtactccactcttctgatgtctttctggactcctcgatccttgtaaaattgattctgtttattggaggtgaaattcattgggtgattcctgtgtacaacgtaaaagttctgtcattaactgaatagccataaaaagcctttaaatctccgtaaagcagctgttagatgagaaaacttagttccttaaagcttttcaaatgagcacagcacaaaaagaaatgaaggtgctgctgaatgtcaaactgatgagtactatagctggagggtatagatggaaatagtactcatgaatgtggatcacaaaatgaagctaaattcttactattcagatatgatttgttcaggtgccctagaatttatgcatttggacaccttctgtgtataaggcactgttctgcattcttgatggggtggggacagcctcagagaggtataagacacagtctttatcatgaaagagctgagcacagttaactataaaagcgaagcacatgacatgtatcttagaagggctcctgttaagtaccacaggaggtcagagtagggatgtcagggcaagctacatggagggctggcttttagctgggcttggatgaatgcttagaatgtggacaagtggagattagagaaaaacaggtcattccagatggagaaaacttaccaggagcaaagcaagataaggctcggtgtattttttctatttcaggtagaaatgtaaatctacaagttgagatctattgaggtcatttaaaaatctatcatttttcaggctgggtactgtggctcacgcctgtaatcccagtactttggaaggccaaggctggcagatcacctgaggtcaggatttcgagaccagcctggccaacatggtgaaaccccatctctatcaaaaa

SEQ ID NO: 68592 - DNA, 1067 bp, Homo sapiens
tttttagacagtcagagaaaggagtaccttttcctaatttgcactaagttaacattaatctcggggttcagtagctctccagctgtataagatgatggagtctttctttatatacaggctagagttcagagtgaagacagctttaggaaaatggaatctcttacctcctccacttcttcttccaaaggtttatgaaaaccccagatgaaatcatgagtggccgaacagaccgtctggagcacctagagtcccaggagctggatgaacaaatataccaagaagatgaatgctgaaggaaccaacagtccacctcagcgggccagcagcccagggaacccctgcccaccaggattgctggaagtgtgacggagcaggcgggctgaggagagtggaaaaggaagcgacccagaaatggcagggacacttctcttgcagaccaagagggaccctggagcaccttagacaaactacccagcacaggcggggctggaattctggcggagggcatgagcctgggactccatgtcacgtttccttctgatttggaatctctccatctgtaattcctcaccctcacccttccaccgttgttagtatcatggtgtttttgtttttgtttttgttttaagaacctgcagtttgactcttcatcgttcatctaggggaagacatctgatgttgttttcctatggaaatatatatctattatatatatattttttgcaaatctcacaaagtgcggcaagcccagctggtcaggaaagagaatacttgcagaggggttcaggttcctctttttcctgccacgtggatcaggtctgttcctgttactgttgggtcttggctgaaaaaaaaaaatgcttttaaaaaagataaaatgaaaaggagagctctctttttctctctcttgctctgttcttcccttggtcccctctgtcctcccgccctgcctgcagttgagattcagatgccttctgacagagttcagcctcttggagagtcttggggattgttggcacctaaacagaatcagtgacccgggtgctttgtggccagcagcacagaat

SEQ ID NO: 68593 - DNA, 1101 bp, Homo sapiens
agtttcctggtctccactggacacagagctttggagacggaggatcccagagggcagtctcagttgcaatcagtgtgtgcccagcctgggcagacaggaaattcctcggatacattattttttctttctttcatagctgtgtctcagaaaggacccatttgtggctctttttcacctcaaaataagatcgatggtatcttgtaaaatgagggtagtgccacttcttagtatttttgaaagctgttttagattttttttttttttccttttctagccatctaaattgactcttccaatataggtctcagaaatccaatatttggagtacaatttcttttaatccagattacacctgccttacaaagcaccccctccttgttcccctctgtttcctctactcagttgggggagaaactcacagctcctccgggatacatatgtgccctcagcagcagctcccaggtgaagttaccagacccctgggcttctccccagctttttctgagttgagtcagacatgtagagtttgggtcacacaggcaagaggaattttccctcggccttactgacaaggacaccaacctagggtgcaaacagatggactatggttcaaggacactggaattgaggagctgatcaaggctctcttcagccttgctctgtccctgcctcttatcagagcacaggtagacacacgggcatagccagcccactcctactgtcacaggcgccccaccattcaaccttccgggaggtcagggaccttctatatgaggcgagtgggtctcagtctgcttgaatggtgatgagattctgctggatctcagcacgctgcaggtgtcttttgagagcattcagtaggacatggtgatccctatttcagcctctaagatgactggtattctatctgaaatgcagagattaagccaaatacctgatgtattgtgaaagccactgattttaagaatggagagaaagggattttttactgcatccctctgtatgaatatgaaatcagagaccagggcatgatgttgctaggattagagcctctcagtctggcctcttcacccaagtgcaagaactcagtctcttactgtt

SEQ ID NO: 68594 - DNA, 1041 bp, Homo sapiens
tacatgtccagctaaaaattaggggttgtattgccatagaggaaggggagaatgtattttagcggacaactagcagtcttggtcaccagtcactcctctatctgttccttgtgtctttctaaatgccttatgtaactgtagaaggtgacttggtcaccaatcagtttgtggcaaagagcattacagggttctggtttagtcccagactttggaaccatttttgggggagatcgcttaatatgtcaataaccttccattccagaaactgctccccttccatgttagccgtgtgggtttatagaaccagagcagtgatgtcttccgagaagggcatccaaggtaatgaaggaactgaaaaatcacaccacatgtgggacagctgaggatatttagcctagaggagaagctgaagaaacaggatatttagcctagaggagagaagagtggaggatgacatgtttcatatatttgaagggctgtcttgtgaaagatctagatggacaagaagggcagaatccactcagtacatagaagttatagggaaagtaatataagttcaatacacagagagaaattgtaatattaagagctatctcagaagatatgagcatagatttactgctctgttcccattgctggtagacattcaggacaaaatagtcagcagagaaggtttgcttcttgccctgatggcagctgcagtctagtgaggaagacagaaatggctcagatcatcacacattcataaatgtatatggtaaagcatgacaattaggccttagaccattgactgtggagaagcaagggatagttgaccatttgtagacctcgtatagacaggatttgtgctcatgtagggtctaaattaaatgacttatgacctctcccagttcatttctagaaatggactttaagtagtgctacagtgggaagaacagaaaagatttaccttggagggcaaagtgaatttcaaatttgtgggacttctacagtggacttttgaaagttccacaataggtcaccattactaaacccggttgt

SEQ ID NO: 68595 - DNA, 1024 bp, Homo sapiens
ctgtctcagcctctcaaagtgctgggattataggcataagccaccatgcttagcttgaaatacatgtacatcagactatcatgtacatgataaataacatacaactttatctgtcaattaaaaaaatctagtatcaccactgaaggagagaactctgaatagacataatgatgagaagagaaaggaaaatgcaaatgtggggtcctttctatagatacataagacatttagaaatacacaagtaacagaagagtcatagatagtactgatcgggaggaaaattttttgttcatattgtgatgatcctaaagtgcacattttgggctcatattaacctctgaaattgggaagtctcttaccagcagcggtgtctcacaaacattgtgggccaggcagcagtcagacgtagtcattgtttacttatgtgtgagcttcttcaaagattggcacaatgtctgcacttcacttgggttatgttcattgtcagaagtacaaatgttgaatttaagtgggatcagaaatgtcttcagaaagattacattatgacactgcactgttgcatttgaaacgctgcaacctaaggcaggagaaataagcaaatctcagatttctaggtaacgagaggacagtgtgagtcattcatgtgttgcacattactatccttaatacattagttatatgtagtggtcctaaaataatggtgcatcttataattgatagtgtcttgaatatgatgaaatacggcacaaaattacttgattaagtgatatgtatggaaaatgcattttttccagaggtttcaaggtgtgtgcggcactctcttaggtctcttgctttgccttcagacttctgtctagtagtcccatgcactagtgaaggcctatggagaagaggtgggtaggtgccgacttgctctgaggctggagctgcttggtgttctattaatagtaggtcatggtctaagatagaagcattctaggaaaaagtttctaataaacttgcttttttttgagagaagttctgg

SEQ ID NO: 68596 - DNA, 1925 bp, Homo sapiens
tattgaaggtattaaaaatagccatcatctgtattaggtagcagttttggaggatcatctttttcttttgctataaagccctattaatgaagaatacttccagtagagttaatagctgtagcttacctagtgtgttaatgaagtgtgtttatttatgtgacttgataccagtagtcataatagagactgaagaggtatgcgttaagcacgcctacttctatgcagtaaacaggctgcagctgcctagattagattcttagaaatgtcatattttgaattgttttatttcttgtaggggaagctttgtcccacttcattcatttgcatgccataggaattacatattggttatcattacgtatctaacaagattcagaaacaaaaatcttggacttttcacatccgaaatatgtcagctcttaataaatgtgtggtgcttaagtctacatatggcatccatagttgatttagagtatggatatgagtgtgttgaccagttatcagtaggtggacaaatatttgggcatctacagatgagactatgcactaagtgtggactgagtcctaaagaagcttatagtcaggtgttgtttaaaacattatcagaattcttaaacccaaggaatttaattttatttggtatttcttaagcctaaaatgaaccaagagaaagatgattttagaaagtacttgtagtgaaagatgattttagaaagtacttgtagtgcatgtgtggcttctgacttttgggatggcaccattttataatagtttcaaaatttagcttttgaaattctcaacattttatggtagaagactttggacctcaagtataaaattatacgtttataatttttttaaaatttaaattataagtattgtgaattcacactctcaggctattgtctgacttgatctacgtctcataaagcctgtacctgagtggagtggaaggtggagtcttaggttaatcagttactgactctaccctcaccctctttcaattgaggtaaactttgctgtttttctttttcataaagcattctcaaattgttgagtttattgctgaaaaaaatctccatgactttacagatagaattacaaactaaatgatgtcttgtatttagaagcagagtacagacctaacgaactgttagattctccaccatcacttagggtttgcccagaagcaacaccagagaattacagacaacgcgcttttgctgaactgtccattttggtggttgtgtttttcagtcaaatataagcaggatgggcgatagagatatatttatatatagatacatattctatatatctaatgcctaaatatgggtattaaagggaaaatttttaaagtctgattaaatccaatatgacatgaaattaaatatatggattagtaaggaaaaatgttaaaaagtagagaggataccaagaagattaaactggactagccttatttgcaagtgaaggatctggtgctgctttcagatgtttatcttttatttttttcccttaagctttaatcttcgtcattgtcttaaagtcaactggtgtttcttgttcattgactttggtacgatggtgctttgcaaggatgtatttatgttataatggccaacatttggtcagcccttgtccacttattcacttccctccttttgtaaaataagtgctttaattataaactgtataaaaataccttgtataaaccccttttttgattattacaataaataagctgaattgtaacaaatgaaatttgatttttgtaataaaacagtggaaaagtaaaagtgtctgtcctttcttttcagcaagaaattaagacagtagctggttgtccttcgctgtttcagacacaaaacccagctttattgtttgcattttaaataatactctgccagtacacctatagtccc

SEQ ID NO: 68597 - DNA, 3478 bp, Homo sapiens
atttccctttgctaagataacaacaatggaatagttatgcccctgaggctgtctaccaaaatccagcctggactgtacagaaattgtacagaattgtacagaagaaagaaatgaagacttcagatgtcattaaattaattattcatcaggttaattttggagtaaagaatgttgagggaatgctgacatgtttgagtagtgtaaaatatgtaaaaacccattcttcccatgggctatgaaactgcagaacaaatttgaatagtcattttttattctgtgatacagtttaacttgaagatgtaagagcacaaccagaggctagattgaattcacctctgcattcccatcctgttcattttcacttgccactttcttatttgcaaataagaaagtacctgctattttcctcagcgaatctgccattgaaaattgcctcttggtctgtgtaaatttaaattgcagtagcttattgttttcatagggtagttgacatctaatacctctattctgagaggggaaatcatttttttttgtaaaactaactgcttctctttattttctccctataccagctacaggccatatagctaccggcactttgcaccccccaccacaccctgcagcacagatgtttgtgacagtgactatgctcctagtcggagaatgacctcagtggcaacagccaagggctataccagtgacttgaactatgattcagaacctgtgcccccacctcccacaccccgaagccaatacttgtcagcagaggagaactatgaaagctgcccaccttctccatacacagagaggagctattctcatcacctctacccaccgccaccctctccctgtacagactcctcctgaggaggggccctcctcctctgactgcctccaacgtaaaaatgtaaatataaatttggttgagatctggagggggggagggagctattagagaaggatgaggcagaccatgtacagttaaaattataaaatggggtagggaatactggagatatttgtacagaagaaaaggatatttatatattttcttaaaacagcagatttgctgcttgtgccataaaagtttgtataaaaaaaatttgtactaaaagttttatttttgcaaactaaatacacaaagcatgccttaaacccagtgaagcaactgagtacaaaggaaacaggaataataaaggcatcactgaccaggaatatctgggctttattgataccaaaaataaaaaagaggaagaagaaaaattaagtccatctcagagcagcaaaccatagatacatggatgtagccagatagccttcagttaactaacatttgagggccaacaagtaagaaatgatgaaaggaaaaaaatgcaattaatactaaccttggacgaagggctttgttttctctaggaatccaacagtgctagtgaggaaagtagatatttctaaaaacccattctgggtgttgctgttgtaggagagatcagccctctggtaagatgccatgaagctgtgtgtgtgtgcaagtctctgtccctacctttagaatccatacctctgtcaaaatgaatttttttctctaggtatgtttaccttgctgcctcctccagcaacttggtaagtcattttgctaagataccatgatttttttaagctgaagcattgactaaatggaattttctaaattaaacttgattttaatatttcttctagctccattccccagtaggcttagctcttcaatttgactgctgtttttgcataatgatcaaaagttagacatattatttctcttcttccaagattgttttaatgctcattaaaatgtctttttacaacacatatagacaatgtttaagaattaaaaatttaaccattatgtttttgttgtaaatctcatatccttgcactactttcagcatatatcacagtacgaaatcatttatatatatatatatatatatatatatatatatatatatatatatatatatattttgtttgtttgtttgttttctgagtaaaacatttaaatatgttctggttagagacaatctatttaaaaagatttttttcttattaggattttccctatattaacagtttgtgatgttttcatgttctttagaccggtttttctcagaataatgtctacatacatacctcttctaatgtgtgacatgaatttaatatctttctgttacccactgtgaatgttaggctgttttcaaattatccacaaattattcttgtaatcacccaatatttttatgtgggtcctctcttacccattatggattaagatagtttaacaaatttaacaatgaggattaaatgagaaggcaaactgttaacttctcagctgtcagaatttgggtggaagggaataatggaagcctcttttgtgatctgcctgacctgctgtcatgtatggtactggggctgctacatcttgagctatcagggctgacctgtggaatgattctagcacttgctctgccaccttgccagaagttcgtttcctgctttttacacatgtgtagcacttctctgctaaaattgaatggttttaaactaatgtatttttagcttaagaggtgttggtcagttaattattgaattttttttttttcttttttaattctgtcttgccaaggcctctctgggtttcagggcccaagagaaaacagtggaagaaaggattcagaatttgggcaagggtgaagtaactgttcatgcaagttaaaaatacctaagtaaagtttttgaagataaaattgtggtttcagaataatgctgattgttggagactgtaagaatcaggtgcacttgattttgcatataagcaaatggtaaatctatcagaatcctaaaacagacaagcatgaactcttcccattgctggaactaagtgcccacagtgtcagacaaaatggacattgaacttggattctgtgatacacagggcacttgatgcttaaatgaagatggaaaggttagcaatacctgggtgtcagttagaatttgagaattctatatgtttacatatttaaatgtgcatcttgatctggtgggcttcccatgtggagacttgcactctaattaactaagaagaatattgccttgttggatctcagtccacgtgcttgcactgcgatggcaatggcctcttcttcaaaatactaatttgtgtgccaatttgtttaaaattatttgaaggcagttcagcctaatctcagtgttctctttctggggtagatgagatggattcttaatatttctgggagtactttttaatgagagaattgtcaaatttggaaagatttattgagccttaggttacatggacagttaagcttaagtaaactgtatattgattatcaaacacaagctgtaattggaaaagttgagaggaaaagcatgagatcacaaattagggggaaaaaagaaaagggatttttaaatttggtgt

SEQ ID NO: 68598 - DNA, 1036 bp, Homo sapiens
ttgatgccctctgcttcttaaacgggtagctcagggatccagggaaggtgaatccctggggtggtgtcctcttctggcaatgtggcctttctttgtgagtcctccagtaatcaggtattaaagaccttatgttccttggtctcaggcaactagacagcctgaaggccagcagcataggggatttgagagctgaggcttatctttagcttccagttttcattcatcaggcctaaatgtcactattcaaatctaaaatctaacatgtgctcagagctgattttggcttcttcaccattccaggtaaaacatttgatgacttttctaggtttatcccttctggtcataaattttttcccgaaatcttggaataccgttgttcatttgtatggtatatagaatgaagtagaatggattttatctgtttatttatttaaagcttcttaatggtgtttaaatctgtacttcatttaccatctttgtttctatctgtttacaattacactttccaacctattgttttatttctgtcttcatttaagggtagttcattttgattcctaatgatgacatttatttcatatgtcttcagggcgtggtatgtatgtactcataaaaaagaaaagtgtttatgaattatcttcattaggcttatagcttcacatcctattagcaagccctcttttgattactattttgaatatacagttgtttttctattaaataaccatactgcattcttcattgtagatccgactgaagaaccagcaccacaggccaccaatacagttggttctgttattggcgtaattgtcaccatttttgtgtctggaactgtatactttatctgccagaggatgttgtgtccacgtatgaagggagatggggaaactatgactaatgactatgtagttcatggaccagcttctgtgcctcttggttatgtgccacacccaagttctttgtcaggatctcttccaggtgagtcaggatggatccattgagaatcaagtctttggtcctgcaagactgccagttt

SEQ ID NO: 68599 - DNA, 1490 bp, Homo sapiens
gagattacaggtgtgtgccactgcacccggcctaaaattttttcaatcaccatattagtagagttttaggagagaatatataagtaaacttgtgcttagcctaccatctgaatgttgactcaggcaatgccttcccatctggaatatctccccacttttcttcatttattaaaaagttggcattttgcttgcctctttcctgaaactttccttgatacttccaaaatatcagctaatgtctttgtttgactgaactcatgacttaggaaccgtgaactttctataaatatttgaaggactgttatgaaaaagaaggaatgagtatattttttctttttgagtgagggagaaactgaataaagcagggtggggggtatgaacacagattttagcccactgtataaaagaactttctcactgtgcaacaatagcagaagttgcctcctcagagtctggatgactctatgtctgagatgattagaaataattcttaccttggggtgagtcagtcattttttctaattgtgttctgagaagccaggtggggtgagagtgaagctgttcttcataaatgcctcaggtatactcagaactctgggtccaccaccactgctcctccagagaagtgccatttttatctgttgtatatataagttagggtttttcaaactactgttctaagttcttttctacatttctatgaactagaatatttactgcacattgggcacttacttgctcttgattgcatattaatatctagtttattggctgttttctagtgtatgtcttaccatgatttttaagttttgtggtagagatcttgttttttttttcttttctctacctgtagaatctaactggtagtcagtaaataattaccaaaagtataacttgacccacatgagtcatttctgttgaattttctccttttccaaggtgctaaccggatagtattagaagactccaatatcttgcagcctgtgggacttactgtgtttgaaaactggctctattggattgataaacagcagcaaatgattgaaaaaattgacatgacaggtcgagagggtagaaccaaagtccaagctcgaattgcccagcttagtgacattcatgcagtaaaggagctgaaccttcaagaatacagtaagtgttaatgggataaagctaattggaggaatcatgtgttataataaattaatatgtacttttgtggatttttaaactctgtttccttgaagactttcatgcacttttagttttgccatttttttgaactctccatgcttttttttttttggagacggagtctcactctgtcgcccaggctggagtgcagtgtcacgatcttggctcactgcagcctctgcctcccgggttcaagtgattctcatgcctcagcctccagagtagctgggattacaggtgcatgccaccatgcctcgctaattttttttttttttaatttttagtagaagcagggtttc

SEQ ID NO: 68600 - DNA, 1895 bp, Homo sapiens
cggaatattgtaggatgtttaacagcatccctggtctctgcctgctagttaccagttgtattcccacagtcgtgacagtaaaaaatgtcttcatacattgccaaatgcccatggcggggcaatattgcctctagttgcaatccgctgctttagagatatttctagggtgtggttttagccacagttgtctccagtttagagaagatagttgccaccttctcactcccatctcttaatcaaggcattatcaggttcttggagcaactaatctgacctcagctctttttttcagcagcaggataacccaaggaacatttgagatgtgtattaacaaagaagcacattacccataaaaaaaggtatcagtaagaaatactccttaagacttgagagagccttctcagctgtgtgcccatgtaggtgtaagcattgtgactgattgcctcagggttatctgcccctggagtttaattttctctgtatttctttttttccctagggctttactgtggttgtgagctcagttccgagtcagaacctggaaatacaaccctatgacctcagcattgatatttacagccgctacatctactggacttgtgaggctaccaatgtcattaatgtgacaagattagatgggagatcagttggagtggtgctgaaaggcgagcaggacagacctcgagccgttgtggtaaacccagagaaagggtatgttactaaagtggcgttcagatactgtggcttctgagactctcctcacccttctttttcagcctgttatttatttacctttaagtgtcctgtgctccagcaaacaattcaatattctctatcagtttgtttctgcattatcttaacagttgtcttacactttctctgatttcactgcccagactttctttcctgggccactagtgctttaattctaagtcttaaccacacctccaggaccatttcaactgccacgtcctccaggaagttttcctcgatctacctcatcccagccagatgtgatttttgccccctcctgaatactcagtactctgtatctgtgcctctctaagttatacttagtcctttccaatttacgttacttttaattattttttagtcttgtatttaccactagacatcagttttctttatgatgagaactagtatgctttctttcatttaataaagagctttgcatttaataaatactcaataatcagttgtatctgagtcaatgataaggtattcagcaagtaaagtagcttacttcaaaagagaggaaaaggatgaaatctagacgttaaatataagaagtgatttatatgtaacttctttttagttattaaatagattaattagaaagaatttaaaattttgtgttaaggtctctctagtcactgatctttaatttgtcgtattattctgaaaacatatgtgtgcctatgtctaacactattctgttaatctatgaaagctccctaataacttctgtgtacctttgttgctactattaaaagtagtaaaagtgtcccatgaccttttaaaaatgtaaatatataaatagatatgtatatatttataaaaggatttttatctatacacatttatttatataaaagaggatttatatatatatacacatatatatttatataaaagaggatatatatatatatatttggatacaaggtttggctcgatcacccaggctagagtgcagtgacacaatctcagctcactgcaacctctgcctcctgggctcaagtgatcctcccacctcagccttccaagtagctgggactacaggcacacgccaccatgcctggctaatttttggggtattttttgtagaaatggggttttgctgtgttgcccaagctggtctctcactcataagc

SEQ ID NO: 68601 - DNA, 1054 bp, Homo sapiens
cacccaccagacagaataggttaagggttattcacttggtagaccaggagaattttgtatatcaaatacctgatggaaatgaagttttctgtggtatctctgtggacaagatggagaaaaacagggtaggtggctatgtcattaggtaaattcataactgatttggtaaccagagagctgattagtgttactctgaagagagtttttgagggcatgccaaagaattttgtcctcagccttagctcttcaacatctatgtctgttttgtatgaaatacatacaacaggctgatcaaatcattggatgatagaggatgtagggtaactagatttcagattttctcttttcttccttttaagctcctacgactttcctgctcttcagtcaaaagagtgccatcaaccgcatggtgattgatgaacaacagagccccgacatcatccttcccatccacagccttcggaatgtccgggccattgactatgacccactggacaagcaactctattggattgactcacgacaaaacatgatccgaaaggcacaagaagatggcagccaggtaattgagagcttggttcaaaattcatttctcctgactaataactggactcaccaaccactctgtttcacttaagtcttgactctgcttaagtgtgtgtgtatgtgtgtatgaaactgaaattctggacctggtagcttattttttccttctgacgatattttgagtaagcaattgtttgatgatgatattatgatgaaaattgttaggcgtacttaagctgttgtgttggtaatggctttgtgactgccccctacgtttctttatgaagtctttttccttacatttctattgtatggagtattagaagccttgaaataggccttggttctgattccagctctatccctcacttaggattcttaggaacttttttagctgaaaagaatgcaaagcacatagctcttatgtgttatgtaacaggaactcaataaataacggttacattactaattaactattatttaaaaggttcagaggatatgaaacata

SEQ ID NO: 68602 - DNA, 2156 bp, Homo sapiens
ggccaggctggtcttgaactcctgacctcaggtgatccaccagccttggcctcccaagatgctgggattacaggcatgagccactacgcctggcctaacctttcagatcctcagcgcactcgcctataaaatagagataattttgtggattaaataacatttagtatgatatgtaatatattggaggtcctaaataaatttttcttttcctttcctcgtctcaaattttattttcttactttcaaaatcatagctacaaggctctccttgtcactcagtgcttctttctggcttttttccctctttttaagagatcaggtcttactgtgttgcccaggttagacttgaactcctgggctcaagcagtcctcccacctcaatcttccgagttgctggaactacgagcacatgccactgcgctaggctctattgcttgtttctttgtttcttcatatattattgtaatgagtgtttatttatcaagcacctattacatgctgcgcattacttcagccgttggaaaacatagcagtgaatgaaattcagtggaacagataataaactaaataaattatgtcaggggttaggtggcaataagtataatgaagaaatataaagagcaagaaagggtgatggtgacagggactgcagtgttaactggggtgattagggaagttcttactgaaaaaatgacatttatgtcaagaactgaaggaagtgaggaaatgagctatgcggatactgggagaaggcctatcaagcaaaaggggatagtaaatgcaaaaggtcttgggggaacatgtccgacatgttagaggaacacctaggaagctagtgttgctggaatgaagtgaataaagaaattagatcagagaggaaatgggaagccagattgtgtaatcctttattcagtactgaagtggcctctgtggcatctttgtgcaaattggaaaaagatgtttcctctgagcagatttagccctacaggtgtatggcgtggctaaggaagtgtggactggatttcagttcctactcaatgcccctggcacagagcacaaatggtacagtcatacatgatggtcttggccttatagtttattctattcttaaacaagagcaacacctttgtctaagctaccagtgaacacatatgccttcagaagagaactgaaaagctccctcctacgtacatctcatcctccagcttctctgatgtctccattgtgggaatgcgagactcaagacaaccagatgaggtcgttgttaaagcaccattctgaaggaaatgtgagagaggtggttagagtttaataaatttgatagggtggatttaggcttttaaaatggcatattctttgtcattttaaacactgacttgaaaataggtcaaaatattagctgccttttagaaataaccagttaatttgtaatttttaatatatttgagtagactttttggagcaggtatttatttggagccacatatggctttctcttaatctgcatttctagaacaacaagatccacaactaattgtggaatcttattgaaggttaaaattttgcttggaaaagagagtacccagcaaaatatcctaggagccaaatatatatttgattaattgcttcccaggcaagaaaatatgggaactaaaactctgggatctttcttctaagtcttttaaacagaagggggtcttgctgggttgttcaggctggtcttgaactcccagcctcaagtgatcctactgcctcagcctcccaaagggctagtattacaggcatgaaccactgtgcccagccaatttagaacctttaaaaatttttttcttgctttactaagaaagtagtactgccaaaatataattcttttaaaataaaaatgatagtgggagactttttagctattctgtgtgatgtgtttttactactcgaagtatggactccacaaaaattgctaaaagttgttaaatcaatgtattagtatgatggactccagaaatggagatttgtagtaggatcattgggataactttctaaatcttccaagctgagtgtgggtttttaactaatgaagaacttaaagcagaattgcagttttgtagataacaagtttctttgtgagtactgatttcctttgggatttaagccagtatt

SEQ ID NO: 68603 - DNA, 1105 bp, Homo sapiens
gcccatttcttggtggatagacaagaacaaattggtagatacgattaagaaataagtagattaaatcagaaagagtagattatgggaggggtgtagggtttgggtcaatatgatggaaagtaacaaactgctaaggatattagaggtaattaactattgacatgactttcttttgtgcttgagagaatgtgtcagaattcccataggaaaaatttggtctgttctgatgccaacttcagttgtgaaagagaaaggacacaagcatgtagtggaatgattaagaggttatactttggaatctctgccacacattagcttttttgctttacacaagtaataaattctttaagcctttattttttctcatttgtaaaattggaataataatagtaattgctgtatagggttgttatgaagattaaagataatacatggtctgatttctggggagaaccagtagcagggaagtcagttagaccagtgtggtaatgcaggtagacctggacaatggtggtggcagcagcgtgtgtgttgaagagaggttgatggattcgagatgtatgtggaagctagagcaagcagaagttgttaatgagttctgtgtgggaaagaaagggaggaagcaaggatgacctctagattatgtgtcatagatgatggactatcatcggagaagagacatgaggttgaagatacaaattttgggattaccaggatgtatttaaaatgaatgaggttacctaaagagaaggtatagttcaagagccagcagctttctctcataggctttgtgggtgtttaggctgtctcacacctgctgaactctgcccagctctcgccatggcagtgtgagagcagcctcaggcaatacattttaaaaatggaagtggctgaattccagtaaaactttattacagaaacaggcagcaggccagatttaacttgtgggccataacccccatcagtgggctaactctgatggagagaaaagaaggcacttggtaaactatgcaactctggttgaggaagagaagttcacagagaacactgagaagtagcaaccagagaggtaagaggaaaagcgggagagaatagaggcacgaag

SEQ ID NO: 68604 - DNA, 2996 bp, Homo sapiens
agcaactttgggaggccgaggcgtgggcagatcacaaggtcaggagttcgagaccagcctggccaacatggtgaaaccccgtaactactaaagataaaaaaaaattagccaggcatggtggcatgtgtctgtagtcccagctactctggaggctaaagcaggaaaattgtttgaatctgggaggtggaggttgcagtgagccgagatcgtgccactgcactccaccctgggcaacagagcaagactccatcttggaaaaaaaaaaagaagtaaacagtgtgaacatataaatatgtttactgtatttgctacttaaaataatttccctgaagtgacattgattccatgattagctagtaattcatctagtcagcactgacatattgtggtgatctttgctctaaacattagctgccagacagataaatttaatagttgggactaattggttgctgctggcaagtatgaaatttctctcacagttgtttctctttggctcttgtggtgtgcacatgcctgtcaaatgacaagtgcaaatgcatataaaggcaggacaccttcagttttcagaaaagcatgttcatacattgctaccaagtcagctatcagctgacaggctgatgagtgaatatatgtcctcaggtatttcgtgagagctggcatgtgatgtgcttttttagttccagtattcaagagtctcaaaaactagcacctcactagtttacttgaaagggcatttggccaaggattaggttctagttctagctctgtcatctaactggcttgaagacattagataagttgttcacatttcttgtagtgttttgggctcttcatctataaaaagcctatactgtaggattactgtaagattaaagtgcaaaactcaaaaatggaaaataacagcaaagtaattattctaaaatttcacagagattgttgtagcgtagtgtagtgttcattgcccagtggacacatcaaggggtgagtcgttgttcttaccatatagtatgctcccttggaccatatgaccaaatacattttcaagctttgcttttgacttcagttaaaggcttagtatttataattacctttcatgtacttctgcaacttattttgaggaagagttgattacacaagtcaaaaagtaagttcagcatattaaaaactcaaattagttaatattcaaaagtatataaaaatattttactcagaagtgaaccagattctgagaccagagctttaaacctttgctgttttcttgaatgttaattttacaaatgccagtactgcaataaactgttggtttatttccaattcctaggtttggatggaacaaatgtattggaaagactaaggaaagctgactcacttcctttttgggatatggaaaaaaatatttagtttagggtgccaaaataattgaaagcattgtagccgtgattttgtttaacccatttccttgatttgctgtatgttttctttaaatttatttagttactttgcatgaatatgactctttcccccagataataaaaaattgaaatgttaaatatttattattttgaatttagatttatgtattggactgaatggggtggaaaacctaagatagacagagctgcaatggatggaagtgaacgtactaccttagttccaaatgtggggcgggcaaacggcctaactattgattatgctaaaaggaggctttattggacagacctggacaccaacttaatagaatcttcaaatatgcttggtaagctttactactttttactcaaacagtatattctttccatgcaaatatcagtggctgctatttatcattggttagatacttttaatacaacttcatatgaatgtgtccattcttcttctgttctggaattgtatcctgtttgttattaatagtgatccaggtacttggattcatctttttattatgtgaaagtttcattattattggacttgtaatgaaatttataactccctagatactcctgaaatgacttttgtaccagtaaaatatatatatttccatcttttccttctatagttcaagaagaaaaagtgaactgtagacccttatatagagaaaataaaaccacatttaaagtagaccatttgcaagaattttaggaaactgagtgatttgtagcaggaatataagtttgaagcatggggtcagaagatagattgatttcagagaattggtctcgttttagaattgcttttaaatgaatttttctattttaaattgcttacaatgtaatgttttatatgttagggcttttttttttctttttgccagcaagacacttgtattctcacatatttcatcactctgcttctcccctgtctactgcctttctgaaaatagggctcaaccgtgaagttatagcagatgacttgcctcatccttttggcttaactcagtaccaagattatatctactggacggactggagccgacgcagcattgagcgtgccaacaaaaccagtggccaaaaccgcaccatcattcagggccatttggattatgtgatggacatcctcgtctttcactcatctcgacagtcagggtggaatgaatgtgcttccagcaatgggcactgctcccacctctgcttggctgtgccagttgggggttttgtttgtggatgccctgcccactactctcttaatgctgacaacaggacttgtagtggtaagctgcatttccctccaaagcaagctagaatgagagaaagcagcattttcaaagtactttagtgtgtgttttttctaaagttaaatagtgtggaaatccagagggggttatttgtttggttaaagggtaggggaatgcaagtgtttgttacttattacttgtttgatgatagcaatttgatgttatagaaaaattaagtcttatgctggtccattgtcttatgtccgtaacccagcactttgggaagctgaggtgggaggaatgcttcagctcaggagttcaa

SEQ ID NO: 68605 - DNA, 1053 bp, Homo sapiens
ggcaaagctctcaagataaaataaaagatgttataaaacaaaatatatgataaaataatgtatatgaaggtacattataatttgaaaacaaatgtgcaaacttaaggtgatgatactgtatttttaattttgccacaattgtttaatagaagagttgcataatctaaagttgccagaatttttagaaggaagagtaatatgagattggggggaaaagtggtcaaatagaggcttatatggaaaatttgaaatcatttttataaaatcatcatgtaattttgagaaagcattgtaataggaataccaagatgactcttggatttttatacaacaggcagttggatttgttatttttagctgaagaataaatgcataattcatccccttctcttttgaatttaaacctgaaggttatgaatactgatggcactgggagacgagtactagtggaagacaaaattcctcacatatttggatttactttgttgggtgactatgtttactggactgactggcagaggcgtagcattgaaagagttcataaacgaagtgcagagagggaagtgatcatagatcagctgcctgacctcatgggcctaaaggctacaaatgttcatcgagtgattggtgagtaactccaaagctttcttagaaatgggaaccaggaatgaaaaaagatggagatagtcagcagtgtaaattattgatgttttgaggcaattttgaaaccttctttactgcccccccgccttttttttttttttttttttttttttttttttttttactgagaagggaccttttaaacgttgacttactactctagctacccagtttgaattgaagggctgaatacacatgcacaggcacaccttcatcaaaagaattcagtctgatagtatgaataatataccttactttaaagcttactgtggtattaaaggaaaatacttcaccatgcttttactccctattaatctgcatattacttgtttgtgatattagaattgaaacttgagattgggagcaagacataatcataggcatttgtga

SEQ ID NO: 68606 - DNA, 1025 bp, Homo sapiens
gccattgcattccagcctgggggacaagaacaagactctgtctaaaaaaaaaaaaaaaaaaaaaagtttgggctcacactgttgtatatgtgtttatagtacatttggaaagaaaagataattatttggtaaattatttatatagcaaggtaagacatagtaaacctatgtgtcttgagtggatcacatgggaaagtctcactgtgttcattcatttatgctacctgctcgcttagtggaaattctttagatcagcttctcacttcctcttttgtaagtggtgatgtgaccagatgctggctacattagggaaaccagggagaaggaatggggaattctgggtattagatgtgtttttatattgtacagagttgtagaaagaatgaatagatttaacctcaggtttataataagcttcgggaaggagggattgagcgtagggcattgctaatgatgtcacattttttaaaagatggttgtggtatttggctcctgctttaatagaataacatatatgtgagggtatgtctgttttccctacttgtcaggtgatagtggccacctatctgtaggtgttaaaatttaaaaggtgcctgctagtacttgtttatgtctcttcttcattatgctgaaatgacttcattgccttttgtggacaaacctagtttacttgtctgcacagtacttctgccaccaccccccctcctgatttttactatattgttgtggggccttcccataataagtactaaagcattagcagaaagaataattttcatgtttttgatagaggaaagatcaaaagcctttatttctattttatatgaccctgcagtaggcagaacaaccttgtttcttaacagcattcctttttttttttttaggatcaggttttactgctgaaaacgtttgttgcactgagggcctgtagtacttcttactaatagccaagatatatcgttgataatttataggtttaaagcatttttgccatggtgtaaaattaagaatgtactattagctta

SEQ ID NO: 68607 - DNA, 1049 bp, Homo sapiens
tcctaagttaggaaaacaaagcccacatgtatgtgtatatctatatctatatctatatctatatctatatctatatctatatctatatctatatcttttattgctgttaactggtgttggggcagatggtagaatatattaaatattatgatggttacatgcaaacaattttaaaattgatttatgggctgtgtgggaacaagactaattaaccaaagcttgggaaaaaatatttaccaagtggtagagttaagtttgtggcaatcaaatagattatggtgaaaataatcagtgattaatattttatcacagtgttttattagtggcctatatccctgatattggtgttaagtctaaaattaacaactttgaattagactttgctacaggtcttatggatcacatagatagaacagagttaggtctcaattttcctttgggggaaacttcacatacaaggatggctttaaatggctcttcagagagacactgtacacatctaatggacagaaaattcagactctagaacagttgttttggaaaggtattctgtagagtgcccatgaccctgagggaataatgacttcaaggccttgcttccaaaatggaaacttggaatagaagaaaccccgttagtattccaccaggctcaaatactgaaaacggcatctgttgttcttgcagctggttttcattaatagaaaattttgcatagactccataaattttctccctgttagtatttcactgcctcccactcttttcaaatccaagttgatgtttgaatcttttaacagttggagtgcattgctgatgagacaaaggttatgagtttatgtttcagacaggcttttagcttcattttggtcagcttgaatatagattgcctacctaatcccatctagttcacacctgtggattatgaactatacatgagtgtataggtacgagtatgcttaggaaaacagtttaaagcccataagttttagaagaatatctgtagcaagaaaatttacgtaagggaatgcaccaaatttattatcatgtag

SEQ ID NO: 68608 - DNA, 3847 bp, Homo sapiens
tttaaacctcagcggtttttttcccatttgactctgtacttattgtctataatgtgcaaaatagcacttagttttattggttttgtttgtttgtttgtttgtttttagttttgctttttgttaattttgtttaactgactaaattgtaacctcttttagggcagggatctcctgctttacttcttgtgtattcctctttggttacaaaatactaagtaaattcacactgattaattcctgtctttgcagatggtttgatagtcaagcacctgcatgacatttggtaataattttggcttatcacagttgttcatgttatggttgttaacctttgtgtacttagtaatcattgatattaatcaatgtgatttatatttgacagccacaaatccatgtggaattgacaatgggggttgttcccatttgtgtttgatgtctccagtcaagcctttttatcagtgtgcttgccccactggggtcaaactcctggagaatggaaaaacctgcaaagatggtaagaagatattatccaaaatgaaaaattttataactattggaattcttcatgatttgttttctctataatcagctctctaggttatactgctttgggagaccagtcacttaatttcacagtcttcacacatggttatagaataggagtgttttgttctgtggcatcacttgaatgctattttataaattattttagtgttttaaataacatatttttgaaaaaagttacgtgttgtatcttttctgtcaaatctcatagtcattgatatcacagttgataactatggaaatgagtagtcgcataaggaatatatttttaacaggtagcatttgtgaataaagaacctctgtgaaagaaagtatgtttattaaacttttagctacaaagaatatcatgagatatattttataacaaattatttaaggatgttttaaattgctttttaacaacagagagatgctttcagagctgggaaaaaaaatccatatttaaaacaacttctttttatacttaagaaacacactttgcctgttctccttactcttaattccctatagagagagggcacgttggagaaagtatactgatttaggacattttaagggacttccagtttggaagaacaccagttcttctgtttttcttcttaatgagaatgttattcttcattctcacccctatggatcaccatctggttctctagcaaccagcaagacctggtaagaaaattgttgtatttagctgtggcttctttatctaactctgaaaagcagaagcctgtgttttggagtgtgttagagtccctggcaagggggccagggagtcagagagatggaattgagtctgtgtacaggatgtttgttatgacttggcattgataaattatcctcatagtaaaaggtgaagctggctgactcttggtcaaatggtttccatggcagacagcaatttggtttcaatttaaaacaaaaggtttttgtaatgttgcttttttctttaaaaatgtagcctgactttaaaacagaggatttattttagcaataatggtctatctgctccctcacagcagtgcaagtgtacatatttaaccagttttgaatttcatgtgtgcatttggcatgtagtagccttaagttaactgttctgttttgatcaccttgctcaaattaacagctctatgacttctttgtgaagttctaggctggctccttttggttgttagccggggcagtgaattgtacaaagttattcctacttggttcctgcagtggcatttgggctgtattttcttcaagttggaattcatttataattagctctagagtgaaagggctgatattgagaggcttcactcctcttctcagttttttgacttgtaattgcagattgattcttgaagtttatatgccagtattttgttttggactcatttatttagctgggaatcttttcttattctttcagttgtcaatttgcttactgtcttttattagcttcctatagttagacgattttttgctggtggtttacttgaacaatttaaaatgaaaaaaagattgagctcagtatcttcattcttggttatgtggttaagtatttggggcttgggctttaaacagttcataaataaacctaatttaaaattcagtgaaataaaaatctgaaaatctttattttttaatactgttgttaagtattagttaatatttcttgagtacttaaatgttcagtactttcctgagttttagatttatctcctttaatccttacaacaaccttacaaggtatagatggggaaactaggcttagcgagattagatattttcccaaagtttgtgtagcttcttgaatcaaattatattggatccacaactcttaaccactgtgttatgtttatctggttccttccctccattgcagctgtttgtttctccatagcttgctttgtcctcaattctgtgaggtattgccctgtatttctctttgttaagacagttttactgagatgtaacttacatagcatataaaatccatccattttttaaattgtacaattcggtgactttttagtaaatttacagagttacgcagttatcaccacaatccaattttagaacattcctatcaagcacaaagattcttgtcctaaatttctttatctttttttaaaaaatgcttcttgaacaaaggatctatatcctacatttccttctcctttaatactgagctacttagcttcttagtcattacatagtcattattcattgtacttttaaatagctggattaattccaatgaaaccatagaatgtatcacaacttaatttggagagttagccattaaacagcttgacctcagagtagactcttctatttcactgtattactttccatttccactctaaagagagtgcacatccttttgtgttaatttatgtatattttatatttatttttcagttcttgattctttatctagagcaggtaaattttacctctgggtttcaaagtattcttcatttcactttgttgttctaggtgccacagaattattgcttttagctcgaaggacagacttgagacgcatttctttggatacaccagattttacagacattgttctgcagttagaagacatccgtcatgccattgccatagattacgatcctgtggaaggctacatctactggactgatgatgaagtgagggccatacgccgttcatttatagatggatctggcagtcagtttgtggtcactgctcaaattgcccatcctgatggtattgctgtggactgggttgcacgaaatctttattggacagacactggcactgatcgaatagaagtgacaaggctcaatgggaccatgaggaagatcttgatttcagaggacttagaggaaccccgggctattgtgttagatcccatggttgggtaagaagctctactgatagtaaattctgtgtggtgtttctgtttttcacaggttcctgaaaacattgactaagataacatgacatatatattggtttccagtaaacagctctttaatggctgtctattttaggatatggtgattagaatacaatctcaagtttaaaaattgctagttttttgccttggatgtcttagatattttttctttctaaattaagtccatgtttgctgactttgggtgttgtctgcagattttgctcggattgcatcattaccatgaaaaatgtgggaagaaattgttttcagaactctttcccttcccctagaagctttaattccattttcagtactttatagtaagaatatagcttacttttttttccctaaatacat

SEQ ID NO: 68609 - DNA, 1008 bp, Homo sapiens
tggtgaaaccccgtctctactaaaataacaaaaatattagccaggcgtggtggcgtgtgcttataatcccagctacttgggaggctgaggctggagaatcgcttgaacccgggaggcagaggttgcagtgagccaagatcacgccattgcactttcagcctgggcaacaagaaagaaattatgtctcaaaaaaaaaaaaaacaaaaaacacacacacacacaaaaacgcctcttctttttaaatgaaaactctgttaatctagaatatatttgaatttaagtacctcagcttgctaaataaaatacctacttaaacttttctgtgtacccctcccaccttgttttccttagttttggttctgtgtttggtcagcctttacaatgactcgggctatgactgctgagaacttgtaagagaggactggaattaggtttaaaaggaatacgagaatgttaagggtttggcacttttgtgtaaataaatgtctggcatctgtctgagtgtatttcagattttattacatagccaaaaatgaagagattttgcaacatatgttgctttatattagctctccatttagggggagataatcaaatattgaaagtgttatgttggaatctgatgatcatgagcccataaaaatgtttttaagtgtatgtgttactcttctgtacaaaagaaaatgttcagtcacttgtatgaatttttttattcttcatagccctcaaaagagaattttccctgttttttgtttgttttttgagatagagtcttgctctgttgtgcgtttatgtgatcacggctccctgcagcctcgaacttccaggctcaagtgatctttccacctcagcctccctagtagctgggactacaggcatatgccaccacacctggctaattttagtattttttatagaggtagggtctcaccatgttggtgacccaggctggtctcaaactcctgggctcaagtgatccacgcacctaggcctcccaaagtgctggga

SEQ ID NO: 68610 - DNA, 1912 bp, Homo sapiens
ctttcccttcccttttcccttcatttttctttcccttcctccctctctgcccatctctgcctcctgggtgggctattgggaaacttggatttatgaaaatatcaaaacatgtattttcttgaatattattttgactcaaaacgtgatttgttcattattccagagcatttgcttattcttttttttttcttttttttttttttgagatgagtctcgctctgtcgcccaggctggagtgcagtggcgcgatctcggctcactgcaacctccgcctcctggattcaagcagttctctgcctcagccttccgagtgtctgggattacaggcgcccaccaccacgcctggctaatttttttgtatttttagtagagatggggttttaccatcttggccaggctggtcttgaactcctgaccttgtgatccacccacctcggcctcccaaagtgctgggattacagacgtgagccactgcgcccggccctcagcatttgcttattctataactctctctaatactctacaaagttctgtgccttaagtactaactaggctgtctacttttccttttaaaaagtatgtattgcttgtgaaaattttggatctgctttgtctcatgaacatattctaccactaacaggacttctttttggctgcctgaatatagtgaaaagtcagctaagatgatcacttgctggagctagactggggtttgcggggagagtgctacctgcatgccattttggcctcatgtttatgtttcattctcagttatcaaaaccataagaagtgatggacaaaacaggctcaggttctttgttcttccacatcaagaaggaaaaaacctattgctgatataaatctacttcagtgccaactgtaacccctgtgatttttctcattgcttacctttctctgtctgatgacatgaattgtgtgaaagggtggaagctgtgagtccagagatggtagttgaagagtaggatttgacagcagtgcaaacaatgaaaaagcagtgctctctctctgccgggtatcttgtactgaacttgaggctgctgccaagttagggactattcccaaatgcttgtttggggcttttggacaccttaaaaatatatatgaattcattatgtgaattattttttataggtgtatttgacctattggtatgtattactcaagatttgtatgtgttaatgtgaactaagatcattttaatgggagaggtgacgttatgatagaagaagaaaatttagaaataagtttaaatttttctctttatgttaataggcaggcagtggttaaaggttcccttccacatccttttgccttgacgttatttgaggacatattgtactggactgactggagcacacactccattttggcttgcaacaagtatactggtgagggtctgcgtgaaatccattctgacatcttctctcccatggatatacatgccttcagccaacagaggcagccaaatggtaagtgatccttgatttttaaattgcaagttggaacagctttgtagcactctaatgtctggctttagtgaggatcaggaggagggagggcatatccaaagatagttggcgggaataaaaaagagttaaaatcctacttgggaggctgaggcaagagaatcacttgaactcgggaggccgaggttgcagtgagctgagattgcgccactgcactccagcctgggagacagagaaagactgtgtctcaaaaaaaaaaaaaaaaaagttaaaatcccagcactttgggagactgaagcaggcagatcatatgaggtcaggagtttgagaccagcctggccaacctggtgaaaccctgtctctactaaaaaatacaaaaattaatggggtgtggtagtgtgcacctgtagtcccagccgcttggg

SEQ ID NO: 68611 - DNA, 1016 bp, Homo sapiens
gaaggaagaattttttttttttttttgaggcaggttctcgctctgttgcccaggctggaatgtagtggcatgatctcagctcactgcaacctctgcttcctgggttcaagtgatcctcctgcctcagtctccctagtagctgggactgcaggcgtgtgccaccacacctggttaatttttgcatttttagtagagacagggttttaccatgttggcctgtctggtctcttaattcctgacctcaggtgatccgcccgcctcagcctcctaaagtggtgggattacaggcgtgaaccaccgtgcccagctggaaggattaattaattcaaactggagtaaattagctgttgctgttgccttcaacctcaccagaatggattgcttatggggcttgcttctgtcgctgcttcctctttgacctctacgtcctcctccttttgttgattcagtttttcaaagtcggggttggtttgtctgactggaaaagctcaggacttacacgtaaccctgtcccagttaggagagagatgtggaaagcaaatacctggttttcagtttctttagttttagggcaaggttctgccttataaagtgaagaattctccaaacataggaaagtggattcgataaagctgggtagccccctccagtgccatatatccatgaaagaacattttgtgaatgaaagggaatggttacaggatttgtggatatctttgctgtgatttgagtcttgtttgtattttttccccctttctaatgttgaaaaatgaatgaggtgcaatggtagatacaaaagcggaggacagttggcctgttggggtggctcacgcctgtaatcccagcactttgggaggctgaggtgggcggatcacaaggtcaagagaccgataccatcctggccaacatgggaaacctcatctctactaaaaatacaaaaattagccaggcgtggtggcgggcacctatagtcccagctacttgggaggctgaggcaggagaatcgtttgaacccc

SEQ ID NO: 68612 - DNA, 1178 bp, Homo sapiens
accatgtgcatgatagttgaggattattcatacttgctaatatgtatattaatgacttattttaattatggataggattatataagtaacttcaaggatcatgacatgatttatgatctagtatagatctgggtcacttagtttttatagctcaagtctcaatgtcttaattagtcacctgtgtatgtaattacatcttgtaaagggtgaaatttcatccctttagtctagatttattgaaactgaacattttcattatgggaagccgaattcagattgagtatacttaccaaattagggcttgtgaatattttggaagatttgttgttttatccttacctaatcaaataaattaaatgctttggattgtaataaaaatgtataaagtaaatttgtataaaatggcttgtgtgtctagtcttattatcagtttgagatatttttattttcctggcataagaaattgtgacatcttgaaaacttaatatatgtttacttgctttacttccctcccagttaaaatgaagctcatcttctacctttcactccatttaaaaattattttccagaaagcattacaaatgaatatgagaccagacacagcaataaaattacatttgtgtggacgctaatgaacagcatataacagcctggtcctggttttcatgatttttggatgaatagcagatgtgtatactattgcaaagtggagctgtgaccacatatatttatttaatcattatcaagtacatatgttcattctctcttaattcaaagccaaaataaagctaattgaggccaaaataaattagaggccaaatagattacataaccagagttagtaaagattactgctgaagtgagatttcttctatataagcctgtagcctagcttttgagaagccaagggagatatttatcacacactttctgtttcccaaagcatactaaaattggctttaaaatatgttgctgataaaagcccttgcagaatatattacacaactagttgaattaagcaacttcattgttaagtgcttttatgtgtctacaggtttctaaggtagattctaaggtagattaaatacaaaaacaaaacaaccaaacctgctccttaatatttgcacaccaattattatttattttttgaaagagtctaaaataaaatgaagtagtca

SEQ ID NO: 68613 - DNA, 1136 bp, Homo sapiens
aacatgaacctaaaatgactaatatttggttaaaatccaaagataaataacctgtactattttaatactttgttttctttagctttcagttgtattagaatgctttaaaactcatttcacttatagaaaggagtgaattctttttatgtaataaatgagaacttggggagaatggaagaaaggtttatatgtgcttctttatcttgatatcaggcctggttacagaggttgaacaggatgccatgttgtagaaaaatgagaagactgatttgactgtaaaggattatgtgggcagtagtatagggaaattttagagggagatgtctggaaatacaaatatgtattttttagagtgaaattaaaacgtgtttgttgaagcaagatggtgctcttaaagcaccaggaaatattgtagtggctctgatcgtaggaaaaacgattggatgtcctgaggaggaggtctcagatgtaactgtagttatcaaagaatttggttgttgagaactttatagatatttttgagaaacggagtttgtgttttgctaacagagtttgtaaggctcagagggtgttgaaatgtttctgaggttactgctttgtagaacacataggattttggtgcttgtagtcgtcattagggaagaataccgtggtgaaaagataaagttcttttttcccctcttcttgacaagttcaattttaccactgtaagggtgatgattgaaatttaatgaaatatctgttaaatggttattatgttcagagttctgcattttgtactctggttggagagagggggtttggtttatctttactgtttaaggacagaaaacttgggagagacaactttttcttcttcaaagcatgtttatttgcattatgtaacatgaatgtgaagagaggaagagtgttaaaataattagaaggggcacaagagctgttatgagcttcattaccaaattttggaatgggatcttgatcatttctataagagattaatgattacctgatagtacattattaaagggaactgaatgtatatagttcctcttgactcttcaggatctaacagttcagtgagtaaattaatcattttcattttgttccccaaaactaatgagctttacttctgggta

SEQ ID NO: 68614 - DNA, 1211 bp, Homo sapiens
ttgacatatgtttttgtttctcttgagtaaatacctagatgtggaataaacagtatctagctattgccttggattgtatagtaggttgtatgtttaaccttttaggaaactgccaaactgttttcccaagtggctgtaccattttacattcaccccagtagagtatgagtgttccagtagctccatattattgccaattcttggtatagccaggctttaaaattttatctgagttattttaacaagaaaagactatcgtggtggaaatagttccccccatttcctatgtcttattttttaaatgctgcaaaaataatattttgtgtgtgaagtttagatggtctcctaatgatttatttattcttttcttattttcgacagtctttgctcacttaaaccgatttgaaacgcagtttataagaaccaatacgttttcttccttttcacttacatatttttctttttttgttctagcggcccctttgttgctttatgcaaacagacgggacttgcgattggttgatgctacaaatggcaaagagaatgctacgattgtagttggaggcttggaggatgcagctgcggtggactttgtgtttagtcatggcttgatatactggagtgatgtcagcgaagaagccattaaacgaacagaatttaacaaaactgagagtgtgcagaatgttgttgtttctggattattgtcccccgatgggctggcatgtgattggcttggagaaaaattgtactggacagattctgaaactaatcggattgaagtttctaatttagatggatctttacgaaaagttttattttggcaagagttggatcaacccagagctattgccttagatccttcaagtgggtaagtttttgtacagtgtacgaagatcatcatacctcctttcggtttttctccactgacatacaccaccctgacccctatgagaaaagaaagatcgaaaacaggaattttagattctttgggcttctttgttgagtagacttgaatgtggaaagttacgttgtgttattattatttttgacagggtttttgctttgtcactcaggctgtagtgcagtggtgcaatcaaagctcactgcactgtcagcctcccaggctgaagtgatcctcccatttcagcctcccaagtagctgggactttaggtgtgcgctaccacacctggctagctaaaaaaaatttttt

SEQ ID NO: 68615 - DNA, 1056 bp, Homo sapiens
ttaggatacctatatataggaagtggaaggtttgaaacaagacaagaaaaaataggtagtattgtatgaggagaacattctatataggtagggatatagtcaacagcattgactgctctagaggtgttaagaataaagactgagaggctgggcgcagtggctcaagcctgtaatcccagcactttgggaggccgaggcgggcggatcacgaggtcaggagatcgagaccatcctggctaacacggtgaaaccccatctctactaaaaatacaaaaattagctgggcgtagtggcgggcgcctgtagtcccagctactcgggaggctgaggcaggagaatggcgtgaacccgggaggcggaccttgcagtgagccgagattgcaccactgcactccagcctgggcgacagagccagactccatctcaaaaaaaaaaaaaaaaaaaaaaaaaaaagagtaaagactgagaaaagaccactggatttggttataaagatttagaggaagcacttgcagttgagtgatggataggaagttagataaaagagtaatagctaatgaatggtagtgtgaagtatatataccaatgttataagattttgcagttagtagaaatataattattattctgatggtagcaaggttagggttattaaaacaaaacaatagcaaggaacctggcgtaaaccattgaaaatacgagaaatacagaacaattgatagagcgaagttgtagagaggaggtaaggaggctgaaccgaaagtattgctttagccttaggaggaaggccatcttctcatttgagactgaggacaaggtaagggaagatgggtggagagaaaattttgagaggtataaattaagatgttggggatgtatgacatttaccttgtatcctgcttcactgagattgttttatgagatgatctgaggataaaggattcagggcatggaaattagtctttaaaagtagaaaaggcttagaaaggctggtagagaaagtttcccaggagtttaataaaggaaaacaaggattcctgagcactgtgagtgttc

SEQ ID NO: 68616 - DNA, 1434 bp, Homo sapiens
tgcacatgtaccctagaacttaaagtataataataaaaaaaaagaaaaaaagtgaaagatcttatgaaactttgttagaaaagataatgaaattggcaaggaagtttgatttttgtggcatgcgaactaaaatcaacccaaaaaagtgttagacaaaagcatatctataagcgtaatgattaactttattttattattattttttgagacagagtctcgctgtgttgcccaggctggagttcagtggcgcgatcttggcccaccacaacctctgccttctgggttccagtgattctcctgcctcagcctcctgggtagctgggattacaggcacgcgccaccacgccctgctaatttttatatttttggtagagacagggtttcgccatgttggccaggctggtctcaaactcctcacctcaggtgatcaacctgcatcagccccccaaagtgctgggattaaggtgtgagcaactgcgcccagccgattaaccttattttaaagaagagtggctagtacatgtcatttatgaatatagatgaatatattcattgcagagagaaaatctaaagacatataatcctaagatgtaatggaccatgaatatgtcaagagtatatcaagaatgtatatatgtatagagtatatcaagaatgtatcaagattatcaaggaaaaagatttagcagtctggagtaggtcgttaacttctatataatagcattccataagtaaatgatgtgaattcttaactgagaaccattagccaacctagaagattaaagaagccaaattatgaccaagttaacattgaggaaaaaaaatccctgaaattatgactgatgacattatactgttgtctaataccaggcaaagcagcaccagaactctgattaatagacatggacaatgagggcattgatgaatttctaggagctttataccttcatagaacttccaaaatatccctattaataacattttacctatacaaatttaacttaaacttagggagggtaagcctctctggctttgacagtgctttccatatgacccataacgtttgatcaaataaactattatttttaacatctctcttttacaaggtaaagggaattttgattttctagggccccttaggggaaatctcaaagacagttgttggtacaaaaggcatcatttaggaggtttgaacatttgattaaataggatcatgggccactgtggaaaaaaatacttggctacatatttaaccaaaagtgaccggaaaaaaaaaaagattttagttcagtgcggtggcccatgcctgtaatctcagtgctttgggaggccaagatgggaggatcacttgaggtcaggagtttgagaccagcctgggcaacgtggtgggatcctgtctctacagaaattagctgggcgaaagatttcatgcct

SEQ ID NO: 68617 - DNA, 1256 bp, Homo sapiens
tcttttaatattgccttgctgaaagtttttttaaggaatctgattggactttaaaatgcctcttgagactataaaggtaagtcaagaactgaccatcaggtttcacttgtaatacctataaatttgggtgaattcctgtcttgaagttcccaaaatattctaggatttttgagcctgccgggaagtgatcttgcttaattcacctgcaaggctgggaactctgtaagccagttaccaggccagttttcctaagaggactgtaagcgttggttcataaagtcaactgtaacttagaagtatttggtcatacctgattaaatgaatattttcaaatgtggcattccagtcaaagccttggttgcataagtaatgtttccagctagaaggcagactcattgaacctctgcagataactatattgccatgaaaataaaaataataagagtttttgaattctggaggagtaagacgggggagaaaaagataagtgtttatttcggtttacaaaaacatagtctccttaaattgttgtgagttatagatagcttcagagaaaagagaaaggggttccttatatccagaaaataggacgctaaggcatcagcaatattttaaacgaaacccataatcatccttcatcagtttattcagtcctatgtaattaattcttgttctgctggatctgtgttagcagtctcacgaacccatctgtttttctactagctgtttggaaatcttgactcagtccactggtgtggtctcagagttatttaagtgatgccatcagacgcttgtgttcaggttacctggcgtagtagttttcctttttctttctttcttttttttttttttttttttttgagacagagtctcactctgtcacccaggctggagtgcaatggcacaatcttggctcactgcagccttgacctcctgggctcaagtgatcctcccatctcagcctccctagtagctgcgaccacaggtgtgtgcgaccatacccagctaattttgtattttttggtagagaaggggtttcgccaagttgcccaggctggtctcgaactcttgggctccagtgatatgcccacctcagcttcccaaagtgtggggattagaggcgtgagccaccacacctggcccatagcccttttttattgaagacaagtgcactctggcctgtagctgatttgcaagtgctttcagggaagcattagagtaaaacagaaaactatctgtagatgacaaaatactta

SEQ ID NO: 68618 - DNA, 1474 bp, Homo sapiens
aagctccgccccccgggttcacgccattctcctgcctcagcctcccgagtagctgggactgcaggccccgccaacacgcccggctaattttttttgtattttagtggagacggggtttcaccatgttagccaggttggtctccatctcctgacctggtgatccagccgcctcggcctcccaaagtgctgggattacaggcgtgaaccaccgcgcctggcctaaatttatttctaaaggattgcagccataactattttaggtgatgattattataaataagctacagaacagacagttcaaatgattgtgatacttattaaagagttaagcatgggcaaaataattttatcaagacatctaattgagaaattgcattatttgtttacaacaattattcagttggtggatttctttctgcaggatggctgaatgctatactgagtttctgcattgcatgttttcacttcggataagggtgtttatcttctataaagtaagcctcacttcagtgaataaaacactgttttatatgagtaactttgaaatttagtcaaatatacagactaggcaatctaagaacaggctgtttgctcttaaaattatttattttaaaatacaatttgtcagtacataaatgcaaggaaacaaggttatttggtattattaacatatgcttttgtttctcaagctgttcgtgtttgcggcagtgagtattctcactaaaggttcaagctgttcgggtgtgaggctagaaacttttaaaatgtgcttggactcttcggtgaaaattattgatactttgatgctgtgatccttttagcggtatcataacttgtagtttctgtaatatcttgcttggaaggaccttgtataagtgcttaaatattttggaactaatttcaggaggagattggggatgcaaaatgaaattatatttttaggcagaaaactacattaagttatgtaagttattaacaccaggcctaaagttattgatgagactctcaataaaaataacatgaccagcagtagtctttttttttttttttttttgagatggagtctcgctctgtcacccaggctggagtgccgtgccatgatcttggctcactgtgacatctgcctcctgggttcaagtgattctcctgtctcagcctcccaagtagctgggattagtaggcgcccactatcatgcctacctaatttttgtgtttttagtagagatggggtttcaccatgttggccaggctggtctcgaactcctgacctcaggtggtccacccgctttggccttccaaagtgctgggcttacaggcgtgagcctgctgcacacagctgtcattttttttttcccaagaaaatagtcacccaaatattggaaacctacctttatcaaattatgtatgtttaaccaggaggctattttctctaatggtcttagtcattgttttatcactacaagacccaaactac

SEQ ID NO: 68619 - DNA, 3261 bp, Homo sapiens
gccgcagaaagtagtcccgaccacgccggctccaatgttgttcaacgccgcctcacgccctccgcggggagggccgaagcggccggtccgggaaagaatcccgctggaatgcgccaccgggaggaggctttccctcccagttcgcctctgctagcccagaacctctcccagggtctcaggcagaggctgtgcgtgcggttgccgactcccttccctggccgtacaggaggcagtaccgggagaaggggctcgttgcgcgcagggacacggtcgcggcgaccctaggaggcggtgccgaccgtatccctgcgccgctgcgcgaggcagaggctgaatgaggagctgcgcgggggaagcggggcgccgggggaggaggcggcgggatggaagcagacgctggcgtcgcgcgagcccggggccgagcggcgcggtagagagggcggcggcggcgcgcgcggaaccttgacgtgcccctttctttcttctctcgctgggaagctgggaagtatgagcgtgcagccctgccgctgcggcggccgccccggctcctcgcctcccccacttctggccacccctcgccggtgagagaagagaacgcgagaagggaagatgggggccgtcctgaggagcctcctggcctgcagcttctgtgtgctcctgagaggtgggaagagtgggggcactggaaagttggtggggttcggggggaggtggccttgttgtatgtgtctagggggaggggagggacggaggaagggagaaggggagaggagcggggagaggcctggtcgtggggagggggagagaaaggggcccgggagcaggggctgcgtgcaccgcccggccacaatgcggacctggcctggcttcccagaccttccccggacacatcggagcttcgatcccggctgctggtcttagggaacccttggcaccccatgctgtcgggatgactgagtgtctgtgtgcctctctctgcctggggtcttccagggaaaagggtctttgtacgtattttggcttttaaaatgtttgagtccgagatgctttaaggttggccttatccatcgaagccccgccacccactccccaccccgtttcggtgtttcttaggtgaacttttaaagccctcttgctattttttccaggccttgttacaggtaatgattggcttccgtttgggatataatgaccctgggtgagagcgcagttggaaagtgactccggggttataggtcgagcgtttcagcattgggagccttctgagcttcagcccataataaaataaaacattgcccttgtaacctctggtattcacggcttgcccctattttcggagtatgcaagtgtacagttggcactaagtagggaaattcatcctcgtgtgaagaggagccggtcctgggaccaaaatgataatttgctctgcacccctggggactgcttggcactttggtaaattgcataggctgttcgagataatttgctctgggaatcgcttgaattcgatggcactatgatgttttgaattggactgcaaagctgacacatgctctgtgacttttgtgacagttcacaaagatttttgactggcccgtcggcagctcttctcaaactatttagtgttgaacttgagatggctgtgatggctgtggagcatttaccagcagaggaatttaagtactgctcgatacggtggcttgtagttttggtttggtaaagttcttactggcgttcatagtaagttcttttcaggcatgtgaccgctggtcgctggagatttttaggtgttaacaagctaaacttttgttaagttctccaaactaatttaagtttacagaacactaatagtaactaatagtctgtgacaggtgtatatttttgcgtgtactgtgtatatgtatttcggatgagaatgattgagtttttttttggaggaggagaaatactttcttcagttactctgtagtaatgcagcattgtgtttgcatgttatattacttgatactctaagcatattacaaagttttcccacatgtaaaccccggaaaggtagtgttcattagatttttgtggcagaaattttaatgaagtgttacgtactggagaggtttcataagtatatacttattttattattggcatactctattgaaaggggttttgctgtagctgttagaaacaactatatttgacataagaatatgtatgtattttaagacataaggttaatagggctgacaaatatgagaaccagctgattggttagagtcgtgggaaaacttataacttgggatgtttctggttgtctagttgtatttcttggaggagaagcgtgtgatgtaaatgccgtttgtttaacaccagctttgagaccagagctgggtttgttcattattggaatttagataggttgcacttatttatgtaacaagacctggaagaggtaatagtttaaattgtctcgtttccactagcaaagttttcagaagtggagctctcgttttaaatgtggcgaaatatggtgtaaggtggtcttctaatatgtaacagtactgtacttagctgtgagtacatattatttgaagtaaaactgtcttttgatgtaaaatatttttgttcataatttagaattaattcattctttgagaatgtcatcctctgttatagtaaagatatttagtcaaccttggactccaaggagaaaaatctgattgatttgttgcatttaggtcatttttttcccccacaaagaattggggctttaacattggctgggtgtgatggggtatgtgagagtctgggagaccttctgtcctgtagccctgttgaattagtagcagaaagccagggaatactgttagtgctgtgtccctatctctatcatcacatgacaaggtataaaggaaagatttgggaatttcaatactaaaatcttggatttaaagcccaagtgtcacaacttcataactttgtggttctggtctagtccgcttctctaggtctcagtttctttactggtagtgtggataatgatacctgactagtttgcagggttattgggtgttttaaatgaaataatatggagtaccttgttaatgttactttttgctataatttttgcttgttcagggacatatcctcaaatgctttcatgatttgagatttaatttgtataacgttcacaatttttttttttttaaagagacaaagtcttgcttcatcactcagtctggggtgcagtggtgtaatcacagctca

SEQ ID NO: 68620 - DNA, 1082 bp, Homo sapiens
acagaataccactgggtggggaggtatcataaactaaaggaagggagttttaacaagtgggatagaaacctatgttaaatacggaaaagaagaggaggatgtggactgagaaaaaaacttcaagcatgaaaagaaaacactagtaatcctccaaagcagcaaatatggatgaagttatgtatatgagagcctgtccaggggaacttcccaaatggcagaggtatcaaggaagcagggacagcatgtagcacccatggagtcagtaagtttggcagcagaaatgagaacagagaaagcgtggtagccaagagggcaactgaattgaaagaaagtgttcgtcttctgtttttaagatgggaagagctgtatatctgaacaagaggaaagaggtccactaagctagttgcgagacaaaaagagaaaaggacaggagcaaagtcccagcaaatggaaagagtgaaacagaatggcattaagtttcagagaaaggcatgaatacctcatctgagacttaatggaaagaaacaagaatggatgcaggcacacagagatttatgggagtaagggaaaagatgagggtgttctggtgagacagcttcactttctcaatcggttgaaagcaaccattcacctggtacttcccactcttctgagtaaggctaacccaatgctggtaaacagctatgtttatttttgtttttgtttttacacacaactcacacttctctgaatagccatgtttaaaagcttaactgaagagctattacaaatacaaacccataaagtaatcaggaataagtcatcaatctttccaatatggtatttgggagaaaatatacttaggattacccctgggtttagagattacctttaagccattcagagaagactgtggctctgattaagatccattctcttgtcccctcctttggctgccattttccaatgcaatgataaggtctgacagctggtagaggcagacatctgatgaatgcaaagacttttatttgtccagatgacagaagaatgtgaagaaactggtcatttgaaatctagctccatcatgctctccttatcgccct

SEQ ID NO: 68621 - DNA, 1034 bp, Homo sapiens
agatggggtgtcaccatgttggtcaggctggtctcgaactcctgacctcagttgatctgcctgcctcagcctcccaaaatgctggaattacaggcatgagccaccacgcccggcccaccttcacttctttgtgctattgctttcatatatattgcatctacatacgttagaaatcccatagtggttttatacacacacacacacacacacacacacacacacacacgtttttgttttaataatatattttttgaagtgattaagagaagaaaataactatatatagaatgtgatgtttacccacatagttaacatttccagaattcctaatccctttctccagtttccatttgatgtcatttatttttagtttaaaggacttcttttagcatatcttgcagtacaggtcagctggaaaaaagtcctgtttttatctatctgaacttttttttgcccacttttgttataaagtcattttttggtgtaattactaagtttttgaagacatattgtgagactccatgaaatctcattttttaatctacctttatttcatcagttataatatctattgatgattcttgcttgaattaattatgctgtgatggctaccaaataactgttttctaaatttttcattccttctacatttattagtttatattctattggaaggaataggtttctcatctccccatttatttattcaaatcagtgcgggaacagtcagctcctattttatccaatgagttgtatgtaatctgttattatcattatttctttttcaatctcaaaatgttccaaaattggccagtgacagcatcttcaatctaacttcctgtgtccttttttttttggagatggagtctcgctctgtggcccaggctggagtgcagtggtgcgatcttggctcactgcaagctctgcctcctgggttcacgccattctcctgcctcagcctgccgagtagctgggactacaggcgcccaccatcatgcccagctaatttttctgtatttttagcagagacggga

SEQ ID NO: 68622 - DNA, 1069 bp, Homo sapiens
ttattattattattattattttgagaaagagtctctctctgtcacccaggctggagtgcagtggtgtgatctctgccactgcagcctccgcttcccaggttcaaatgattctcttgtctcagcctcccaagtagctgggaatacaggtgcgtaccaccacacccagctaatttttttttttttttttttttttgtatttttagtagagatggggtttcaccatgttggccaggctgatctcgaactcccgacctcaagtgatccacctgccttggcctcccagcgtgccgggattacaggggtgagctaccatgcccggcaaggtgggaaaattaggttagggccagatttggaggctcctaaaggatagggaaaggaatttgaagttgatgccataagaacgtgattgtagttttgtttgttgcagtagggagcagggtattaacatgttgacagctgcgctttttgaatgaattggtatgacagtggccaaagatggacaatgcagttaggagattgttgtagtttcctagtgatgagctgatgaaagcctgggctggggtggggatagtggaaggaggagcaaacttgagaggcattttcaaggaagaaatgacaggatttggcaaattgggtgccaggaataaaaagacggggaaatagccatagggttgcttgattgagggagcagaataatggcagaatggggaagggagattaattttgtttgtttgtttgtttcttttggagatggagtctggctctgttgcccaggctggagtgcagtggcaccatctcggctcactccgccccctgggttcaagcgattctcctgcctcagcctcccgtgtagctgagattacaggcccacattaccacgcccagctaatttttgtatttttagtagagatgggtttcatcatgttggccaggctggtttcaaactcctgacctcaagtgatctgcccgcctcggcctcccgaagtgctaggattacaggtgtgagcaaccgtgcccagtgggagattaattttgaattttggccttgtggccttgcaaaaccacaact

SEQ ID NO: 68623 - DNA, 1023 bp, Homo sapiens
ctagttacataccctagagaaaactctcatacatgtgcaaaaggagacatgtacaaagatgtccactgcaaaactgtttaatagtaaaacaactggaaacaactcaaatattcactaataagtcaatggatacactgtgaaatattcatttgatggaatactacgcagcagtgaaaataagtgagacatatatcaacatggataaatctcaaaattataaggaaaagaaaaaagaaagttacacaagtagctgaaggatacatatagaacacaacttatataaagtcaaaacaagtgaaagaatattctacaccgcttagatatacaaaaacatgtaggaaaaagacaagccacgaagaaaacacatgggcatgatgaatgccaaaatcagatcaataattccctgtggagtgggaggaggagggaatatcagggaaggatataaaggatggggagggggcgttgtttatttgaaacgtgtatttttcttcctgcagggaaagagatctgaagcaaacatggcaaaatattaaaatatgacaaatttgatgaatacacaggtgtttgctatttttttttttttttctgtatgctgacatactgcaaatgaaaaagaaattctaggtagcagctgataatctctatggaggacaaggcatcctatccacagcagtttcttaaaccctgctgggtctaaggcccctctgcaaagctgatggaatctatggctccacttcccatggggtttattatgctaccaccactccacccttggtcacctcaggagacattcaggaaaacccatgcccactcttttgtcatgtggttgaccgaggtaatttcaactcttgctaagagttaccaaggccagacaattagacagggagagagcgtgaaacattggctgctcagagaaatagcctgtgataaaaacaagattttcactgaatcaaggctgccagggtaacaactagtgaaaaagctaaaaatccagtggtacacatgcaactgaatgttttcaaa

SEQ ID NO: 68624 - DNA, 1052 bp, Homo sapiens
aggctcaacagcatgctgcccgagggcgagcggctggagcccttcagcatgaagcccgaccgcgagctcaggctgtagctgctgcccggcctgcctggggctgggagccccagacaccgacaccctgaggacgtgtggagctaaggtcatatcatctgaccaggtctggaggctggcgggaggctccctgaaagtgggtgcgaaggagtccggctggcatgaaaatctgactttgcccagctcttttccttgatgcagtttcccggtgtggaaggaacctaaccagttctcggtgataactgaagctggaacgtgtgaattattaggaattctttgaagaactctgcattgagaattatttttatttagtttttttttttttttaattgagagtatatagtccagtccaggtaccggaataaaaatatggagacaaggggaaaatattttacgaagctctgtgttctcaacgccctcatgaacttttcagtaggctgtctggtttatgtgtggtcaacttgaaaaactaattgaatctaggtctctgtattgttcctgtttctaccctgactgtttccgtcacaccaagcccttatctggggcgcgtcttcctgcccaggtggaacactggcattttgttgactgtcaggttaggtgtcccttagtcgtcatcagaagctgaagccttcctttccacaccctcatcagattcatctccactgataaccggtttccttgatgcagacatagtttagctttctttgactgcagagatgtctcattccacagacatttcttgaacccatttgatgtgtccaatattgtgccagggatacaaatatggccgtatagcctcaggccttcatttctgaaaagaaaaaagctcaaaaagctgctgaatttctctgggagtttaggaaaggaagttatttgagtaacaacaaaagtgcttagtgtcgtactttacacatcataggtgttctaatggaagcaaggactggagaagcaaagagtggaatgtgaggagcagacctaggcagacaccttgagac

SEQ ID NO: 68625 - DNA, 1032 bp, Homo sapiens
aaaaccagcacagaatgatatgactcaacacagaccgacttggttatggggatgatgagccgcacagacctcactagttgtgcacaaataatgtgctatgatggggtgtaaagtgaaggcagaagagggtcagccgcattgttatgatactgggaaagtgctggtcaacgatttgagttagtttttagatatacattgaaatctttaatcagacattctcaagtttcacacagtagtttttgatgttatgtacacacacaccaaatgtgtaacagttcaccacttccagagtgtggtcatgcccaaaacatgtttaagaaaggaaagcagtagctccttgctaacgatgtttcaggaggtttgggggacttggttttaatgagcttctgtcatttagggcttctcttggccatggtcccccttccttctggaactgtgatgtagtcacatcctacagcctttagtgctggttcactagtgtcagataatcagttcttggaatcgagactgccgtggcgaaggggtggcctcggaggcaggctctggagctgcttggatgtctttaggtggggtggtggctggctctcttcagcatgtaattggggaaaccctcgcgtctactaggggtgatacagatggtgattttaaagagcaaaactagacttctatgtgagaagtgctggaaaatgatttaggacatgtgtaaagttagatggaaagactgtaaatgtttaatatgaatatagtgttcttttgaagtaaggccagctgttgaacggttaaactgtgcatttctcattttgatgtgtcatgtatgttaatgtatgaaatgattaaataaaatcaaaactggtacctgtttatacataaatacgagaaaagacctatctttgcagccataaactcggtgggaacaccaccactcaagttgccaaaggaggcagtggtgaaacctgtcctgttctcacttaaatgaggatttagctcaaaataaagtggtggtgtcatcaggtttattccgtgttctgtcat

SEQ ID NO: 68626 - DNA, 1377 bp, Homo sapiens
gttccttctctctggatatcaaatcagtttcatattcagccagcatggcagcatccttacatggcttctcctcatcagaagatgctttggaatactacaaaccttccactactctggatgggaccaacaagctatgccagttctcccctgttcaggaactatcggagcagactcccgaaaccagtcctgataaggaggaagccagcatccccaagaagctgcagaccgccaggccttcagacagccagagcaagcgattgcattcggtcagaaccagcagcagtggcaccgcccagaggtcccttttatctccactgcatcgaagtgggagcgtggaggacaattaccacaccagcttccttttcggcctttccaccagccagcagcacctcacgaagtctgctggcctgggccttaagggctggcactcggatatcttggccccccagacctctaccccttccctgaccagcagctggtattttgccacagagtcctcacacttctactctgcctcagccatctacggaggcagtgccagttactctgcctacagctgcagccagctgcccacttgcggagaccaagtctattctgtgcgcaggcggcagaagccaagtgacagagctgactcgcggcggagctggcatgaagagagcccctttgaaaagcagtttaaacgcagaagctgccaaatggaatttggagagagcatcatgtcagagaacaggtcacgggaagagctggggaaagtgggcagtcagtctagcttttcgggcagcatggaaatcattgaggtctcctgagaagaaagacacttgtgacttctatagacaatttttttttcttgttcacaaaaaaattccctgtaaatctgaaatatatatatgtacatacatatatatttttggaaaatggagctatggtgtaaaagcaacaggtggatcaacccagttgttactctcttaacatctgcatttgagagatcagctaatacttctctcaacaaaaatggaagggcagatgctagaatcccccctagacggaggaaaaccattttattcagtgaattacacatcctcttgttcttaaaaaagcaagtgtctttggtgttggaggacaaaatcccctaccattttcacgttgtgctactaagagatctcaaatattagtctttgtccggacccttccatagtacaccttagcgctgagactgagccagcttgggggtcaggtaggtagaccctgttagggacagagcctagtggtaaatccaagagaaatgatcctatccaaagctgattcacaaacccacgctcacctgacagccgagggacacgagcatcactctgctggacggaccattaggggccttgc

SEQ ID NO: 68627 - DNA, 1099 bp, Homo sapiens
ttacaaaatacacatcattagccttattttacaggtgaggaaattaaagctaccggaggttaggtaaccttcccaagatcacccaggcgatgagtggtaatgcgctgggctgtgctctggtttttctggggccgttacccatgtactttactttattccgtgccacactgagattccacactaaccactaatgaattgtttccaagaagagatcctttaggagtttgctttaataaatcgatcagtcttctcagtatggcatttgataaagttctgtagcttggcagtaaaactctttagcttgatatttaagaccttccaggacctaataccacctttttagttcttacctctcctgttctcttcctctgctcatcctctttcaatgtctggacacactcacctagtgagtgcaccccagatatttctgtcctgtccttggtcttcattcattttctatactccatctggaatgcctctaccgccatctgagcttcagctgacaattttagttcccattataaatagtcttctcagaatccttccctttggttttactcctgttttccactgccattttgtttatcctgctacattatattcatcggatacctctttgtatcatcattattcgtgcaactgtcttacagttgctagtagactattcatccctcagtgagaacacttgcttttttatgccccagaataccttgatgcatagtaagcccttggtgattatttttcaaaataaatagttatatcctaatttgtaacccatgcaacttgtatgaaatgtacatgtccttaaacattaagtaaacacaccttctgttaatttactcagaaaaccttctgttaatgaatttgagaatctaaaattttcaacccaggaaaaacagtcttttttaaattatgaaatgaatgtaagttaatgatattttacagtgacttgtaaaatgaaaatgtgcaaggaacatatatgaaggtttctcattagaagatgctaataaaccagttactagatactgattttagtcagcttcagggataagggttcgttcatgtattcgcccaacaaatgtttattgagcctctacca

SEQ ID NO: 68628 - DNA, 1031 bp, Homo sapiens
cagctcaaaggtggaggaaggccccacagatggcgctagatactgaatgtttgatcaccgtaacaaaaaaacggggaggccgaggtgggcagatcacctgaggtcaggagttcatgaccagcctggccaacttgatgaaaccctgtctctactaaaaataaaaaattagccaaatgtggtggcatgcgcctgtagtcccagctactcgggaggctgaggcaggagaatcgcttgaacccgggaagcggaggttgcagtgagccaagatcgcgccactgcactctagcctgggcgacagagtgagactctgtctcaaaaaaaaaaaaaaaaaaagcaataaccagtgatacctcctgagtgctttactatacgccaggcacaaaatacttttgatatactaactaattatctcaacaactctgtgagataggtgtgatcattatcctcattttatagatgaggaaattagagtaggaggggcttaagtaacttgacaaatcagacaactagaaagtggtaaagccaggacaggaactcaggtacaagggcttgtgttcttacttcctctgctgtatgatcatggggcttgcccacatgtgtatgctgtatgtaccgtggcttctacgtgtgcatgcatggggcggtgtgagggtggtattcttggacaagagaacggcatggaaatgtgaaataacaatgagttttatgtggctggaggtcatcattggaaacggtaagaaatgaaactggaggccaaggcaggtggatcacctgaggtcaggagttccagatcagcctgaccaacatggagaaaccccgtctctactaaaaatacaaaattagccgagggtggtggtgcatacctgtagtcccagctactcaggaagctgaggcaggagaatctcttgaactcgggaggcggagattgcagtgagctgagatcatgccatcgcactctagcctgggcaacaagagcaaaacttcgtctcaaaaaaaaaaaaaaaaaatgaaaccatgaaactgtaaggtgc

SEQ ID NO: 68629 - DNA, 1087 bp, Homo sapiens
agggaaacacatgtgggttactatgactttgttttctgcattcccagatgataaacagcataaaattaggaataggagaaacttggcaagattggacagtgagccaagtcttcagacaactttaaaaaataggcgcaaattttttcaagaagcttatcagtttttcggtactgcttttcacagtaaatagcggataacggactgatgttatgtcttgtaatggaatctagcttggagtccctgggacaacaaagttatgataagggcagataagaggacgcttgattctttgtctccgttagccatttggagcagaacgtttgcataaatgaacttttcttctgaagtggatcttgtttgtaagagaacttacgaaaggaagagggacattttaagcatgtttcaaaactgagttgctggtgaggccacagttagtttttagaggtccaagggaaatcaggcagtgtctcatctgttgttaattaatgaaacgaaactggagtcactagagtgcagcagtgaatgaaaggtcagtgaatggaaaaaactgtcaatgaaggaggatgtcagcagagtggaacattgtcatagataaagatcagtgaaaatgtgctctggctgaggtagggttttctggaagtgactgggagccagtctgggacatttcaagccaaactgagcactaaatgaatgttctgattgcagctaaatctgttaaatatttttaaatatttgtttgagtttgttctagatatcagttgagaaagatttgtgaaaaagaggcttctttttgttttataatgtgttttacagtgtagtgttgttttgtttggctcttttgttttgaagctgaacaatggtttctttctctcctttctgttctctgtcttagaactttctagagccacacttacttttgaggtccactgaaatcaaagtgatctaggatcactgtaccaattaacgatagaactggacctcgaacagcctggctgatggctcagtttatgattattgcagaattgcatctcctctgaaagttgttctgtggggggtgacctgacagccaaggtctactaccaacttg

SEQ ID NO: 68630 - DNA, 1042 bp, Homo sapiens
ggtggaatgctgctaatgctgtggaaaaaatgctatgctctctaccttcctaggagtaatttaccaaacctgtgtggcttggcttatccagaccaaagtatctacattgaaacattagttacatattttgtttgctttctttaggggtatgaaattatgttgcttttttttttcttttcttttcttcaactagtttcaactctccatgtttactgtctgctgatcccgaaagaattgtgaccatactttagtctgtttttgagtgtctagagaataaagttgcctaaatcagacatgtcagactgaggcataacagaattactcttaagagcaattaaagtactttactgcaaaataaacattttcagtattttccatttttaatgttagagttgtctcctttgtgtgatggtaaagcaacagattttctttccagtatggagagaagagagaactgtcctctacaggtgaaggtgtactctagtttttcacatatattctaaaataagcaaatgaaaggattgtgtttatgttacaaaaagggagttttgttttacaaaagaattaaactacttgagaactacaaaagaatttaatggctgggcacggtggctcacgcctgtaatcccagcgctttgggaggccaaggcgggctgatcacctgaggttgggagttcgagaccagcctgaccaacatggagaaaccccgtgtttactaacaatacaaaattagccgggcatgatggcgcatgcctgtgatcccagctactcgggaggctgaggcaggagaattgcttgaacccgggaggtggaggttgcggtgagcggagatcgcaccattgcactccagcctgggcaacaagagtgaaactccatctccaaaaaacaacaacaacaagaatttaaccgcatagttcaaaaactgtgaaaccatatgaactatatgcagatgatttaaaatacaaaagttaaatttgcatatgactttttaggaaaatgtcttccataaagtagagctttatatcaatattatttctttgta

SEQ ID NO: 68631 - DNA, 1301 bp, Homo sapiens
tagaacggtggttaccaggggctggagggctggggtaatggggagatgctgcttaaagagtacagactttcagtgatatgatgagtaagttctagagacctattgtacagcatggtgactacggttgacaataaacgtaccatatacttcaaatttgctgaaagagtagatcttaagtgttctcaccacaacaaaaagagcatggctatgtgaggtaaggtagtcattccaagtgtatatgtatatcacatcatcatgctgtacaccttaaacagataaaatttttgtttgttaatcatacttcaataaagctggggaaaaaggtgctgtttgctcactggctgctgtgtatttctggctctgtttctgagtctcagttggcatgaattcgtctaaattggatcatcttttctccgattgctatctgccagtgtggagagtcagtcatgtctcttcccagctaccagtggctaagacacatgcttgagattgtcttttgaaacaaacagactagagagccaactaaagcttaaagatagtcctttggttccccatcctgatattgtgcacaaaccaaacaaaagcatcccagatgacaacagtgacatcaatcttcccttgccccaggtggggcagctgtgtagtctagagaaacaccaggtccagcatattcttcagccctttcactcactcagcctctcaatatttgatgggtgcctccatggctgtgccttggactgggctctcgggggtgaagatattggaaaagcaaaaggcttgcccctgcctttgagaatgtagtggttaatttggggaaatgcacctaaagtggatgaaagaaagagaagtatatgatcatttgctaaaatgtatgatacagtgataagggatgattcagagtagtctgcagaagtcagggaagacttgattagggcagtggaattttaatcaaaccttgaaagatgaggagtaagatttgggtagggagggttctgcgcattctgagggggaaagaacatgattaaaaatgtcaggaatgaacatagatttggaggggcagtgagcagaccagagtggattttttgtgaaggagagaaatgggaattgagaggacatgagatcaaattatgtaagctctttaaatcagaaggaagaatttgtactttaaggtgatgggtattgtgagctattggagatatggctgcaatacctgtcatctcttagtcaccagatctttcttccaacctcttcggtctgtctggttttctggtcttctgctaccatgaagtcagttgaatgtt

SEQ ID NO: 68632 - DNA, 1055 bp, Homo sapiens
cttcaactctgttcacctgcttgcaggtaaggctcgtgatggaattaaaaggactcagaatcttgctgagctgtatgagtaagcatatttcactgtgaactcagtacaatagatcatcccaactttgctgtgtaaaatgatttatttatagcttttgattgatgtcaccgttctatttaacttgaatactatatcattcttccacataggtcagtgtatttttgacttggctcaagtgcctctttgcttgctattaactggtagtgccacatagatttgcacacccatatggatagctcaaagccagctgcttctgtctgcctttttccattcacctgtgatgtaagaacaccaaatgatgaacatctcagctcctgctagttcccacccctgtggcaagaaccagaccaatattacagtgtcaaactcttacttaacatttatagttggagcggactccagagataagccttatggtcacctttctgggcattataaacaatgaaatagggggagaatgtgtgcagaatgtttcttctggtaattaggggaattgttttaaaagttacttgtatatttttatttgttttataattaaaaaaaagtctcaacgtagaaatgctaagcaaccagatgatcttataaagtgtgtgggaaggaccaaatattctatatctctcctggaggacggcattgtaggagttaatcccatcaaattccaaagaaggctattcatcctttgcttctcgttttgcaaatgaaaatcctttcccttgccctgtgggctcatagagctgggaatatagtttgacaacacacagtaaccttaacataaagctgctgtgttgggcggattcagcttcagtgataggcaagagtgcttttaaacatttggtctaagaaaaacaaaacattaagattaattagttgttggtgtgttaataattttaaactctgggcaggtttagataagatttccatgtctccagttctctctcacaagcttttcctcagttctctaagaacaaggatagttcatctttttcagattgtct

SEQ ID NO: 68633 - DNA, 1566 bp, Homo sapiens
acatatacacctacccattcatcgcaggaattctcaagccatttcagaaaatatttttttttttgtcctggtaacacaggattgctaactttgtcctcagctgccattctttgtgggatttcaataaataagcaaataaaatataggaaaactatttggaataataatacttcaagcagctttttgtagcccttttaattcaatactacaggtcatttagttctgagccctaggtgattataattcatgatatgtcttgttttgttttctttgagtttttacattttgaggtaaaatggaattatcactagcacatttttctgaagccataccaatttgtcctttttatttgtttgttcaaatgaagcagtgcatcaagtatggaattagattaatggagtaaatattatgaatcatacactctctctaatctgacactctttcttctttttttgacctcacgttttgttttctgtctttctctctccgcgtaggctttcagtccagtgtaaagctgttggagcgcgggagcaaaggtaaagaatgatgtaatgcgctggctgctccaaagcatcttttgttgtggaatggttattccagtcatctctttatgaatcaaatgtgaggggctgctttgtggacggagtcctttgcaagagcacatcaacgggaaagagaaagagacattcacttggagggctcttgctgaaaatgggtttaactctccttttgccagtcaccaccagcctgacctcatacacttttagtacaatggagtggctgagcctttgagcacaccaccattacatcatcgtggcaaattaaagaaggaggtgggaaaagaggacttattgttgtcatggcccatgagatgattggaactcaaattgttactgagaggttggtggctctgctggaaagtggaacggaaaaagtgctgctaattgatagccggccatttgtggaatacaatacatcccacattttggaagccattaatatcaactgctccaagcttatgaagcgaaggttgcaacaggacaaagtgttaattacagagctcatccagcattcagcgaaacataaggtaaacgctttcctttttgccttttcaaaataaatggacacactgaatgaggaataattttaattgaagcctcctctttaagtagagaaagtaatttgaggaagttttggttgctttttaaattttggtgccttgtggtacctcaaaataatttattgtccatattgccacatttaataatatttctaaactatgaaggattaacttgctttagtttggacaagtgctatattttcttgtggcttgctaaaatgattttattaaacactattctatattatctgcaaatttactgaaaggaaagtcattcttttcaagttctttggaaagaaagtaggaactaattattaggggtgctttttatgtgtcataacacatgtggtaacattggtcaagacttaatgatatcttcaagggaagttattcctgggatactaaaatgttgtctgtgtggtgaggaagttggtttttttcttcac

SEQ ID NO: 68634 - DNA, 1095 bp, Homo sapiens
aaccaaaattctctaactgtaaatgaaagagattaaggccattgttactttaccctccatgatcccttggcagggctctgcctctcacctcacccatttagcactacagagaattagaccttgggcatgaagtcctaccaggaggactccagctggcctcagtacagcactgaaagaatggaacttcaccctcacttcacttttacccctatgcttcacttacatcctcagcttagagtcactttgaccagagcctttcttggtcagggaaagggtctttttatatctgtaactaagctctgattctctgggcaagaatgacattctctgctctgtagaactgtttgttgtaacctgtctttgggtttatgagaattggctgaggggaagcaaagatgagaactttctaattcaacttttgcatgtttgctgacttctccctccttttgtcccttgatctgctaacccagataactgctttgtcccatccggattttatctctttgagaggagccaatcagactcagagacccagtgccattgttggaatcaacttgctcttgttctcggatttccactttctgtgccacctgggtaccctcatggacaattggcatcattctttcccagtccagttccattatgggaacaagtacttagggaaaacagggcaacccagtagtagaagccctggtttgggaatcagacaatctgaatacaggaccttacattgccgtgaactctgtcactgagcaggcagaacctgattgagtggtatggctttggtaggcgctttgcagaagtttattagtggattgactaggacaaattctctcttatagttccttcagttgaaaatagagatgacttttgtacttcattaccataaagctatgctaaaaataatacattaatgaaagttgtttcttggaaaataagaaatggaaatataatgtattaaatggagctggtttgtaaaatatggtgtggttgagacagtatctcaggtgccttctaactccctgtgtgtcagcctctgtgagaaagggcacagtttggttgcagctgtactataggaggatggaattacatctg

SEQ ID NO: 68635 - DNA, 1084 bp, Homo sapiens
ggctgactgctattccagcctttatctgtgggtccttgagatgtatgtaaacaacctgaacctctgattggaggggcggctttcaacagtgtggtatgtcagtgcgaggcaactgggttctacggtgcggataactgctgtctccaggtctagtatcatctaaatagttttgcttcaagcagtctcattattgccatcacttgtcagaatatgtgtcctcaatttttgggtaaggaaatatgatcagacattaataggcagctaaaaagcacattaagtttgtagttttactttgttttatacttttataaataaaagtacatattataaagtatatattatacttttaagttctggggtacatgtgcagaacatgcaggtttgtttcataggtatacacatgccatggtggtttgccgcaccaagttcttagctttcttgattttggtgagggtggttttttgtgtttgtttttatttttttaattgaatatatttgccaaataccagagctcagaatttctatcaagtttatcttaacccacagcttatgagataaagttgctttaatctgtgtagcattgaggcagtcaaagtctaaggagttcttgtttgcttgcagatatgatagtctccttttttcccttttgattggtttttttcctgttattgaaagcctgtgtttagggctctattgaaaggcatttcggtatatcttgttgcctgtttcttcagttttgttggagggaaaaaatttaagtcaggcttgtagtttaataaaagtaaacttctcacctgattatatcctttccataaactgagaatttgaacttgagctctagcccaaccaaataaaactaaatccctctcctcactcaacaggcctgttaagcaccccatagctatgggatccttttcctttccctgataatttctctttgtaaaagaaaatgtttaaaatggagttgtgcctctctgagtgggaccccccgcttcctcctggagccccatcccctgctgtgggccttgatgcaggccttgggagtgggtgttttagggcagcagtagcagtagcagatgaaact

SEQ ID NO: 68636 - DNA, 1024 bp, Homo sapiens
aacagttaccccagagttacccgttttagtttgtgtgttgtagggtataaactctcacaccataatatgactgcttaatgataagtcagccctgtccctgttaggagactttgctgagaactgaggcacacttacagcaatatctttttgttctaagtgaaataatctttagatattagtgatcactgaattcctcattatacaagtaggaaaaacacaggcttggggaatgtcaagtgacactgtatacgccattttagcattttagtagatgagttgaaattaggaacaaggtctcctgagtcctagtccacagtatcttttaaaaacaataacctcacttgtctctaaattcctagggttagttttgccctcatggagcaaagaaactgagcaggcctaggttgtaggtgactggcacaaagagactgagagaaggaagcctgtggtggagtgttctgtgattttagagtttttgtagctcctgcttttgctgttgaagctgagcaaggggcctgcagctacccctgggcctggctggtgtcccatttttgaggccccagagttatttttagccgcagggccttggaagcaggtgtggtccgggcttgaaggccacgcctggaatgtgttcaaaccttgttgtgcatgtctgcttaggagctgagaatagtgacgaagccattgcatatactttgttagaggaatttgcacttttccaagtgagagcaatgaaagtcatcttgcgttgcatttgtgacactttaaacaggtttattttggaaactttataaattgaatgatcttttacaagtattagtgaatataattaaaaaatacattagctataaatcctttgtataccaaataaacttttgtattataagagtcataccctaactgacctatttttaaagtctagcttcatagtcataaacatgtgatttaaaatttcatttttctcacttcccccacccctcaaacattattgctgtttaaaataattctttataaatccatttca

SEQ ID NO: 68637 - DNA, 1019 bp, Homo sapiens
tggctgcacacggatacatagttgaagaagggtggggtattttcatagtcttttcatataattgtgaatatttttgttacaccaaaattcaacaattggtaaatgctttttatttatttatttatttttttgagatagtctcgctctgtcgcccaggctggagtgcagtggtgtgatctcagctcactgcaacctctgcctcccgggttcaagtgattctcctgcctcagcctctcaagtaactgggattacaggcacgcaccaccatgcccagctaatttttatatttttagtagagatggggtttcagcatattgaccaggctggtctcaaactcccgaccccaagtgatccgcttgcctcggcctcccaaatttctgggattacaggcgcagccaccgctcccagccagattcttaaatattagttgcactgctgaatctgaagccatgtcagtgaattttgtgtactctgtaacattaaaatccactggtccatcttgcactttgaatggatctttgacctgtgtgtgattttgtaactgcatacattgatcattcaaaaaataatggtttactaagctgactgggcacagtggcttacgcctgtaatcccagcactttgggaggccgaggcaggtggatcacgaggtcaggagatcaagaccagcctggccaacatggtgaaaccccgtctctactaaaaataacaaaaattagccaggcatggcagtgcacgcctgtagtcctagctactcgggaggctgagacaggagaattgcttgaacctgggaggtggaggtttcagtgagctgagatcgtgccactgcactccagcatgggtaacagagcgatattccatctcggaaaaaaaaaaaaaaaaaggtttactaagttctgcacatctttgaaatgttggcacatttgattatacaatattaagcaaatcacagtcattaatatcaccatcagtctcatccaaaaaatctttaagaattgggaagtggtcaagatcttggt

SEQ ID NO: 68638 - DNA, 2832 bp, Homo sapiens
tgattgtaagtgtgtacctataaaataaaaatagacatgtaaaattggggattggagtctttgggccaaaagcttaatggcagtaactgagaaggcagtaaaagaggagacactgttaccccggttcttttcctttttcctacacgtttaaaaattatttgtgggacagttgagagtggaagtgaggctgagatgggaggggggaagagtaggtgtgagaaggttgcagagtttaggtagggatcagaataagaggcaggatttatgtgttagtgtgttttgatgctattttctgtaaatccctggactgggaatttaatttcatacagtgtttagcatatgggattaatatattgatgaagcagacttatatagctgtccagtattaaattttttcaattttcagctaatcctaaaaatcctactaaatataatttgctagaattaccagtgtaataatttatcctagaactcccaagttttcctagacaaaaataattttctacttcgtgttacctgaactaaaaatttcactggacattcagtgtttttaaaatgcattaagttctcaagcaaaaggtactttaatttgaagaagtaaattaatatagggtgaactgatttggatcagaatcccaagaaaataaggagataacttagaggaaataaaacagattttatgacagatttcaacagatgaaagaaactagttaaaaagatttcacaggaaaaaccatagttggtgcttgattggctttaaaagaaatttactgatcatttaaaacggagatattcaccatcataaaagaaaatccgaatgttggcttaaacaaaaacataattaggaaaataagtcttgcccaaagctacatatgataaattccaaagccagatgtcaattttttttttctgattttcttgtgttgtagacaatctgttatttgtatgcatttcattatccttgatgatcaagggttggctgtgtgaagagaggttcataaaggttggccgaatttaaagaagcaggctcaggctttaagaagagctggttcttctacacaaatggattgagacagggagttagaattttaatcaaataaataactggaggaaacagtggctcaaaagaaggatgtaagacagattaccttggacaggtacaaagaaataataaaagcttgccaggagtatgatcagtaaggaagggaacagaatacatcttgccatgaaaggaaagaggaataagtggaaaaatgccctctgatacctcagcaacaagagagaggaatgaaacttcacgcccttcttgactggggttagaaacatcattataggtattgccacaaagtcacaagatttttttattacattaaaaaatgtaggccaggcgtggtggctcattcctataatcccagcactttaagaggctaaggcaggaggatcacttgagctcaggtgttgagaacagccctggcaacaaagaccttgtttccacagaaaatcaaaaaattagctaggtatggtagtagtacgcagctgtggtgccggctactttggaggctgaagtgggaggatctcttgagcctgggaggtcaaggctgcagtgagctatgatggcactgctgcgctccagcttgggcaacagagcaagacagtgtatcaaaaaaaaaaaaacatataatcttgagggatagtgattgatagggtaaattatgagcattacttatatgagaatgtaaaatttaaaattgtcagaaataaaaagagggattcgctgtaatatcatggcctattttgagttatttgaaagggagggatacattataaactgaaattattaactgaatttctggattaactactgataggaatcaagcaaaacatttgttagcagtatgctgtttacatgtgctgagatggattccaaaagttggggacactggcccatgttatggagaacaggattataagaattttaagggagatacatacatatgcaaagataattaccagacagctggcaagtgccaaattcaggtacaaaagagaaagagggctcagggaggtaatcttcatagagataatagaatttgaccctggccttaaagattggttaacatgtgtatggagagagggaagtgggggaggcgaaaggcggaaggtattcacccatctcattcagcaaatttatgctgatcctctaccaagtgctagaccctggccatacagtggaaaataagagaaagtttttgcccttacgtaacttatattctagtgggagaagacaggacaataaacaaagacagtaaacaagtaaacagtacattaaaaaagtgatgttaaatagtggtcggtagtaaaggtaatgatcagggtcgataaattgcacttattctgtgaatcacttgctttgcctatgatagtctaatgaacagtcttcatgttataactttttaatattcatgtgcagtccaaatgaatttgaataaaaatctacacattaaccagtttttaaaaaaagaaatgggaattaaagaaaaagaaacctatgtgacttttttttaggtcaaagcatggaaacttagatttttttttttttttttttgagacggagtcttgctctgtcgccaggctggagtgcagtggcgccatctcggctttctgcagcctccgcctcccgggttcaagcgattccccttcctcagcctcccgagtagctgggactacaggcgtgtgccaccgcacccagctaatttttttttgtattttagtagagacggggtttcaccacgttggccaggatggtctcgatctcctgacctcgtgttccac

SEQ ID NO: 68639 - DNA, 1033 bp, Homo sapiens
agtgggtgcgctcccggccgctgcgcggcgcttggaccgggccccgccgagaggagcggccgccgcgggacgcggcacctttgcgggcgaagctgctcacttccaggcgcgactgttacacaacacgcctgccaagtggggccctggcctgactgttcccattatccccagttcgcctttggtgtaagcagcgaggccacctgggtggtgacggtgctgctttcttcaaccaaccaaccgaaaaagccctcaattttcggacaggggctcgggtcttggcgttggggggcccgacgcctagtgacttctttatttacactagctgcaaaacgtgagaaataaaaaagcccagggtctgtgtatcacgtgtagtttcatgtaatgaaacaccacagagggaaatattttcagatgctgggtttatttcctaaagaataccaataatgaaccagagaaaaggcaagtagatctgaaaatgaatggatactgcaaaatcctaaagaagtttaggaaacatcaactgcaaggattcttggcgttttgaagtcgtgggtgtctcagattggagaaagcacacctctaaccagcctgtgatgaataagctggggaggaaaaaaacctgttgcataatctcatttgccgtggggtttgctgtgccatccccttgaaccaaagggaagtgagttaagatgcagggttttaaaactctctgaagtttttatttacccagcgctctggctcccacttctgttttaaaagattataagtaaatactctgctctttcaagtgaaccaaacctatcaaacctgtttagaaaataaaccaggtatgtttctttctcttctttcttttccgcctctgtgtgtgtgtgtgtgtgtgaaatttaccatccatgcaaaagtttaggactagtgtttggggaactgagactgtcagaaaaatgcctctttatgccactcaccttatggggctgatggagagtccacgtaaaggataaccgtttcctcaaaggatttatgctgtttcacctcc

SEQ ID NO: 68640 - DNA, 1057 bp, Homo sapiens
ctgatgagtgaagggaacaaggatatgtgtaggaggggagctcggtatgactaagggtcaagagaaggtgaggccagagagagcctgagctgagatctgctgaaacagctcctaaaatgaaaacaaagttggggccagaattttttctggatagtagttatgttttcctgccaacgctcaagtcctacacaaagacaaatgacaatcaatgtaaatgtcaaataagatcgttagcctgagtaatcataaccaatctgtatgacacctttttaacaggaggcctcattcttcttttccccaaccagaattaagagaaaaaaagtgaatatggtttttgctcacagaatggataacagcaagccacatttgattattcctacacttctggtgcccctccaaaaccgcagctgcactgaaacagccacacctctgccaagccaatacctgatggaattaagtgaggagcacagttggatgagcaaccaaacagaccttcactatgtgctgaaacccggggaagtggccacagccagcatcttctttgggattctgtggttgttttctatcttcggcaattccctggtttgtttggtcatccataggagtaggaggactcagtctaccaccaactactttgtggtctccatggcatgtgctgaccttctcatcagcgttgccagcacgcctttcgtcctgctccagttcaccactggaaggtggacgctgggtagtgcaacgtgcaaggttgtgcgatattttcaatatctcactccaggtgtccagatctacgttctcctctccatctgcatagaccggttctacaccatcgtctatcctctgagcttcaaggtgtccagagaaaaagccaagaaaatgattgcggcatcgtgggtctttgatgcaggctttgtgacccctgtgctctttttctatggctccaactgggacagtcattgtaactatttcctcccctcctcttgggaaggcactgcctacactgtcatccacttcttggtgggctttgtgattccatctgtcctcataattttattttacc

SEQ ID NO: 68641 - DNA, 1027 bp, Homo sapiens
tctgcctcccgggttcaagcgattctcctgcctcagcctcccatgtagctgggactacaggcacatgccaccacgcctggctaatttatgtatttttagtagagacggggttttgccgtattggccaggctggtcttgaactcctgacctcaggtgatccgcccgcctcagcctcccaaagtgctagggttacaggtatgagccaccatgcctggcccccagttctgtgctatgacaacccatctaccattttccccactcatgtattaatcttaaagcttggatgggtgagaagtagataataggataaatgaatgattcctcttttagatcatatataggtagagataaataaggaccttcaatacctcagccaagggagtatgtcaaatggtagtctcagaactggctgggaagagataggtcgaacaggaaagaggtgaagaagcctttcttgtcactgctaaaattactgcatatggatggctctgaacagaattactaattaaccagatcttatatttcagaaacacccccttgaagatatatttttatctaaattaatggagcaggggaggcctttctgaaactttactttgggaccctagaatttagttataatatggcagacttttttctgggaggaaagtgcaagaacctgtctgaggacacctaaattaccttggctttcccttagatgagatatctgtttcatatagcagttgacctggtagcttcagtttcacctgccctgcttttatcaggagtcatgttttcccctatcaccataatccccaatgtttcacctctctgagaatatatagtgattttctatgtgcatttaattctcctagcagaggcacatagagtaagagtcatttatttcagttctctgtccttacagatccaatttagtaaacatcgaataagcaattattaatgtaaagaacttcagtggaagctgtagagcatggagaaaaagaataacatccccatctccctactggagtccacagtttattggaga

SEQ ID NO: 68642 - DNA, 3751 bp, Homo sapiens
gtggggctgggggcgggaagatggtttaacagtctaccctgcacagcgtcatcttgtctccctaacaggaagcaggctgtgagccaaggggaaggcagaggacagaaatgaatgtgtttccaggctttcctggtggtttatggcattctccaaactcctatgcaagggctattcctgaccaagaagatctaaagagaacgtctctgaaatcaagtccggatgaaggtatgtgatagggatcccttggtattgcgactgaaatttggctcagaggacataatgccttctttttttccaggcaatttggagattttgtcctgccttagatgctggttagaggctttaggtttgttaccagtccagaaaagatgcctaggtagttctgtaaaatgaaaattcatcagagtatgtgtcagttgaaaaattggatggaaattgtgtatagtgataattaatgaaacaaagcactcattgatgaaaaggattttttccccttgaagcctggaaagaggggaaaaaattaccgaaaccaactaggtttcatcatcactgtaataaaagctgtttcatcctttttcagctgcttattctatgcccatgttcccagaggttattggcagggcttggggagctgaagtgggcaggcgtgctgttcctttgtgctgtgtgatcatcttccttctgatgttcctggaaccaggggtgcttgtgattgttcccagctctgatttaggacagtagactgccacagaatttcacatcttgtagaaatgctagcaacaagaccctggggaagttctcaaaggaatctaccaaagttacaggctaaaataatcagccgtgaactcaaattttcatgtctttgactattttcagcacaaagagaggagcccctttaaattttattttgtctttatttaacaaatacttaagaaagttctttctaatgtgcaaggcactgttctaagcacaaacagtcattgaatccttataacaaccctttgaggaaggttttattacccacattttagagatgaagaaacagaggcacagagaagttagggaactttcccaaggtcacacagctagcaaacagtagaagcagaatttggacctacgaaacttgaccccaaagcctgtgctcttaaccactgagctatgctgcttgcctgctcatattatttcaaatgatgtcagcagtcaatttggcttcaaattttgttcagctgacgctactagaagattgaatcagcttgctttgctaaaacagatccccaaagaaatctatatttaatcttaaattatccctgtagtcacattctgtacccccaagtaacccagtaagtaattgccgttctgtttcccttgtgctgtatagatctctgtagtaaaacgctatgttactatggtgaccaattgatgtctcaagaaaaaagaaatctagaattatatcatgggttttttaaaaaatcgaacgtagaaacactcttccatcctagaacctagcaaggccagcctaagcatattttctttaaaagcacctacctagttctcaaaataaaatagattaaaaacttctaaaactatgtatataaattataatatcaaactgactggatttattttttaaaatgatattatacctaaaataagggaataggtatcttttgcaaattattttaggtttttaagggtaaaagaggagatttgctaataactttttttaactgctagaaatttctgaggtataaagatttcctttttttgatctgtgtagatttccttctggcctttgataataaaagatgactgatctgattcctataagctatggaaaaactaagaaaagttaccagttcccttcagggtttcattgcgcagtactttaagacgtaattgtgtcccctacaatattgaactttagtcttttagcttaagcatttgatccctgctgaaatctacatttttctggaacaagtaacactttgatgctattatagtcacatgaagtgagcttcttgagggatggtatcctttcctctttggatttctagcacttatcaccaggcctggtttatggtgaactctcaatatactcttgtgaatgaagactgagaagactcaaaacaatgacatattctgctggtgccaatttgggagtccatgcctgttttattttgcatgtatttatagagaggacagtgaggagacacatgtgtagtaagaacttggcaacagtcaaaattatgcctgaagtttatatagttaggctggccctggagcagctacaaattacagtttagaaagtatacataaattatttcctggagatcaccaatccccctgacatttttatttatatttagaatgaagttctcctgatattttcattcatatctaaatggaagcacccctaacagtcttattttcctctgatgttttgggtggttccatctcccagcgttgaaacagtttaattcagtttgagagtgaatgtcttgagaagtcaactcctgcctcaggcaattctctcctaatccagtctgactcccagtccttagaactctgtatagaaagctcacaggactgcaggactatttcctagggaactctgggatcttgagtatcagtgtgggttagggtcagactacctttcccaaaccatggcatgattgaagaagattgtcctgaatgaagaagattttcctggggcattttgaaagcttggtcaggatttaaattcaagttagcaagatagtaaggcttaaagtagtcaccctcctgataatatacacaaacataatctatgatttttccatctaattaaatcattaaggggttgtggataaagtgtgtgtccttgaattctaccagctcatgctgctcacctcaaacattacctgctgagcgagctgcacaaaacagacaacagccctgacggaagcacaaaccagctggcaagtgctacatgccccccacacatgcagggcttctcagataagcagggctagcacacacatgaggcatggatctggaagcctagctgggcttcctacacatccctctggagtctaaaagggggcaacctactcaaccagctaaatgggaggatagaacagagggagagaaagtggagaggcttccccttgaggagaggccttgccaagtatgatttcaacctagaggtgaggggtgaaagcagaaataagaagagggacaatgagcatgggtaaagactatgagaaagtgatacctgggtcctgcctttcggacacaacagcttgcctgcaagtaaaccctgccaaatgagtcagggcctgccaggggaatgatcagatcccttcctagggtgtatgtagggaggggagaggagagagaaggaccagagtgtggacgtagtttcttctccatcagccaaggcaaaaaattggatgacatgggagttgtgctgagaggatggcttaaaaagaaaaagggaggctgagtgccataactcacgcctgtaatcccagcactttgggaggctaaggcgggaggattgcttgagcccaggaatttgagaccagcctaaacatagggagaccttaggccaggcatggttgctcacgcctgtaatcccagctgtttgggaggctgaggggggcagaatacttaaggtccggagttctaggccagcctggccaacatgctgaaaccccatctctactaaaaatacaaaaattagctgggtatggtggcaggtgcctgtaat

SEQ ID NO: 68643 - DNA, 1051 bp, Homo sapiens
taccaattaaatcagaatctctgcgagtggagcccagacatcagtactttcttaaaaccctccattttgcaacaaaggttgagagccactgctttaagagttccctctagggccaggcacggtggctcacgtctgtaatcccagcactttgggaggcggaggcggggggatcacgaggtcaggagcttgagaccagcctggccaacatggtgaaaccccatctctactaaaaatacaaaaattagctgggtgtggtggcacgcgcttgtaatcccaactactccggaggctgaggcaggagaattgcttaaacccaggaggcagaggttgcggtcagccgagatcgtgccactgcactccagcctaggtgatagagcaagactccgttttggaaaacacgtttggaggaatgaagtttagagcttgagacaggcagataagtagggcatcatgagctctattcaggaggaaggccactgtgataagaatggggttaacgtactaatttgggaaaggtcattgataaagccattagtataattgccaggatacacaggcttagctgtagagatagaagagtgtcagtctcccaagctggtcttttgatctagcacaggcaacacagataatgatgtctttattgcattacacatggtgaatcttgggccatcagcagggctgatggcagtagtgggttggggcggatctttacaacctgcaatacctcattggttggggagggcatcaaggcatgattgaaatgtgtgttcttttccaatgagaggctgctgtacatgggaatgcatgtgcagcagggcattgataatgaagtgttttccggtagcctatcagggttgatgtggcagctctgaccacacaagtggttttgttattattaacagatgagaaaggtgaggttcaagcctgtctttgtagcctttcagggaacacagaatcacttggaatacaagtggcatggtcagcaatttcagcttctaagagacaagttacttgctagtaggacaattctggtttctaggtttataaataa

SEQ ID NO: 68644 - DNA, 1668 bp, Homo sapiens
tcatcccttctttccgtttttatattggccgtgaactctgtgaggggaggtttcagcgactgaagtagtaaaggagtgggagcgggagagccgattaatgaggttgtagaataagagagaaatctgaagggacaaaggagttttatttattttttggctggtgaccaagaggatgtgagtgtgagctaaggtaatacagtgggaaggagaagatgggaagatttgagagataaatgaaggcagtagctctgtagcctacctgggaggccagactagaaagaagttgacagtagaggacatttttcttaaaagagtgtgaacttatgcatgtttgtaaacaggcagaaatggcatgcatttagtacatggtgtatataaggtggaaatcgggacgcccctaatggaatggaatgaggaagattctaaaagccacagtcctgaacacaggccgaggtggaattgcgaagaacagtcgcggtaacagaagtcaggaatttgggaactgtctcgagggatctgaccaatctgacctctttttgtctctcaggatatatgggacacctgcaccggcattggatttggccccgcaacatcttaaaggtaccacccaacacctgaagtgtctgcctccttccgatggagcctcctggcccctcccacctctcaccagctttaccctttagccagaatgaaatgtggatttcatggaatgaaatggtggcatttagctaccacattactcagatgtgtcactgacaccttacagaagtacatacttctagcctctagcctcccagttcactagatattagagtccatcttgatatcggcagcaattctatgccacttagctactataatttgattctttgtatactatctggagtacaaggcagaagaatgctgatggaatacgtaattttactccaacaaaggaatggctgataggtaaagagtatcacttcatctgtaagaaaaactaaatatggaaagccacaggattgaagctagcagtgatggagaaggatcccagtgtgaatatatagaatggaagtacttcagtaaagagccaggcatggtaatcacttaccaagaaagtgacttcatttcattttggcagcctaaagtatatcctggcagctgcgctgtatgtgtgaagtgcataggaaaatgctgcaggaaaaatccatggaggcaatggaataggatttcagggttgaagcctgggtgtcttgttttagggagtgggatcatccagctctgagaggcatgacatctcgatatgatgtcatataaagtgtgtacaattgggaatcagacctgggctttgactttagggtctgccagtcactctgtgtgtcctgtctgaatctcagtttctcaatttataaaataaggataatagtgcctgtgccataggattattgtaatgacaaaatgaggtagcatagaacttagtgtaaagtacatgccacctatcagttgaattgtggatgctctgtgcatcgtaggtccgtctgtatttagggagctttaagacaggtactctaccgggtcaggcgcggtagctcacgcctgtaatctcagcactttgggaggctgaggcggtcggatcacaacgtcaggagatcgagaccatcctggcaaatacggtgaaaccccgtctct

SEQ ID NO: 68645 - DNA, 1056 bp, Homo sapiens
agcgaagtaaaaaaaaaaaaaaaaaaaaaaaagcagccatgcaaaatttgaaacttggagacgactctagaagcattaacccaagaaagcacaagccaacaaacaaatttttgaaatggtttgaagagctcttcaaagtcagtttcaggtggcttagaagaggatgttgcttataaaatgagatctgatggaaacttgttttacagatatgactggattcgtttgaaaacaaaaaaaaaggcaggcaaagtgactttttaaaaagtatttttatggaaggatttctaatgatacattttaatgtgctcaaaaaacaaccttaaataactggtagattcagccaaacctggatcattgttatcttagagctggataagagcataaatgttaacaatttggcaattttattggactctgttatgtttttgaatggtgaatttgaagacttcaacttgtaacaagaaattttctaaaaggaaagtgggattttcaagacatatgaaattaagcagagaatatgtatggacatgtgaacagatggaaccaaattttgaaagctttgcatgtgtccagcatcggtcacagaaaatccttttatctcaagaaactagcctctggattttctcacgttcaatatgataaaactcagtaaatccagcagcttgaataccttttaacacaaatttgtaccaaaatgagaagtaactttaaaattccgctccattatctagaggtactctgacttggttaaggtaaggtgaaaatcggttttccaagccagtattgaactggcattttcatcatgaagaaaaaaaaaatgcagataaagtgaatgggtatcttgttcactttaatgattaagactaactcagaaagctggcttactttgtcaaggcaaacaaccagtattaaacaaactgaatactctcattgcacataatgagaaggcttgaatgaaaattaagtatgggagtggaagagctgataaagaacagtgacttctttgagactcctagttcatttacatgtgatgaaaattatagtgtaagaatagta

SEQ ID NO: 68646 - DNA, 1653 bp, Homo sapiens
cccgcttgctcacggctctgcgactccgacgccggcaaggtttggagagcggctgggttcgcgggacccgcgggcttgcacccgcccagactcggacgggctttgccaccctctccgcttgcctggtcccctctcctctccgccctcccgctcgccagtccatttgatcagcggagactcggcggccgggccggggcttccccgcagcccctgcgcgctcctagagctcgggccgtggctcgtcggggtctgtgtcttttggctccgagggcagtcgctgggcttccgagaggggttcgggctgcgtaggggcgctttgttttgttcggttttgtttttttgagagtgcgagagaggcggtcgtgcagacccgggagaaagatgtcaaacgtgcgagtgtctaacgggagccctagcctggagcggatggacgccaggcaggcggagcaccccaagccctcggcctgcaggaacctcttcggcccggtggaccacgaagagttaacccgggacttggagaagcactgcagagacatggaagaggcgagccagcgcaagtggaatttcgattttcagaatcacaaacccctagagggcaagtacgagtggcaagaggtggagaagggcagcttgcccgagttctactacagacccccgcggccccccaaaggtgcctgcaaggtgccggcgcaggagagccaggatgtcagcgggagccgcccggcggcgcctttaattggggctccggctaactctgaggacacgcatttggtggacccaaagactgatccgtcggacagccagacggggttagcggagcaatgcgcaggaataaggaagcgacctgcaaccgacggtaatgaccctttcccaaccatagaatgtgtttggggccccgctttgcctgctggagggtgttaaccttagcttgcttttcggcgtattctgatttagctttgggagagctaactttattggtcttaggtgttcagtgctacctggcccactgcttgtctgtttgtgacttttaagtcagaaactggagatggtaagatccgataatttccctaacttaatacatcgcggtccctctcactagcaactcctaggtatgtgacaaagttgggatgtttatcaacggtccgcctcctggctagggaaagagctctggggcggagaatgcactttctgttttttgaaaacaacctcattttgtgcccttaaaagccactggggatgacggatccaggattgtgggtggaggtagtgggtttttcatcccctgactatggggccaacttctgccagccattgttttttctaataaagattgtgtgttctttttaaaaatttcccctgcgcttagattcttctactcaaaacaaaagagccaacagaacagaagaaaatgtttcagacggttccccaaatgccggttctgtggagcagacgcccaagaagcctggcctcagaagacgtcaaacgtaaacagctcggtgggttgatcactaaaggagcacgcactggaacccggggccttcagacctcacgatacctgatcttactggttgctggcaaattaaaagcttatggggttttgttttgtttatacttcgtgaggtcaaaaaagtagcaatggggaaggctggggat

SEQ ID NO: 68647 - DNA, 1578 bp, Homo sapiens
cttgtttatcagatacatcactgcttgatgaagcaaggaagatatacatgaaaattttaaaaatacatatcgctgacttcatggaatggacatcctgtataagcactgaaaaacaacaacacaataacactaaaattttaggcactcttaaatgatctgcctctaaaagcgttggatgtagcattatgcaattaggtttttccttatttgcttcattgtactacctgtgtatatagtttttaccttttatgtagcacataaactttggggaagggagggcagggtggggctgaggaactgacgtggagcggggtatgaagagcttgctttgatttacagcaagtagataaatatttgacttgcatgaagagaagcaattttggggaagggtttgaattgttttctttaaagatgtaatgtccctttcagagacagctgatacttcatttaaaaaaatcacaaaaatttgaacactggctaaagataattgctatttatttttacaagaagtttattctcatttgggagatctggtgatctcccaagctatctaaagtttgttagatagctgcatgtggcttttttaaaaaagcaacagaaacctatcctcactgccctccccagtctctcttaaagttggaatttaccagttaattactcagcagaatggtgatcactccaggtagtttggggcaaaaatccgaggtgcttgggagttttgaatgttaagaattgaccatctgcttttattaaatttgttgacaaaattttctcattttcttttcacttcgggctgtgtaaacacagtcaaaataattctaaatccctcgatatttttaaagatctgtaagtaacttcacattaaaaaatgaaatattttttaatttaaagcttactctgtccatttatccacaggaaagtgttatttttcaaggaaggttcatgtagagaaaagcacacttgtaggataagtgaaatggatactacatctttaaacagtatttcattgcctgtgtatggaaaaaccatttgaagtgtacctgtgtacataactctgtaaaaacactgaaaaattatactaacttatttatgttaaaagattttttttaatctagacaatatacaagccaaagtggcatgttttgtgcatttgtaaatgctgtgttgggtagaataggttttcccctcttttgttaaataatatggctatgcttaaaaggttgcatactgagccaagtataattttttgtaatgtgtgaaaaagatgccaattattgttacacattaagtaatcaataaagaaaacttccatagctattcattgagtcaaattgtaatgtgctttaccaaacaaggtatttgacctggcattctagtcatatttacacaaatgtaaatgtgaagtggcaaatacctaggtaattcaggcccacaactcagatgatgttttatgtagtccgaatgtagttagcagttactgttttccacttagctctgtgtgggaggacaaaactttagaaggtgaaaatggaaaagctacattttcatatgaataaggttgtcaaaagtctgcattag
